(19) United States
(12) Patent Application Publication
(10) Pub. No.: US 2012/0264634 A1
(43) Pub. Date: Oct. 18, 2012

(54) Marker Sequences for Pancreatic Cancer Diseases, Pancreatic Carcinoma and Use Thereof

(75) Inventors: Peter Amersdorfer, Graz (AT); Annabel Höpfner, Dortmund (DE); Angelika Lueking, Bochum (DE)

(73) Assignee: PROTAGEN Aktiengesellschaft, Dortmund (DE)

(21) Appl. No.: 13/498,964

(22) PCT Filed: Sep. 29, 2010
(86) PCT No.: PCT/EP2010/064510

§ 371 Date: Jun. 22, 2012

(30) Foreign Application Priority Data
Sep. 29, 2009 (EP) 09171690.2

(51) Int. Cl. C40B 30/04; G01N 21/64; G01N 27/72; C07K 14/435; C40B 40/06; C40B 40/10; C12N 5/09; C07H 21/04; G01N 33/574; G01N 27/62

(52) U.S. Cl. 506/9; 436/501; 435/6.14; 435/7.92; 506/16; 506/18; 435/2; 536/23.1; 530/350

(57) ABSTRACT

The present invention relates to novel marker sequences for pancreatic cancer diseases, pancreatic carcinoma and the diagnostic use thereof together with a method for screening of potential active substances for pancreatic cancer diseases, pancreatic carcinoma by means of these marker sequences. Furthermore, the invention relates to a diagnostic device containing such marker sequences for pancreatic cancer diseases, pancreatic carcinoma, in particular a protein biochip and the use thereof.

[0001] The present invention relates to novel marker sequences for pancreatic cancer diseases, pancreatic carcinoma, and the diagnostic use thereof together with a method for screening potential active substances for pancreatic cancer diseases of this type by means of these marker sequences. Furthermore, the invention relates to a diagnostic device containing marker sequences of this type for pancreatic cancer diseases, pancreatic carcinoma, in particular a protein biochip and the use thereof

[0002] The 5-year-survival rate for pancreatic carcinoma of approx. 1% is the lowest of all cancer types (Parkin, D. M., F. Bray, et al. (2001). “Estimating the world cancer burden: Globocan 2000.” Int J Cancer 94(2): 153-6). Early diagnosis might increase the 5-year survival rate to 40% (Yeo, C. J. and J. L. Cameron (1998). “Prognostic factors in ductal pancreatic cancer.” Langenbecks Arch Surg 383(2): 129-33). Therefore, for diagnosis, the precursor diseases of pancreatic cancer need to be considered as well, such as PDAC (pancreatic ductal adenocarcinoma), PanIN (pancreatic intraepithelial neoplasias), pancreatic lesions, CP (chronic pancreatitis), including endocrine tumors of the pancreas. Especially PanID are associated with pancreatic lesions and differentiate them morphologically into PanIn 1A, 1B, 2, and 3 (Kern, S., R. Hruban, et al. (2001). “A white paper: the product of a pancreas cancer think tank.” Cancer Res 61(12): 4923-32). Pancreatic lesions have also been described for CP. Endocrine (benign or malignant) tumors of the pancreas, particularly neuroendocrine tumors, are relevant as well.

[0003] WO2008064670 describes e.g. marker genes for pancreas obtained by means of proteome analysis and histological investigations.

[0004] Protein biochips are gaining increasing industrial importance in analysis and diagnosis as well as in pharmaceutical development. Protein biochips have become established as screening instruments.

[0005] The rapid and highly parallel detection of a multiplicity of specifically binding analysis molecules in a single experiment is rendered possible hereby. To produce protein biochips, it is necessary to have the required proteins available. For this purpose, in particular protein expression libraries have become established. The high throughput cloning of defined open reading frames is one possibility (Heyman, J. A., Cornthwaite, J., Foncerrada, L., Gilmore, J. R., Gontang, E., Hartman, K. J., Hernandez, C. L., Hood, R., Hull, H. M., Lee, W. Y., Marcil, R., Marsh, E. J., Mudd, K. M., Patino, M. J., Purcell, T. J., Rowland, J. J., Sindici, M. L. and Hoeffler, J. P., (1999) Genome-scale cloning and expression of individual open reading frames using topoisomerase I-mediated ligation. Genome Res, 9, 383-392; Kersten, B., Feilner, T., Kramer, A., Wehrmeyer, S., Possling, A., Witt, I., Zanor, M. I., Stracke, R., Lueking, A., Kreutzberger, J., Lehrach, H. and Cahill, D. J. (2003) Generation of Arabidopsis protein chip for antibody and serum screening. Plant Molecular Biology, 52, 999-1010; Reboul, J., Reboul, J., Vaglio, P., Rual, J. F., Lamesch, P., Martinez, M., Armstrong, C M., Li, S., Jacotot, L., Bertin, N., Janky, R., Moore, T., Hudson, J. R., Jr., Hartley, J. L., Brasch, M. A., Vandenhaute, J., Boulton, S., Endress, G. A., Jenna, S., Chevet, E., Papasotiropoulos, V., Tolias, P. P., Ptacek, J., Snyder, M., Huang, R., Chance, M. R., Lee, H., Doucette-Stamm, L., Hill, D. E. and Vidal, M. (2003) C. elegans ORFeome Version 1.1: experimental verification of the genome annotation and resource for proteome-scale protein expression. Nat Genet, 34, 35-41.; Walhout, A. J., Temple, G. F., Brasch, M. A., Hartley, J. L., Lorson, M. A. , van den Heuvel, S. and Vidal, M. (2000) GATEWAY recombinational cloning: application to the cloning of large numbers of open reading frames or ORFeomes. Methods Enzymol, 328, 575-592). However, an approach of this type is strongly connected to the progress of the genome sequencing projects and the annotation of these gene sequences. Furthermore, the determination of the expressed sequence can be ambiguous due to differential splicing processes. This problem may be circumvented by the application of cDNA expression libraries (Büssow, K., Cahill, D., Nietfeld, W., Bancroft, D., Scherzinger, E., Lehrach, H. and Walter, G. (1998) A method for global protein expression and antibody screening on high-density filters of an arrayed cDNA library. Nucleic Acids Research, 26, 5007-5008; Büssow, K., Nordhoff, E., Lübbert, C, Lehrach, H. and Walter, G. (2000) A human cDNA library for high-throughput protein expression screening. Genomics, 65, 1-8; Holz, C, Lueking, A., Bovekamp, L., Gutjahr, C, Bolotina, N., Lehrach, H. and Cahill, D. J. (2001) A human cDNA expression library in yeast enriched for open reading frames. Genome Res, 11, 1730-1735; Lueking, A., Holz, C, Gotthold, C, Lehrach, H. and Cahill, D. (2000) A system for dual protein expression in Pichia pastoris and Escherichia coli, Protein Expr. Purif., 20, 372-378). The cDNA of a particular tissue is hereby cloned into a bacterial or an eukaryotic expression vector, such as, e.g., yeast. The vectors used for the expression are generally characterized in that they carry inducible promoters that may be used to control the time of protein expression. Furthermore, expression vectors have sequences for so-called affinity epitopes or affinity proteins, which on the one hand permit the specific detection of the recombinant fusion proteins by means of an antibody directed against the affinity epitope, and on the other hand the specific purification via affinity chromatography (IMAC) is rendered possible.

[0006] For example, the gene products of a cDNA expression library from human fetal brain tissue in the bacterial expression system Escherichia coli were arranged in high-density format on a membrane and could be successfully screened with different antibodies. It was possible to show that the proportion of full-length proteins is at least 66%. Additionally, the recombinant proteins from the library could be expressed and purified in a high-throughput manner (Braun P., Hu, Y., Shen, B., Halleck, A., Koundinya, M., Harlow, E. and LaBaer, J. (2002) Proteome-scale purification of human proteins from bacteria. Proc Natl Acad Sci USA, 99, 2654-2659; Büssow (2000) supra; Lueking, A., Horn, M., Eickhoff, H., Büssow, K., Lehrach, H. and Walter, G. (1999) Protein microarrays for gene expression and antibody screening. Analytical Biochemistry, 270, 103-111). Protein biochips of this type based on cDNA expression libraries are in particular the subject matter of WO 99/57311 and WO 99/57312.

[0007] Furthermore, in addition to antigen-presenting protein biochips, antibody-presenting arrangements are likewise described (Lal et al (2002) Antibody arrays: An embryonic but rapidly growing technology, DDT, 7, 143-149; Kusnezow et al. (2003), Antibody microarrays: An evaluation of production parameters, Proteomics, 3, 254-264).

[0008] Protein-biochips have a advantageously high sensitivity.

[0009] However, there is a great need to provide indication-specific diagnostic devices, such as a protein biochip.

[0010] The object of the present invention is therefore to provide improved marker sequences and the diagnostic use thereof for the treatment of pancreatic cancer diseases up to pancreatic carcinoma.

[0011] The object of the present invention is solved in providing of novel marker sequences SEQ 1-1004, which are identified for the first time by means of a protein biochip, in particular including bioinformatic analysis. Therefore, SEQ 1-1004 are identified for the first time by means of a protein biochip.

[0012] The provision of specific marker sequences permits a reliable diagnosis and stratification of patients with pancreatic cancer diseases up to pancreatic carcinoma, in particular by means of a protein biochip.

[0013] The invention therefore relates to the use of marker sequences for the diagnosis of pancreatic cancer diseases up to pancreatic carcinoma, wherein at least one marker sequence of a cDNA selected from the group SEQ 1-1004 or respectively a protein coding therefor or respectively a partial sequence or fragment thereof (hereinafter: marker sequences according to the invention) is determined on or from a patient to be examined

[0014] It was possible to identify the marker sequences according to the invention by means of differential screening of samples from healthy test subjects with patient samples with pancreatic cancer diseases, pancreatic carcinoma.

[0015] The term “pancreatic cancer diseases up to pancreatic carcinoma” in accordance with the invention encompasses also precursor and/or concomitant illnesses thereof, pancreatic cancer diseases and/or pancreatic carcinoma as such, however in particular PDAC (Pancreatic ductal adenocarcinoma), PanIN (pancreatic intraepithelial neoplasias), pancreatic lesions, CP (chronic pancreatitis), including endocrine pancreatic tumors, particularly pancreatic tumors and pancreatic neoplasm (definition, e.g., according to Pschyrembel, de Gruyter, 261st edition (2007), Berlin).

[0016] In a further embodiment at least 2 to 5 or 10, preferably 30 to 50 marker sequences, or 50 to 100 or more marker sequences are determined on or from a patient to be examined

[0017] In a further embodiment of the invention, the marker sequences according to the invention can likewise be combined, supplemented, fused, or expanded likewise with known biomarkers for this indication.

[0018] In a preferred embodiment, the determination of the marker sequences is carried out outside the human body and the determination is carried out in an ex vivo/in vitro diagnosis.

[0019] In a further embodiment of the invention, the invention relates to the use of marker sequences as diagnostic agents, wherein at least one marker sequence of a cDNA is selected from the group SEQ 1-1004, preferably SEQ 503-1004, or respectively a protein coding therefor or respectively a partial sequence or fragment thereof.

[0020] Furthermore, the invention relates to a method for the diagnosis of pancreatic cancer diseases up to pancreatic carcinoma, wherein a.) at least one marker sequence of a cDNA selected from the group SEQ 1-1004, preferably SEQ 503-1004, or respectively a protein coding therefor or respectively a partial sequence or fragment thereof is applied to a solid support and b.) is brought into contact with body fluid or tissue extract of a patient and c.) the detection of an interaction of the body fluid or tissue extract with the marker sequences from a.) is carried out.

[0021] The invention therefore likewise relates to diagnostic agents for the diagnosis of pancreatic cancer diseases up to pancreatic carcinoma respectively selected from the group SEQ 1-1004, preferably SEQ 503-1004, or respectively a protein coding therefor or respectively a partial sequence or fragment thereof

[0022] The detection of an interaction of this type can be carried out, for example, by a probe, in particular by an antibody.

[0023] The invention therefore likewise relates to the object of providing a diagnostic device or an assay, in particular a protein biochip, which permits a diagnosis or examination for pancreatic cancer diseases up to pancreatic carcinoma.

[0024] Furthermore, the invention relates to a method for the stratification, in particular risk stratification and/or therapy control of a patient with pancreatic cancer diseases up to pancreatic carcinoma, wherein at least one marker sequence of a cDNA selected from the group 1-1004, preferably SEQ 503-1004, or respectively a protein coding therefor is determined on a patient to be examined

[0025] Furthermore, the stratification of the patients with pancreatic cancer diseases up to pancreatic carcinoma in new or established subgroups of inflammatory pancreatic cancer diseases up to pancreatic carcinoma is also covered, as well as the expedient selection of patient groups for the clinical development of novel therapeutic agents. The term therapy control likewise covers the allocation of patients to responders and non-responders regarding a therapy or the therapy course thereof.

[0026] “Diagnosis” for the purposes of this invention means the positive determination of pancreatic cancer diseases up to pancreatic carcinoma by means of the marker sequences according to the invention as well as the assignment of the patients to pancreatic cancer diseases up to pancreatic carcinoma. The term diagnosis covers medical diagnostics and examinations in this regard, in particular in-vitro diagnostics and laboratory diagnostics, likewise proteomics and nucleic acid blotting. Further tests can be necessary to be sure and to exclude other diseases. The term diagnosis therefore likewise covers the differential diagnosis of pancreatic cancer diseases, pancreatic carcinoma by means of the marker sequences according to the invention and the prognosis of pancreatic cancer diseases, pancreatic carcinoma.

[0027] “Stratification or therapy control” for the purposes of this invention means that the method according to the invention renders possible decisions for the treatment and therapy of the patient, whether it is the hospitalization of the patient, the use, effect and/or dosage of one or more drugs, a therapeutic measure or the monitoring of a course of the disease and the course of therapy or etiology or classification of a disease, e.g., into a new or existing subtype or the differentiation of diseases and the patients thereof

[0028] In a further embodiment of the invention, the term “stratification” covers in particular the risk stratification with the prognosis of an outcome of a negative health event.

[0029] Within the scope of this invention, “patient” means any test subject—human or mammal—with the proviso that the test subject is tested for pancreatic cancer diseases up to pancreatic carcinoma.

[0030] The term “marker sequences” for the purposes of this invention means that the cDNA or the polypeptide or protein that can be respectively obtained therefrom are significant for pancreatic cancer diseases, pancreatic carcinoma. For example, the cDNA or the polypeptide or protein that can be respectively obtained therefrom can exhibit an interaction with substances from the body fluid or tissue extract of a patient with pancreatic cancer diseases, pancreatic carcinoma (e.g., antigen (epitope)/antibody (paratope) interaction). For the purposes of the invention “wherein at least one marker sequence of a cDNA selected from the group SEQ 1-1004, preferably SEQ 503-1004 or respectively a protein coding therefor or respectively a partial sequence or fragment thereof is determined on a patient to be examined” means that an interaction between the body fluid or tissue extract of a patient and the marker sequences according to the invention is detected. An interaction of this type is, e.g., a bond, in particular a binding substance on at least one marker sequence according to the invention or in the case of a cDNA the hybridization with a suitable substance under selected conditions, in particular stringent conditions (e.g., such as usually defined in J. Sambrook, E. F. Fritsch, T. Maniatis (1989), Molecular cloning: A laboratory manual, 2nd Edition, Cold Spring Harbor Laboratory Press, Cold Spring Harbor, USA or Ausubel, “Current Protocols in Molecular Biology,” Green Publishing Associates and Wiley Interscience, N.Y. (1989)). One example of stringent hybridization conditions is: hybridization in 4×SSC at 65° C. (alternatively in 50% formamide and 4×SSC at 42° C.), followed by several washing steps in 0.1×SSC at 65° C. for a total of approximately one hour. An example of less stringent hybridization conditions is hybridization in 4×SSC at 37° C., followed by several washing steps in 1×SSC at room temperature.

[0031] According to the invention, substances of this type are constituents of a body fluid, in particular blood, whole blood, blood plasma, blood serum, patient serum, urine, cerebrospinal fluid, synovial fluid, or of a tissue extract of the patient.

[0032] In a further embodiment of the invention, however, the marker sequences according to the invention can be present in a significantly higher or lower expression rate or concentration that indicates pancreatic cancer diseases, pancreatic carcinoma. The relative sick/healthy expression rates of the marker sequences for pancreatic cancer diseases, pancreatic carcinoma according to the invention are hereby determined by means of a protein biochip according to the invention.

[0033] In a further embodiment of the invention, the marker sequences have a recognition signal that is addressed to the substance to be bound (e.g., antibody, nucleic acid). It is preferred according to the invention that for a protein the recognition signal is an epitope and/or a paratope and/or a hapten and for a cDNA is a hybridization or binding region.

[0034] The marker sequences according to the invention are the subject matter of Table A and can be clearly identified by the respectively cited database entry (also by means of the Internet: http://www.ncbi.nlm.nih.gov/) (see in Table A), see also the associated sequence protocol.

[0035] The sequences 1 to 502 relate to the full-length sequences of the sequences 503 to 1004. The sequences 503 to 1004 are preferred sequences, which are identified directly from the protein biochip according to the invention.

[0036] According to the invention, the marker sequences also cover those modifications of the cDNA sequence and the corresponding amino acid sequence as chemical modification, such as citrullination, acetylation, phosphorylation, glycosylation or poly(A) strand and other modifications known to one skilled in the art.

[0037] In a further embodiment of the invention, partial sequences or fragments of the marker sequences according to the invention are likewise comprised. In particular those partial sequences that have an identity of 95%, 90%, in particular 80% or 70% with the marker sequences according to the invention.

[0038] Such partial sequences or fragments of the marker sequences according to the invention are defined by function and have the same diagnostic function.

[0039] Partial sequences are also sequences of the type which have 50 to 100 nucleotides, 70-120 nucleotides of a sequence of the SEQ 1-1004, preferably SEQ 503-1004, or peptides obtainable therefrom.

[0040] In a further embodiment, the respective marker sequence can be represented in different quantities in one more regions on a solid support. This permits a variation of the sensitivity.

[0041] The regions can have respectively a totality of marker sequences, i.e., a sufficient number of different marker sequences, in particular 2 to 5 or 10 or more and optionally more nucleic acids and/or proteins, in particular biomarkers. However, at least 96 to 25,000 (numerical) or more from different or identical marker sequences and further nucleic acids and/or proteins, in particular biomarkers are preferred. Furthermore preferred are more than 2,500, in particular preferred 10,000 or more different or identical marker sequences and optionally further nucleic acids and/or proteins, in particular biomarkers.

[0042] Another object of the invention relates to an arrangement of marker sequences containing at least one marker sequence of a cDNA selected from the group SEQ 1-1004, preferably SEQ 503-1004 or respectively a protein coding therefor. Preferably, the arrangement contains at least 2 to 5 or 10, preferably 30 to 50 marker sequences, or 50 to 100 or more marker sequences.

[0043] Within the scope of this invention, “arrangement” is synonymous with “array,” and if this “array” is used to identify substances on marker sequences, this is to be understood to be an “assay” or diagnostic device. In a preferred embodiment, the arrangement is designed such that the marker sequences represented on the arrangement are present in the form of a grid on a solid support. Furthermore, those arrangements are preferred that permit a high-density arrangement of protein binders and the marker sequences are spotted. Such high-density spotted arrangements are disclosed, for example, in WO 99/57311 and WO 99/57312 and can be used advantageously in a robot-supported automated high-throughput method.

[0044] Within the scope of this invention, however, the term “assay” or diagnostic device likewise comprises those embodiments of a device, such as ELISA, bead-based assay, line assay, Western Blot, immunochromatographic methods (e.g., so-called lateral flow immunoassays, or similar immunological single or multiplex detection measures. A protein biochip in terms of this invention is the systematic arrangement of proteins on a solid support.

[0045] The marker sequences of the arrangement are fixed on a solid support, but preferably spotted or immobilized even printed on, i.e. applied in a reproducible manner. One or more marker sequences can be present multiple times in the totality of all marker sequences and present in different quantities based on one spot. Furthermore, the marker sequences can be standardized on the solid support (i.e., by means of serial dilution series of, e.g., human globulins as internal calibrators for data normalization and quantitative evaluation).

[0046] The invention therefore relates to an assay or a protein biochip comprising an arrangement containing marker sequences according to the invention.

[0047] In a further embodiment, the marker sequences are present as clones. Clones of this type can be obtained, for example, by means of a cDNA expression library according to the invention (Büssow et al. 1998 (supra)). In a preferred embodiment, such expression libraries containing clones are obtained using expression vectors from a cDNA expression library comprising the cDNA marker sequences. These expression vectors preferably contain inducible promoters. The induction of the expression can be carried out, e.g., by means of an inductor, such as IPTG. Suitable expression vectors are described in Terpe et al. (Terpe T Appl Microbiol Biotechnol. 2003 January; 60(5): 523-33).

[0048] One skilled in the art is familiar with expression libraries, they can be produced according to standard works, such as Sambrook et al, “Molecular Cloning, A laboratory handbook, 2nd edition (1989), CSH press, Cold Spring Harbor, N.Y. Expression libraries are also preferred which are tissue-specific (e.g., human tissue, in particular human organs).

[0049] Furthermore included according to the invention are expression libraries that can be obtained by exon-trapping. A synonym for expression library is expression bank.

[0050] Also preferred are protein biochips or corresponding expression libraries that do not exhibit any redundancy (so-called: Uniclone® library) and that may be produced, for example, according to the teachings of WO 99/57311 and WO 99/57312. These preferred Uniclone libraries have a high portion of non-defective fully expressed proteins of a cDNA expression library.

[0051] Within the context of this invention, the clones can also be, but not limited to, transformed bacteria, recombinant phages, or transformed cells from mammals, insects, fungi, yeasts, or plants.

[0052] The clones are fixed, spotted, or immobilized on a solid support.

[0053] The invention therefore relates to an arrangement wherein the marker sequences are present as clones.

[0054] Additionally, the marker sequences can be present in the respective form of a fusion protein, which contains, for example, at least one affinity epitope or tag. The tag may be one such as contains c-myc, his tag, arg tag, FLAG, alkaline phosphatase, VS tag, T7 tag or strep tag, HAT tag, NusA, S tag, SBP tag, thioredoxin, DsbA, a fusion protein, preferably a cellulose-binding domain, green fluorescent protein, maltose-binding protein, calmodulin-binding protein, glutathione S-transferase, or lacZ.

[0055] In all of the embodiments, the term “solid support” covers embodiments such as a filter, a membrane, a magnetic or fluorophore-labeled bead, a silica wafer, glass, metal, ceramics, plastics, a chip, a target for mass spectrometry, or a matrix. However, a filter is preferred according to the invention.

[0056] As a filter, furthermore PVDF, nitrocellulose, or nylon is preferred (e.g, Immobilon P Millipore, Protran Whatman, Hybond N+ Amersham).

[0057] In another preferred embodiment of the arrangement according to the invention, the arrangement corresponds to a grid with the dimensions of a microtiter plate (8-12 wells strips, 96 wells, 384 wells, or more), a silica wafer, a chip, a target for mass spectrometry, or a matrix.

[0058] In a further embodiment, the invention relates to an assay or a protein biochip for identifying and characterizing a substance for pancreatic cancer diseases, pancreatic carcinoma, characterized in that an arrangement or assay according to the invention is a.) brought into contact with at least one substance to be tested and b.) a binding success is detected.

[0059] Furthermore, the invention relates to a method for identifying and characterizing a substance for pancreatic cancer diseases, pancreatic carcinoma, characterized in that an arrangement or assay according to the invention is a.) brought into contact with at least one substance to be tested and b.) a binding success is detected.

[0060] The substance to be tested can be any native or non-native biomolecule, a synthetic chemical molecule, a mixture, or a substance library.

[0061] After the substance to be tested contacts a marker sequence, the binding success is evaluated, which, for example, is carried out using commercially available image analyzing software (GenePix Pro (Axon Laboratories), Aida (Ray test), ScanArray (Packard Bioscience)).

[0062] The visualization of protein-protein interactions according to the invention (e.g., protein on marker sequence, as antigen/antibody) or corresponding “means for detecting the binding success” can be performed, for example, using fluorescence labeling, biotinylation, radioisotope labeling, or colloid gold or latex particle labeling in the usual way. A detection of bound antibodies is carried out with the aid of secondary antibodies, which are labeled with commercially available reporter molecules (e.g., Cy, Alexa, Dyomics, FITC, or similar fluorescent dyes, colloidal gold or latex particles), or with reporter enzymes, such as alkaline phosphatase, horseradish peroxidase, etc., and the corresponding colorimetric, fluorescent, or chemiluminescent substrates. Readout is conducted, e.g., using a microarray laser scanner, a CCD camera, or visually.

[0063] In a further embodiment, the invention relates to a drug/active substance or prodrug developed for pancreatic cancer diseases, pancreatic carcinoma and obtainable through the use of the assay or protein biochip according to the invention.

[0064] The invention therefore likewise relates to the use of an arrangement according to the invention or an assay for screening active substances for pancreatic cancer diseases, pancreatic carcinoma.

[0065] In a further embodiment, the invention therefore likewise relates to a target for the treatment and therapy of pancreatic cancer diseases, pancreatic carcinoma respectively selected from the group SEQ 1-1004, preferably SEQ 503-1004, or a protein respectively coding therefor.

[0066] In a further embodiment, the invention likewise relates to the use of the marker sequences according to the invention, preferably in the form of an arrangement, as an affinity material for carrying out an apheresis or in the broadest sense a blood lavage, wherein substances from body fluids of a patient with pancreatic cancer diseases, pancreatic carcinoma, such as blood or plasma, bind to the marker sequences according to the invention and consequently can be selectively withdrawn from the body fluid.

### EXAMPLES AND FIGURES

[0067] Ten or more patient samples were individually screened against a cDNA expression library. The expression clones specific to pancreatic cancer diseases, pancreatic carcinoma were determined through a comparison with ten or more healthy samples. The identity of the marker sequences was determined by DNA sequencing.

[0068] FIG. 1 shows the differential screening between two protein biochips from respectively one cDNA expression bank of a patient and a healthy test subject. The differential clones are detected by means of fluorescent labeling and evaluated by means of bioinformatics.

[0069] In the scope of the biomarker identification, various bioinformatic analyses are performed. For each serum, reactivities against approximately 2000 different antigens are measured by means of microarray. These data are used for a ranking of the spotted antigens with respect to their differentiation capability between healthy and diseased sera. This analysis is performed by means of the non-parameterized Mann-Whitney test on normalized intensity data. An internal standard which is also spotted on each chip is used for the normalization. Since a p value is calculated for each antigen, methods are used for correction of the multiple test. As a very conservative approach, a Bonferroni direction is performed and the less restrictive false discovery rate (FDR) according to Benjamini & Hochberg is additionally calculated. Furthermore, the data are used for classification of the sera. Different multivariate methods are used hereby. These are methods from statistical learning methods such as support vector machines (SVM), neural networks, or classification trees, as well as a threshold value method, which is capable of both classification and also visual representation of the data.

[0070] To avoid overfitting, a 10-fold cross-validation of the data is performed.

TABLE A

| SEQ | Accession No | Accession No | Name |
|---|---|---|---|
| 1 | gi\|10518498 | 11237 | Homo sapiens ring finger protein 24 (RNF24), mRNA |
| 2 | gi\|11038650 | 3550 | Homo sapiens IK cytokine, down-regulator of HLA II (IK), mRNA |
| 3 | gi\|221139925 | 57224 | Homo sapiens NHS-like 1, transcript variant 5 (NHSL1), mRNA |
| 4 | gi\|113428396 | 25759 | Homo sapiens SHC (Src homology 2 domain containing) transforming protein 2 (SHC2), mRNA |
| 5 | gi\|113430465 | 392485 | PREDICTED: Homo sapiens similar to ataxin 7-like 3 (LOC392485), mRNA |
| 6 | gi\|14249519 | 84908 | Homo sapiens hypothetical protein FLJ14668 (FLJ14668), mRNA |
| 7 | gi\|19913395 | 6525 | Homo sapiens smoothelin (SMTN), transcript variant 2, mRNA |
| 8 | gi\|21361156 | 9454 | Homo sapiens homer homolog 3 (Drosophila) (HOMER3), mRNA |
| 9 | gi\|21735620 | 4191 | Homo sapiens malate dehydrogenase 2, NAD (mitochondrial) (MDH2), mRNA |
| 10 | gi\|22027484 | 51655 | Homo sapiens RAS, dexamethasone-induced 1 (RASD1), mRNA |
| 11 | gi\|22027497 | 23523 | Homo sapiens calcineurin binding protein 1 (CABIN1), mRNA |
| 12 | gi\|22095372 | 80774 | Homo sapiens LIM domain containing 2 (LIMD2), mRNA |
| 13 | gi\|22538469 | 8320 | Homo sapiens eomesodermin homolog (Xenopus laevis) (EOMES), mRNA |
| 14 | gi\|22748870 | 136051 | Homo sapiens zinc finger protein 786 (ZNF786), mRNA |
| 15 | gi\|28178831 | 3418 | Homo sapiens isocitrate dehydrogenase 2 (NADP+), mitochondrial (IDH2), mRNA |
| 16 | gi\|29826322 | 118 | Homo sapiens adducin 1 (alpha) (ADD1), transcript variant 3, mRNA |
| 17 | gi\|31377576 | 143282 | Homo sapiens chromosome 10 open reading frame 13 (C10orf13), mRNA |
| 18 | gi\|32401423 | 65108 | Homo sapiens MARCKS-like 1 (MARCKSL1), mRNA |
| 19 | gi\|34147459 | 92922 | Homo sapiens coiled-coil domain containing 102A (CCDC102A), mRNA |
| 20 | gi\|34147626 | 65982 | Homo sapiens zinc finger protein 447 (ZNF447), mRNA |
| 21 | gi\|34147687 | 64777 | Homo sapiens required for meiotic nuclear division 5 homolog B (S. cerevisiae) (RMND5B), |
| | | | mRNA |
| 22 | gi\|34147700 | 147015 | Homo sapiens dehydrogenase/reductase (SDR family) member 13 (DHRS13), mRNA |
| 23 | gi\|34335280 | 5715 | Homo sapiens proteasome (prosome, macropain) 26S subunit, non-ATPase, 9 (PSMD9), mRNA |
| 24 | gi\|34452731 | 57580 | Homo sapiens phosphatidylinositol 3,4,5-trisphosphate-dependent RAC exchanger 1 (PREX1), |
| | | | mRNA |
| 25 | gi\|35250828 | 22820 | Homo sapiens coatomer protein complex, subunit gamma (COPG), mRNA |
| 26 | gi\|37550270 | | Homo sapiens chromosome 5 genomic contig, reference assembly |
| 27 | gi\|37551026 | | Homo sapiens chromosome 10 genomic contig, reference assembly |
| 28 | gi\|38679885 | 90864 | Homo sapiens splA/ryanodine receptor domain and SOCS box containing 3 (SPSB3), mRNA |
| 29 | gi\|38679886 | 6717 | Homo sapiens sorcin (SRI), transcript variant 1, mRNA |
| 30 | gi\|40353201 | 55593 | Homo sapiens OTU domain containing 5 (OTUD5), mRNA |
| 31 | gi\|40789263 | 84310 | Homo sapiens hypothetical protein MGC11257 (MGC11257), mRNA |
| 32 | gi\|40795668 | 10991 | Homo sapiens solute carrier family 38, member 3 (SLC38A3), mRNA |
| 33 | gi\|40804467 | 782 | Homo sapiens calcium channel, voltage-dependent, beta 1 subunit (CACNB1), transcript variant |
| | | | 1, mRNA |
| 34 | gi\|40807365 | 64118 | Homo sapiens dihydrouridine synthase 1-like (S. cerevisiae) (DUS1L), mRNA |
| 35 | gi\|41352714 | 55737 | Homo sapiens vacuolar protein sorting 35 (yeast) (VPS35), mRNA |
| 36 | gi\|42475533 | 9746 | Homo sapiens calsyntenin 3 (CLSTN3), mRNA |
| 37 | gi\|42476152 | 5764 | Homo sapiens pleiotrophin (heparin binding growth factor 8, neurite growth-promoting factor 1) |
| | | | (PTN), mRNA |
| 38 | gi\|4505904 | 5372 | Homo sapiens phosphomannomutase 1 (PMM1), mRNA |
| 39 | gi\|4506456 | 5955 | Homo sapiens reticulocalbin 2, EF-hand calcium binding domain (RCN2), mRNA |
| 40 | gi\|4506742 | 6202 | Homo sapiens ribosomal protein S8 (RPS8), mRNA |
| 41 | gi\|46198303 | 51287 | Homo sapiens coiled-coil-helix-coiled-coil-helix domain containing 8 (CHCHD8), mRNA |
| 42 | gi\|47078280 | 9679 | Homo sapiens family with sequence similarity 53, member 8 (FAM53B), mRNA |
| 43 | gi\|47132573 | 5571 | Homo sapiens protein kinase, AMP-activated, gamma 1 non-catalytic subunit (PRKAG1), |
| | | | transcript variant 1, mRNA |
| 44 | gi\|48375183 | 3476 | Homo sapiens immunoglobulin (CD79A) binding protein 1 (IGBP1), mRNA |
| 45 | gi\|51465675 | | Homo sapiens chromosome 6 genomic contig, reference assembly |
| 46 | gi\|52856410 | 30827 | Homo sapiens CXXC finger 1 (PHD domain) (CXXC1), mRNA |
| 47 | gi\|53759121 | 324 | Homo sapiens adenomatosis polyposis coli (APC), mRNA |
| 48 | gi\|55925645 | 27101 | Homo sapiens calcyclin binding protein (CACYBP), transcript variant 1, mRNA |
| 49 | gi\|56676339 | 51710 | Homo sapiens zinc finger protein 44 (ZNF44), mRNA |
| 50 | gi\|56790944 | 5499 | Homo sapiens protein phosphatase 1, catalytic subunit, alpha isoform (PPP1CA), transcript |
| | | | variant 3, mRNA |
| 51 | gi\|57242773 | 9703 | Homo sapiens KIAA0100 (KIAA0100), mRNA |
| 52 | gi\|57617038 | 23170 | Homo sapiens tubulin tyrosine ligase-like family, member 12 (TTLL12), mRNA |
| 53 | gi\|62953138 | 57727 | Homo sapiens nuclear receptor coactivator 5 (NCOA5), mRNA |
| 54 | gi\|63082031 | 23113 | Homo sapiens p53-associated parkin-like cytoplasmic protein (PARC), mRNA |
| 55 | gi\|65301138 | 10079 | Homo sapiens ATPase, Class II, type 9A (ATP9A), mRNA |
| 56 | gi\|68448524 | 972 | Homo sapiens CD74 molecule, major histocompatibility complex, class II invariant chain (CD74), |
| | | | transcript variant 2, mRNA |
| 57 | gi\|74048536 | 64219 | Homo sapiens praja 1 (PJA1), transcript variant 2, mRNA |
| 58 | gi\|7705609 | 51012 | Homo sapiens chromosome 20 open reading frame 45 (C20orf45), mRNA |
| 59 | gi\|7706556 | 51759 | Homo sapiens chromosome 9 open reading frame 78 (C9orf78), transcript variant 2, mRNA |
| 60 | gi\|77628146 | 10961 | Homo sapiens endoplasmic reticulum protein 29 (ERP29), transcript variant 1, mRNA |
| 61 | gi\|86788141 | 9844 | Homo sapiens engulfment and cell motility 1 (ELMO1), transcript variant 2, mRNA |
| 62 | gi\|88942921 | | Homo sapiens chromosome 1 genomic contig, reference assembly |
| 63 | gi\|88979823 | | Homo sapiens chromosome 4 genomic contig, alternate assembly (based on Celera assembly) |
| 64 | gi\|92859637 | 6861 | Homo sapiens synaptotagmin V (SYT5), mRNA |
| 65 | gi\|113412087 | 9672 | PREDICTED: Homo sapiens syndecan 3 (N-syndecan), transcript variant 2 (SDC3), mRNA |
| 66 | gi\|142385096 | 641700 | Homo sapiens endothelial cell-specific chemotaxis regulator (ECSCR), mRNA |
| 67 | gi\|222144282 | 65998 | Homo sapiens hypothetical protein LOC65998 (LOC65998), mRNA |
| 68 | gi\|113423046 | 26011 | Homo sapiens odz, odd Oz/ten-m homolog 4 (Drosophila) (ODZ4), mRNA |
| 69 | gi\|169790824 | 283450 | Homo sapiens chromosome 12 open reading frame 51 (C12orf51), mRNA |
| 70 | gi\|111607440 | 400506 | Homo sapiens chromosome 16 open reading frame 88 (C16orf88), mRNA |
| 71 | gi\|150010638 | 23326 | Homo sapiens ubiquitin specific peptidase 22 (USP22), mRNA |
| 72 | gi\|148839304 | 23347 | Homo sapiens structural maintenance of chromosomes flexible hinge domain containing 1 |
| | | | (SMCHD1), mRNA |
| 73 | gi\|113428453 | 57662 | Homo sapiens KIAA1543 (KIAA1543), mRNA |
| 74 | gi\|113429692 | 389906 | PREDICTED: Homo sapiens similar to Serine/threonine-protein kinase PRKX (Protein kinase |
| | | | PKX1) (LOC389906), mRNA |
| 75 | gi\|11386142 | 5345 | Homo sapiens serpin peptidase inhibitor, clade F (alpha-2 antiplasmin, pigment epithelium |
| | | | derived factor), member 2 (SERPINF2), mRNA |
| 76 | gi\|12056481 | 9310 | Homo sapiens zinc finger protein 235 (ZNF235), mRNA |
| 77 | gi\|12408642 | 8019 | Homo sapiens bromodomain containing 3 (BRD3), mRNA |
| 78 | gi\|12408650 | 7520 | Homo sapiens X-ray repair complementing defective repair in Chinese hamster cells 5 (double- |
| | | | strand-break rejoining; Ku autoantigen, 80 kDa) (XRCC5), mRNA |
| 79 | gi\|12545399 | 3385 | Homo sapiens intercellular adhesion molecule 3 (ICAM3), mRNA |
| 80 | gi\|13112047 | 2261 | Homo sapiens fibroblast growth factor receptor 3 (achondroplasia, thanatophoric dwarfism) |
| | | | (FGFR3), transcript variant 2, mRNA |
| 81 | gi\|13236584 | 79187 | Homo sapiens fibronectin type III and SPRY domain containing 1 (FSD1), mRNA |
| 82 | gi\|13236586 | 79188 | Homo sapiens transmembrane protein 43 (TMEM43), mRNA |
| 83 | gi\|13376149 | 79844 | Homo sapiens zinc finger, DHHC-type containing 11 (ZDHHC11), mRNA |
| 84 | gi\|13376239 | 79891 | Homo sapiens zinc finger protein 671 (ZNF671), mRNA |
| 85 | gi\|13376368 | 79969 | Homo sapiens chromosome 6 open reading frame 134 (C6orf134), transcript variant 2, mRNA |
| 86 | gi\|13435352 | 3897 | Homo sapiens L1 cell adhesion molecule (L1CAM), transcript variant 2, mRNA |
| 87 | gi\|13443001 | 80154 | Homo sapiens hypothetical protein FLJ22795 (FLJ22795), mRNA |
| 88 | gi\|13514826 | 1655 | Homo sapiens DEAD (Asp-Glu-Ala-Asp) box polypeptide 5 (DDX5), mRNA |
| 89 | gi\|13994299 | 83862 | Homo sapiens transmembrane protein induced by tumor necrosis factor alpha (TMPIT), mRNA |
| 90 | gi\|14043021 | 4141 | Homo sapiens methionine-tRNA synthetase (MARS), mRNA |
| 91 | gi\|14195613 | 56129 | Homo sapiens protocadherin beta 7 (PCDHB7), mRNA |
| 92 | gi\|14196449 | 56105 | Homo sapiens protocadherin gamma subfamily A, 11 (PCDHGA11), transcript variant 1, mRNA |
| 93 | gi\|14211539 | 4343 | Homo sapiens Mov10, Moloney leukemia virus 10, homolog (mouse) (MOV10), mRNA |
| 94 | gi\|14249707 | 85007 | Homo sapiens alanine-glyoxylate aminotransferase 2-like 2 (AGXT2L2), transcript variant 1, |
| | | | mRNA |
| 95 | gi\|14589925 | 51294 | Homo sapiens protocadherin 12 (PCDH12), mRNA |
| 96 | gi\|14670372 | 57060 | Homo sapiens poly(rC) binding protein 4 (PCBP4), transcript variant 4, mRNA |
| 97 | gi\|14971416 | 10155 | Homo sapiens tripartite motif-containing 28 (TRIM28), mRNA |
| 98 | gi\|15718685 | 6134 | Homo sapiens ribosomal protein L10 (RPL10), mRNA |
| 99 | gi\|15721936 | 64951 | Homo sapiens mitochondrial ribosomal protein S24 (MRPS24), nuclear gene encoding |
| | | | mitochondrial protein, mRNA |
| 100 | gi\|15812219 | 6160 | Homo sapiens ribosomal protein L31 (RPL31), mRNA |
| 101 | gi\|16507965 | 2023 | Homo sapiens enolase 1, (alpha) (ENO1), mRNA |
| 102 | gi\|16950626 | 1174 | Homo sapiens adaptor-related protein complex 1, sigma 1 subunit (AP1S1), transcript variant 1, |
| | | | mRNA |
| 103 | gi\|16950656 | 894 | Homo sapiens cyclin D2 (CCND2), mRNA |
| 104 | gi\|16950659 | 1022 | Homo sapiens cyclin-dependent kinase 7 (MO15 homolog, Xenopus laevis, cdk-activating kinase) |
| | | | (CDK7), mRNA |
| 105 | gi\|17149812 | 116138 | Homo sapiens kelch domain containing 3 (KLHDC3), mRNA |
| 106 | gi\|17388802 | 10606 | Homo sapiens phosphoribosylaminoimidazole carboxylase, phosphoribosylaminoimidazole |
| | | | succinocarboxamide synthetase (PAICS), mRNA |
| 107 | gi\|17505192 | 7477 | Homo sapiens wingless-type MMTV integration site family, member 7B (WNT7B), mRNA |
| 108 | gi\|17530790 | 117608 | Homo sapiens zinc finger protein 354B (ZNF354B), mRNA |
| 109 | gi\|17978480 | 64601 | Homo sapiens vacuolar protein sorting 16 (yeast) (VPS16), transcript variant 3, mRNA |
| 110 | gi\|17978511 | 22827 | Homo sapiens fuse-binding protein-interacting repressor (SIAHBP1), transcript variant 1, mRNA |
| 111 | gi\|18105005 | 8907 | Homo sapiens adaptor-related protein complex 1, mu 1 subunit (AP1M1), mRNA |
| 112 | gi\|18105057 | 26276 | Homo sapiens vacuolar protein sorting 33B (yeast) (VPS33B), mRNA |
| 113 | gi\|18201904 | 2821 | Homo sapiens glucose phosphate isomerase (GPI), mRNA |
| 114 | gi\|18375629 | 7917 | Homo sapiens HLA-B associated transcript 3 (BAT3), transcript variant 2, mRNA |
| 115 | gi\|18426914 | 1627 | Homo sapiens drebrin 1 (DBN1), transcript variant 1, mRNA |
| 116 | gi\|19263342 | 119016 | Homo sapiens centaurin, gamma-like family, member 1 (CTGLF1), mRNA |
| 117 | gi\|19913344 | 7884 | Homo sapiens stem-loop (histone) binding protein (SLBP), mRNA |
| 118 | gi\|19923783 | 10923 | Homo sapiens SUB1 homolog (S. cerevisiae) (SUB1), mRNA |
| 119 | gi\|20127439 | 10227 | Homo sapiens tetracycline transporter-like protein (TETRAN), mRNA |
| 120 | gi\|20127622 | 79084 | Homo sapiens WD repeat domain 77 (WDR77), mRNA |
| 121 | gi\|20270302 | 89941 | Homo sapiens ras homolog gene family, member T2 (RHOT2), mRNA |
| 122 | gi\|20270356 | 130617 | Homo sapiens zinc finger, AN1-type domain 2B (ZFAND2B), mRNA |
| 123 | gi\|20336204 | 546 | Homo sapiens alpha thalassemia/mental retardation syndrome X-linked (RAD54 homolog, S. |
| | | | cerevisiae) (ATRX), transcript variant 2, mRNA |
| 124 | gi\|20357555 | 2017 | Homo sapiens cortactin (CTTN), transcript variant 2, mRNA |
| 125 | gi\|20558635 | | Homo sapiens chromosome 20 genomic contig, reference assembly |
| 126 | gi\|20986498 | 5598 | Homo sapiens mitogen-activated protein kinase 7 (MAPK7), transcript variant 2, mRNA |
| 127 | gi\|20986517 | 9479 | Homo sapiens mitogen-activated protein kinase 8 interacting protein 1 (MAPK8IP1), mRNA |
| 128 | gi\|21040276 | 221955 | Homo sapiens diacylglycerol lipase beta (DAGLBETA), mRNA |
| 129 | gi\|21070955 | 25839 | Homo sapiens component of oligomeric golgi complex 4 (COG4), mRNA |
| 130 | gi\|21070996 | 6786 | Homo sapiens stromal interaction molecule 1 (STIM1), mRNA |
| 131 | gi\|21265107 | 7103 | Homo sapiens tetraspanin 8 (TSPAN8), mRNA |
| 132 | gi\|21361550 | 6522 | Homo sapiens solute carrier family 4, anion exchanger, member 2 (erythrocyte membrane protein |
| | | | band 3-like 1) (SLC4A2), mRNA |
| 133 | gi\|21361610 | 51177 | Homo sapiens pleckstrin homology domain containing, family O member 1 (PLEKHO1), mRNA |
| 134 | gi\|21361948 | 81926 | Homo sapiens family with sequence similarity 108, member A1 (FAM108A1), mRNA |
| 135 | gi\|21362049 | 84317 | Homo sapiens coiled-coil domain containing 115 (CCDC115), mRNA |
| 136 | gi\|21389334 | 90809 | Homo sapiens transmembrane protein 55B (TMEM55B), mRNA |
| 137 | gi\|21396488 | 9361 | Homo sapiens Ion peptidase 1, mitochondrial (LONP1), nuclear gene encoding mitochondrial |
| | | | protein, mRNA |
| 138 | gi\|21536463 | 4356 | Homo sapiens membrane protein, palmitoylated 3 (MAGUK p55 subfamily member 3) (MPP3), |
| | | | mRNA |
| 139 | gi\|21687111 | 112476 | Homo sapiens proline-rich transmembrane protein 2 (PRRT2), mRNA |
| 140 | gi\|21735549 | 4294 | Homo sapiens mitogen-activated protein kinase kinase kinase 10 (MAP3K10), mRNA |
| 141 | gi\|21735623 | 7534 | Homo sapiens tyrosine 3-monooxygenase/tryptophan 5-monooxygenase activation protein, zeta |
| | | | polypeptide (YWHAZ), transcript variant 1, mRNA |
| 142 | gi\|21735624 | 7534 | Homo sapiens tyrosine 3-monooxygenase/tryptophan 5-monooxygenase activation protein, zeta |
| | | | polypeptide (YWHAZ), transcript variant 2, mRNA |
| 143 | gi\|22035552 | 322 | Homo sapiens amyloid beta (A4) precursor protein-binding, family B, member 1 (Fe65) (APBB1), |
| | | | transcript variant 1, mRNA |
| 144 | gi\|22035553 | 322 | Homo sapiens amyloid beta (A4) precursor protein-binding, family B, member 1 (Fe65) (APBB1), |
| | | | transcript variant 2, mRNA |
| 145 | gi\|22035561 | 55290 | Homo sapiens BRF2, subunit of RNA polymerase III transcription initiation factor, BRF1-like |
| | | | (BRF2), mRNA |
| 146 | gi\|22035607 | 114879 | Homo sapiens oxysterol binding protein-like 5 (OSBPL5), transcript variant 1, mRNA |
| 147 | gi\|22095338 | 5230 | Homo sapiens phosphoglycerate kinase 1 (PGK1), mRNA |
| 148 | gi\|22095346 | 23705 | Homo sapiens immunoglobulin superfamily, member 4 (IGSF4), mRNA |
| 149 | gi\|22095348 | 23038 | Homo sapiens WD and tetratricopeptide repeats 1 (WDTC1), mRNA |
| 150 | gi\|22095350 | 23039 | Homo sapiens exportin 7 (XPO7), mRNA |
| 151 | gi\|22538463 | 5690 | Homo sapiens proteasome (prosome, macropain) subunit, beta type, 2 (PSMB2), mRNA |
| 152 | gi\|22547145 | 55336 | Homo sapiens F-box and leucine-rich repeat protein 8 (FBXL8), mRNA |
| 153 | gi\|22547185 | 6470 | Homo sapiens serine hydroxymethyltransferase 1 (soluble) (SHMT1), transcript variant 1, mRNA |
| 154 | gi\|22748758 | 125144 | Homo sapiens chromosome 17 open reading frame 45 (C17orf45), mRNA |
| 155 | gi\|22748780 | 126282 | Homo sapiens tumor necrosis factor, alpha-induced protein 8-like 1 (TNFAIP8L1), mRNA |
| 156 | gi\|22907051 | 10552 | Homo sapiens actin related protein 2/3 complex, subunit 1A, 41 kDa (ARPC1A), mRNA |
| 157 | gi\|23111044 | 8723 | Homo sapiens sorting nexin 4 (SNX4), mRNA |
| 158 | gi\|23199996 | 55695 | Homo sapiens NOL1/NOP2/Sun domain family, member 5 (NSUN5), transcript variant 2, mRNA |
| 159 | gi\|23308571 | 79143 | Homo sapiens leukocyte receptor cluster (LRC) member 4 (LENG4), mRNA |
| 160 | gi\|23510380 | 3842 | Homo sapiens transportin 1 (TNPO1), transcript variant 2, mRNA |
| 161 | gi\|23510447 | 4174 | Homo sapiens MCM5 minichromosome maintenance deficient 5, cell division cycle 48 (S. |
| | | | cerevisiae) (MCM5), mRNA |
| 162 | gi\|23510450 | 327 | Homo sapiens N-acylaminoacyl-peptide hydrolase (APEH), mRNA |
| 163 | gi\|23943927 | 140680 | Homo sapiens chromosome 20 open reading frame 96 (C20orf96), mRNA |
| 164 | gi\|24307888 | 9100 | Homo sapiens ubiquitin specific peptidase 10 (USP10), mRNA |
| 165 | gi\|24308188 | 56963 | Homo sapiens RGM domain family, member A (RGMA), mRNA |
| 166 | gi\|24308325 | 84446 | Homo sapiens BR serine/threonine kinase 1 (BRSK1), mRNA |
| 167 | gi\|24308431 | 91875 | Homo sapiens tetratricopeptide repeat domain 5 (TTC5), mRNA |
| 168 | gi\|24430150 | 5700 | Homo sapiens proteasome (prosome, macropain) 26S subunit, ATPase, 1 (PSMC1), mRNA |
| 169 | gi\|24431972 | 54862 | Homo sapiens coiled-coil and C2 domain containing 1A (CC2D1A), mRNA |
| 170 | gi\|24431995 | 56904 | Homo sapiens SH3-domain GRB2-like endophilin B2 (SH3GLB2), mRNA |
| 171 | gi\|24432025 | 84861 | Homo sapiens kelch-like 22 (Drosophila) (KLHL22), mRNA |
| 172 | gi\|24476015 | 23432 | Homo sapiens G protein-coupled receptor 161 (GPR161), transcript variant 2, mRNA |
| 173 | gi\|25306276 | 85476 | Homo sapiens G elongation factor, mitochondrial 1 (GFM1), nuclear gene encoding mitochondrial |
| | | | protein, mRNA |
| 174 | gi\|25777644 | 3781 | Homo sapiens potassium intermediate/small conductance calcium-activated channel, subfamily |
| | | | N, member 2 (KCNN2), transcript variant 1, mRNA |
| 175 | gi\|25777676 | 9770 | Homo sapiens Ras association (RalGDS/AF-6) domain family 2 (RASSF2), transcript variant 2, |
| | | | mRNA |
| 176 | gi\|26667164 | 64978 | Homo sapiens mitochondrial ribosomal protein L38 (MRPL38), nuclear gene encoding |
| | | | mitochondrial protein, mRNA |
| 177 | gi\|27262633 | 4678 | Homo sapiens nuclear autoantigenic sperm protein (histone-binding) (NASP), transcript variant 1, |
| | | | mRNA |
| 178 | gi\|27374999 | 11345 | Homo sapiens GABA(A) receptor-associated protein-like 2 (GABARAPL2), mRNA |
| 179 | gi\|27477128 | 4157 | Homo sapiens melanocortin 1 receptor (alpha melanocyte stimulating hormone receptor) |
| | | | (MC1R), mRNA |
| 180 | gi\|28178837 | 3421 | Homo sapiens isocitrate dehydrogenase 3 (NAD+) gamma (IDH3G), nuclear gene encoding |
| | | | mitochondrial protein, transcript variant 2, mRNA |
| 181 | gi\|28416941 | 6632 | Homo sapiens small nuclear ribonucleoprotein D1 polypeptide 16 kDa (SNRPD1), mRNA |
| 182 | gi\|28872807 | 2596 | Homo sapiens growth associated protein 43 (GAP43), mRNA |
| 183 | gi\|28933450 | 23129 | Homo sapiens plexin D1 (PLXND1), mRNA |
| 184 | gi\|29171704 | 10916 | Homo sapiens melanoma antigen family D, 2 (MAGED2), transcript variant 2, mRNA |
| 185 | gi\|29740881 | | Homo sapiens chromosome 6 genomic contig, reference assembly |
| 186 | gi\|29791451 | | Homo sapiens chromosome 2 genomic contig, reference assembly |
| 187 | gi\|29791548 | | Homo sapiens chromosome 4 genomic contig, reference assembly |
| 188 | gi\|30179901 | 6659 | Homo sapiens SRY (sex determining region Y)-box 4 (SOX4), mRNA |
| 189 | gi\|30181235 | 221184 | Homo sapiens copine II (CPNE2), mRNA |
| 190 | gi\|31341385 | 5383 | Homo sapiens postmeiotic segregation increased 2-like 5 (PMS2L5), mRNA |
| 191 | gi\|31341899 | 196403 | Homo sapiens deltex 3 homolog (Drosophila) (DTX3), mRNA |
| 192 | gi\|31342615 | 337867 | Homo sapiens phosphoglycerate dehydrogenase like 1 (PHGDHL1), mRNA |
| 193 | gi\|31343375 | 137984 | Homo sapiens 1-acylglycerol-3-phosphate O-acyltransferase 6 (lysophosphatidic acid |
| | | | acyltransferase, zeta) (AGPAT6), mRNA |
| 194 | gi\|31343395 | 201164 | Homo sapiens similar to CG12314 gene product (LOC201164), mRNA |
| 195 | gi\|31377649 | 84866 | Homo sapiens transmembrane protein 25 (TMEM25), mRNA |
| 196 | gi\|31377801 | 6405 | Homo sapiens sema domain, immunoglobulin domain (Ig), short basic domain, secreted, |
| | | | (semaphorin) 3F (SEMA3F), mRNA |
| 197 | gi\|31542734 | 79703 | Homo sapiens hypothetical protein FLJ22531 (FLJ22531), mRNA |
| 198 | gi\|31542944 | 51493 | Homo sapiens chromosome 22 open reading frame 28 (C22orf28), mRNA |
| 199 | gi\|31543803 | 7980 | Homo sapiens tissue factor pathway inhibitor 2 (TFPI2), mRNA |
| 200 | gi\|31652217 | 6837 | Homo sapiens surfeit 5 (SURF5), transcript variant c, mRNA |
| 201 | gi\|32967304 | 51004 | Homo sapiens coenzyme Q6 homolog, monooxygenase (S. cerevisiae) (COQ6), transcript |
| | | | variant 1, mRNA |
| 202 | gi\|33186926 | 152137 | Homo sapiens coiled-coil domain containing 50 (CCDC50), transcript variant 1, mRNA |
| 203 | gi\|33188442 | 23499 | Homo sapiens microtubule-actin crosslinking factor 1 (MACF1), transcript variant 2, mRNA |
| 204 | gi\|33356548 | 4172 | Homo sapiens MCM3 minichromosome maintenance deficient 3 (S. cerevisiae) (MCM3), mRNA |
| 205 | gi\|33359212 | 5310 | Homo sapiens polycystic kidney disease 1 (autosomal dominant) (PKD1), transcript variant 2, |
| | | | mRNA |
| 206 | gi\|33359689 | 1948 | Homo sapiens ephrin-B2 (EFNB2), mRNA |
| 207 | gi\|33413399 | 2098 | Homo sapiens esterase D/formylglutathione hydrolase (ESD), mRNA |
| 208 | gi\|33466360 | 10139 | Homo sapiens ADP-ribosylation factor related protein 1 (ARFRP1), mRNA |
| 209 | gi\|33519462 | 4705 | Homo sapiens NADH dehydrogenase (ubiquinone) 1 alpha subcomplex, 10, 42 kDa (NDUFA10), |
| | | | nuclear gene encoding mitochondrial protein, mRNA |
| 210 | gi\|33598938 | 91179 | Homo sapiens scavenger receptor class F, member 2 (SCARF2), transcript variant 1, mRNA |
| 211 | gi\|33636749 | 63893 | Homo sapiens ubiquitin-conjugating enzyme E2O (UBE2O), mRNA |
| 212 | gi\|34147352 | 79002 | Homo sapiens chromosome 19 open reading frame 43 (C19orf43), mRNA |
| 213 | gi\|34147392 | 79363 | Homo sapiens chromosome 1 open reading frame 89 (C1orf89), mRNA |
| 214 | gi\|34147499 | 5504 | Homo sapiens protein phosphatase 1, regulatory (inhibitor) subunit 2 (PPP1R2), mRNA |
| 215 | gi\|34147502 | 58491 | Homo sapiens zinc finger protein 71 (ZNF71), mRNA |
| 216 | gi\|34147585 | 51433 | Homo sapiens anaphase promoting complex subunit 5 (ANAPC5), mRNA |
| 217 | gi\|34147615 | 83723 | Homo sapiens family with sequence similarity 57, member B (FAM57B), mRNA |
| 218 | gi\|34147632 | 5347 | Homo sapiens polo-like kinase 1 (Drosophila) (PLK1), mRNA |
| 219 | gi\|34147640 | 60528 | Homo sapiens elaC homolog 2 (E. coli) (ELAC2), mRNA |
| 220 | gi\|34147695 | 84946 | Homo sapiens LTV1 homolog (S. cerevisiae) (LTV1), mRNA |
| 221 | gi\|34147717 | 115704 | Homo sapiens ecotropic viral integration site 5-like (EVI5L), mRNA |
| 222 | gi\|34222164 | 91392 | Homo sapiens zinc finger protein 502 (ZNF502), mRNA |
| 223 | gi\|34222207 | 146330 | Homo sapiens F-box and leucine-rich repeat protein 16 (F8XL16), mRNA |
| 224 | gi\|34222313 | 27339 | Homo sapiens PRP19/PSO4 pre-mRNA processing factor 19 homolog (S. cerevisiae) (PRPF19), |
| | | | mRNA |
| 225 | gi\|34222340 | 80148 | Homo sapiens PQ loop repeat containing 1 (PQLC1), mRNA |
| 226 | gi\|34222352 | 79751 | Homo sapiens solute carrier family 25 (mitochondrial carrier: glutamate), member 22 |
| | | | (SLC25A22), mRNA |
| 227 | gi\|34303923 | 147923 | Homo sapiens zinc finger protein 420 (ZNF420), mRNA |
| 228 | gi\|34328935 | 6634 | Homo sapiens small nuclear ribonucleoprotein D3 polypeptide 18 kDa (SNRPD3), mRNA |
| 229 | gi\|34335143 | 6166 | Homo sapiens ribosomal protein L36a-like (RPL36AL), mRNA |
| 230 | gi\|34335149 | 6205 | Homo sapiens ribosomal protein S11 (RPS11), mRNA |
| 231 | gi\|34335279 | 5713 | Homo sapiens proteasome (prosome, macropain) 26S subunit, non-ATPase, 7 (Mov34 homolog) |
| | | | (PSMD7), mRNA |
| 232 | gi\|34335395 | 666 | Homo sapiens BCL2-related ovarian killer (BOK), mRNA |
| 233 | gi\|34452691 | 51160 | Homo sapiens vacuolar protein sorting 28 homolog (S. cerevisiae) (VPS28), transcript variant 1, |
| | | | mRNA |
| 234 | gi\|34577108 | 226 | Homo sapiens aldolase A, fructose-bisphosphate (ALDOA), transcript variant 1, mRNA |
| 235 | gi\|36287068 | 10524 | Homo sapiens HIV-1 Tat interacting protein, 60 kDa (HTATIP), transcript variant 1, mRNA |
| 236 | gi\|36287129 | 64432 | Homo sapiens mitochondrial ribosomal protein S25 (MRPS25), nuclear gene encoding |
| | | | mitochondrial protein, mRNA |
| 237 | gi\|37059733 | 3030 | Homo sapiens hydroxyacyl-Coenzyme A dehydrogenase/3-ketoacyl-Coenzyme A thiolase/enoyl- |
| | | | Coenzyme A hydratase (trifunctional protein), alpha subunit (HADHA), mRNA |
| 238 | gi\|37059754 | 90353 | Homo sapiens ATP binding domain 3 (ATPBD3), mRNA |
| 239 | gi\|37059801 | 51239 | Homo sapiens ankyrin repeat domain 39 (ANKRD39), mRNA |
| 240 | gi\|37537720 | 126792 | Homo sapiens UDP-Gal: betaGal beta 1,3-galactosyltransferase polypeptide 6 (B3GALT6), mRNA |
| 241 | gi\|37544588 | | Homo sapiens chromosome 17 genomic contig, reference assembly |
| 242 | gi\|37546841 | | Homo sapiens chromosome 13 genomic contig, reference assembly |
| 243 | gi\|37574605 | 7750 | Homo sapiens zinc finger, MYM-type 2 (ZMYM2), mRNA |
| 244 | gi\|37574721 | | Homo sapiens chromosome 19 genomic contig, reference assembly |
| 245 | gi\|37594439 | 10467 | Homo sapiens zinc finger, HIT type 1 (ZNHIT1), mRNA |
| 246 | gi\|38016912 | 8683 | Homo sapiens splicing factor, arginine/serine-rich 9 (SFRS9), mRNA |
| 247 | gi\|38146101 | 27343 | Homo sapiens polymerase (DNA directed), lambda (POLL), mRNA |
| 248 | gi\|38176297 | 10715 | Homo sapiens LAG1 longevity assurance homolog 1 (S. cerevisiae) (LASS1), transcript variant 1, |
| | | | mRNA |
| 249 | gi\|38201654 | 54556 | Homo sapiens inhibitor of growth family, member 3 (ING3), transcript variant 1, mRNA |
| 250 | gi\|38488711 | 128989 | Homo sapiens chromosome 22 open reading frame 25 (C22orf25), mRNA |
| 251 | gi\|38569402 | 403 | Homo sapiens ADP-ribosylation factor-like 3 (ARL3), mRNA |
| 252 | gi\|38570153 | 23567 | Homo sapiens zinc finger protein 346 (ZNF346), mRNA |
| 253 | gi\|38570154 | 64101 | Homo sapiens leucine rich repeat containing 4 (LRRC4), mRNA |
| 254 | gi\|38683847 | 9158 | Homo sapiens fibroblast growth factor (acidic) intracellular binding protein (FIBP), transcript |
| | | | variant 2, mRNA |
| 255 | gi\|38788218 | 126299 | Homo sapiens zinc finger protein 428 (ZNF428), mRNA |
| 256 | gi\|39725639 | 54973 | Homo sapiens cleavage and polyadenylation specific factor 3-like (CPSF3L), transcript variant 1, |
| | | | mRNA |
| 257 | gi\|39725712 | 5213 | Homo sapiens phosphofructokinase, muscle (PFKM), mRNA |
| 258 | gi\|39725941 | 56652 | Homo sapiens progressive external ophthalmoplegia 1 (PEO1), mRNA |
| 259 | gi\|39811997 | 166 | Homo sapiens amino-terminal enhancer of split (AES), transcript variant 2, mRNA |
| 260 | gi\|40068460 | 11344 | Homo sapiens PTK9L protein tyrosine kinase 9-like (A6-related protein) (PTK9L), mRNA |
| 261 | gi\|40217846 | 23020 | Homo sapiens activating signal cointegrator 1 complex subunit 3-like 1 (ASCC3L1), mRNA |
| 262 | gi\|40254856 | 22846 | Homo sapiens vasohibin 1 (VASH1), mRNA |
| 263 | gi\|40254860 | 9898 | Homo sapiens ubiquitin associated protein 2-like (UBAP2L), mRNA |
| 264 | gi\|40254865 | 25978 | Homo sapiens chromatin modifying protein 2B (CHMP2B), mRNA |
| 265 | gi\|40255056 | 116372 | Homo sapiens LY6/PLAUR domain containing 1 (LYPD1), mRNA |
| 266 | gi\|40255100 | 91252 | Homo sapiens solute carrier family 39 (zinc transporter), member 13 (SLC39A13), mRNA |
| 267 | gi\|40288188 | 64236 | Homo sapiens PDZ and LIM domain 2 (mystique) (PDLIM2), transcript variant 2, mRNA |
| 268 | gi\|40353202 | 57184 | Homo sapiens chromosome 15 open reading frame 17 (C15orf17), mRNA |
| 269 | gi\|40806168 | 6683 | Homo sapiens spastin (SPAST), transcript variant 1, mRNA |
| 270 | gi\|41281370 | 2224 | Homo sapiens farnesyl diphosphate synthase (farnesyl pyrophosphate synthetase, |
| | | | dimethylallyltranstransferase, geranyltranstransferase) (FDPS), mRNA |
| 271 | gi\|41281380 | 9902 | Homo sapiens mannose receptor, C type 2 (MRC2), mRNA |
| 272 | gi\|41281440 | 9726 | Homo sapiens zinc finger protein 646 (ZNF646), mRNA |
| 273 | gi\|41281446 | 9742 | Homo sapiens intraflagellar transport 140 homolog (Chlamydomonas) (IFT140), mRNA |
| 274 | gi\|41281472 | 9772 | Homo sapiens KIAA0195 (KIAA0195), mRNA |
| 275 | gi\|41327758 | 539 | Homo sapiens ATP synthase, H+ transporting, mitochondrial F1 complex, O subunit (oligomycin |
| | | | sensitivity conferring protein) (ATP5O), nuclear gene encoding mitochondrial protein, mRNA |
| 276 | gi\|41327778 | 57696 | Homo sapiens DEAD (Asp-Glu-Ala-Asp) box polypeptide 55 (DDX55), mRNA |
| 277 | gi\|41327780 | 25915 | Homo sapiens chromosome 3 open reading frame 60 (C3orf60), transcript variant 1, mRNA |
| 278 | gi\|41352715 | 8568 | Homo sapiens DNA segment on chromosome 21 (unique) 2056 expressed sequence |
| | | | (D21S2056E), mRNA |
| 279 | gi\|41352716 | 51366 | Homo sapiens E3 ubiquitin protein ligase, HECT domain containing, 1 (EDD1), mRNA |
| 280 | gi\|41393546 | 51594 | Homo sapiens neuroblastoma-amplified protein (NAG), mRNA |
| 281 | gi\|41872373 | 1263 | Homo sapiens polo-like kinase 3 (Drosophila) (PLK3), mRNA |
| 282 | gi\|41872408 | 5473 | Homo sapiens pro-platelet basic protein (chemokine (C-X-C motif) ligand 7) (PPBP), mRNA |
| 283 | gi\|41872442 | 26133 | Homo sapiens transient receptor potential cation channel, subfamily C, member 4 associated |
| | | | protein (TRPC4AP), transcript variant 2, mRNA |
| 284 | gi\|42415528 | 6508 | Homo sapiens solute carrier family 4, anion exchanger, member 3 (SLC4A3), transcript variant 2, |
| | | | mRNA |
| 285 | gi\|42476205 | 51308 | Homo sapiens receptor accessory protein 2 (REEP2), mRNA |
| 286 | gi\|42544225 | 57617 | Homo sapiens vacuolar protein sorting protein 18 (VPS18), mRNA |
| 287 | gi\|42544228 | 7186 | Homo sapiens TNF receptor-associated factor 2 (TRAF2), mRNA |
| 288 | gi\|42544230 | 10446 | Homo sapiens leucine rich repeat neuronal 5 (LRRN5), transcript variant 1, mRNA |
| 289 | gi\|42734423 | 10213 | Homo sapiens proteasome (prosome, macropain) 26S subunit, non-ATPase, 14 (PSMD14), |
| | | | mRNA |
| 290 | gi\|42734433 | 79639 | Homo sapiens transmembrane protein 53 (TMEM53), mRNA |
| 291 | gi\|44888817 | 22982 | Homo sapiens DIP2 disco-interacting protein 2 homolog C (Drosophila) (DIP2C), mRNA |
| 292 | gi\|44890060 | 5479 | Homo sapiens peptidylprolyl isomerase B (cyclophilin B) (PPIB), mRNA |
| 293 | gi\|44955913 | 9170 | Homo sapiens endothelial differentiation, lysophosphatidic acid G-protein-coupled receptor, 4 |
| | | | (EDG4), mRNA |
| 294 | gi\|4502368 | 8424 | Homo sapiens butyrobetaine (gamma), 2-oxoglutarate dioxygenase (gamma-butyrobetaine |
| | | | hydroxylase) 1 (BBOX1), mRNA |
| 295 | gi\|4502884 | 1198 | Homo sapiens CDC-like kinase 3 (CLK3), transcript variant phclk3, mRNA |
| 296 | gi\|4503970 | 2664 | Homo sapiens GDP dissociation inhibitor 1 (GDI1), mRNA |
| 297 | gi\|4505650 | 5833 | Homo sapiens phosphate cytidylyltransferase 2, ethanolamine (PCYT2), mRNA |
| 298 | gi\|4505940 | 5431 | Homo sapiens polymerase (RNA) II (DNA directed) polypeptide B, 140 kDa (POLR2B), mRNA |
| 299 | gi\|4506138 | 5119 | Homo sapiens procollagen (type III) N-endopeptidase (PCOLN3), mRNA |
| 300 | gi\|4506756 | 6262 | Homo sapiens ryanodine receptor 2 (cardiac) (RYR2), mRNA |
| 301 | gi\|4506890 | 6418 | Homo sapiens SET translocation (myeloid leukemia-associated) (SET), mRNA |
| 302 | gi\|4507520 | 7086 | Homo sapiens transketolase (Wernicke-Korsakoff syndrome) (TKT), mRNA |
| 303 | gi\|4507668 | 7178 | Homo sapiens tumor protein, translationally-controlled 1 (TPT1), mRNA |
| 304 | gi\|45433546 | 57513 | Homo sapiens CASK interacting protein 2 (CASKIN2), mRNA |
| 305 | gi\|45439320 | 5481 | Homo sapiens peptidylprolyl isomerase D (cyclophilin D) (PPID), mRNA |
| 306 | gi\|4557618 | 2632 | Homo sapiens glucan (1,4-alpha-), branching enzyme 1 (glycogen branching enzyme, Andersen |
| | | | disease, glycogen storage disease type IV) (GBE1), mRNA |
| 307 | gi\|4557692 | 3795 | Homo sapiens ketohexokinase (fructokinase) (KHK), transcript variant a, mRNA |
| 308 | gi\|4557808 | 4942 | Homo sapiens ornithine aminotransferase (gyrate atrophy) (OAT), nuclear gene encoding |
| | | | mitochondrial protein, mRNA |
| 309 | gi\|45593139 | 54676 | Homo sapiens GTP binding protein 2 (GTPBP2), mRNA |
| 310 | gi\|46094059 | 27018 | Homo sapiens nerve growth factor receptor (TNFRSF16) associated protein 1 (NGFRAP1), |
| | | | transcript variant 2, mRNA |
| 311 | gi\|46195756 | 114826 | Homo sapiens SET and MYND domain containing 4 (SMYD4), mRNA |
| 312 | gi\|46255048 | 3275 | Homo sapiens protein arginine methyltransferase 2 (PRMT2), transcript variant 1, mRNA |
| 313 | gi\|46359074 | 23090 | Homo sapiens zinc finger protein 423 (ZNF423), mRNA |
| 314 | gi\|46488918 | 23245 | Homo sapiens astrotactin 2 (ASTN2), transcript variant 3, mRNA |
| 315 | gi\|46592990 | 56850 | Homo sapiens GRIP1 associated protein 1 (GRIPAP1), transcript variant 1, mRNA |
| 316 | gi\|46909599 | 8751 | Homo sapiens ADAM metallopeptidase domain 15 (metargidin) (ADAM15), transcript variant 6, |
| | | | mRNA |
| 317 | gi\|47078217 | 20 | Homo sapiens ATP-binding cassette, sub-family A (ABC1), member 2 (ABCA2), transcript variant |
| | | | 2, mRNA |
| 318 | gi\|47078257 | 8702 | Homo sapiens UDP-Gal: betaGlcNAc beta 1,4-galactosyltransferase, polypeptide 4 (B4GALT4), |
| | | | transcript variant 1, mRNA |
| 319 | gi\|47078275 | 1119 | Homo sapiens choline kinase alpha (CHKA), transcript variant 1, mRNA |
| 320 | gi\|47132610 | 23192 | Homo sapiens ATG4 autophagy related 4 homolog B (S. cerevisiae) (ATG4B), transcript variant |
| | | | 1, mRNA |
| 321 | gi\|47174863 | 56915 | Homo sapiens exosome component 5 (EXOSC5), mRNA |
| 322 | gi\|47271442 | 6427 | Homo sapiens splicing factor, arginine/serine-rich 2 (SFRS2), mRNA |
| 323 | gi\|4757805 | 9605 | Homo sapiens chromosome 16 open reading frame 7 (C16orf7), mRNA |
| 324 | gi\|47578121 | 51566 | Homo sapiens armadillo repeat containing, X-linked 3 (ARMCX3), transcript variant 3, mRNA |
| 325 | gi\|4758119 | 1611 | Homo sapiens death-associated protein (DAP), mRNA |
| 326 | gi\|4758559 | 9410 | Homo sapiens WD repeat domain 57 (U5 snRNP specific) (WDR57), mRNA |
| 327 | gi\|4758955 | 9256 | Homo sapiens benzodiazapine receptor (peripheral) associated protein 1 (BZRAP1), mRNA |
| 328 | gi\|48255932 | 3150 | Homo sapiens high-mobility group nucleosome binding domain 1 (HMGN1), mRNA |
| 329 | gi\|48255950 | 491 | Homo sapiens ATPase, Ca++ transporting, plasma membrane 2 (ATP2B2), transcript variant 1, |
| | | | mRNA |
| 330 | gi\|4826959 | 5859 | Homo sapiens glutaminyl-tRNA synthetase (QARS), mRNA |
| 331 | gi\|48762680 | 476 | Homo sapiens ATPase, Na+/K+ transporting, alpha 1 polypeptide (ATP1A1), transcript variant 1, |
| | | | mRNA |
| 332 | gi\|48762925 | 5822 | Homo sapiens PWP2 periodic tryptophan protein homolog (yeast) (PWP2H), mRNA |
| 333 | gi\|4885584 | 10055 | Homo sapiens SUMO-1 activating enzyme subunit 1 (SAE1), mRNA |
| 334 | gi\|48976060 | 80724 | Homo sapiens acyl-Coenzyme A dehydrogenase family, member 10 (ACAD10), mRNA |
| 335 | gi\|49472840 | 26993 | Homo sapiens A kinase (PRKA) anchor protein 8-like (AKAP8L), mRNA |
| 336 | gi\|49574501 | 51706 | Homo sapiens cytochrome b5 reductase 1 (CYB5R1), mRNA |
| 337 | gi\|5031892 | 10062 | Homo sapiens nuclear receptor subfamily 1, group H, member 3 (NR1H3), mRNA |
| 338 | gi\|50345980 | 498 | Homo sapiens ATP synthase, H+ transporting, mitochondrial F1 complex, alpha subunit 1, |
| | | | cardiac muscle (ATP5A1), nuclear gene encoding mitochondrial protein, transcript variant 2, |
| | | | mRNA |
| 339 | gi\|50346004 | 5211 | Homo sapiens phosphofructokinase, liver (PFKL), transcript variant 1, mRNA |
| 340 | gi\|50363222 | 79005 | Homo sapiens sodium channel modifier 1 (SCNM1), transcript variant 1, mRNA |
| 341 | gi\|50409737 | 51329 | Homo sapiens ADP-ribosylation-like factor 6 interacting protein 4 (ARL6IP4), transcript variant 3, |
| | | | mRNA |
| 342 | gi\|50726984 | 51466 | Homo sapiens Enah/Vasp-like (EVL), mRNA |
| 343 | gi\|50811881 | 2820 | Homo sapiens glycerol-3-phosphate dehydrogenase 2 (mitochondrial) (GPD2), mRNA |
| 344 | gi\|50811906 | 1808 | Homo sapiens dihydropyrimidinase-like 2 (DPYSL2), mRNA |
| 345 | gi\|51093838 | 51386 | Homo sapiens eukaryotic translation initiation factor 3, subunit 6 interacting protein (EIF3S6IP), |
| | | | mRNA |
| 346 | gi\|51317356 | 10226 | Homo sapiens mannose-6-phosphate receptor binding protein 1 (M6PRBP1), mRNA |
| 347 | gi\|51464027 | | Homo sapiens chromosome 3 genomic contig, reference assembly |
| 348 | gi\|51467962 | | Homo sapiens chromosome 10 genomic contig, reference assembly |
| 349 | gi\|51477712 | 11253 | Homo sapiens mannosidase, alpha, class 1B, member 1 (MAN1B1), mRNA |
| 350 | gi\|51702205 | 254428 | Homo sapiens solute carrier family 41, member 1 (SLC41A1), mRNA |
| 351 | gi\|5174456 | 10403 | Homo sapiens kinetochore associated 2 (KNTC2), mRNA |
| 352 | gi\|51944964 | 10550 | Homo sapiens ADP-ribosylation-like factor 6 interacting protein 5 (ARL6IP5), mRNA |
| 353 | gi\|51972237 | 440400 | Homo sapiens similar to DNA segment, Chr 11, Brigham & Womens Genetics 0434 expressed |
| | | | (MGC71993), mRNA |
| 354 | gi\|52145308 | 84894 | Homo sapiens leucine rich repeat neuronal 6A (LRRN6A), mRNA |
| 355 | gi\|52426770 | 3105 | Homo sapiens major histocompatibility complex, class I, A (HLA-A), mRNA |
| 356 | gi\|52486264 | 9240 | Homo sapiens paraneoplastic antigen MA1 (PNMA1), mRNA |
| 357 | gi\|52856412 | 51118 | Homo sapiens UTP11-like, U3 small nucleolar ribonucleoprotein, (yeast) (UTP11L), mRNA |
| 358 | gi\|53749664 | 7025 | Homo sapiens nuclear receptor subfamily 2, group F, member 1 (NR2F1), mRNA |
| 359 | gi\|53759067 | 92979 | Homo sapiens membrane-associated ring finger (C3HC4) 9 (MARCH9), mRNA |
| 360 | gi\|53832010 | 8912 | Homo sapiens calcium channel, voltage-dependent, alpha 1H subunit (CACNA1H), transcript |
| | | | variant 2, mRNA |
| 361 | gi\|54112408 | 56005 | Homo sapiens chromosome 19 open reading frame 10 (C19orf10), mRNA |
| 362 | gi\|5453564 | 10458 | Homo sapiens BAI1-associated protein 2 (BAIAP2), transcript variant 3, mRNA |
| 363 | gi\|5453765 | 4753 | Homo sapiens NEL-like 2 (chicken) (NELL2), mRNA |
| 364 | gi\|5454057 | 6484 | Homo sapiens ST3 beta-galactoside alpha-2,3-sialyltransferase 4 (ST3GAL4), mRNA |
| 365 | gi\|5454161 | 10628 | Homo sapiens thioredoxin interacting protein (TXNIP), mRNA |
| 366 | gi\|54607107 | 83637 | Homo sapiens zinc finger, MIZ-type containing 2 (ZMIZ2), transcript variant 1, mRNA |
| 367 | gi\|55741674 | 22889 | Homo sapiens KIAA0907 (KIAA0907), mRNA |
| 368 | gi\|55741856 | 25981 | Homo sapiens dynein, axonemal, heavy chain 1 (DNAH1), mRNA |
| 369 | gi\|55742814 | 27154 | Homo sapiens bromodomain and PHD finger containing, 3 (BRPF3), mRNA |
| 370 | gi\|55749725 | 57542 | Homo sapiens kelch domain containing 5 (KLHDC5), mRNA |
| 371 | gi\|55749880 | 8562 | Homo sapiens density-regulated protein (DENR), mRNA |
| 372 | gi\|55749916 | 9681 | Homo sapiens DEP domain containing 5 (DEPDC5), transcript variant 1, mRNA |
| 373 | gi\|55769569 | 84911 | Homo sapiens zinc finger protein 382 (ZNF382), mRNA |
| 374 | gi\|55925575 | 3485 | Homo sapiens insulin-like growth factor binding protein 2, 36 kDa (IGFBP2), mRNA |
| 375 | gi\|55925651 | 51186 | Homo sapiens WW domain binding protein 5 (WBP5), transcript variant 1, mRNA |
| 376 | gi\|55956785 | 9814 | Homo sapiens Sfi1 homolog, spindle assembly associated (yeast) (SFI1), transcript variant 1, |
| | | | mRNA |
| 377 | gi\|56676386 | 23423 | Homo sapiens transmembrane emp24 protein transport domain containing 3 (TMED3), mRNA |
| 378 | gi\|56699487 | 9612 | Homo sapiens nuclear receptor co-repressor 2 (NCOR2), mRNA |
| 379 | gi\|56788363 | 85378 | Homo sapiens tubulin, gamma complex associated protein 6 (TUBGCP6), transcript variant 1, |
| | | | mRNA |
| 380 | gi\|57242795 | 10765 | Homo sapiens jumonji, AT rich interactive domain 1B (JARID1B), mRNA |
| 381 | gi\|5729771 | 1203 | Homo sapiens ceroid-lipofuscinosis, neuronal 5 (CLN5), mRNA |
| 382 | gi\|5730084 | 6993 | Homo sapiens dynein, light chain, Tctex-type 1 (DYNLT1), mRNA |
| 383 | gi\|57634538 | 6625 | Homo sapiens small nuclear ribonucleoprotein 70 kDa polypeptide (RNP antigen) (SNRP70), |
| | | | transcript variant 2, mRNA |
| 384 | gi\|57770467 | 146712 | Homo sapiens UDP-GlcNAc: betaGal beta-1,3-N-acetylglucosaminyltransferase-like 1 |
| | | | (B3GNTL1), mRNA |
| 385 | gi\|57863256 | 6950 | Homo sapiens t-complex 1 (TCP1), transcript variant 1, mRNA |
| 386 | gi\|57863280 | 56917 | Homo sapiens Meis1, myeloid ecotropic viral integration site 1 homolog 3 (mouse) (MEIS3), |
| | | | transcript variant 1, mRNA |
| 387 | gi\|57863294 | 23313 | Homo sapiens chromosome 22 open reading frame 9 (C22orf9), transcript variant 2, mRNA |
| 388 | gi\|57863311 | 54963 | Homo sapiens uridine-cytidine kinase 1-like 1 (UCKL1), mRNA |
| 389 | gi\|58331162 | 26147 | Homo sapiens PHD finger protein 19 (PHF19), transcript variant 2, mRNA |
| 390 | gi\|58331183 | 10574 | Homo sapiens chaperonin containing TCP1, subunit 7 (eta) (CCT7), transcript variant 1, mRNA |
| 391 | gi\|58331234 | 64411 | Homo sapiens centaurin, delta 3 (CENTD3), mRNA |
| 392 | gi\|58331236 | 55816 | Homo sapiens docking protein 5 (DOK5), mRNA |
| 393 | gi\|58530880 | 9077 | Homo sapiens DIRAS family, GTP-binding RAS-like 3 (DIRAS3), mRNA |
| 394 | gi\|58761485 | 7203 | Homo sapiens chaperonin containing TCP1, subunit 3 (gamma) (CCT3), transcript variant 2, |
| | | | mRNA |
| 395 | gi\|59889569 | 11051 | Homo sapiens nudix (nucleoside diphosphate linked moiety X)-type motif 21 (NUDT21), mRNA |
| 396 | gi\|6005965 | 7705 | Homo sapiens zinc finger protein 146 (ZNF146), mRNA |
| 397 | gi\|6005992 | 1211 | Homo sapiens clathrin, light polypeptide (Lca) (CLTA), transcript variant brain-specific, mRNA |
| 398 | gi\|60498972 | 23040 | Homo sapiens myelin transcription factor 1-like (MYT1L), mRNA |
| 399 | gi\|60499005 | 9570 | Homo sapiens golgi SNAP receptor complex member 2 (GOSR2), transcript variant A, mRNA |
| 400 | gi\|61744459 | 11091 | Homo sapiens WD repeat domain 5 (WDR5), transcript variant 1, mRNA |
| 401 | gi\|61966896 | 441208 | Homo sapiens hypothetical gene supported by AK094370 (LOC441208), mRNA |
| 402 | gi\|62240999 | 975 | Homo sapiens CD81 molecule (CD81), mRNA |
| 403 | gi\|62241007 | 1428 | Homo sapiens crystallin, mu (CRYM), transcript variant 2, mRNA |
| 404 | gi\|62241021 | 11269 | Homo sapiens DEAD (Asp-Glu-Ala-As) box polypeptide 19B (DDX19B), transcript variant 3, |
| | | | mRNA |
| 405 | gi\|62388887 | 3767 | Homo sapiens potassium inwardly-rectifying channel, subfamily J, member 11 (KCNJ11), mRNA |
| 406 | gi\|62388891 | 3838 | Homo sapiens karyopherin alpha 2 (RAG cohort 1, importin alpha 1) (KPNA2), mRNA |
| 407 | gi\|62530390 | 6414 | Homo sapiens selenoprotein P, plasma, 1 (SEPP1), mRNA |
| 408 | gi\|63079686 | 6468 | Homo sapiens F-box and WD-40 domain protein 4 (FBXW4), mRNA |
| 409 | gi\|63162571 | 7203 | Homo sapiens chaperonin containing TCP1, subunit 3 (gamma) (CCT3), transcript variant 1, |
| | | | mRNA |
| 410 | gi\|64085030 | 5395 | Homo sapiens PMS2 postmeiotic segregation increased 2 (S. cerevisiae) (PMS2), transcript |
| | | | variant 1, mRNA |
| 411 | gi\|66346686 | 27122 | Homo sapiens dickkopf homolog 3 (Xenopus laevis) (DKK3), transcript variant 1, mRNA |
| 412 | gi\|66472381 | 11188 | Homo sapiens nischarin (NISCH), mRNA |
| 413 | gi\|66932946 | 2 | Homo sapiens alpha-2-macroglobulin (A2M), mRNA |
| 414 | gi\|66933015 | 3615 | Homo sapiens IMP (inosine monophosphate) dehydrogenase 2 (IMPDH2), mRNA |
| 415 | gi\|67906819 | 7936 | Homo sapiens RD RNA binding protein (RDBP), mRNA |
| 416 | gi\|68160909 | 6208 | Homo sapiens ribosomal protein S14 (RPS14), transcript variant 3, mRNA |
| 417 | gi\|68216257 | 6143 | Homo sapiens ribosomal protein L19 (RPL19), mRNA |
| 418 | gi\|68533248 | 55859 | Homo sapiens brain expressed, X-linked 1 (BEX1), mRNA |
| 419 | gi\|6857798 | 10857 | Homo sapiens progesterone receptor membrane component 1 (PGRMC1), mRNA |
| 420 | gi\|68800342 | 3654 | Homo sapiens interleukin-1 receptor-associated kinase 1 (IRAK1), transcript variant 2, mRNA |
| 421 | gi\|6912481 | 3954 | Homo sapiens leucine zipper-EF-hand containing transmembrane protein 1 (LETM1), mRNA |
| 422 | gi\|69354670 | 23 | Homo sapiens ATP-binding cassette, sub-family F (GCN20), member 1 (ABCF1), transcript |
| | | | variant 1, mRNA |
| 423 | gi\|69885083 | 1877 | Homo sapiens E4F transcription factor 1 (E4F1), mRNA |
| 424 | gi\|70609879 | 3921 | Homo sapiens ribosomal protein SA (RPSA), transcript variant 1, mRNA |
| 425 | gi\|70778814 | 9581 | Homo sapiens prolyl endopeptidase-like (PREPL), mRNA |
| 426 | gi\|70906438 | 2266 | Homo sapiens fibrinogen gamma chain (FGG), transcript variant gamma-B, mRNA |
| 427 | gi\|71164870 | 10658 | Homo sapiens CUG triplet repeat, RNA binding protein 1 (CUGBP1), transcript variant 3, mRNA |
| 428 | gi\|71164880 | 6201 | Homo sapiens ribosomal protein S7 (RPS7), mRNA |
| 429 | gi\|71164882 | 7443 | Homo sapiens vaccinia related kinase 1 (VRK1), mRNA |
| 430 | gi\|71482588 | 6217 | Homo sapiens ribosomal protein S16 (RPS16), mRNA |
| 431 | gi\|71565153 | 128 | Homo sapiens alcohol dehydrogenase 5 (class III), chi polypeptide (ADH5), mRNA |
| 432 | gi\|71772514 | 6228 | Homo sapiens ribosomal protein S23 (RPS23), mRNA |
| 433 | gi\|72534753 | 112812 | Homo sapiens similar to RIKEN cDNA B230118G17 gene (MGC19604), transcript variant 1, |
| | | | mRNA |
| 434 | gi\|73695875 | 2483 | Homo sapiens FSHD region gene 1 (FRG1), mRNA |
| 435 | gi\|73747843 | 3980 | Homo sapiens ligase III, DNA, ATP-dependent (LIG3), nuclear gene encoding mitochondrial |
| | | | protein, transcript variant beta, mRNA |
| 436 | gi\|7382489 | 8694 | Homo sapiens diacylglycerol O-acyltransferase homolog 1 (mouse) (DGAT1), mRNA |
| 437 | gi\|74229006 | 3192 | Homo sapiens heterogeneous nuclear ribonucleoprotein U (scaffold attachment factor A) |
| | | | (HNRPU), transcript variant 2, mRNA |
| 438 | gi\|74229024 | 91304 | Homo sapiens chromosome 19 open reading frame 6 (C19orf6), transcript variant 1, mRNA |
| 439 | gi\|74271817 | 79415 | Homo sapiens chromosome 17 open reading frame 62 (C17orf62), mRNA |
| 440 | gi\|75813624 | 4773 | Homo sapiens nuclear factor of activated T-cells, cytoplasmic calcineurin-dependent 2 |
| | | | (NFATC2), transcript variant 1, mRNA |
| 441 | gi\|75992939 | 8237 | Homo sapiens ubiquitin specific peptidase 11 (USP11), mRNA |
| 442 | gi\|76150622 | 4839 | Homo sapiens nucleolar protein 1, 120 kDa (NOL1), transcript variant 1, mRNA |
| 443 | gi\|76257390 | 84196 | Homo sapiens ubiquitin specific peptidase 48 (USP48), transcript variant 1, mRNA |
| 444 | gi\|7657016 | 25832 | Homo sapiens neuroblastoma breakpoint family, member 14 (NBPF14), mRNA |
| 445 | gi\|7657121 | 50628 | Homo sapiens gem (nuclear organelle) associated protein 4 (GEMIN4), mRNA |
| 446 | gi\|7657133 | 8443 | Homo sapiens glyceronephosphate O-acyltransferase (GNPAT), mRNA |
| 447 | gi\|7657479 | 27069 | Homo sapiens growth hormone inducible transmembrane protein (GHITM), mRNA |
| 448 | gi\|7661727 | 28956 | Homo sapiens mitogen-activated protein-binding protein-interacting protein (MAPBPIP), mRNA |
| 449 | gi\|7661743 | 28969 | Homo sapiens basic leucine zipper and W2 domains 2 (BZW2), mRNA |
| 450 | gi\|7662309 | 9855 | Homo sapiens FERM, RhoGEF and pleckstrin domain protein 2 (FARP2), mRNA |
| 451 | gi\|7669500 | 3916 | Homo sapiens lysosomal-associated membrane protein 1 (LAMP1), mRNA |
| 452 | gi\|7706090 | 51283 | Homo sapiens bifunctional apoptosis regulator (BFAR), mRNA |
| 453 | gi\|7706588 | 2778 | Homo sapiens GNAS complex locus (GNAS), transcript variant 4, mRNA |
| 454 | gi\|77695910 | 7073 | Homo sapiens TIA1 cytotoxic granule-associated RNA binding protein-like 1 (TIAL1), transcript |
| | | | variant 1, mRNA |
| 455 | gi\|78000182 | 9045 | Homo sapiens ribosomal protein L14 (RPL14), transcript variant 1, mRNA |
| 456 | gi\|78190460 | 6147 | Homo sapiens ribosomal protein L23a (RPL23A), mRNA |
| 457 | gi\|78190461 | 6155 | Homo sapiens ribosomal protein L27 (RPL27), mRNA |
| 458 | gi\|78190465 | 6144 | Homo sapiens ribosomal protein L21 (RPL21), mRNA |
| 459 | gi\|78482615 | 2976 | Homo sapiens general transcription factor IIIC, polypeptide 2, beta 110 kDa (GTF3C2), transcript |
| | | | variant 1, mRNA |
| 460 | gi\|82546842 | 613 | Homo sapiens breakpoint duster region (BCR), transcript variant 1, mRNA |
| 461 | gi\|82617635 | 26999 | Homo sapiens cytoplasmic FMR1 interacting protein 2 (CYFIP2), transcript variant 2, mRNA |
| 462 | gi\|83376127 | 1933 | Homo sapiens eukaryotic translation elongation factor 1 beta 2 (EEF1B2), transcript variant 1, |
| | | | mRNA |
| 463 | gi\|83641893 | 3178 | Homo sapiens heterogeneous nuclear ribonucleoprotein A1 (HNRPA1), transcript variant 1, |
| | | | mRNA |
| 464 | gi\|83700221 | 9453 | Homo sapiens geranylgeranyl diphosphate synthase 1 (GGPS1), transcript variant 1, mRNA |
| 465 | gi\|83700234 | 1974 | Homo sapiens eukaryotic translation initiation factor 4A, isoform 2 (EIF4A2), mRNA |
| 466 | gi\|83779009 | 79048 | Homo sapiens SECIS binding protein 2 (SECISBP2), mRNA |
| 467 | gi\|86198309 | 123096 | Homo sapiens solute carrier family 25, member 29 (SLC25A29), transcript variant 1, mRNA |
| 468 | gi\|86198319 | 123096 | Homo sapiens solute carrier family 25, member 29 (SLC25A29), transcript variant 2, mRNA |
| 469 | gi\|86792636 | 533 | Homo sapiens ATPase, H+ transporting, lysosomal 21 kDa, V0 subunit b (ATP6V0B), transcript |
| | | | variant 1, mRNA |
| 470 | gi\|87159809 | 526 | Homo sapiens ATPase, H+ transporting, lysosomal 56/58 kDa, V1 subunit B2 (ATP6V1B2), |
| | | | mRNA |
| 471 | gi\|88758569 | 155400 | Homo sapiens NOL1/NOP2/Sun domain family, member 58 (NSUN5B), transcript variant 1, |
| | | | mRNA |
| 472 | gi\|88900496 | 23174 | Homo sapiens zinc finger, CCHC domain containing 14 (ZCCHC14), mRNA |
| 473 | gi\|88954355 | | Homo sapiens chromosome 2 genomic contig, reference assembly |
| 474 | gi\|88958353 | | Homo sapiens chromosome 2 genomic contig, alternate assembly (based on Celera assembly) |
| 475 | gi\|89034479 | | Homo sapiens chromosome 11 genomic contig, alternate assembly (based on Celera assembly) |
| 476 | gi\|89039160 | | Homo sapiens chromosome 15 genomic contig, alternate assembly (based on Celera assembly) |
| 477 | gi\|89040674 | | Homo sapiens chromosome 16 genomic contig, alternate assembly (based on Celera assembly) |
| 478 | gi\|89059047 | | Homo sapiens chromosome 22 genomic contig, reference assembly |
| 479 | gi\|89059140 | | Homo sapiens chromosome 22 genomic contig, alternate assembly (based on Celera assembly) |
| 480 | gi\|8922070 | 55565 | Homo sapiens hypothetical protein LOC55565 (LOC55565), mRNA |
| 481 | gi\|8922226 | 55068 | Homo sapiens proliferation-inducing protein 38 (PIG38), mRNA |
| 482 | gi\|8922727 | 55248 | Homo sapiens chromosome 1 open reading frame 75 (C1orf75), mRNA |
| 483 | gi\|8922734 | 55250 | Homo sapiens signal transducer and activator of transcription 3 interacting protein 1 (STATIP1), |
| | | | mRNA |
| 484 | gi\|8922866 | 55776 | Homo sapiens chromosome 6 open reading frame 64 (C6orf64), mRNA |
| 485 | gi\|8923416 | 54936 | Homo sapiens ADP-ribosylhydrolase like 2 (ADPRHL2), mRNA |
| 486 | gi\|89276753 | 2934 | Homo sapiens gelsolin (amyloidosis, Finnish type) (GSN), transcript variant 1, mRNA |
| 487 | gi\|89886487 | 9899 | Homo sapiens synaptic vesicle glycoprotein 2B (SV2B), mRNA |
| 488 | gi\|91208424 | 24148 | Homo sapiens PRP6 pre-mRNA processing factor 6 homolog (S. cerevisiae) (PRPF6), mRNA |
| 489 | gi\|91718898 | 5595 | Homo sapiens mitogen-activated protein kinase 3 (MAPK3), transcript variant 1, mRNA |
| 490 | gi\|91823780 | 389524 | Homo sapiens GTF2I repeat domain containing 2B (GTF2IRD2B), mRNA |
| 491 | gi\|92091570 | 83992 | Homo sapiens cortactin binding protein 2 (CTTNBP2), mRNA |
| 492 | gi\|92091577 | 11041 | Homo sapiens UDP-GlcNAc: betaGal beta-1,3-N-acetylglucosaminyltransferase 1 (B3GNT1), |
| | | | mRNA |
| 493 | gi\|92091602 | 116985 | Homo sapiens centaurin, delta 2 (CENTD2), transcript variant 2, mRNA |
| 494 | gi\|93141038 | 4899 | Homo sapiens nuclear respiratory factor 1 (NRF1), transcript variant 2, mRNA |
| 495 | gi\|93204870 | 59277 | Homo sapiens netrin 4 (NTN4), mRNA |
| 496 | gi\|93277120 | 83694 | Homo sapiens ribosomal protein S6 kinase-like 1 (RPS6KL1), mRNA |
| 497 | gi\|93277121 | 5936 | Homo sapiens RNA binding motif protein 4 (RBM4), mRNA |
| 498 | gi\|94538321 | 3029 | Homo sapiens hydroxyacylglutathione hydrolase (HAGH), transcript variant 1, mRNA |
| 499 | gi\|94538348 | 5217 | Homo sapiens profilin 2 (PFN2), transcript variant 1, mRNA |
| 500 | gi\|94721355 | 5447 | Homo sapiens P450 (cytochrome) oxidoreductase (POR), mRNA |
| 501 | gi\|9845292 | 9985 | Homo sapiens REC8-like 1 (yeast) (REC8L1), mRNA |
| 502 | gi\|9955964 | 11194 | Homo sapiens ATP-binding cassette, sub-family B (MDR/TAP), member 8 (ABCB8), nuclear |
| | | | gene encoding mitochondrial protein, mRNA |

The application's sequence listing, which the Patent Office published only in electronic form, follows.

SEQUENCE LISTING (1004 sequences)

SEQ ID NO: 1 - DNA, 3374 bp, Homo Sapiens
gcggccgccgcccccgggctggggtttgggggaccgagccgctccgggttcgggatgctgaggagaccgcgggcccgcgccagcctcccacacacacacactctcccggcgcctcggccggccgggcgcggtgtgcaggggtgaggcggtgtctccaggctgaggagggacgcggaggagggtccggcgcggccccgggactggagggtgagtccctcacaaagggcggagcggggctgtcacctggagatcacggagggaagttcatccatgagctcggatttcccacattacaacttcaggatgcctaatattggattccagaatctgcctctcaacatatatattgtggtttttggtactgctatatttgtcttcatccttagtttactcttctgttgctacttgattaggctaagacatcaagcacacaaagaattttatgcctacaaacaggttatattaaaagagaaagtaaaagaattgaatttacatgagctctgtgcagtgtgcctagaagacttcaagcctcgagatgagttggggatttgcccatgtaagcacgccttccacagaaagtgccttattaagtggctggaggttcgtaaagtgtgtcccctgtgcaacatgccagttctacagctggcccagttgcacagtaagcaggaccgtggaccccctcaggggccccttcctggggcagagaacattgtatagcttaccgcaaggatcagactgttgctggacacgacgtctgtgtggagccaggaggaacacatgtggtgtctgtatggctgctctctacctaggacaccagctgccacttcttttgcctcatgaagaactcttgggccagccaaactgggaacctaggtgtctgggtcttgtgacaaccaaagcactttgacactaccccctgccgagagaagaggagtggatgagcctgcgggtttgcctcaagaaacttcatgagggtctcttactaactccattacactctctctcctggagcctcatctccatgtcaagcaggagggtaaagaagggaactaagagcaggtctttcaagccacacccccacctgcggatggatgggtttctctgtaggccatgcaggcctttgtcgcagcaaaccttcccagcagcccttgagccaagtaaaaccagcacaaccagccaccagtggttggtgaggcagtgcccacaaggctcatgttgtatgcctttgataaggccatcttggctttgagtagcagtgttcctcgtcacccatttccccctcaggattacaacacctgctatcaaatcatctaagctgaaaacatgagatgcgcttggaaaggcctagtcagaagccatttcctcttatcatttccctctcctatgcaccagtaaggcccgtccagagccccagcagggagtgggccctgagtccacactgtccctgagtgatccaggaggctgcccacatccccacatgtgcactgtggttccagtgtagctgctgtgagcccactgccactgcctcagaagggagccactgtgaacctctcgagtggctccaaagagcagtggctttttgagaatggcccatacttctggcccggctggatgaagggaatgccgaccctttggcctctccccctccttccatctcttctctctcttgccctatctctctttctacttcagaaaaaaaaaaaaaaaaaaaaaaaagcctgtcattcactttttaacactttatcccaaataagatccctgtgtaattctgaagctggtgatccacttggaattgtagatagtttcaggaagctcctgcagggctgtccaccgttggtgtgtgcctcagtatttggacttccgaaactgaaagtgaaagtgtctttataggagagaaacgcatgctgctctttggctctttctgtccaacttttctagaaatgactcaaagtccattaagatttgtgaatattgtataaattagctatggaaagtagcaggtcagatggaaaattcttttccacagccctgctctccgcctccctccatcttaggagcgcctgcctcaattcctcgtcaactgctttgctccactccatcccacaggtgtgagtgggggaagtttttcattaggaatacagtctgcgtgacatggagaatggatggagggagctttgctactctgctcttggcatgactccaggatttttttctggaatccaacctctgtcctcttaggagaaggaacctgtccttggttcagatggctgggcatgaggaggaaaatttccattagtgtagaacagtgctggacagaatccggtttggaaaattacaaatccagttggtcaaaataggccatttcctatgtgtgacctattcgtggtatgccaactggactgcttcctaaacaggacgaggaaagtgaggaatatttttatatgaaagccttagcctgtctggcacccatgaaaaaaactatttatgcactcctactttcaccgtctttttgcattctctatttgtagcacaacagagttgaatgccacaaaacaccccgtttatagtgagctgttttcagtgaccaatatcagaaggaggcttgcttctggactagcctcactaattgccagcagccaccattttccatggaatggccttgggacagatgtcacctctgttatggggctctaataggaaagagaatgttttttcccttcctatgatcaatactgcaaattattgctgctcacagcttttataggattctcccaactgaaagttgcaggctttttctgtccctgtgcatcagtactaacaaaagacagcctcaccaagtctgtatatttgaacagaggcaagttaattcatccccccgtgtcagagccacaggcatgttgagggggttgatacgtagcactggaccagggcgcaaagcccagatagttccagccatgagaggagagcacaagaatgctctgcactctgcactcagcaccaccttgggtctgctttgcccagatgagggaccactaacaaccttctcagcacatgtgaatgtggactggttttaaaatgcattcattctgctaggattgggctggaagctggaacagtgagagtactttttctgctcctagtcatctccctttctcagcgtgacatcctcctgcagcaagcctagtatcactagcagtagttcctgcgactcttagcaacacaacccgaatatttgctccctgcatctgggtcctccaccaggatgggcctgcgcatctgcattgctgtacagacaaacaggccttttaatttacatcctcctttaattctcattaaaatcgcagggtttttgtttgaaaaaaaaaaaaaaaaaa

SEQ ID NO: 2 - DNA, 1955 bp, Homo Sapiens
acgcaaagcagtgtgggttgattctgaggtgcactgtgggaaagagcttgtcgctgcggtgttgctgttggagactcgattgttggtgacagcgaaagaacgataacaaaatgccggagcgagatagtgagccgttctccaaccctttggcccccgatggccacgatgtggatgatcctcactccttccaccaatcaaaactcaccaatgaagacttcaggaaacttctcatgacccccagggctgcacctacctctgcaccaccttctaagtcacgtcaccatgagatgccaagggagtacaatgaggatgaagacccagctgcacgaaggaggaaaaagaaaagttattatgccaagctacgccaacaagaaattgagagagagagagagctagcagagaagtaccgggatcgtgccaaggaacggagagatggagtgaacaaagattatgaagaaaccgagcttatcagcaccacagctaactatagggctgttggccccactgctgaggcggacaaatcagctgcagagaagagaagacagttgatccaggagtccaaattcttgggtggtgacatggaacacacccatttggtgaaaggcttggattttgctctgcttcaaaaggtacgagctgagattgccagcaaagagaaagaggaagaggaactgatggaaaagccccagaaagaaaccaagaaagatgaggatcctgaaaataaaattgaatttaaaacacgtctgggccgcaatgtttaccgaatgctttttaagagcaaagcatatgagcggaatgagttgttcctgccgggccgcatggcctatgtggtagacctggatgatgagtatgctgacacagatatccccaccactcttatccgcagcaaggctgattgccccaccatggaggcccagaccacactgaccacaaatgacattgtcattagcaagctgacccagatcctttcatacctgaggcagggaacccgtaacaagaagcttaagaagaaggataaagggaagctggaagagaagaaacctcctgaggctgacatgaatatttttgaagacattggggattacgtaccctccacaaccaagacacctcgggacaaggagcgggagagatatcgggaacgggagcgtgatcgggaaagagacagagaccgtgaccgagagcgagagcgagaacgagatcgggaacgagagcgagagcgggaccgagagagagaagaggaaaagaagagacacagctactttgagaagccaaaagtagatgatgagcccatggacgttgacaaaggacctgggtctaccaaggagttgatcaagtccatcaatgaaaagtttgctgggtctgctggctgggaaggcacagaatcgctgaagaagccagaagacaaaaagcagctgggagatttctttggcatgtccaacagttatgcagagtgctacccagccacgatggatgacatggctgtggatagtgatgaggaggtggattatagcaaaatggaccagggtaacaagaaggggcccttaggccgttgggactttgatacccaggaagaatacagcgagtatatgaacaacaaagaagctttgcccaaggctgcattccagtatggtatcaaaatgtctgaagggcggaaaaccaggcgcttcaaggaaaccaatgacaaagcagagcttgatcgccagtggaagaagattagtgcaatcattgagaagaggaagaagatggaagctgatggggttgaagtcaaaagaccaaaatactaatcactagttacaaccagagatgctccacaaggatatgctccccactgttttctttctacaatttccaaaggttgcaagatgtttttttgtggatgaatataaaattttattgtgtaattacttggttccattaaaattggttaacttgctaaaaaaaaaaaaaaaaaaaaa

SEQ ID NO: 3 - DNA, 7491 bp, Homo Sapiens
acagacgggaaggagagcaagtgggcggtttatgattctgccctgtgctggggcgagtgagctgagctctttgatttctcccaagtaaccgtgtgggtgaactgtaaactgggtgcctggcttgaccctgactctttttctctagggtgaggagttacttcaccagggcagctggctttctgccctggtggggaaagatgcccaggagaggagtaggattacaatttgggatgctagggacacgccaaagagtcggggtgccttggctttgtgttttgcaaagtcctgacaagtactcctgaaatgaacacgctgcttcattttttaaattatacttttatttgtttattattttttggccgtggatatcgcggatctagaaacggagtccacaatgtggctagggtaaaacatttttcttttctttcttaacccctccttttccctttctttttaattgggtgacacagaagccgtctttttggataatgcggtgcctgactgtcagcgttgtctaagagggaaacagcaggctcgtggagaggacctgggccaacgcaaaaaacccagcgttttgtttgctgggctgttctttgtctctagttgattttgaaaagaagatgaaaaaggaaggctcttcaggttccttcagactccagccgaatacaggttctctctcacgtgctgtaagttggataaatttctcctccttgtccaggcagacaaagaggctgtttcgcagtgatggagagctctcggtttgtgggcagcaggtggaagtggatgacgaaaactggatatacagagcccagcccagaaaagcggtttccaacctagatgaggaaagccgatggacagtccactacactgccccgtggcaccagcaggagaatgtgttccttcccaccacaagacccccctgtgttgaggacctgcaccgccaagccaagctcaacctcaaatcagtactgagggaatgcgataagttgcggcatgatggctaccgcagttctcagtactactctcagggacccacctttgcggccaacgccagcccattctgtgatgattaccaagatgaagatgaagaaacagatcaaaagtgttctctgtcttcatcagaagaagaaagatttatttccatcaggagacctaaaacaccagcctcaagtgacttctccgaccttaatactcagacgaactggaccaagtcgcttccactgccaacaccagaagagaagatgcgacagcaagcccaaacagtccaggctgacgtggtgcctattaacataactgcatcaggcactggccaagatgatgctgatggccactcagtgtacacccctgatcactactctacactaggaaggttcaatagctgtcggtctgctgggcagcgctcagaaaccagggactccagctgtcagacggaggatgtgaaggtcgtaccaccttccatgaggagaatcagggcacagaaggggcaaggcattgctgcccagatgggccacttctcaggttcctctggcaacatgtctgtgctgagcgattctgcagggatcgtattcccttcccgccttgacagtgatgctggcttccatagtcttccgcgttctggagcaagggcaaacattcagtcccttgagccgaggctgggtgccctcggccctgcaggagacatgaatggcactttcctctaccagagaggtcacccacaagcagatgaaaacttaggccatttaggaggtgcctcagggactggaacacttttgagacccaaatcccaggagttgagacacttcgagagtgaaaatataatgagcccagcgtgtgtggtttctcctcatgcaacctactccaccagcatcatcccaaatgccacactgtcttcctcttccgaggtcatcgctattcccactgctcagagtgcgggacagcgggaaagtaaaagttctggctcatcacatgcaaggataaaatccagagaccacctcatctccaggcatgctgtgaaaggtgatcctcagtctcccggtcgccactggaatgagggccatgccaccattctttcacaggacttagaccctcattcccctggtgaacccgcactgttgtccctctgtgactcagccgtccctctaaatgctccagcaaatagggagaatgggtcccaagctatgccgtataattgtagaaacaacctggccttcccagcccacccccaagatgtggatggcaagagtgaatctagttattcagggggcggagggcacagcagctcggagccctgggaatacaaatcctcaggtaatggaagggcatcccccctgaagccgcatttagcaactcctggctattccactcccacaagtaacatgagcagctgcagtttggaccaaacgtccaacaaagaggatgctgggtcgctgtattctgaggaccacgatggctactgtgcatctgtgcacactgactctggacatggatctgggaatctgtgcaatagcagtgatggctttgggaaccccaggcacagcgtgatcaatgtttttgttggaagagctcagaaaaaccaaggggaccggtccaattaccaggataaatccctatcaagaaacatctctttgaagaaagcaaagaagcctcccctgccaccctcccggacagactccctccgcaggattcccaagaagagcagccagtgcaacgggcaggtgctcaacgagagcctgatcgccacactccagcactcgctgcagctgagcctcccaggcaagagtggcagctcgccctcccagagcccctgcagtgacttggaagagccctggctgccccgctcccggagccagagcacagttagtgctggcagcagcatgacttccgccaccacccccaatgtctactccctgtgcggggccacgccatcgcagagtgacacaagcagcgtcaagtcagagtacacggacccctggggttattacattgactacacgggcatgcaggaagatccggggaacccggcagggggctgttcaaccagcagtggggtgcccactgggaacgggccagtccgccatgtccaagaagggtccagagccacaatgccccaagtgcccggtggttcagtcaaaccaaagatcatgtcaccagagaagtcacacagagtcatttctccatccagtgggtattccagccagtcgaatacacccacagcactcacccctgtgcctgtgtttttaaaatcagtgtcaccagcaaacgggaaggggaagcccaagcccaaggtaccagaaaggaagtcctctctgatatcttcagtatccatttcctcatcgtccacttctctttcttctagtacttctactgaaggaagtggcactatgaagaagctggatccagccgtgggctctcccccggctcctcctcctcctcctgttccctctcctccattcccttgtcctgcagacaggtctcctttccttcctcccccacctcctgtcacagattgctcccagggctctcctctgcctcactctcctgtgttcccccctccgccgccagaagctctcattcctttctgctccccacctgattggtgcctttctcctccccgccctgcactgagccccattcttccagattcacctgtgtccttgccattgcccccacctctcttaccttcctcggaacccccacctgccccacctcttgaccccaaattcatgaaagacaccaggccgcctttcacaaattctggccagccagaatcctcccggggatccttgaggccgccttctaccaaggaggagaccagcaggccccccatgcccctgataaccacggaagcattgcagatggtgcagttgaggcccgtgagaaagaactcaggcgctgaggcggcacagttgtctgaacgaacagctcaggaacaacgaactccagttgctccacagtaccacttaaagccatctgctttcctgaaatcccgaaatagcacaaatgaaatggagagtgaaagccagcctgcctctgtgacaagctcgcttccgacgcctgccaagagctcgagtcagggtgaccatggcagtgcggctgagcgtggtggccctgtgagccgcagccctggagctccaagcgctggggaggcagaggctcggcccagccccagcaccaccccactcccagactcttcacccagcaggaagccaccccccatttccaagaagcccaaactgttcctggtggtaccacctccgcagaaagattttgcagtggagcccgcagagaacgtgagcgaagccctccgagctgtgcccagccccacgacgggagaggagggctctgtgcacagcagggaggcaaaagagagttctgcagcccaagctggctctcatgccacgcaccctggcacctcggttcttgagggaggagctgcaggatccatgtctcccagcagagtggaagccaatgtccccatggttcagcctgatgtctcaccagcccccaagcaggaggagccagccgagaacagtgcggatactgggggcgatggggagagctgcctatctcaacaggacggagcagctggggtgccggagaccaacgcagccggttcatcctcagaggcctgtgacttcctcaaggaagacgggaatgatgaggtaatgacccccagtcgacccaggaccacagaagacctttttgcagctattcacagatccaaaaggaaagtcctcggccgtagagattcagatgatgaccactcccgaaaccattctccctccccgcccgtgacacccaccggcgctgccccaagcctggcctctccaaagcaagtggggtcgattcagagaagcatccgaaagagcagcaccagcagtgacaacttcaaagctctgctgctgaaaaagggcagtcgttcagacaccagcgcccgcatgtctgcagcagagatgctcaagaacacagaccctagattccagaggtcgaggtcagagccttccccagatgcccccgagagcccgtcaagctgctccccaagcaagaacagaagggcgcaggaggagtgggccaagaacgaaggcttgatgcctcggagtctgtccttttccggccccaggtacggccgcagccgaacgccgccttctgccgccagcagcaggtacagcatgcggaaccggatccagagcagccccatgaccgtcatctcggagggagaaggggaagccgtggagcctgtggacagcatagcccgcggggctctgggcgctgcggagggatgttccctggacggactggcgagggaggagatggacgagggcggcctgctctgtggggaggggcctgccgcctccctgcagccccaggcccccggccctgtggatgggacagccagtgcagagggcagagagccctccccacagtgtggcggttctctgagcgaggagagttagggccaagaacgtaactctcccaggtgacacggggggagacgagcaatgcagcactctaggaagcctgctaggcgcccttccctggctcacccggggagcccactctgcttctgtgctgtgggccccggggttgccagccctgcagtgtgagtgaacggttatttaggactcacctggcacttgccctgtggcttaagaacaagtagaagcttaaacttctgaaagtgcttcccggggaagattttttttttttttttttttttttgctaaatgctgggtgtgtatgtgtgcattttccacactttttaatttttaaaaaatacacatatacacaaacaacatgtacagaaatagaagaaagcaagccagacttaagcttggtagagtaacggagtcctctggtctaggcggtaattgctttcagagaattacgtttatagaaatcagcgagttttgtaagaaaggagaagatgttacttcaagaaagaggcagtagagttgctggttcttaatgcacagaacacacagatatatgcacacgtgtgctgctgaggtgaggcaggtctggtgagcacggagaggctgggaaggggctaagtgactaattggttcaggtacttttttctgggggaggtagactttgcttcttttttgtaaaaatgacaaacgtagaagtggcaatgctgtaacctggtgcctgctgctgtgcagccacatacacacaattgtagcctgatttttagaagtgtgggtaattttttaatgaatttcctccttgagtagcagctgaggtcattgacaactgaagtgatggtgtggacatagagagaggggaagggttggaaaggagtaagtgatacactgctggaatttgtttcctgcctatgaaataaaattatttttcagaattaaatttgaaaacttgcactacagaactatgggtggagcttttccttttacaacagtttttttttttttttttttttaaccagagtttaaacttccattaggcaatttcctgtcacttgaaatgtcaacatttgctaacttttggatatccttttggttacaccaaagaaaaagttatggctatttttttttccttgaactgcctacagtatcatgtcctaattcagaaagatttatcaaaatctattatatattatcttactttgaagaaaatgctgaatagctcttgttagtcaaataaactgataaaaattggtagggcctggctatcaattagccctgggaaatgaatttttagattaaaaaggtttttttgcatcatttggtttgtgcatttttatatttgtttataaataattgagttgctaattacttctaatcttctccaatcagattttcaacaattttagacatgggacacacgtgtgtgaagtctttattttaatgtaataatctcattacccccacccttactcccttaacttccatgtacttagactcctttatttgttaaataaactagagtattgtcttcttcattagaaggacctaggatgacaatgcggagagtcttggtctgaatctagtgcgactaccacctgccagcttttggggggtatggaaatactatctaaaagttggactgcatgggtcaaatcattatgagacttataaactaaaactttagatacccatatagaaatgtctttgaggcaaaaacaaacctaaagaatgaaggctctttcccttctctgaaaaaaacaaaacactgctcttcacacaaccggaagtcaagaccagagatttggagcaattgtctactaatttggcacaaagatcgtttctttagaaaagtggcattggcttttgaatatgaaatcttctcatagctgcctaaaaaagactagaatgtatatggatatcagaaacctttaataatacataatttatgcaaagataagataaagcaacataacactaattataaaactatttttaaatccccatttttaatgaaaaatatacatttgtatttaatttcctttgaataaaacaattgtaaagtaaa

SEQ ID NO: 4 - DNA, 2509 bp, Homo Sapiens
atgacgcagggtccgggcgggcgcgcgcccccggcgccccccgcgccccccgagcccgaggcgcccaccaccttctgcgcgttgctgccccgaatgccgcagtggaagttcgcggccccgggcggcttcctgggccgcggcccggcggcggcgcgggcggctggggcctcggggggcgcggacccccaacccgagccggcgggcccggggggcgtcccggcgctggcggccgccgtcctgggcgcctgcgagccccgctgcgccgcgccctgtcccctgcccgcgctcagccgctgtcggggcgcggggtcgcgggggtcgcggggcgggcggggggcggcggggtccggggacgccgccgccgccgccgagtggatccggaagggcagcttcatccacaaacccgcgcacggctggctacaccccgacgccagggtcctggggcccggggtctcctacgtcgtgcggtacatgggctgcatcgaggttctccgctctatgcgctccctggactttaacacgcgcacgcaggtgaccagggaagccatcaaccggctccatgaggccgtgcctggcgtccggggatcctggaagaaaaaggcccccaacaaggccctggcgtccgtcctgggcaagagcaaccttcgctttgccggcatgagcatctccatccacatctccactgatggcctcagcctctccgtgcctgccacgcgccaggtcatcgccaaccaccacatgccgtccatctccttcgcgtcaggcggagacacggacatgacggattacgtggcctacgtcgccaaggaccccatcaaccagagagcctgccacatcctggagtgctgtgagggcctggcacagagcatcatcagcaccgtgggccaagctttcgagctgcgcttcaagcagtacctgcacagcccgcccaaggtggcgctgcccccagaaaggctggcagggccggaggagtcggcctggggggacgaggaggactctttggagcacaattactacaacagcatcccggggaaggagccgccgctgggcgggctagtggactccaggctggccctgacacagccctgcgccctcacggccctcgaccagggcccatctccttctctaagagatgcctgcagcctgccatgggacgtggggtccaccggtacagctccaccgggggacggctacgtgcaggcggacgcccggggccccccggaccacgaggagcacctgtatgtcaacacccagggtctggacgcccccgagccggaggacagccccaaaaaggatctgtttgacatgcgaccctttgaggatgccctgaagttgcatgagtgctcagtggcggcaggcgtgacagcagcccctcttcccttggaggaccagtggcccagcccccctacccgccgggcccctgtggcccccacggaggaacagctgcgtcaggagccctggtaccacggccggatgagccgccgggcggcagagaggatgcttcgagctgacggggacttccttgtgcgagacagcgtcaccaaccccgggcagtatgtcctcaccggcatgcacgccgggcagcccaagcacctgctgctcgtggaccccgagggcgtggtacggacgaaggacgtgctgtttgagagcatcagccacctgatcgaccaccacctgcagaacgggcagcccatcgtggccgccgagagtgagctgcacctgcgtggcgtggtctcacgggagccctgagccaggtgaccgttctcagccctggctcctgcctgttctcagccccggctcctgcctgtcatggccttggggctctcagccctcctcctggatcctggtcaggccgaaccaccgctgcctctccttcctccgcatgagcctctggcatggtccttcctccagctggccccgggctgggcagagcctcctcctgccggggcccctgcccaccccctcctttgcctggagtgagggtgttcataccaaagacggaaccatttcgcctttaaagaaaatatatccagaagcagccgctgcctcggagccctggcccttgggtccccctctcgcctggctggttcggtctaacgccccggagagtcagggctcccaggaccctggggaggaggcggattccgggcctggctgggcttcctcttcccacctgaggactgggtgcacagttgtctttgaggggggacgcttaaggtgctttggggttctcaggccaggatacatgctggcgctgaagtgcaggcagccttgaggtcacctgggatctcggggtagccaggctgctccaagacagtggatatcgaggcagtcgtgaggcccctactccacctgggagcaggggaaggacgtggttgcctggcctgggctgcgcccagcagcttccccccagtcctgccctcccagctgtcgacccagatgggatgttcggatcggtttgtaattaaacctgggaatggccacaagagcacaaaaaaaaaaaaaaaaa

SEQ ID NO: 5 - DNA, 996 bp, Homo Sapiens
atggaggaaatgtctttgtctggcctgaataacagcaaactagaggccatagctcgggagatataagcggacctagtctagaattcttgttcgggattctgctttgaggtacaccaggctgtcatgtgtggctacctctttctggatgacacagaccctaatagcatgaaggatattggttttcaaccagtggaagagcaaagagtgtgtttgccccaactgcaactgtagcattcctgcctcccgttttgctccccatctggataggtgcctgggaatgggtgggaatagcggccgaatcgccatccactggattgccaatagcaacaatatgggcaagtctgagagtgaccaagaggataatgatgacatcaatgacaatgactggtcctatggctcagagaataaagccaagaagagaaaatcaggcaagaaccccgattcccctcgaagatctgagtctttgaaacacaaaaatggggaactttgtgatttgattttttgtaagtataacaactcaactgggatcagctacgaaacctggggccagaggagcttcatatcctgctaagcatgcaatgtaggatgatttctgaagataccaagaagatgtgcacaaagtccctgcactgcccacagcacacagttgagcagaagtgaaccttgcagatgtatttcttcagggcctcagctgtccatccagaggtggagagctcccaggataatgacagctttgacatgactgacagccaggccctgatcagccagcttcagtgggtctgctcctctgatctctcaccctgtgattcaggctcccccaagacgagcgaaaatcagggatggggtctaggtaccaacagctctgagacacagaaaaccaagaaaaagaaatcccatctgagcctggtagggacttcctccgacctgggctccaacaggaagaagccaaagctaccgatacccccgacggccagcatctatgatgacatcaactga

SEQ ID NO: 6 - DNA, 1824 bp, Homo Sapiens
gcggtgagggggcgggcccgtacgccgattccatatgggcgccggcgcggagcgccgcggggcagcgcggggtcgccatggctgagctgcagcagctccgggtgcaggaggcggtggagtccatggtgaagagtctggaaagagagaacatccggaagatgcagggtctcatgttccggtgcagcgccagctgttgtgaggacagccaggcctccatgaagcaggtgcaccagtgcatcgagcgctgccatgtgcctctggctcaagcccaggctttggtcaccagtgagctggagaagttccaggaccgcctggcccggtgcaccatgcattgcaacgacaaagccaaagattcaatagatgctgggagtaaggagcttcaggtgaagcagcagctggacagttgtgtgaccaagtgtgtggatgaccacatgcacctcatcccaactatgaccaagaagatgaaggaggctctcttatcaattggaaaataaaagtatttgccagtggccatcagggctgagggcaagaatatattttttataaggaattgggaattttagtcttttaagcaaagtttacgaatgaagaaatgaaggatggccacaagcgtaaggcatatgtcacttgcctctggacactggttattttatgtttcagtccctaaaaaatgaaatggaaaaaagtggtgctaaatcgagtcagagatattacaggagagttttagagcttattatttcctgtggccagtgcttgtcctggcagtaaggctttcccctgtaacaagccagagccctccaaggtaccagactcttcttactacacaggtactaacaggctggcaggttagagttggtggagtctgaggagagatattttctctttgttgccaacatcctgtttaccaaaagtgtcaccccaccatcttccataagctgtgaaacaaaatcaatgaggtcactaacttagaagggaaagaaagttttctgggtctttgttttcttgatttggggtaatttatacaagggcatacaagttgattttaagatgtggaactgggaggtagactagtttggataagaactttgaaatgttccttgtggatccccatttctggtcatcaagatgtggatgtacatttcttaaaattattacatgctgcatctttcagcctggagactgtgcagaaacatgagaggtgatgacacactaattatgggaagcagaattactggctgatggcccctgaggctgtgtgtaacaaaatgacaggacaatcttgcagtaacactttccccttgaagagaagggggttttgattgtgatatatactagtatctaggaatgaacagtaaaagaggagcagttggctacttgattacaacagagtaaatgaagtactggatttgggaaaacctggttttattagaacatatggaatgaaagcctacacctagcattgcctacttagccccctgaattaacagagcccaattgagacaaacccctggcaacaggaaattcaagggagaaaaagtaagcaacttgggctaggatgagctgactcccttagagcaaaggagagacagcccccattaccaaataccatttttgcctggggcttgtgcagctggcagtgttcctgccccagcatggcaccttattgttttgatagcaacttcgttgaattttcaccaacttattacttgaaattataatatagcctgtccgtttgctgtttccaggctgtgatatattttcctagtggtttgactttaaaaataaataaggtttaattttctccccaaaaaaaaaaaaaaaaaa

SEQ ID NO: 7 - DNA, 3294 bp, Homo Sapiens
cagaatccaggggacggttgctgagcgggcctgggacagcgggtcgcggcacctccggcctgcgcgtgtctaatccgtctgtcgggtcccgaaagagctaagccgagcctgcgccggacgggtgggctggactgagagaattctctgagctggtgacaggtgccacaggcactggggatctcaccagaaaggaaccgacggagctaggggccagcgagatggcggacgaggccttagctgggctggatgagggagcccttcggaagctgctggaggtcacagcagatctggcagagcggcggcgcatccgctcagccatccgggaactgcagcggcaggagctggagcgcgaggaggaggccctggcatccaagcgtttccgtgccgagcggcaggacaacaaggagaactggctgcactctcagcagcgggaagctgagcagcgggctgccctggcacggctggcagggcagctggagtccatgaacgatgtggaggaattgactgcactgttgcgaagcgctggtgagtatgaggagcgcaagctgatccgagctgccatccgccgtgtacgggctcaggagattgaggctgccaccttggctgggaggttgtacagcgggcgtcccaacagtggctcaagagaggacagcaaggggctagcggcacacaggctggaacagtgtgaggtgccagagcgagaggaacaggaacagcaggcagaggtttcaaagccaacccccacccctgaaggcaccagccaggatgtgaccacagtgacactcctgctgcgagccccacctgggagcacatccagctcacctgcctcacccagcagttcacccacccctgcctctcctgagcctccattggagcctgccgaggcccagtgccttacagctgaggttccaggcagcccagagccaccccccagcccacccaagaccaccagccctgagcctcaggagtctccaacgctccccagcactgagggccaggtggtcaacaagcttctgtctggccccaaagagacccctgctgcccagagccccaccagaggcccctctgacaccaagagagcagacgtggctggaccccgaccctgccaacgctccctgtcggtgctcagcccccgccaaccagcccagaaccgagagtccaccccccttgccagcggaccttcctcattccagcgggctggctctgtgcgggatcgtgtccacaagttcacatctgattctcctatggctgctaggctccaggatggcacaccccaggctgccctaagtcccctgacccccgcaaggctcctgggcccctccctcaccagcaccacccctgcctcctcctccagcggctcctcctctcggggccccagtgatacctcctcccggttcagcaaggagcaacgaggagtagcccagcccctggcccagcttcgaagctgcccccaggaggagggccccagggggcggggcttggctgctaggccccttgaaaacagagcaggggggcctgtggcacgttcagaggagcctggtgccccgctgcccgtggccgtcggcactgccgagccagggggcagtatgaagaccacattcaccatcgagatcaaggacggccgtggccaggcctccacaggccgggtgctgctgcccacaggcaaccagagggcagaactgacactggggctgcgggcgcccccgaccctactcagcaccagtagtgggggcaagagcaccatcacccgtgtcaacagccctgggaccctggctcggctgggcagtgtcactcatgtcaccagcttcagccatgccccccccagtagccgaggaggctgcagcatcaagatggaagcagagccagcagagcctctcgctgcagcagtggaagcggccaatggggctgagcagacccgagtgaacaaagcaccagaagggcggagccctctgagcgctgaggagctgatgactattgaggatgaaggagtcttggacaagatgctggatcagagcacggactttgaagagcggaagctcatccgggctgcacttcgtgagctccgacaaaggaagagagaccagcgggacaaggagcgggaacggcggctgcaggaggcacggggccggccaggggaggggcgcggcaacacagccactgagaccaccacgaggcacagccagcgggcagctgatggctctgctgtcagcactgttaccaagactgagcggctcgtccactccaatgatggcacacggacggcccgcaccaccacagtggagtcgagtttcgtgaggcgctcggagaatggcagtggcagcaccatgatgcaaaccaagaccttctcctcttcctcctcatccaagaagatgggcagcatcttcgaccgcgaggaccaggccagcccacgggccggcagcctggcggcgctcgagaaacggcaggccgagaagaagaaagagctgatgaaggcgcagagtctgcccaagacctcagcctcccaggcgcgcaaggccatgattgagaagctggagaaggagggcgcggccggcagccctggcggaccccgcgcagccgtgcagcgatccaccagcttcggggtccccaacgccaacagcatcaagcagatgctgctggactggtgtcgagccaagactcgcggctacgagcacgtcgacatccagaacttctcctccagctggagtgatgggatggccttctgtgccctggtgcacaacttcttccctgaggccttcgactatgggcagcttagccctcagaaccgacgccagaacttcgaggtggccttctcatctgcggagacccatgcggactgcccgcagctcctggatacagaggacatggtgcggcttcgagagcctgactggaagtgcgtgtacacgtacatccaggaattctaccgctgtctggtccagaaggggctggtaaaaaccaaaaagtcctaacccctgctcggggccccacggatgctggtggactgtgtgcccctggtggaggtggacgacatgatgatcatgggcaagaagcctgaccccaagtgtgtcttcacctatgtgcagtcgctctacaaccacctgcgacgccacgaactgcgcctgcgcggcaagaatgtctagcctgcccgcccgcatggccagccagtggcaagctgccgcccccactctccgggcaccgtctcctgcctgtgcgtccgcccaccgctgccctgtctgttgcgacaccctcccccccacatacacacgcagcgttttgataaattattggttttcaacg

SEQ ID NO: 8 - DNA, 1991 bp, Homo Sapiens
caataaccaggacaatgagaaatttacatctggatgtcagcggccaccaggctcctctcagagggccatctcctgtacagggtgttgtgggggcttcccctagacaaagaaagatggggtctgcttgctctgagttatctataataattatcttacctttttgtttctttttataatttctttcttttttgagacagggtctcactctcttgtccaggctggagtgcagtggcctgaccatagctcactgcactgcagccttgacctcctgggctcaagtgatcctcccacctcagcctccccagtagctgggacggcaggcacatgccaccacacccagctaattgtttaaatttttggtagagatggggtctcgccatgttgctcaggatggtctcgaactcctgggctcaaaggatcctcctgactcagcctcccaaagcaccaggtgtactttgggcctctcctgcctttttgattgaaagttccatgacgggcacacctggtgatgggtcctgagatggaacctgcttggcctccctcagcctggcctgagggacactcatagtccctcctctctccctaggggccaaaccagtgctcctgccacctctctggctgccccctagagcctgcccatcccagcctgaccaatgtccacagccagggagcagccaatcttcagcacacgggcgcacgtgttccaaattgacccagccaccaagcgaaactggatcccagcgggcaagcacgcactcactgtctcctatttctacgatgccacccgcaatgtgtaccgcatcatcagcatcggaggcgccaaggccatcatcaacagcactgtcactcccaacatgaccttcaccaaaacttcccagaagttcgggcagtgggccgacagtcgcgccaacacagtctacggcctgggctttgcctctgaacagcatctgacacagtttgccgagaagttccaggaagtgaaggaagcagccaggctggccagggagaaatctcaggatggcggggagctcaccagtccagccctggggctcgcctcccaccaggtgcccccgagccctctcgtcagtgccaacggccccggcgaggaaaaactgttccgcagccagagcgctgatgcccccggccccacagagcgcgagcggctaaagaagatgttgtctgagggctccgtgggcgaggtacagtgggaggccgagtttttcgcactgcaggacagcaacaacaagctggcaggcgccctgcgagaggccaacgccgccgcagcccagtggaggcagcagctggaggctcagcgtgcagaggccgagcggctgcggcagcgggtggctgagctggaggctcaggcagcttcagaggtgacccccaccggtgagaaggaggggctgggccagggccagtcgctggaacagctggaagctctggtgcaaaccaaggaccaggagattcagaccctgaagagtcagactggggggccccgcgaggccctggaggctgccgagcgtgaggagactcagcagaaggtgcaggacctggagacccgcaatgcggagttggagcaccagctgcgggcgatggagcgcagcctggaggaggcacgggcagagcgggagcgggcgcgggctgaggtgggccgggcagcgcagctgctggacgtcagcctgtttgagctgagtgagctgcgtgagggcctggcccgcctggctgaggctgcgccctgagccggggctggttttctatgaacgattccggcctgggatgcgggccaggctgcaggcggcatagttgggcccattcgtcctggaaagggactggggggtcccaacttagccctgggtgggccgggccgggctgggctggggtgggccccagtcggctctggttgttggcagctttggggctgtttttgagcttctcattgtgtagaatttctagatcccccgattacatttctaagcgtggcaaaaaaaaaa

SEQ ID NO: 9 - DNA, 1321 bp, Homo Sapiens
ggcgctgggcagtgtggaggtcgttggagtcacttccgcgtcaccagctcctgtgcctgccagtcggtgcccctcccgctccagccatgctctccgccctcgcccggcctgccagcgctgctctccgccgcagcttcagcacctcggcccagaacaatgctaaagtagctgtgctaggggcctctggaggcatcgggcagccactttcacttctcctgaagaacagccccttggtgagccgcctgaccctctatgatatcgcgcacacacccggagtggccgcagatctgagccacatcgagaccaaagccgctgtgaaaggctacctcggacctgaacagctgcctgactgcctgaaaggttgtgatgtggtagttattccggctggagtccccagaaagccaggcatgacccgggacgacctgttcaacaccaatgccacgattgtggccaccctgaccgctgcctgtgcccagcactgcccggaagccatgatctgcgtcattgccaatccggttaattccaccatccccatcacagcagaagttttcaagaagcatggagtgtacaaccccaacaaaatcttcggcgtgacgaccctggacatcgtcagagccaacacctttgttgcagagctgaagggtttggatccagctcgagtcaacgtccctgtcattggtggccatgctgggaagaccatcatccccctgatctctcagtgcacccccaaggtggactttccccaggaccagctgacagcactcactgggcggatccaggaggccggcacggaggtggtcaaggctaaagccggagcaggctctgccaccctctccatggcgtatgccggcgcccgctttgtcttctcccttgtggatgcaatgaatggaaaggaaggtgttgtggaatgttccttcgttaagtcacaggaaacggaatgtacctacttctccacaccgctgctgcttgggaaaaagggcatcgagaagaacctgggcatcggcaaagtctcctcttttgaggagaagatgatctcggatgccatccccgagctgaaggcctccatcaagaagggggaagatttcgtgaagaccctgaagtgagccgctgtgacgggtggccagtttccttaatttatgaaggcatcatgtcactgcaaagccgttgcagataaactttgtattttaatttgctttggtgatgattactgtattgacatcatcatgccttccaaattgtgggtggctctgtgggcgcatcaataaaagccgtccttgattttatttttcaaggtcccttctgtaaaaaaaaaaaaaaaaaa

SEQ ID NO: 10 - DNA, 1758 bp, Homo Sapiens
agcaagcggcctgtgcccagatcctgggagaaccccagccgagcccagcctagcccgagcccagcccgagcggagccggagccccaagcccgagccgcgcccagcccgagcagagccctccagccgctcaccccgcgtgccaccccagcgaccctcagccgctctctgcccttctctcggccccgcgcccgccctcgcggcccctctgcccaatgaaactggccgcgatgatcaagaagatgtgcccgagcgactcggagctgagtatcccggccaagaactgctatcgcatggtcatcctcggctcgtccaaggtgggcaagacggccatcgtgtcgcgcttcctcaccggccgcttcgaggacgcctacacgcctaccatcgaggacttccaccgcaagttctactccatccgcggcgaggtctaccagctcgacatcctcgacacgtccggcaaccacccgttccccgccatgcggcgcctctccatcctcacaggagacgttttcatcctggtgttcagtctggacaaccgcgactccttcgaggaggtgcagcggctcaggcagcagatcctcgacaccaagtcttgcctcaagaacaaaaccaaggagaacgtggacgtgcccctggtcatctgcggcaacaagggtgaccgcgacttctaccgcgaggtggaccagcgcgagatcgagcagctggtgggcgacgacccccagcgctgcgcctacttcgagatctcggccaagaagaacagcagcctggaccagatgttccgcgcgctcttcgccatggccaagctgcccagcgagatgagcccagacctgcaccgcaaggtctcggtgcagtactgcgacgtgctgcacaagaaggcgctgcggaacaagaagctgctgcgggccggcagcggcggcggcggcggcgacccgggcgacgcctttggcatcgtggcacccttcgcgcgccggcccagcgtacacagcgacctcatgtacatccgcgagaaggccagcgccggcagccaggccaaggacaaggagcgctgcgtcatcagctaggagccccgccgcgctggcgacacaacctaaggaggacctttttgttaagtcaaatccaacggcccggtgcgccccaggccgggagcgcgcgcggactggcgtctcccctcccggcgatccgcccccagcactggggaggcgccactgaaccgagaagggacggtcatctgctccggaaggaaagagaacgggccaagactgggactattccccacccccggtcccccattgaggcccgccacccccataactttgggagcgagggcccagccgagggtggatttatcttctcaaagacctaagagtgagcgcggggtgggggagggatgtgaagttatccagcctctgctaggcttcaagaaaccgtcatgcccgcttgagggtcaggacccacggggcattatcttgtctgtgattccgggttgctgtgacagccggtagagcctctgccctcccgaaactaagcgggggggcgtgggtcaaatcatagccaagtgacttgtttacatgtgagtgaaactgcacaaaggaacacaaaacaaaacttgcactttaacggtagttccggtgtcaacatggacacgaacaaaaccttacccaggtgtttatactgtgtgtgtgtgaggtctttaaagttattgctttatttggttttttaatatacaataaaataatttaaaatggaaaaaaaaaaaaaaaa

SEQ ID NO: 11 - DNA, 7222 bp, Homo Sapiens
agccggacggcgcggtggtcgggacagactggccgttgctgtggagacgcctggagagttgtggactggggcaacctttgccagtgatgagaagtgatgctcgtggcagtgctgaatctctctgaatatgattcgaattgcagccttaaatgccagctccaccattgaggatgatcatgaaggaagctttaaaagtcacaaaacccagacaaaggaggctcaggaagcagaggcttttgcattgtaccacaaggcccttgatctgcagaaacatgaccggtttgaggagtctgccaaagcctaccatgagctcttggaggcgagcctgctgcgggaggcagtttcatccggtgatgagaaagaggggttgaaacaccctgggctgatactgaaatattccacttataagaacttggcccagctggcagcccagcgggaggatctggagacagccatggagttctacttagaggcagtgatgctggactccacagatgtcaacctctggtataagattggacatgtggccctgaggctcatccggatccccctggctcgccatgcttttgaggaagggctgcggtgcaatcctgaccactggccctgtttggataacctaatcactgtcctgtacaccctcagtgattacacaacatgtctgtacttcatctgcaaagctttggagaaggattgccggtacagcaaagggctggtcctcaaggagaagatttttgaggagcagccttgtctccggaaggactctctcagaatgttcctcaaatgtgacatgtcgattcacgatgtttcggtgagtgcagctgagacacaggcgattgtagatgaggccttggggctgcgaaaaaagaggcaagcgctgattgtgcgggagaaggagccggacctgaaacttgtgcagcccattcctttcttcacctggaagtgcctcggagagagcttgctggccatgtacaatcatctcaccacctgtgagcccccacgtcccagccttggcaaaaggattgatttgtcggactaccaggaccccagccagcctcttgagtcctccatggtggtgacgccagttaacgtgatccagccaagcactgtcagcaccaacccagctgtggctgtcgccgagcctgtggtctcctacacctctgtggctacaaccagcttcccactgcacagtcctggtctgttggagacaggcgctcctgtgggtgatatttctgggggagataaatccaagaaaggggtaaaacggaagaagatttcagaagagagtggagaaacagcaaagcggcggtctgcccgtgtccgaaacaccaagtgcaaaaaagaagagaaagtagacttccaggagcttctgatgaagttcttgccgtccaggttaagaaagctggaccctgaggaggaagatgattcctttaataactatgaagtccagtcagaagccaaactggaaagcttcccaagcattgggcctcaaaggctgtcatttgactcagccacattcatggaatctgaaaagcaggacgtgcatgagttcctgctggagaacctaaccaacgggggcatcctggagctgatgatgcgctacctgaaagccatgggccacaagttcttggtaaggtggcctccaggcttggcggaggtcgtgctcagcgtctaccacagctggaggaggcacagcaccagcctgcccaacccgctgctgagggactgcagcaacaagcacatcaaggacatgatgctgatgtctctctcctgcatggaactccagctggaccagtggctgctgaccaaaggcagaagctctgcagtgtctcctcggaactgtcctgctggtatggtgaatggcagatttggacctgacttcccagggacccactgcctgggtgacctcctacagctgtcatttgcctcgtcccagcgcgacctgttcgaggatggttggctggagtttgtggtccgtgtttactggctgaaggctcgcttcctggcgctgcagggagacatggagcaggccctggagaactatgacatctgcacagaaatgctccagagttccaccgccatccaggtggaggcaggggctgaacgaagagacattgtcatccggctgcccaacctccataatgactctgtggtttccctggaggagattgataagaacctgaagtcgctggagcggtgccagtccctggaggagattcagcggctgtatgaagcaggcgactacaaggctgttgtgcatctgctccgccccactttgtgcaccagtgggtttgaccgggccaaacacctggagtttatgacttccattcctgagaggccagcccagctgcttcttctgcaggactccttgctccggctgaaggactatcggcagtgttttgagtgttccgatgtggctctgaacgaggctgtccagcagatggtgaactcaggtgaggctgccgccaaggaggagtgggtggccacagtgacccaactgctgatgggcatcgagcaggccctctctgcggacagcagtggtagcatcctgaaggtatcatcctccaccactggccttgtgcggctcaccaacaacctcatccaggtcattgactgcagcatggctgtgcaggaggaggccaaggagccccacgtctcttcagtgctaccctggatcattctacaccggatcatctggcaggaggaagacaccttccattctctgtgccaccagcagcagctccaaaacccagcggaggaagggatgtcagagacgcccatgctcccatcctccctcatgctgctgaacacagcccacgagtatttgggcagaaggtcctggtgctgcaattcagatggggctctgctgcgattctatgtgcgagtactccagaaggaactggctgcatccacctctgaagacacgcacccttacaaggaggagctggagacagccttggagcagtgcttctactgcctgtacagcttccccagcaagaagagtaaggccaggtacctggaggaacactcggcccagcaggtggatcttatatgggaggatgcactgttcatgtttgagtattttaagcccaagacccttcctgaatttgacagctataagaccagcaccgtgtctgctgacttggccaacctactgaagagaattgccaccattgtgcctcgcacagagaggccagcccttagcctggacaaagtctctgcctacattgagggaacttcaactgaggtaccctgcctcccagagggggctgacccctcccctccagtggtgaacgagctttactacctcctggctgattatcatttcaaaaacaaggagcagtccaaggccatcaagttctacatgcatgacatctgcatctgccccaataggtttgattcctgggcaggcatggctctggcccgggccagccgcattcaggacaagctgaactccaatgagctgaagagtgatgggcccatttggaagcatgccacgcccgtcttgaactgcttccgtcgggccctggagattgacagctccaacttgtccctatggattgagtatggcaccatgtcctatgccttgcactcattcgcctcacgtcaattgaagcagtggagaggcgagctgccccctgagctcgtgcagcagatggagggccggcgcgacagcatgctagagacagccaagcactgtttcacatcagcagcccgctgcgagggtgatggtgacgaggaggagtggctcatccactacatgctgggcaaggtggctgagaagcagcagcagccacccaccgtttacttgctgcactacaggcaggctggccactacctgcacgaggaggctgcccgctaccccaagaagatccactaccacaacccacctgagctggccatggaggccctggaggtgtactttcggctccatgcttccatcctgaagctcctggggaagcccgattctggggttggtgcagaggtcctggtcaactttatgaaggaggctgcagaaggaccctttgccaggggcgaggagaagaacacacccaaagcttcagaaaaggagaaggcctgcctggtggacgaggactcccactcttcagctgggacactgccgggccccggagcctccctcccctcctcctctggcccaggtctgacatccccaccttacacagccactccgattgaccacgattacgtcaaatgtaaaaaaccccaccagcaggcaacgccggacgaccgaagccaggacagcacagccgtagcactctcagactctagctcaacgcaggacttctttaatgagcccaccagcttactggaaggctccaggaaatcctacacagagaagaggctgcccattctcagttcccaagcaggagcgacgggtaaagatcttcagggggccacagaagaaagaggaaaaaacgaggagtcattggagagtacagaaggcttccgggctgcagagcaaggtgtccagaagcctgctgcagaaaccccagcctctgcttgcatccctggcaagccctcagcatccacacccaccctgtgggatgggaagaagagaggggacctcccaggggagccagtggccttcccccaggggctgccggctggtgctgaggagcagcggcagtttctcacagagcagtgcatcgcctccttccgcctgtgcctgagccgcttcccccagcactataagagtctctaccgtctggccttcctctacacctacagcaagacccaccggaacctccagtgggcccgcgacgtgttgctaggcagcagtatcccgtggcaacaactgcagcacatgccggcacaggggctcttctgcgagaggaacaagaccaatttcttcaacggcatctggcggatccccgtggacgagattgaccggccgggcagctttgcctggcacatgaaccgctccatcgtgctgctgctcaaggtgctggcccagctgcgggaccacagcaccctgctgaaggtgtcctccatgcttcagcggaccccagaccagggcaagaagtatctgcgagatgctgaccgccaggtcctggcgcagcgggccttcatcctcactgtgaaggtgctcgaagacacgctgagcgagctcgcagaggggtcagaacgcccagggcccaaggtctgtggcctccccggagccaggatgaccaccgatgtctcacacaaggccagtcctgaggatggccaggagggcctcccccagccgaagaagccccctctggctgatggctcagggccagggcccgagccaggaggcaaagtgggcctcctcaaccaccggcctgtggccatggatgcaggagacagtgcagaccaaagcggggagcggaaggataaagagagcccacgggcagggcccactgagcccatggacacgagtgaggccactgtttgccactcagacttggagcggacaccacccctgctgccaggtcgccccgcaagggaccggggccccgagagccggcccactgagctgtccctggaggagctgagcatcagtgcccggcagcagcccaccccgctcaccccagcccagccagcccccgcccccgcccccgccaccaccacagggaccagggcagggggccacccggaggagccgctctcccggctcagccgcaagaggaagctcctggaggacacagagtcaggcaagacacttctgttggatgcctaccgtgtgtggcagcagggccagaagggtgtggcctatgacctgggccgtgtggagaggatcatgtcggagacctacatgctcatcaagcaggtggatgaggaggctgcgctggagcaggctgtgaagttctgccaggtccatcttggggctgccgcccagagacaggcctcgggggacacccccaccactccaaagcaccccaaagacagccgagagaacttctttcctgtgacagtggtgcccacagcccctgaccctgtgccagctgactctgtccagcggcccagtgatgctcacaccaagcctcgccctgcactagctgccgccacaactattatcacctgccctccgtcagcatcagcttccaccctggaccagtccaaggaccctgggcctccccggccacacaggcctgaagctacccccagcatggcctctctgggcccagagggagaagagctggcgagagtggcagagggcaccagcttcccgcctcaggagccacggcacagtccgcaggtgaagatggcccccacaagttccccggcagagccacactgctggccggcagaggctgccctgggcacaggcgctgagcccacctgcagccaggaggggaaactgaggcctgagccgagaagggatggggaggctcaggaggctgcgagtgagactcagcccctgagctctcccccaacagctgccagctccaaggcccccagcagtgggagtgcccagccaccagagggtcacccaggcaagcctgagcccagccgggctaagtcccgccccctgcccaacatgccaaagctggtcatcccctccgccgccaccaagttcccccctgagatcaccgtcacgccacccaccccaaccctgctctcccccaaaggcagcatctcggaggagaccaagcagaagctgaagtcagccatcctttctgcccagtctgctgccaacgtgaggaaggagagcctatgccagccagccctggaggtcctggagacatccagccaggagtcctcgctggagagcgagacagacgaggacgacgactacatggacatttgaggggccactgcagccccaccgccacgccccaggggaccagccaggcctggaatgccccctgggcaggaccctgggcaggaccagaggcccacatggatgccactccccacacagcccccaggcctgcccagcccacctcctcatggcatcctccctgtacccaggtcaggctgtccacaccacatgggagcccagaggaggaggggcccgccttagccatgtgaaggtggattggtcgccatctgcacgccaggcggcatccttttctatgaagtgttgactttgtaaatctgcccacacccagctggccatatccacccctcgacgccgggatgagccggctctgcctgtgtcacagtggaggggtcctttagggccaggctcacccctcaccctttttttggttgcttttctaataaagatggaacagtt

SEQ ID NO: 12 - DNA, 3232 bp, Homo Sapiens
agcgataaggcggtggcggcggcggtggctcggggaccactggtagcggcagcagctcgcgcccgcgccctcctcgtacccgtgcgcccccggagaccgatcccgccccgcggcccaggccgggcctgaacccagcgggtgccgcttctccacccgaggcttccacctccaacgagccatgttccaggctgcaggagccgcccaggccaccccctctcatgacgccaaaggcggcggcagcagcacggtgcagcgctccaagtccttcagcctgcgggcccaggtgaaggagacctgcgccgcctgccagaagaccgtgtaccccatggagcggctggtggccgacaagctcattttccacaactcttgcttctgctgcaagcactgtcacaccaagctcagcctgggcagctacgccgcgctgcacggggagttctactgcaaaccccacttccagcagctgtttaagagcaaaggcaactacgacgaggggtttggccgcaagcagcacaaggagctctgggcccacaaggaggtggaccccggcaccaagacggcctgaggcctctgtaaccttccaccccctctgcggaaggcctggagccggcagggggaaggtgggaaggaggtcgagctgggcttgcgtgggggccaggtgggaaggggatgaggcttgctcaggcgtaggggaccagggcagggctctgctccaggactccttccttcttccttctcccgcagccggtgagggtttggaaaccaggattggggtctgcccaccaccctgcttcctgcttcgttcagcctccctccccacctcaccccaggaccccctgggaggcccccaagcccagctcccctatctaggtgccttttctccagcaaggagtcagcatgcccccctcagggtcccaagctccctcactgccaccggagactgtgtggcccccacgtctccccatctacctctacccttaacctgtttctgagccacggagacagggaggaaggagcgcgacagtgccacctgttgggcatcataaatgcccctgcagcccatgggggaggagatggggaagtggagccaccctgcctctgcagggcaaggcagggcctgccccagtggggcttgggaccatctcgaaccaccagcgtggagaagcagaagcaaaagcactcgccaggctgcagcctcaggcactggcaggggctggtgcggccccactcccctcccccgctcccatttgtgcccatcctgttgtgaccaaccccgttttaaacatgtttcaatagatccagattctctattgtgtggcctgctgggggatctgtcacaggaagggtgcagactcaccatggggcgggcatggggggacagggccagccccgactacctcggccctgatgggggcagggagctagaagtgggtgtcagttccctgacacaccattgagaaatgggagggctcctcttcacagcgagggcttcatgctgtcacacccacagtggttttggaactgaaactccacctcacccctcagttctgggttggttcagacccaccaacttaccatatgcaccccattgtgaagaggcctgagagcgggagggccaggctgccagtgggtgatggcgcctgtcctcgctgcacttcagtgcctggggtgcaagctgccgcgttccctggctggttccagctgtctagctccctcccttcttcccagccctttgacctggaagtaagttagcgaagaatggcggtaaccagcagacccagcaagtgctgcccaaggttttagtgacccctggattgtcccccctcatcattacccctcgctgctgtcatcatccccttgccttttcaagctctgcggaggtgcagtcacagctactgtctcaggaaatccaaagagaaactacctctgcttctctgaaaacccagggacaatgagggatgagttcacagcagagcaaaccaggcaagttgggaggacctgagggcgccccggtgggacacaggcagaagtctgggttgtcctgctccagattcaacttcctgatgtctccagacatgggatcgatgagaacagagactcctggagggtttgctgccaccacaccatacaactgcctgagttcctaagtggcctccccgtggaacagggcagggagctgggccacaggctccagtgtcacataagtcactatgctgaggcaggcactgctcctcgagggagcagagcgaatactcagcagagatggtgccccggcctggatcctcccaagtgtgaagtgagcgcctcagagcctctcagggcaggccaacttcctgcaccagaggtctcagatggcaaggatcatcttggttcggttaagcaacagtagcagatgaccacaagggggtactggagaggtggctcttggagacacctgacccctgccctgcaaagatgggactgaaggaagtcctctgggccaggaagaccctaccaaatatcatgaaagctccgggaactcagccactggtgacgttcaggttgtgagggccagcagtgccaccctggtaaatcagccctgttgggaccaccccagtggagctcctggaggggcaactggaggaaaggggcagacacctctggactgacaatggtatcagccagatcaccccaggacccctctacttggagtcaagttctcttctgcttgaaaggcccaggctcgttgccaggcaccatacctggcccctgctaagcaaaaacctacctccaccccccacaactgaaagcactgccacaggacccctctgatataaatgatcccttttattgtaagtaatgcgcaacactggcctggctttgcactgcaagccctcggtcaagatatagtcaaataactatggctgcaggttccacagttccacaataaccatggctgcacgatccacaattcagacacagacatagagctggggtgggtggaaggggcaggagggtggcagagtgcggactgtccccagccctggcctctccatgcagagttggcccaggcagacacaccccatggaatgatgagaaagtgacggcacggccccttcccacagcaagcctggggctgccaggaactgcccttcagaacctttgggcccaggtcaccctgaagccccacaactttttatctggattagttattaaaaaacaataaattaagcaacaacttggtcctgaaaaaaaa

SEQ ID NO: 13 - DNA, 2756 bp, Homo Sapiens
atgcagttaggggagcagctcttggtgagctcagtgaacctgcctggcgcgcacttctacccgctggagagtgcgcgaggcggcagcggcgggagcgctggccacctccccagcgcggccccctctcctcagaagttggacttagacaaagcgtccaagaagttttccggcagtctctcctgcgaggcggtgagcggggagcccgcagccgccagcgcaggggcccccgcggccatgcttagtgacaccgacgccggggacgcatttgccagcgctgcggcagtggccaagccggggcccccggacggccgcaagggctccccctgcggggaggaggagctgccctccgccgctgcagccgccgccgccgccgccgccgcggctgcggccactgcgcgctactccatggacagcctgagctccgagcggtactacctccagtcccccggtcctcaggggtcggagctggctgcgccctgctcactcttcccgtaccaggcggcggctggggcgccccacggacctgtgtacccggctcctaacggggcgcgctacccctacggctccatgctgccccccggcggcttccccgcggctgtgtgcccacccgggagggcgcagttcggcccaggagccggtgcgggcagtggcgcgggcggtagcagcggcgggggcggcggcccgggcacctatcagtacagccagggggctccgctctacgggccgtaccctggagccgcagcggcgggatcttgcggaggactggggggcctgggggttccaggttctggcttccgtgcccacgtctacctgtgcaaccggcctctgtggctcaaattccaccgccaccaaactgagatgatcattacgaaacagggcaggcgcatgtttcctttcttgagcttcaacataaacggactcaatcccactgcccactacaatgtgttcgtagaggtggtgctggcggaccccaaccactggcgcttccaggggggcaaatgggtgacctgtggcaaagccgacaataacatgcagggcaacaaaatgtatgttcacccagagtctcctaatactggttcccactggatgagacaggagatttcattcgggaaattaaaactcaccaataacaaaggcgcaaataacaacaacacccagatgatagtcttacaatccttacacaaataccaaccccgactgcatattgttgaagttacagaggatggcgtggaggacttgaatgagccctcaaagacccagacttttaccttctcagaaacgcaattcattgcagtgactgcctaccaaaacaccgatattactcaactaaagattgatcataacccctttgcaaaaggcttcagagacaactatgattcatcccatcagattgtccctggaggtcggtacggcgttcaatccttcttcccggagccctttgtcaacactttacctcaagcccgctattataatggcgagagaaccgtgccacagaccaacggcctcctttcaccccaacagagcgaagaggtggccaaccctccccagcggtggcttgtcacgcctgtccagcaacctgggaccaacaaactagacatcagttcctatgaatctgaatatacttctagcacattgctcccatatggcattaaatccttgccccttcagacatcccatgccctggggtattacccagacccaacctttcctgcaatggcagggtggggaggtcgaggttcttaccagaggaagatggcagctggactaccatggacctccagaacaagccccactgtgttctctgaagatcagctctccaaggagaaagtgaaagaggaaattggctcttcttggatagagacacccccttccatcaaatctctagattccaatgattcaggagtatacaccagtgcttgtaagcgaaggcggctgtctcctagcaactccagtaatgaaaattcaccctccataaagtgtgaggacattaatgctgaagagtatagtaaagacacctcaaaaggcatgggagggtattatgctttttacacaactccctaaagagttattttaacctcaaaaattagctaactttttgcagatggacttggtggtgttttttgttgtcttctttgcctaggttgccaaaaagatgtttgccttccaccttgatgcatcctgttttgtgcaattctctaaaagaaggtgccaaagctttttgattgctgcaggtaactgaaacaaacctagcatttttaaaaaataagattaatggaagactttaaggtattttaaaattcgaagggtatccaaggttctgtatttatttattggggagacactaacccttcaaagaagcaggctgtgaacattgggtgcccagtgctatcagatgagttaaaacctttgattctcatttctatttgtaaattcttaagcaaatagaagccgagtgttaaggtgttttgcttctgaaagagggctgtgccttccgtttcagaaggagacattttgctgttacattctgccaggggcaaaagatactaggcccaggagtcaagaaaagcttttgtgaaagtgatagtttcacctgactttgattccttaacccccggcttttggaacaagccatgtttgccctagtccaggattgcctcacttgagacttgctaggcctctgctgtgtgctggggtggccagtgggactcaggagagagcaagctaaggagtcaccaaaaaaaaaaaaaaaaaaaaaa

SEQ ID NO: 14 - DNA, 3268 bp, Homo Sapiens
gtttgggggccacccgggctgtgcgtgggagtcgggttggggcggagcggaggggagtcagtgcgcagcagggcaggttcctgcggagccgccggagacggtcgggtttgccagggccgggcgggaccgcggggaccatggcggagccgcctcggctacctctgacttttgaggatgttgctatttatttctccgagcaagaatggcaggatctagaggcatggcagaaggaactttacaagcatgtgatgagaagcaattatgagactctcgtctctctagatgatggacttccaaaaccagaactaatatcctggattgaacacgggggagagcccttcaggaaatggagagaatcacagaaatcaggaaacataatttgctcctctgttgatatgcattttgatccaggttttgaggaacagctgttttggggaagccagcaggctatgaattcaggaaaaactaaaagccatttccaattagatcctgaaagccagtgttcctttggatcctttgtttccttcaggcctgaccaaggcatcaccctcgggagcccacagagacacgacgccagggctcctccaccactagcctgcggccccagtgaatctaccctaaaagaaggaatcccaggtcccagaaatctggatcttcctggtttgtgggacgtccccgcctgggagagcacccagcacccttggcctgtctgcggggaaagctgttgggagaacaaccatttagtaatgcaccagagaggccactcaaaggaccggacacgtagggcctgggagaaattcaacaagagggcggagacgcagatgccgtggagcagccctcgggtacagaggcacttccggtgtggcgtgtgcggtaagagcttccgccggaagctgtgtctgctgcgccatctggcggcccacacggggaggggccccttccggaacgctgacggtgaaatgtgcttccgacacgagctgacccatcccagccaccgcctcccgcagcagggggagaagcctgcccagtgcaccccatgcggcaagcgctccctcccagtggacagcacgcaggctcgccggtgccagcacagccgggaggggccggcctcttggagagaaggccgcggggcctccagcagtgtgcactcgggacagaaaccaggctcgcgcctgccccaggaggggaacagccaccaggaaggggacacggaggcgctgcagcatggcgcagaggggccctgctcctgctcggagtgtggcgagcgctcccctatgagcgccaggctcgccagcccctgcagggcgcatactggagaaaagcccttccagtgtgcgcattgcaccaagcgcttccgcctgcgccgcctgctgcaggtccaccagcacgcgcacggtggggagagaccgttctcctgcaggaagtgtggcaagggcttcgccaagcagtgtaaactcacggagcacattcgagtccacagcggagagaagcctttccggtgtgccaagtgtggcaggaacttccgtcagaggggacagctgctgcggcaccagcggctgcacacggacgagaagccctttcagtgcccagagtgtgggctgagcttccgcctggagagcatgctgagagcccaccggctccggcacggtggggagaggccgttctcctgtagcgagtgtggcagaggcttcacccaccagtgcaagctccgtgagcacctgagagtgcacagcggggagaggcccttccagtgcctgaagtgcgacaagcgcttccgcctgaagggcatcctgaaggcccaccagcacacgcacagcaaggagaggccgttctcgtgcggggagtgtggcaagggcttcaccagacaatccaagctcacggagcacttgcgcgtgcacagcggggagagacccttccagtgcccagagtgcaacaggagcttccgcctgaaggggcagctgctcagccatcagcgcctgcacacgggagagaggcccttccagtgtccggagtgcgacaagcgctatcgcgtgaaggccgacatgaaggcccaccagctgctgcacagcggggagatgcctttctcctgtgagtgcggcaagggctttgtgaaacactcaaagctcatcgagcacatcagaacgcacacgggagagaagccttttcagtgtcccaagtgtgacaagagtttccgcctgaaggcgcagctgctcagccatcagggcctgcacacaggggagaggccttttcactgccctgagtgtgacaagaacttccgggaaaggggacacatgctgaggcaccagcgcatccacaggcccgagaggccctttgcctgtggcgattgtgggaagggcttcatttacaagtctaagcttgcggagcacatcagagtacacacaaaatcctgtcctgctccaaatgaactggacattaagaaaaggctcagccaactgtttgcaatgatagaggccgattggagttgaggcagagtgggacatccaaagcgttgagcaggattggtattgcccaggaatccacagcaacagtagccagacccgctggtagacgggttttaggagcaggtatccttctttgagcaagagtgtcatgcaagttaggaatatgaagaaccacaaaggattttctcttcagaagcatcaccaattatatttctttcttttttttttttttttccaagatggagttttgctctgtcacccaggctggagtgcagtggcgtgatcccagctatattggaaaagacagcattataaaacaaggacataattttatgaaaaaggaggcatctgcaaacgaaaacaatttctacgaggttatatgtgattgttaacatttttaagaaaaggtgcacacagaaatccagataagatgtgattacctttgtgcatttgtataaaaatatatgtgtgtaattataaggaagttctgacattttaaaaagtaattgttataaaagtaaatttaggccaggcacagtggttcatgcctgtaatcccagcacttgggaggccgtggcaggaggatcacgagccaaggagtttgagaccagcttgggcaacatggcaaaaccctgtctctactaaaaatacaaaaattagccaggcatggtggtacacaccagtagtcccagctactcctgaagctgaggtgggaggatcgcctgagcccagggaggtcaaggctgcagtgagcaatgatggtgccactgcactccagtatggatgacatagtatgacactgtctc

SEQ ID NO: 15 - DNA, 1740 bp, Homo Sapiens
ccagcgttagcccgcggccaggcagccgggaggagcggcgcgcgctcggacctctcccgccctgctcgttcgctctccagcttgggatggccggctacctgcgggtcgtgcgctcgctctgcagagcctcaggctcgcggccggcctgggcgccggcggccctgacagcccccacctcgcaagagcagccgcggcgccactatgccgacaaaaggatcaaggtggcgaagcccgtggtggagatggatggtgatgagatgacccgtattatctggcagttcatcaaggagaagctcatcctgccccacgtggacatccagctaaagtattttgacctcgggctcccaaaccgtgaccagactgatgaccaggtcaccattgactctgcactggccacccagaagtacagtgtggctgtcaagtgtgccaccatcacccctgatgaggcccgtgtggaagagttcaagctgaagaagatgtggaaaagtcccaatggaactatccggaacatcctgggggggactgtcttccgggagcccatcatctgcaaaaacatcccacgcctagtccctggctggaccaagcccatcaccattggcaggcacgcccatggcgaccagtacaaggccacagactttgtggcagaccgggccggcactttcaaaatggtcttcaccccaaaagatggcagtggtgtcaaggagtgggaagtgtacaacttccccgcaggcggcgtgggcatgggcatgtacaacaccgacgagtccatctcaggttttgcgcacagctgcttccagtatgccatccagaagaaatggccgctgtacatgagcaccaagaacaccatactgaaagcctacgatgggcgtttcaaggacatcttccaggagatctttgacaagcactataagaccgacttcgacaagaataagatctggtatgagcaccggctcattgatgacatggtggctcaggtcctcaagtcttcgggtggctttgtgtgggcctgcaagaactatgacggagatgtgcagtcagacatcctggcccagggctttggctcccttggcctgatgacgtccgtcctggtctgccctgatgggaagacgattgaggctgaggccgctcatgggaccgtcacccgccactatcgggagcaccagaagggccggcccaccagcaccaaccccatcgccagcatctttgcctggacacgtggcctggagcaccgggggaagctggatgggaaccaagacctcatcaggtttgcccagatgctggagaaggtgtgcgtggagacggtggagagtggagccatgaccaaggacctggcgggctgcattcacggcctcagcaatgtgaagctgaacgagcacttcctgaacaccacggacttcctcgacaccatcaagagcaacctggacagagccctgggcaggcagtagggggaggcgccacccatggctgcagtggaggggccagggctgagccggcgggtcctcctgagcgcggcagagggtgagcctcacagcccctctctggaggcctttctaggggatgtttttttataagccagatgtttttaaaagcatatgtgtgtttcccctcatggtgacgtgaggcaggagcagtgcgttttacctcagccagtcagtatgttttgcatactgtaatttatattgcccttggaacacatggtgccatatttagctactaaaaagctcttcacaaaaaaaaaaa

SEQ ID NO: 16 - DNA, 4068 bp, Homo Sapiens
gcacccaggtcgggcggtgggggcgagcggaggggctgaggggcggagaggcctggcgggccgctgctgcgggccaggggacgggggcggagccggagccggagccgacgggcggtggccgcactgggaccccggaatcccgcgcgctgcccacgattcgcttctgaggaacctagaaagattgtacaatgaatggtgattctcgtgctgcggtggtgacctcaccacccccgaccacagcccctcacaaggagaggtacttcgaccgagtagatgagaacaacccagagtacttgagggagaggaacatggcaccagaccttcgccaggacttcaacatgatggagcaaaagaagagggtgtccatgattctgcaaagccctgctttctgtgaagaattggaatcaatgatacaggagcaatttaagaaggggaagaaccccacaggcctattggcattacagcagattgcagattttatgaccacgaatgtaccaaatgtctacccagcagctccgcaaggagggatggctgccttaaacatgagtcttggtatggtgactcctgtgaacgatcttagaggatctgattctattgcgtatgacaaaggagagaagttattacggtgtaaattggcagcgttttatagactagcagatctctttgggtggtctcagcttatctacaatcatatcacaaccagagtgaactccgagcaggaacacttcctcattgtcccttttgggcttctttacagtgaagtgactgcatccagtttggttaagatcaatctacaaggagatatagtagatcgtggaagcactaatctgggagtgaatcaggccggcttcaccttacactctgcaatttatgctgcacgcccggacgtgaagtgcgtcgtgcacattcacaccccagcaggggctgcggtctctgcaatgaaatgtggcctcttgccaatctccccggaggcgctttcccttggagaagtggcttatcatgactaccatggcattctggttgatgaagaggaaaaagttttgattcagaaaaatctggggcctaaaagcaaggttcttattctccggaaccatgggctcgtgtcagttggagagagcgttgaggaggccttctattacatccataaccttgtggttgcctgtgagatccaggttcgaactctggccagtgcaggaggaccagacaacttagtcctgctgaatcctgagaagtacaaagccaagtcccgttccccagggtctccggtaggggaaggcactggatcgcctcccaagtggcagattggtgagcaggaatttgaagccctcatgcggatgctcgataatctgggctacagaactggctacccttatcgataccctgctctgagagagaagtctaaaaaatacagcgatgtggaggttcctgctagtgtcacaggttactcctttgctagtgacggtgattcgggcacttgctccccactcagacacagttttcagaagcagcagcgggagaagacaagatggctgaactctggccggggcgacgaagcttccgaggaagggcagaatggaagcagtcccaagtcgaagactaaggtgtggacgaacattacacacgatcacgtgaaacccttgctgcagtctctctcgtccggtgtctgcgtgccaagctgtattaccaactgcttgtggactaaagaggatggacatagaacttccacctctgctgtccctaacctgtttgttccattgaacactaacccaaaagaggtccaggagatgaggaacaagatccgagagcagaatttacaggacattaagacggctggccctcagtcccaggttttgtgtggtgtagtgatggacaggagcctcgtccagggagagctggtgacggcctccaaggccatcattgaaaaggagtaccagccccacgtcattgtgagcaccacgggccccaaccccttcaccacactcacagaccgtgagctggaggagtaccgcagggaggtggagaggaagcagaagggctctgaagagaatctggacgaggctagagaacagaaagaaaagagtcctccagaccagcctgcggtcccccacccgcctcccagcactcccatcaagctggaggaaggagacggatgcgctagagagtacctgttaccctaaccttgtgccggagccgactactggagatgacagtgatgctgccacctttaagccaactctccccgatctgtcccctgatgaaccttcagaagcactcggcttcccaatgttagagaaggaggaggaagcccatagacccccaagccccactgaggcccctactgaggccagccccgagccagccccagacccagccccggtggctgaagaggctgccccctcagctgtcgaggagggggccgccgcggaccctggcagcgatgggtctccaggcaagtccccgtccaaaaagaagaagaagttccgtaccccgtcctttctgaagaagagcaagaagaagagtgactcctgaaagccctgcgctaacactgtcctgtccggagcgaccctggctctgccagcgtccccggccacgtctgtgctctgtccttgtgtaatggaatgcaaaaaagccaagccctccgcctagaggtcccctcacgtgaccagccccgtgtagccccgggctgacccagtgtgtgctcagcagccccaccccaccctgccccttgtcctctcagagcctcagcttctgggggagacatgctctccccacaggggggaggcactaagtcatggtcctggctggaaggtactgaaggcttctgcagctttggctgcacgtcaccctcctgagcctcacctttcctgccgtccctcctgttgtgaaatcaccacattctgtctctgcttggcttcccctccaccctaaagtctcaggtgacggactcagactcctggcttcatgtggcattctctctgctcagtgatctcacttaaatctatatacaaagccttggtcccgtgaaaacactcgtgtgcccaccagcggccttgaagaggcaggtctgggccagatgctgggcaggaaaccccagcggcagatgggcctgtgtgcacccaacgtgatgctatgcatgtctgaccgacgatccctcgaccagaatcagattcaggagctcagtttctttttcacttgggtctctggattcctgtcatagggaaggtatatcaggaggggaagaggcctttctagaattttctttgagcaggtttacaatttagcttacatttttcgactgtgaacgtgaataggctgctttttgctttcttctttccagaccccacagtagagcacttttcacttatttgggggaggcttcaggggactgttctcaccttaactcagccagaaagatgccctagttgtgatcaaaggtaactcgaggtggagggtagccctggggcccctcgacatcaccgtcattgatggagcctgaaccgtgtgctcctcggcagatgctgttgttgttacttccctccaagaggctggaaaagggctcagagctgctgagcaggaaccggagggtgacccatttcaggaggtgccggtaccagcctgactaggtacaggcaagcttgtgtgggcccaacaggcccttggtagagctggtgccagatgtgggctcagatcctgggcatgatgggccgagccacctcggatcccactgattggccagccgagcgagaaccaggctgctgcatggcactgaccgccgcttccagcttcctctgagccgcagggcctgctacgcgggcaagcgtgctgcctctcttctgtgtcgttttgttgccaaggcagaatgaaaagtccttaaccgtggactcttcctttatcccctcctttaccccacatatgcaatgacttttaattttcacttttgtagtttaatcctttgtattacaacatgaaatatagttgcatatatggacaccgacttgggaggacaggtcctgaatgtcctttctccagtgtaacatgttttactcacaaataaaattctttcagcaa

SEQ ID NO: 17 - DNA, 2564 bp, Homo Sapiens
attgataccacgttcattcacagggagccggctaaaacagactactcccccgtgcagtcgttccctctaccctaataaggctttggcgcctctcccagaactcggtcctggggaatgctctttgcctggtccagccccgacaaacgtggtctgagaacagcggagcgcggaaaccgcggagcatgactcctccgaagctgcgagcgtcgctgtcgccgtcgctgctgctgctgctgagtggttgcctcctcgcggctgctcggagggagaaaggggcggctagcaacgtggcggagccggtccccgggcccactggcggctcctcgggtcgcttcctcagccccgagcagcacgcgtgcagctggcagctcctgctgcccgccccggaggccgcagcgggcagcgagctggcgctgcgctgccagagcccggacggggcgcgccaccagtgcgcctaccgcgggcatccggagcgctgcgcagcctacgccgctcgccgcgcgcacttctggaagcaggtgctgggagggctgcgcaagaagcggaggccctgtcacgaccccgcgccgctccaggcccgcttgtgcgcgggcaagaagggccacggcgccgagctgcggctagtgccccgcgcgtccccgcccgcacgccccaccgtcgcgggattcgcgggggagtccaagccccgggcccggaaccgggggcggacccgggagcgtgcgtccggcccagccgctgggaccccgcctccccaaagcgcaccgcccaaagaaaacccctcagagaggaagaccaacgagggcaagaggaaggcggccttggtccccaacgaggagcgacccatggggaccgggcccgaccccgacgggctggacgggaacgcggagctcacggagacctactgcgctgagaagtggcactccctctgcaacttctttgtcaatttctggaacggctgagactgcctgccggcttagggagggttgatgggggaggcgtggggaagggaaagctaagggcgtcttagaccggggggtactgtgatagagattggggagaagtccaggttctcgaatgggggtgggggcaagggtaagggtgagatgcttgggatgagagtgtaaggggtatggagaatctctgggatagcagagaagttaaaaattttgaaaagtctcagtcctgattaagagcaggaaaaataatggaaacagaaataggcgtactttaaatgtgcaaaaactggagactggggagagaaatcgatgcagagggaggctgagaataagggggagatagagtgactaaagtgatgtgagtcccatgtggggagggggatgcaatgtttattgtttaacatttctattaaatgcagccatgagcaattgccaacctgagccaggttgaatcaatgtcttctcacttaatcagctaacaagactgcagactttttttccgtttctgaattggtataaacttggatgcggcgtggtgggtgtcatagataacctctatagggacagaagcctcacaggtcaaaactggctccaaggaaagttttgcagaatgatttcctttccattcttttagaagagctacctttttttttttttttccctgacagggtctggcttgcccaggctggagtgcggtggctagtcacaggtgtaataataggcactgcagtctccaactcctggcctcaagggatcctcacatcttagcctccagaatagctaggagtaggagtagctgggactacaagcatgcacagctgcacttggcttagaagtgctactttatttttatttttgagacagggtcttgtgtcatccagactggagcagtggtgcaattatggctcactgcggcctcgacattccagtctcaagtgatcctctgcctcagcctccggagtagccaggactacaggggtgtgccactagaagtgctactttttaacgaaatggtgactaatgttctggaactttcccattaaccttctgcatttagaaggaattatagatgttgagtgctccagtaaacagtgattctctttatatctgatttttttttttaaacagctaaaatgtaagtatgtatctcagagtcattttgaccattatggaagttgtatctctctgtttcatgtaactaattattaatatatttcatttttagtgtgatgtaatgagagactgtgtgtgtatgttaggtgctcaataaaaactgtatggttagatttaaagaagtggcaaggcaatggaaattctacctgcatttgatctacttccaagtacaccttgaattaagttcttaaacacatcttgaattgctgggaaaagacagaaactaagaagttgacataaagcaagagtcacaaactggcagccacctggccttatcattgttctatttgatttgcaccctggttctctttctttttcccttcctccccaccttcctcccatccattgttgaatctgtggatgcagagcccacggatgtggaggggcaactatatatatgtttttccattatatatataaatgtgtgtgtgtgta

SEQ ID NO: 18 - DNA, 1584 bp, Homo Sapiens
ggcattctggcgcggagcggagcggcggcgggcgcagctagcgggtcggccgcggagcggaggtgcagctcggcttcccccggcacccctccccctcgggcgccagccccacccctccgccggccgggccgaccccgccgtactatcccctgcggcgcgagcccggggcggctccaagcgccccccagcagacccccatcatgggcagccagagctccaaggctccccggggcgacgtgaccgccgaggaggcagcaggcgcttcccccgcgaaggccaacggccaggagaatggccacgtgaaaagcaatggagacttatcccccaagggtgaaggggagtcgccccctgtgaacggaacagatgaggcagccggggccactggcgatgccatcgagccagcaccccctagccagggtgctgaggccaagggggaggtcccccccaaggagacccccaagaagaagaagaaattctctttcaagaagcctttcaaattgagcggcctgtccttcaagagaaatcggaaggagggtgggggtgattcttctgcctcctcacccacagaggaagagcaggagcagggggagatcggtgcctgcagcgacgagggcactgctcaggaagggaaggccgcagccacccctgagagccaggaaccccaggccaagggggcagaggctagtgcagcctcagaagaagaggcagggccccaggctacagagccatccactccctcggggccggagagtggccctacaccagccagcgctgagcagaatgagtagctaggtaggggcaggtgggtgatctctaagctgcaaaaactgtgctgtccttgtgaggtcactgcctggacctggtgccctggctgccttcctgtgcccagaaaggaaggggctattgcctcctcccagccacgttccctttcctcctctccctcctgtggattctcccatcagccatctggttctcctcttaaggccagttgaagatggtcccttacagcttcccaagttaggttagtgatgtgaaatgctcctgtccctggccctacctccttccctgtccccacccctgcataaggcagttgttggttttcttccccaattcttttccaagtaggttttgtttaccctactccccaaatccctgagccagaagtggggtgcttatactcccaaaccttgagtgtccagccttcccctgttgtttttagtctcttgtgctgtgcctagtggcacctgggctggggaggacactgccccgtctaggtttttataaatgtcttactcaagttcaaacctccagcctgtgaatcaactgtgtctcttttttgacttggtaagcaagtattaggctttggggtggggggaggtctgtaatgtgaaacaacttcttgtctttttttctcccactgttgtaaataacttttaatggccaaaccccagatttgtactttttttttttttctaactgctaaaaccattctcttccacctggttttactgtaacatttggaaaaggaataaatgtcgtccctttaaaaaaaaaaaaaaaaaaaaaagaaaaaaaaaaaaaaaa

SEQ ID NO: 19 - DNA, 2450 bp, Homo Sapiens
gcacggtgcccgctctaccccgccgcagcggctgggacgtacggagcccgcaagtcccggcccgaggtccgaggaggcgtcctccgcccggtggcccagagggaagcggggcacggcgtcatcatgcacagttgtatcgcgcccgccgcgcgtccccggagccgcccctgagcccgaccgcgagttcgagctcagggcccgcccggccgcaccatgagccacgggcccagcccccggctggccgagtccccgcagctgtccaagggcagcctcctgaccatcctgggcagcccgtcgccggagcgcatggggcctgccgactccttgccgcccacgccgcccagcggcacgccctcgcccgggccgccgcccgcactgcccctgccccccgcgcccgcgctgctggccgacggcgactgggagagccgcgaggagctgcggctgcgggagctggaggaggcgcgggcgcgggcggcgcagatggagaagaccatgcgccggtggtcggactgcactgccaattggcgcgagaaatggagcaaggtgcgcgctgagcgcaaccgcgcgcgcgaggaggtgcgccagctgcgccagcgcctggacgcgctcaccaaggagctggcgggcgcacggcgcgagcgccaagaggcgcagggcgagtgcgaggcacggggccgcgagctggcgcggctgaggggcgcccggggggtcgccgaccagacgcgcgacggccccgagccggaagcggagcgcgagccagtgcgtgacgtcgggtccgagaggccgccaggcagccaggaactggagctggtggagagcctgctgaagagcatgccagaggagtctgaggactgctgggaggcgcgcagcctgggggctgggggcccgcggggcagctcaggccgccaggagcgcagccggctaccctgggaggacacagctgccacggaggaggaggcctccaagttgaccgccctgcggctacggctggatgagtcccagaaggtgctgctcaaggagcgagaggataaactggcgttgagcaggaacattgagaagctagagggggagctcagccagtggaagatcaagtatgaggagctgagcaagaccaagcaggagatgctcaagcagctcagcatcctgaaggaggcgcaccaggacgagctgggccgcatgtctgaggacctggaagatgagctcggtgcacgctccagcatggaccggaaaatggccgagctgaggggcgagatggagcggctgcaggccgaaaacgctgcggagtggggccgccgggagcggctggagacagagaaactgggccttgagcgggagaacaagaagctgcgggcacaggtcggagacctggaggaggcgctggcccggcggcggcggcaaacagccagcgcactggactgcgacctgagggccagccaggccgcgctcttcgagaagaacaaggagctggcagacctgaagcatgtgcatggcaagctgaagaagcagttccaggagaaggtggcagagctggcacatgccaaccggcgggtggagcagcacgaggctgaggtgaagaagctgcggctgcgggtggaggagctcaagaaggagctggcccaggctgaggacgagctggacgaggcccacaaccaggcacgtaagctgcagcggtcgctggacgagcagacggagcagagcgagaacctgcaagtgcaactggagcacctgcagtccaggctccgcaggcagcagcagaacgctcccctcttcgggaagatccgcagtgctcgctttggcaccgaggaggccgaggatggaaccagtgacctggacgaggacgaggacctgcaaatccaggtggcctagagcttcctgtggctgggcaggatgggccgccccatacctgcccagggtccaggctaaccagccactcaaactgatgcagtgcctaggctcactctgggaccagtccctgccacagccgactttcttctctcccagggatggcgtcaacagtcccacctaccaacgccctgtggaaaggaagcctatgttttatatatatatatacacacacgcgcgcgcgcgcgcgcacacccagaagtctttggacccatttggttttataaatacaggacagctccaaggcccagtccagatgacctcacccacccaggacttcatgcagggctgggcatgttgggggcagttgttggagccccaccctgggctgcctctctaggcttcgctgttcatcatacaatgcagtgaacccagttatttgtaataaatgaagttcaagttcttggggcatctgaaagtatggcagatgtgggcgggggttgtgggggacggcatcggcctgcacctgacgctgaaccagagctcaggaatgtcaagtaacttaataaatgagtgaatgtgaagaaaaaaaaaaaaaaaaaaaaaaa

SEQ ID NO: 20 - DNA, 2960 bp, Homo Sapiens
gcgtctgattggccatgcgcactgtcacctgtcacggctcccttgctcgccccggtgcgcggcacagcctcgcggcattgtgggagtcgtagtccgcggtgaggcccagtgcgcaggcgcagtttgccggccgccatcgcgcactggggctccgggcggctgggaccggcctggggtagctgcgcagcaggtgggtcggtcccggggatgcagcgcgggggtcagagagcgaccccaacagggtagacggtgaggacgcctcagtgggcagcgttagggaaaggggccagggtgttcccggggttggggtgcgagcccccgctgtgcgtccaggaggccgagggtctggcatcccttcgcgtggagtgcggggcaggggccgggtccccccggaggtggctgagatccagatcggtgaggggccctgcaggcaggtctgtgggttctggcaccacctgagcccactgggcatctggtcatccctggcacctctcctttggagccaccttgtccctggctagacagtcacattttccagtgccgttttggaaagatgttgcctttggagaaggcgtttgcctcccccaggagctccccagccccgccggatctgcccacgccggggtcagcagccggagtccagcaggaagaacccgagaccatccctgagaggacccctgctgacctggagttctcccgcctgcgtttccgggaatttgtctaccaggaggctgccgggccccaccagaccctggcccggctgcatgagctgtgccgccagtggctgatgcctgaggcgcgctccaaggagcagatgctggagctgctggtgctggagcagttcctgggcatcctgcctgataaggtccggccctgggtggtggcacagtaccctgagagctgcaagaaggcagcctccctggtggagggcctcgctgatgtcctggaagagccagggatgctgctgggctcccctgcgggctcatcctcaattcttagcgatggagtgtacgagaggcacatggaccctctgctgctaccaggcgagctcgcgagccccagccaggcccttggagctggggagatcccggcaccttctgagacaccctggctttctccggaccccctgtttctggaacagaggagggtcagagaagcaaagaccgaagaggacggccctgccaacaccgagcagaagctgaagtcctttccagaggaccctcagcacctgggggagtggggccacctggaccctgccgaggagaacctgaagagctaccggaagctgctcctgtgggggtatcagctttcccagcctgacgctgcctccaggctggacactgaggaactccggttggtggaaagagatccacaaggaagcagcctcccagaaggcgggaggcggcaggagagcgctgggtgcgcctgcgaggaggccgcccccgcgggggtgctgcctgagctgcctacggaggcgccccctggggacgcccttgccgatcccccgtcgggcaccactgaggaggaggaagagcagcctgggaaggccccggacccgcaggacccccaggacgcggagtccgactctgccaccggatcgcagaggcagtccgtcatccagcagcctgccccggacaggggcacggcgaaactgggaaccaagaggccgcaccccgaggatggggacgggcagagcctcgagggcgtctctagctccggcgacagcgcagggctggaggccgggcagggccctggggctgacgagccgggcttgtcccgcgggaagccctatgcctgcggcgagtgcggggaggccttcgcgtggctctcgcacctgatggagcaccacagcagccatggcggccggaagcgctacgcctgtcagggctgctggaagaccttccacttcagcctggccctagccgagcaccagaagacccacgagaaggagaaaagctacgcgctggggggcgcccggggcccccaaccgtccacccgcgaagcccaggcgggggctagggcgggcggtcccccagagagcgtggagggcgaggctccccccgcacccccagaggcgcagaggtgagccgctgtgctgtcccgttccggaggggccgctttgccggccgtgaatcccagacgaggcattgggcctttccacgcccctgggtggcggcttcctgtggtgtttgtggacgtcctctgcctgtgccctgaatccgctcctgaggctaagcgctcccaacgagaagggtccacgggaagccctcacctctgtaaacacaccctgggccagcgctcgcatccgaggggagccgccggatgtggaagaagactcggctttcctgcagccatttagtgccgccccatgctaggttatttgacattgtgcagtgtagagttgccttaaagtgcgtgatctgccagtgctttcttcaagtcacccttgccccgattcctcctgtttgcgctccccagggttgctcaagtggaaattttgtcagctgtttagccttttcgtacttggcgtgatgtcaacttcacttctaatctgcaaaagcagaagctgtttcctagtttacctcgcgtgtgtttacctatatggagtagctcgcagagatcacagaaatgcttgcagcctaaggcagggttttcagaccgtgggtcccagcccatttagtaaaatgggaaatcaattagcaagtggtcaccagcattacacagcaatgaagcagaataaagtaggccagaatgcatcatgtagtaaaggcaaatactgttttgtgaaacttttcacccatacatctaaatgtgagaactggttgcaatgtaagacatttcttgctgggaagttgtgagcaaaataagttgaaaacactaataaagatctgtctgtctgagcaaaggagactaaactccttgggctacaaaaaaaaaaaaaaaaaaaaaaaaaaaaaaaa

SEQ ID NO: 21 - DNA, 1825 bp, Homo Sapiens
gaagccggggccggggctgcggggcgagttgtcggccctgggccgggagctggagtcccagactcataggtcccggcccagcccccgaagagccgcctcagccggggggagttgctcggactcaaacgtccagtcctcgtgcgaccgcgctgggtcggaagtgagcaggctgaggccaccatggagcagtgtgcgtgcgtggagagagagctggacaaggtcctgcagaagttcctgacctacgggcagcactgtgagcggagcctggaggagctgctgcactacgtgggccagctgcgggctgagctggccagcgcagccctccaggggacccctctctcagccaccctctctctggtgatgtcacagtgctgccggaagatcaaagatacggtgcagaaactggcttcggaccataaggacattcacagcagtgtatcccgagtgggcaaagccattgacaggaacttcgactctgagatctgtggtgttgtgtcagatgcggtgtgggacgcgcgggaacagcagcagcagatcctgcagatggccatcgtggaacacctgtatcagcagggcatgctcagcgtggccgaggagctgtgccaggaatcaacgctgaatgtggacttggatttcaagcagcctttcctagagttgaatcgaatcctggaagccctgcacgaacaagacctgggtcctgcgttggaatgggccgtctcccacaggcagcgcctgctggaactcaacagctccctggagttcaagctgcaccgactgcacttcatccgcctcttggcaggaggccccgcgaagcagctggaggccctcagctatgctcggcacttccagccctttgctcggctgcaccagcgggagatccaggtgatgatgggcagcctggtgtacctgcggctgggcttggagaagtcaccctactgccacctgctggacagcagccactgggcagagatctgtgagacctttacccgggacgcctgttccctgctggggctttctgtggagtccccccttagcgtcagctttgcctctggctgtgtggcgctgcctgtgttgatgaacatcaaggctgtgattgagcagcggcagtgcactggggtctggaatcacaaggacgagttaccgattgagattgaactaggcatgaagtgctggtaccactccgtgttcgcttgccccatcctccgccagcagacgtcagattccaaccctcccatcaagctcatctgtggccatgttatctcccgagatgcactcaataagctcattaatggaggaaagctgaagtgtccctactgtcccatggagcagaacccggcagatgggaaacgcatcatattctgattcctacctggaaggaattttgttgaaaggggttttcacctgtgagccttggtctgtctcggtagggtggtcaacttcagtggactgtggttggtttcagagcgcctggctgaggagttccactgaggggagcactggagcagccctttggcagaggctgaggagggagatggaccagcccacgcctggcacctggctccatggcataaggaaagggagatgctggcctctgtgctcctgctgtcttttcctgtttctgtttgcgtttgacttagtagcaaccgacagagtggcaagggatttggtcttcagcagtagacatccttccacccctgccctcagccaagtctcttgctgccatgccaatgctatgtccacccttgcccctcggcccaagagtgtccagcggtggcccacctcttcctcccactacagcctcaacagtaaaaaaaaaaaaaaaaaa

SEQ ID NO: 22 - DNA, 1939 bp, Homo Sapiens
cgcctccgccttcggaggctgacgcgcccgggcgccgttccaggcctgtgcagggcggatcggcagccgcctggcggcgatccagggcggtgcggggcctgggcgggagccgggaggcgcggccggcatggaggcgctgctgctgggcgcggggttgctgctgggcgcttacgtgcttgtctactacaacctggtgaaggccccgccgtgcggcggcatgggcaacctgcggggccgcacggccgtggtcacgggcgccaacagcggcatcggaaagatgacggcgctggagctggcgcgccggggagcgcgcgtggtgctggcctgccgcagccaggagcgcggggaggcggctgccttcgacctccgccaggagagtgggaacaatgaggtcatcttcatggccttggacttggccagtctggcctcggtgcgggcctttgccactgcctttctgagctctgagccacggttggacatcctcatccacaatgccggtatcagttcctgtggccggacccgtgaggcgtttaacctgctgcttcgggtgaaccatatcggtccctttctgctgacacatctgctgctgccttgcctgaaggcatgtgcccctagccgcgtggtggtggtagcctcagctgcccactgtcggggacgtcttgacttcaaacgcctggaccgcccagtggtgggctggcggcaggagctgcgggcatatgctgacactaagctggctaatgtactgtttgcccgggagctcgccaaccagcttgaggccactggcgtcacctgctatgcagcccacccagggcctgtgaactcggagctgttcctgcgccatgttcctggatggctgcgcccacttttgcgcccattggcttggctggtgctccgggcaccaagagggggtgcccagacacccctgtattgtgctctacaagagggcatcgagcccctcagtgggagatattttgccaactgccatgtggaagaggtgcctccagctgcccgagacgaccgggcagcccatcggctatgggaggccagcaagaggctggcagggcttgggcctggggaggatgctgaacccgatgaagacccccagtctgaggactcagaggccccatcttctctaagcaccccccaccctgaggagcccacagtttctcaaccttaccccagccctcagagctcaccagatttgtctaagatgacgcaccgaattcaggctaaagttgagcctgagatccagctctcctaaccctcaggccaggatgcttgccatggcacttcatggtccttgaaaacctcggatgtgtgcgaggccatgccctggacactgacgggtttgtgatcttgacctccgtggttactttctggggccccaagctgtgccctggacatctcttttcctggttgaaggaataatgggtgattatttcttcctgagagtgacagtaaccccagatggagagataggggtatgctagacactgtgcttctcggaaatttggatgtagtattttcaggccccacccttattgattctgatcagctctggagcagaggcagggagtttgcaatgtgatgcactgccaacattgagaattagtgaactgatccctttgcaaccgtctagctaggtagttaaattacccccatgttaatgaagcggaattaggctcccgagctaagggactcgcctagggtctcacagtgagtaggaggagggcctgggatctgaacccaagggtctgaggccagggccgactgccgtaagatgggtgctgagaagtgagtcagggcagggcagctggtatcgaggtgccccatgggagtaaggggacgccttccgggcggatgcagggctggggtcatctgtatctgaagcccctcggaataaagcgcgttgaccgccgaaaaaaaaaaaaaaaaaaaa

SEQ ID NO: 23 - DNA, 2360 bp, Homo Sapiens
cgcgttcgcggacggctgtggtgttttggcgcatgggcggagccgtagttacggtcgactggggcgtcgtccctagcccgggagccgggtctctggagtcgcggcccggggttcacgatgtccgacgaggaagcgaggcagagcggaggctcctcgcaggccggcgtcgtgactgtcagcgacgtccaggagctgatgcggcgcaaggaggagatagaagcgcagatcaaggccaactatgacgtgctggaaagccaaaaaggcattgggatgaacgagccgctggtggactgtgagggctacccccggtcagacgtggacctgtaccaagtccgcaccgccaggcacaacatcatatgcctgcagaatgatcacaaggcagtgatgaagcaggtggaggaggccctgcaccagctgcacgctcgcgacaaggagaagcaggcccgggacatggctgaggcccacaaagaggccatgagccgcaaactgggtcagagtgagagccagggccctccacgggccttcgccaaagtgaacagcatcagccccggctccccagccagcatcgcgggtctgcaagtggatgatgagattgtggagttcggctctgtgaacacccagaacttccagtcactgcataacattggcagtgtggtgcagcacagtgaggggaagcccctgaatgtgacagtgatccgcaggggggaaaaacaccagcttagacttgttccaacacgctgggcaggaaaaggactgctgggctgcaacattattcctctgcaaagatgattgtccctggggaacagtaacaggaaagcatcttcccttgccctggacttgggtctagggatttccaacttgtcttctctccctgaagcataaggatctggaagaggcttgtaacctgaacttctgtgtggtggcagtactgtggcccaccagtgtaatctccctggattaaggcattcttaaaaacttaggcttggcctctttcacaaattaggccacggccctaaataggaattccctggattgtgggcaagtgggcggaagttattctggcaggtactggtgtgattattattattatttttaataaagagttttacagtgctgatatgaccctgttgtcaccccagctgaatttcttatgaccctcccaaaccaaagctcagatggggtcagaagagcttcatagaaagttgggcaaaacaggctagcaattgcaaagtcaggctttgaccaacatatttctttgcactgaggccttgctgctgtggatacggaaatggttaagtactgtgcttcctcagcagctgggctgtcagggccatagtagctccctttggagaacagggaaagcctggaggcttcccaggtggcccagcgtggtgtcctgtcagcttcctctttaggaacccaccagagggcagcaagctcctttcacttcgctagtaagaacccctccgtttttgtgtgtttttgtttttgttttctggagacaaggtcttgctttgtcacccaggctggagtgcagtgtcgtgatcaaggttcactgaagccttgacgctgtgggcactgcctcagccgcccaagtatctgggaccacaggcgtgcaccaccatgcatagctaatttattttttgtagagacagggtctccctgtgttgaccaggttggtctcgaactcctgggctcaagcagtcctcctgccttggcctcctaaagtgctgggatcacaggcgtgagccactgcgcccagcccactgctagtttgactttttataattgaacctcctggctatgccctgagatcagcgctattttgtaaaccgctgaggtatggataggaacgagtagatcagacctcttgaaaatgcttattcttcctcccttttattttttgtctcttttaagatggtaaaatggttctcagggattcctgccaatactttgaattattttttcctctccatggtatcagtgttcatttccccagttcttgcacaccgctttctgttttggcagttctgccaggcaagccctgtgttccttgggactggttttgctgtggttggatacagataccagcttgccttgatgggattggtattgctgtgtgcttccagccacaggttctcacactcaattccaaagccttcctattgggcgaattccctcaaactctatttgacctgacagccatacgtattcccctctggtagccacagacatgctgtgtttaccaatgtttgctgtttaaattgcatgttctaattccacgtattttccagtctcttttataaagtctcagactataataaacacagcttgcccagtttaaaaaaaaaaaaaaaaaa

SEQ ID NO: 24 - DNA, 6633 bp, Homo Sapiens
cggcgccgcgcggccgcgctagaatggaggcgcccagcggcagcgagcccggcggcgacggggccggggactgcgcccacccggacccccgggcccctggcgccgcggcgcccagctccggccccggcccgtgcgcggccgcccgggagtccgagcgccagctgcgcctccgcctctgcgtcctcaacgagatcttgggcaccgagagggactacgtgggcaccttgcgcttcttgcagtcggcattcctgcatcgcatccggcagaacgtggccgactcagtggagaagggcctcacggaggagaatgtcaaggtcctgttctcgaacatcgaagacatcctggaagttcataaggatttcttggccgccttggagtattgtttacacccggagccgcagtctcagcatgaacttgggaatgttttcttaaaattcaaggacaagttctgcgtgtacgaggagtattgcagcaaccatgagaaagccctgaggctgctggtggagctgaacaagatccctaccgtgcgcgccttccttttgagctgcatgcttctgggaggccggaagaccacggacatccctttggaaggctacctgttgtctccgatccagaggatctgcaagtacccgctcctccttaaggagctggccaagaggactcccggcaagcacccagaccaccccgcggtccagagtgccctgcaggccatgaagaccgtttgctccaacatcaatgagaccaagcggcagatggagaagctggaagccctggagcagctgcagtcccacatcgaaggctgggagggttccaacctcacagacatctgcactcagctcctcctgcaagggactttgttaaagatctctgcgggcaacatccaggaaagggccttcttcctcttcgacaaccttctcgtctactgcaagcggaaatccagggtcaccgggagcaagaagtccaccaagaggaccaaatccatcaacggctccctctacatcttcaggggtcgaatcaacactgaagtcatggaggtggagaatgtggaagatgggacagcggattaccatagcaacggctataccgtcaccaacggctggaagatccacaacacggccaagaataagtggtttgtctgcatggccaagacggcagaggagaagcagaagtggctggatgccatcatccgcgagcgggagcagcgcgagagcctgaagctgggcatggagcgtgatgcctacgtcatgattgcggagaagggggagaagctgtaccacatgatgatgaacaagaaggtgaacctcatcaaggaccgccggagaaagctgagcactgtccccaagtgctttcttggcaatgagttcgttgcctggctcctagaaattggtgaaatcagcaagacggaagaaggagtcaacttgggccaagccctgttggagaatggcatcatccaccatgtttccgacaagcaccagttcaagaatgagcaggtgatgtatcgcttccgctacgacgatggcacctacaaggcccgaagtgagctggaggacatcatgtccaagggtgtgaggctttactgccgtcttcacagcctctacaccccggtgatcaaagaccgtgattaccacctgaagacctacaagtcagtgcttcccgggagcaagctggtggactggctgctggctcagggagactgccagactcgggaggaggcagtggcgctcggcgtgggtctgtgcaacaatggcttcatgcaccacgtgctggagaagagcgagttcagggatgagtcccagtacttccgctttcatgctgacgaggagatggaggggaccagcagcaagaacaaacagcttcgcaacgacttcaagctggtggagaacattctggccaagcgcctgctgatcctgccccaggaggaggactatggctttgacatcgaggagaagaacaaggctgtggtggtgaagtccgtccagaggggctcgctggctgaggtggctggcctgcaggtggggaggaagatctactccatcaatgaggacctggtgttcctgcggccgttttcagaggtggagtccatcctcaaccagtccttctgctcccgccgccctctgcgcctcctggtggccacgaaggccaaagagatcatcaaaatccccgaccagccggacacactgtgcttccagattcgtggagctgccccaccgtacgtctatgctgtggggagaggctctgaggccatggctgcagggctctgtgctggtcagtgcattctgaaggtcaatggcagcaacgtgatgaacgatggtgcccctgaggtcctggagcacttccaggcattccggagtcggcgcgaagaggccctgggcctgtaccagtggatctaccacacccatgaggatgcccaggaagcacgagccagtcaggaggcctccactgaggaccccagtggcgagcaggcccaggaggaagaccaggctgattcagccttcccactgctgtccctgggtccccggctgagcctgtgtgaggacagccccatggtcaccctgactgtggacaacgtgcacctggaacacggcgtggtgtatgagtatgtgagcacggcaggcgtcaggtgccatgtgctggagaagatcgtggagccccgcggctgcttcggcctcaccgccaagatcctcgaggcctttgctgccaatgacagcgtcttcgtggagaactgcaggcggctcatggccctgagcagcgccatcgtgaccatgccccactttgagttccgcaacatctgtgacaccaagctggagagcattggccagaggattgcctgctaccaggagtttgcagcccaactgaagagcagggtcagcccacccttcaaacaagcccccctggagccccacccgctgtgtggcctggacttctgccccaccaattgccacatcaacctcatggaagtgtcctaccccaagaccaccccctcagtgggcaggtccttcagcatccgctttggacgcaaaccctccctcatcggccttgacccggagcaaggccacctgaaccccatgtcgtacacccagcactgcatcaccaccatggctgctccctcctggaagtgcttgcctgctgcagagggtgatccccaaggccagggtctccatgatggcagcttcgggccagccagtgggacccttggtcaggaagaccggggcctcagcttcctactcaagcaggaggaccgtgagatccaggatgcctacctgcagctcttcaccaagctggatgtggccctgaaggagatgaagcaatatgtcacccagatcaacaggctgctgtccaccatcacagagcccacctcgggtgggtcctgcgacgcatccttggctgaggaggcctcctccctgcccctggtcagtgaagagagcgagatggacaggagtgaccatgggggcatcaagaaggtgtgcttcaaggtggccgaggaggaccaggaggactcaggccacgacaccatgagttatcgcgactcctacagcgagtgtaacagcaatcgagactcggtcctgtcctacaccagcgtgagaagtaacagctcctacttgggcagcgacgagatggggtctggagatgagctgccctgtgacatgcggatcccatctgacaagcaggacaagcttcatggctgcctggagcacctctttaaccaggtggactccatcaatgctctcctcaaggggccagtcatgagccgggctttcgaagagaccaagcatttccctatgaaccacagcttacaagagtttaaacagaaagaagagtgtacaatccgtggccggagcctgatccagattagcatccaggaggacccctggaacctccccaactccatcaagaccctggtggacaacattcagagatatgtggaagatgggaagaaccagctgctcctggccttgctgaagtgcacagacacggagctgcagctgcgcagagacgcgatcttctgccaggccctggtggccgccgtgtgcaccttctccgagcagctgctggcggccctgggctaccgctacaacaacaatggcgagtacgaggagagcagccgcgacgccagccgcaagtggctggagcaggtggcggccacgggcgtcctgctgcactgccagtccctgctctcgccagccacagtgaaggaggaacggaccatgctggaggacatctgggtgacgctgtcagagctggacaatgtcaccttctcctttaagcagctggacgagaactatgtggccaacaccaacgtcttctaccacattgagggcagccggcaggcgctgaaggtcatcttctacctcgacagctaccacttctccaagctgccctcccgcctggagggtggggccagcctgaggctgcacacagcgctgttcacgaaagtgctggagaacgtggaggggctgccttctccaggcagccaggccgcggaggatttgcagcaggacatcaacgcgcagtccctggagaaagttcagcagtattaccgcaaactcagggcattttacctggagcggtctaacctgcccacggatgccagcaccacggcggtaaagatagaccagctgatccgccccatcaatgccctggatgagctctgccgcctcatgaagtcctttgtccacccaaagcctggtgctgctgggagtgtgggcgccggcctcatccccatctcctcggagctctgctaccgcctgggggcctgccagatggtcatgtgtggcacaggcatgcagaggagcaccctgagcgtgtccctggagcaggcggccatcttggcacggagccacgggttgctgcccaagtgcatcatgcaggccacggacatcatgcggaagcagggcccaagggtggagattctggccaaaaacctgcgagtcaaggaccagatgccccagggtgctccgcgcctctaccgcctctgccagccgccggtggatggggacctctgaacacccaaatgccccacgctgggccgcggcctctggagctgggatttgggaggacacagcaggcagcgctggccttctccagggatggcccaaggcttccgcagccgcccgttccgggacctgcccagcgtcctccctgcctccttccgggacaagcctggccaccctcgctgtgatgacgagctggctgattggccctgggccggcccattcttcacacgcctgccagaagctggaggggtgctggagacccatagagctgatgggagcagctggtgcctggccttcggctcctgcgtccccagaacccaagggaacgtcatggaggccacatggggccacccggctccctcgggatggctccgcctgcacttttgaaaccccggtttccttcaacgtccacattccaggtgaccacacgtgtctcctcctcctcatcttagcttccaggttcaccctaaccctgtactaacctgcttggtggacttggaaaagacttggctctgtcgggaaaggagagacggggcctccatcacgcctgttaccagaggatccccgagagccacaccagctctggacatcaccgcccctggaactggggccaccagccctgggcacgagatttgctctgactttatttatatggcatgaaatctctggtttattttgggattttttgttgttggtgttgtcaaagtttgttttttctaaagttgtgtgattatatatttgacattttacatttcaaagaaaggtatgttgtctaacaggggaccaacagaaggtagtattgacaactgttcctgcttctactaaaaaaaaaagagcacaaaagaaaaactaaattattgaaaaattaaaaaatgtcattgtttcctgtttgttaatattagggttgtaaggtgtcgttttgaggtatcgactgtgattccttcccccaccctccattctccagcggttggccggtgttagaactcgctctctttgagtgactggctacaagggcctgagaggtggccagccagggttggagctggaggggatggagccccacctgaggtgccgtgtcacacgggttagagggtcactgggaaacaccgggcggtggcttctgtgatttattttcttgatggtaacttctcagagcagggcgattgggacatcaccagccagagcacaggaagccaccctgcctgctggggaggagggacccacacaagccccctcggcagtttgtccccccagcttcggtatgccttcagggaaaggtcacagctggggaggaagcggggggacgcctgtcacccctggcaggtggtgagttcaggtgggggctccctgctgcccccaggcctgggagcttgaagccctcccggcatctggcatccgagcctcccgccctccagggtgcgcttccctctcttgccgcagcatacacgagggcaggcagtggccttgtcactgtatcttgcatcagagacaaaggaggacccgctttagccctgctgcgggaaatgggggagggcccagggccagcgcattgtgcactggtttactttaaaatgtacagattcttctcgttaaattcttgatagattttttattattattaaaagtcagtttataatac

SEQ ID NO: 25 - DNA, 3114 bp, Homo Sapiens
ggggcccggaagtggtccctgtagaaccactgtggcaccgctactccgtgccgcgcccgtcgagcattgcgttgctgcattgcgccccaccgactccactatgttgaagaaattcgacaagaaggatgaggagtcaggtggaggctccaacccattccagcaccttgagaagagtgcggtactccaggaggcccgtgtatttaatgaaactcccatcaaccctcggaaatgtgcccacatcctcaccaagattctttatctcataaaccagggggagcacctggggaccacggaagcgaccgaggccttctttgccatgaccaagctctttcagtccaatgatcccacactccgtcggatgtgctacttgaccatcaaggagatgtcttgcattgcagaggatgtcatcattgtcaccagcagcctaacaaaagacatgactgggaaagaagacaactaccggggcccggccgtgcgagccctctgccagatcactgatagcaccatgctgcaggctattgagcgctacatgaaacaagccattgtggacaaggtgcccagtgtctccagctctgccctcgtgtcttccttgcacctgctgaagtgcagctttgacgtggtcaagcgctgggtgaatgaggctcaggaggcagcatccagtgataacatcatggtccagtaccacgcactagggctcctgtaccatgtgcgtaagaatgaccgcctagccgtcaataagatgatcagcaaggtcacacggcatggccttaagtctccctttgcctactgcatgatgatccgggtggccagcaagcagctggaagaggaggatggcagccgtgacagcccactgtttgacttcatcgagagctgcttgcgcaacaagcacgagatggtggtgtatgaagccgcctcggccatcgtcaatctgccaggctgcagtgccaaagagctggccccggctgtgtcagtgctccagcttttctgcagctcacccaaggctgctctccgctatgctgctgttcgtaccctcaataaggttgccatgaagcatccgtcagctgtgacagcttgtaatctggatctggagaacctggtcacagattcaaaccgcagcattgccacgctggccatcaccaccctccttaagacgggcagcgagagcagcatcgaccgcctcatgaagcagatctcctccttcatgtcagaaatctcggatgaattcaaggtggtggttgtccaggccatcagtgccctgtgtcagaaatatcctcgcaaacacgccgtccttatgaacttcctgttcaccatgctgcgggaagagggtggctttgagtataagcgcgctatcgtggactgcatcatcagcatcattgaagagaactcagagagcaaggagacagggctgtcacatctgtgcgagttcatcgaggactgcgagttcacagtgctggccacccgtattctacatctcctgggccaggaggggcccaagaccaccaatccctcaaagtacatccgcttcatctataaccgagtggtcttggagcatgaggaggtccgggcaggtgctgtgagtgctctggcgaagtttggagcccagaatgaagagatgttacccagtatcttggtgttgctgaagaggtgtgtgatggatgatgacaatgaagtaagggaccgagccaccttctacctaaatgtcctggagcagaagcagaaggcccttaatgcaggctatatcctaaatggtctgactgtgtccatccctggtctggagagggctctgcagcagtacactctagaaccatcagaaaaaccttttgacctcaagtctgtgcccctggccacggcgcccatggcagagcagagaacagaaagtacccccatcacagcagtcaaacagcctgagaaagtggcagctaccaggcaggagatcttccaggagcagttggcagcagtgccagagttccgcggtcttgggcccctcttcaagtcctcgcctgagcccgtggccctcaccgagtcagagacggagtatgtcatccgctgcaccaaacacaccttcaccaaccacatggtttttcagtttgactgcacaaacacactcaatgaccagaccttggagaatgtcacagtgcagatggagcccactgaggcctatgaggtgctctgttacgtgcctgcccggagcctgccctacaaccagcccgggacctgctacacactggtggcactgcccaaagaagaccccacagctgtggcctgcacattcagctgcatgatgaagttcactgtcaaggactgtgatcccaccactggggagactgatgacgaaggctatgaggatgagtatgtgctggaagatctggaagttactgtagctgatcacattcaaaaggtcatgaaactgaacttcgaagcagcctgggatgaggtaggggatgaatttgagaaggaggaaacgttcaccttgtctaccatcaagacacttgaagaggctgtgggtaatattgtgaagttcttgggaatgcacccttgtgagaggtcagacaaagtgccggataacaagaacacccacacgttgctcctggctggtgtgttccggggtggtcatgacatcctggtgcgctcccggctgctgcttttggacacagtgacaatgcaggtgacagccagaagtttggaggagctgccagtagacatcatcttggcatctgtgggataagaggccagcctgcataggacctcatacccttccccaacactacctggaagttgtgccttcctcatgaaactggcagaaaccccttcccaagcttctgtattgaaaaacaattaggaatcattgcagatttttttttattctgctcccacctcccacccgggactacttgctggtgactttttttttttttttttttaaataggggatgattttagcttgtcctaaatcttgctgtccacccttccaggaaagggacattgtaaatgaataaaacattctcaactcctcttgaatctatcccccaagaaaccatcttatccctgtaataaatcagcatgtatttattgaaaaaaaaaaaaaaaaaaaaaaaaaaaaaaaaaaaaaaaaaa

SEQ ID NO: 26 - DNA, 1 bp, Homo Sapiens
  misc_feature (1)..(1): n is a, c, g, or t
n

SEQ ID NO: 27 - DNA, 1 bp, Homo Sapiens
  misc_feature (1)..(1): n is a, c, g, or t
n

SEQ ID NO: 28 - DNA, 1553 bp, Homo Sapiens
gcggggattgtttacgtctcgctccggggcggaaagtgggtcagggccgggccggcggagcgcgcagcgggggctgcagattctttccaccatggccagacgcccccggaacagcagggcctggcacttcgtcctgagtgcagcccgccgagacgcagatgcccgggccgtggctctagcaggctccactaactggggctacgactctgatgggcagcacagcgactcggactccgaccccgagtactccacgctgccgccatccatccccagtgcggtgcccgtgaccggcgagtccttctgtgactgtgctgggcagagcgaggcctccttctgtagcagcctgcactcggcccaccggggcagggactgccgctgcggagaggaagacgagtatttcgactgggtctgggatgacttaaataagtcatcagccaccctgctgagctgtgacaaccgtaaggtcagcttccacatggagtacagctgcggcacagcggccatccggggcaccaaggagctgggggagggccagcacttctgggagatcaagatgacctctcccgtctacggcaccgacatgatggtgggcatcgggacgtcggatgtggacctggacaaataccgccacacgttctgcagcctgctgggcagggatgaggacagctggggcctctcctacacgggcctcctccaccacaagggcgacaagaccagcttctcatcgcggttcggccagggctccatcattggcgtgcacctggacacctggcacggcacactcacctttttcaagaacaggaagtgtataggtgtggcagccaccaagctgcagaacaagagattctacccgatggtgtgctccacggcggcccggagcagcatgaaggtcacccgctcctgtgccagcgccacttccctccagtacctgtgctgccaccgcctgcgccagctgcggccagactcgggagacacgctggagggtctgccgctgccgccgggcctcaagcaggtgctacacaacaagctgggctgggtcctgagcatgagttgcagccgccgcaaggctccagtgtccgatccccaggcagcgacctccgcccaccccagcagtcgcgagcctcggccctgccagaggaagcgctgccgccggacctgactgacttcccagtggaactgccttcttgggctgggacagcccctttcctctgtcccttctttctctgtcccttccttccagccacactccagggcggagttggatgaggcccgtccggagggagccatctcttgctcccgaggctgggacagtcctttctgtgggggctctagggcccctctgctgctgtgctgggtggggaagcggctgccctgagccccaggtcttgtgggaggctgcgaggacgagagcctggctggagcccgcgttgctgttcccacagggcctcggtttttcctaacttgctctgcatgctgtcagcggctgccccgccgtcatagacttaaaggactgcaataaatgtagagttgatgtctaacacccaaaaaaaaaa

SEQ ID NO: 29 - DNA, 2030 bp, Homo Sapiens
ggcggagaggcctggcgcacagggcgagggcggctgcggcgcagtctgcagcatggcgtacccggggcatcctggcgccggcggcgggtactacccaggcgggtatggaggggctcccggagggcctgcgtttcccggacaaactcaggatccgctgtatggttactttgctgctgtagctggacaggatgggcagatagatgctgatgaattgcagagatgtctgacacagtctggcattgctggaggatacaaaccttttaacctggagacttgccggcttatggtttcaatgctggatagagatatgtctggcacaatgggtttcaatgaatttaaagaactctgggctgtactgaatggctggagacaacactttatcagttttgacactgacaggagtggaacagtagacccacaagaattgcagaaggccctgacaacaatgggatttaggttgagtccccaggctgtgaattcaattgcaaaacgatacagcaccaatggaaagatcaccttcgacgactacatcgcctgctgcgtcaaactgagggctcttacagacagctttcgaagacgggatactgctcagcaaggtgttgtgaatttcccatatgatgatttcattcaatgtgtcatgagtgtttaaatcaagaggaagctgcatgaatgtaatcaacattccaactggagctctcctttgcttgtcctctttgccttcggtaatatgtataaacttacatcacgactttctcttaacagctgttgtaaagtttattactttatgtacaactgaagttttgttttagttttgataataaattctttggaactttaataagatctagtctgttacaccatttagaactttcctgagccattatcagtcatgccttattttcttgctaaaactctatgtaaatttaagtatgcaaaatgtttaagtcacattatttatttttcattgtgagacactaaaaactgttaatcagactacagctgttatctttcctctcctacaaagaatactccacacataaaaacttaggtaaatgacatagacgcacttgggtgaaataaaacaacaaaaaaggtaatccagtaatccacgtcaggattcaccttagaagtttagcacacgcccttcaaaacctgttgaataatttgattggcaaatactatctgtcaccaagtccctttttgtcatctatttaaacctttgttaactctccttaaaaatcttgtacattataagcttaactatataaaaagaaaattgatagaaaaagactaagggaatatatggaaatattaacaatgtttattttggatgaatggaattctagatgactttaattttctttatatcagtatttttcagattttctatatgctttccttttaaaatcagattttagtttttaaaatactgatacatccattttgatataccatgtattcacactttaaaaaatacacatagcagagtatcggaaagtatgtaccaaaacattgatctggctaccactgggagtcaggatcatgagttcatcttcttccttcttactgcttttccaaacattctccagtaagcaggtactacatttataatggaaggaattttttaaaaaattttaagctgtacactttcaagtaagatctgaattctaatgctggcttgtgcctcttactatgtggtttggtcattatagataatgcccagtttcagtttccccatctttgaaaaggagataatatgttatctcttgggagtagttctgaatatgaagtgtgttgatacaagaagcactgacaatgtttctgtttcttaaatttaaaactggcctggtttgccttttttatcaagagagcttaacagataaaaaatgaaattagtctattttctacttgccagcagagtatctgtcttattttaggatgcagtgtgaaacttaccattcaactgaacaactagttgtcaactaatgaaaataaaacattttctctaagaaaaaaaaaaaaaaaaaaaa

SEQ ID NO: 30 - DNA, 2941 bp, Homo Sapiens
ccgggttctctcccggcgtgccccgcgccgggtttgttggggggtactcggcagtgcagccatgactatactccccaaaaagaagccgccgcctcccgacgccgaccccgccaacgagccgccgccgcccgggccgatgcccccggcgccgcggcgcggcggaggtgtgggcgtgggcggcggcggcacgggcgtgggcggcggcgatcgcgaccgtgactccggcgtcgtgggggcccgtccgcgagcttcgccaccgcctcaaggcccgctaccaggaccgccgggcgctcttcatcgctgggcgctggccgtgccgcctggtgcagtggcgggtccccggccacaacaggcttctccacctccttgcgggggcccaggtggtcccggcggcggtcccggcgacgcgctgggcgcagcggcggcgggtgtgggtgccgcgggcgtggtggtgggtgtgggtggtgccgtaggcgtgggcggctgctgctccgggcctgggcacagcaagcggcgacgtcaagctcccggggttggcgcggttggcgggggcagtcccgagcgtgaggaggtcggcgcaggctacaacagtgaggacgagtatgaggcggctgcagcacgcatcgaggctatggaccctgccactgtcgagcagcaggagcattggtttgaaaaggccctacgagacaagaagggcttcatcatcaagcagatgaaggaggatggcgcctgtctcttccgggctgtagctgaccaggtgtatggagaccaggacatgcatgaggttgtgcgaaagcattgcatggactatctgatgaagaatgccgactacttctccaactatgtcacagaggactttaccacctacattaacaggaagcggaaaaacaattgccatggcaaccacattgagatgcaggccatggcagagatgtacaaccgtcctgtggaggtgtaccagtacagcacaggtacttctgcagtggaacccatcaacacattccatgggatacatcaaaacgaggacgaacccattcgtgttagctaccatcggaatatccactataattcagtggtgaatcctaacaaggccaccattggtgtggggctgggcctgccatcattcaaaccagggtttgcagagcagtctctgatgaagaatgccataaaaacatcggaggagtcatggattgaacagcagatgctagaagacaagaaacgggccacagactgggaggccacaaatgaagccatcgaggagcaggtggctcgggaatcctacctgcagtggttgcgggatcaggagaaacaggctcgccaggtccgaggccccagccagccccggaaagccagcgccacatgcagttcggccacagcagcagcctccagtggcctggaggagtggactagccggtccccgcggcagcggagttcagcctcgtcacctgagcaccctgagctgcatgctgaattgggcatgaagcccccttccccaggcactgttttagctcttgccaaacctccttcgccctgtgcgccaggtacaagcagtcagttctcggcaggggccgaccgggcaacttccccccttgtgtccctctaccctgctttggagtgccgggccctcattcagcagatgtccccctctgcctttggtctgaatgactgggatgatgatgagatcctagcttcggtgctggcagtgtcccaacaggaatacctagacagtatgaagaaaaacaaagtgcacagagacccgcccccagacaagagttgatggagacccagggattggacaccatctcccaaccccagtactcctgctctccggtgccacctcaccttctttggcttcttccctcttgcctccttctgttctttctgctctcccctcttttccctcctcctcacttccctctggctagcccacccctgcactctctctcattgccgctgccactatcacctgtctctctgccagctgatgtgccctgttgccccccaccccatcccgcacagaaccatccctgcattccacaggggactcgggcaagggtgccgaagatagacaagaggcacacagagacagaccaactggcagccaggcagccccagaggagagagacattcagacagaggaaagtctccctgcccctcattccttccaagatgagaaaaacttgccgccaccccccgacactgatgccagggaggtgggaggaagaagtgggaaatttcccttcccagtacccccaagaacgtctgagccttcaatgttgaattttttctttattaaaattacttttatcttataaaatcaactaatcaaaaatgatatagacgacagcactggctctgtgaaggtggcatctttctgggcaggcaggccatggggcatggaggagggtgcaaagatatgggttgctgtcttctggcctccagctgcatggaggccggcccagggtctagggtgtgcactgggcaagggcagggcggcaggtgtcaggccggcttggacaatgaaaccctgaccttgctgcattccttttgcttccaccaccactagcttctttggaatcttggggtgggggtcatctttggggattatggctgccacccgggatttgagtgtagggagtgtgggagcagccttggcagatggggcacccgtgccctgcaggtgttgacaagatccgccatctgtaatgtccttggcacaataaaaccaaatgtcagtttccctgagcgactctgttctgtgtggggcaggggttgggcgggcctctgggcagaggatgcaatggcacggaccttggcttgacctcagaggtgtgaatgctctccagcagggtctgtctgggggcctggagtttgtatttgatttgctgcttattaaacctccttctggacctattgccactggaaaaaaaaaaaaaaaaaa

SEQ ID NO: 31 - DNA, 1311 bp, Homo Sapiens
gccggaaggcggcgtccgcgacgcagctgttcacgcttaggtgggcgacgtgggcgcaggtgggcgcaggatggcaaaacagaagagaaaagttcctgaagtgacagagaaaaagaacaaaaagctgaagaaggcgtcagcagaggggccactgctgggccctgaggctgcaccaagtggcgaaggagccggctccaagggcgaagctgtgctcaggcccgggctggacgcagagccagagctgtccccagaggagcagagggtcctggaaaggaagctgaaaaaggaacggaagaaagaggagaggcagcgtctgcgggaggcaggccttgtggcccagcacccgcctgccaggcgctcgggggccgaactggccctggactacctctgcagatgggcccaaaagcacaagaactggaggtttcagaagacgaggcagacgtggctcctgctgcacatgtatgacagtgacaaggttcccgatgagcacttctccaccctgctggcctacctggaggggctgcagggccgggcccgagagctgacggtgcagaaggcggaagccctgatgcgggagctggatgaggagggctctgatccccccctgccggggagggcccagcgcatccgacaggtgctgcagctgctctcctagtgggttcagcgcggggcggggccgctgcccagtgcagggctgcctcagaccacacagggtgcagctcctccggcggtgggggccgggttcaccagcagggcagcggctgagcaagggctttcagctcctccggtggtgggggccgggatcaccagcaccagagcctcgcaagggccccttccctcctccagaccctccttggccggtgacggctgtgacagtgatggcaggttcagtgccttcagcgcagagcgtggatgctctggaatcacccggacccctggccttggagggaccctccagccccaggaatctgctttggagggaaatgtctatttttctaccgggaatattttagagattggggcatgctggctcctcccgccagctgcaaacctgcaccttccgcctgattcccgatccccctgcgtgggccgcattcctggtcccctgcctgcgtccatcgaggggcctggctgtggcctgttttcctttgaccccacacagcgtcattgcgggtcatggggagcccctggtgggagcttgtggagtcggatcacgtacctgtgcagaaaccgcctctgtggctgcatttgaaataaaacccgacccagcagcagccgtgggtcctgctctgtaaaaaaaaaaaaaaaaaa

SEQ ID NO: 32 - DNA, 2572 bp, Homo Sapiens
gttgtcgctgttgcagccgagttcagccgggagcagagcgaaccgcaccggcccgagcggagcgccgcacgttcccaaccgcgaggccagacatctgactgttggtgtgagaccagtgctcctggtggtgtgccctgagccatggaggcgcctttgcagacagagatggtggagctggtgcccaatggcaaacactcagaggggctgctcccggtcatcacccccatggcaggcaaccagagggtcgaggaccctgcacggagctgtatggagggcaagagcttcctacagaaaagtcccagcaaggagccacacttcactgacttcgaggggaagacatcattcgggatgtcagtgttcaacctcagcaatgccatcatgggcagcggcatcctgggactcgcctatgccatggccaatacgggcattatccttttcctgttcctgttgacagctgtcgccttgctctccagctactccatccacctgctactcaagtcctcaggggtcgtgggcatccgtgcctatgagcagctgggctaccgtgcctttgggaccccaggaaagctggcagcagccctggccatcacgctccagaacatcggagccatgtccagctacctgtacatcatcaagtctgagctgccacttgtcatacagaccttcctgaacctggaggagaaaacctcggactggtacatgaacgggaactacctggtaatccttgtctctgtcaccatcattctgcccctggcactgatgcggcagcttggctacctgggctactccagcggcttctctcttagctgcatggtgttcttcctaattgcagtcatctacaaaaagttccacgtgccctgcccactgccccccaacttcaacaacaccacaggcaacttcagccacgtggagatcgtgaaggagaaggtgcagctgcaggtcgagcctgaggcttcagccttctgcactcccagctacttcacgctcaactcacagacagcatacaccatccccatcatggccttcgccttcgtctgccaccccgaggtgctgcccatctatactgagctcaaggacccctccaagaagaagatgcagcacatctccaacctgtccatcgctgtcatgtacatcatgtacttcctggctgccctcttcggctacctcaccttctacaacggggtggagtcggagctgctgcacacctacagcaaggtggacccgtttgacgtcctgatcctgtgtgtgcgcgtggccgtgctgacagcagtcacgctcacagtgcccatcgttctgttcccggtgcgccgcgccatccagcagatgctgtttccaaaccaggagttcagctggctgcggcatgtgcttattgccgttggcctgctcacttgtatcaacctgctggtcatctttgcccccaacatcctgggcatctttggggtcatcggtgccacatctgccccattcctcatcttcatcttccctgccatcttctacttccgaatcatgcccacggagaaggagcctgcaagatccacccccaaaatcctggccctgtgttttgctatgcttggcttcttgctgatgaccatgagcttgagcttcatcatcattgactgggcctcagggaccagccggcatggaggaaaccactagggtgaccctcatcctgttctgtctactcaccctagcagccctgcccagactcttcagcccctgctcccatccagtggccagtcgggggaggagaaagacgcgattaacactgtggcattcagccaggccccatgtcctctctgtggaaggtttttgttcaagagccaggaccaaggcccttgggccactaccctgctaggctctggagctgtagaggcttcctgaactgggagcagggtagggctgtcgccttagatcccgcccaagcccctcattccctccttgcacagatgcatacactggggcccagcagctgcctcctgaggtgacacagcctgtaggaacatacacagctgggatcagcctgcagccatcccccgaccctgctgctaggccacggtctgcgccctggggcctcatctcccccagcccacttgttttccccccttttattccctaggcccttttcagactcctgggcccttggatactcttctcccatctcccttcacaggatgacaccctcccataccccatagctggggccagcaggttctgctgagggtggggctggtgtagggacccccaagagacccctgtcctgtcccttcaccagtcctggggaggctgggactccccctgccacaagcctgggccacagctcacattccactgctgggagaagaaacaggccgaggcccagagtggcctgcccccgggagccaaagaccccagtggccacactgggatagggtggggaggctggcagccctcttttataaatattatacataagaaaaaaaaaaaaaaaaaaaaaaaaaaaaaaaaaaaaaaaaaaaaaaaaaaaaaaaaaaaaaaaaaaaaaaaaaaaaaaaaaaaaaaaaaaaaaaaaaaaaaaaaaaaaaaaaaaaaaaaa

SEQ ID NO: 33 - DNA, 3687 bp, Homo Sapiens
gagggaaggcaggaaggaggcagccgaaggccgagctgggtggctggaccgggtgctggctgcgccgcgctgctttcggctcccacggcctctcccatgcgctgagggagcccggctgggccgggccggcggcgggaggggaggctcctctccatggtccagaagaccagcatgtcccggggcccttacccaccctcccaggagatccccatggaggtcttcgaccccagcccgcagggcaaatacagcaagaggaaagggcgattcaaacggtcagatgggagcacgtcctcggataccacatccaacagctttgtccgccagggctcagcggagtcctacaccagccgtccatcagactctgatgtatctctggaggaggaccgggaagccttaaggaaggaagcagagcgccaggcattagcgcagctcgagaaggccaagaccaagccagtggcatttgctgtgcggacaaatgttggctacaatccgtctccaggggatgaggtgcctgtgcagggagtggccatcaccttcgagcccaaagacttcctgcacatcaaggagaaatacaataatgactggtggatcgggcggctggtgaaggagggctgtgaggttggcttcattcccagccccgtcaaactggacagccttcgcctgctgcaggaacagaagctgcgccagaaccgcctcggctccagcaaatcaggcgataactccagttccagtctgggagatgtggtgactggcacccgccgccccacaccccctgccagtgccaaacagaagcagaagtcgacagagcatgtgcccccctatgacgtggtgccttccatgaggcccatcatcctggtgggaccgtcgctcaagggctacgaggttacagacatgatgcagaaagctttatttgacttcttgaagcatcggtttgatggcaggatctccatcactcgtgtgacggcagatatttccctggctaagcgctcagttctcaacaaccccagcaaacacatcatcattgagcgctccaacacacgctccagcctggctgaggtgcagagtgaaatcgagcgaatcttcgagctggcccggacccttcagttggtcgctctggatgctgacaccatcaatcacccagcccagctgtccaagacctcgctggcccccatcattgtttacatcaagatcacctctcccaaggtacttcaaaggctcatcaagtcccgaggaaagtctcagtccaaacacctcaatgtccaaatagcggcctcggaaaagctggcacagtgcccccctgaaatgtttgacatcatcctggatgagaaccaattggaggatgcctgcgagcatctggcggagtacttggaagcctattggaaggccacacacccgcccagcagcacgccacccaatccgctgctgaaccgcaccatggctaccgcagccctggctgccagccctgcccctgtctccaacctccagggaccctaccttgcttccggggaccagccactggaacgggccaccggggagcacgccagcatgcacgagtacccaggggagctgggccagcccccaggcctttaccccagcagccacccaccaggccgggcaggcacgctacgggcactgtcccgccaagacacttttgatgccgacacccccggcagccgaaactctgcctacacggagctgggagactcatgtgtggacatggagactgacccctcagaggggccagggcttggagaccctgcagggggcggcacgcccccagcccgacagggatcctgggaggacgaggaagaagactatgaggaagagctgaccgacaaccggaaccggggccggaataaggcccgctactgcgctgagggtgggggtccagttttggggcgcaacaagaatgagctggagggctggggacgaggcgtctacattcgctgagaggcaggggccacacggcgggaggaagggctctgagcccaggggaggggagggagcgaggggctcacacctgacatgtattcgcctccagggggcgctgtctccctcctttcagatgcctttgctcaaagcttggggtttctttggtgttaccatcccagctcccgggaggcccttaagccccagctgtcggtttttacctgcctgttgtggatggatgggggatacccacctttctgaagtgtcccctttctcccatcttaaggggctctcctccctcaccctcctagagaaaaggtgcacttccttaactctttctactcggggccctaagtgacggtcctaagtgggatggctctccttctcccaagctgcagtactggggaagggctgggcgcttttcctggaaagggaggccacagattctttcccatgggggctctcttccccagaccccagatccaaggtccctcaccctgcctgccccttcctcccagcttcctggcagcatcgtctggtcggtgaaagccatagcatggacaccccatggggagcttgtcttggggagggttctgggtggaagctggcaggcatacagcaccctctaccctccgtggccatggcaacgtccagggcccagaaccctgaggagtgagcggccgagacgctgctccccaccccccacctccatgcctcagcctttgcctaccccaggaatgagcttggcctccaacatcccttgcctgctgccattagtagagggggcccctctgcatctgagccccccatccctgtgccacctgggtgtggagcccatggaacactctggtccgcctcattttaaaccaaaaaactgctccttcaccctcaccctgaggccccaggggagaggacccgtgggatggtgcccaggggttgccttgggacctcggatctcctctggggggcttggctgctgctgttgctgctctgtatttgcctctcgtgattctgtttgttacccatgttcacttcccccaggagaggccttggtaccccctctcccctggggcatccctttgccttggcatccctgtagcccagcaaccctgcccctccccagcatcccagctgggccagagagagccgagtgtgccaacaaggactggggcctgcccggctgcccgcctcagggatgggcacctcatgcctgtctcgccacctcctgtgccaatgtcccaccctccacctgggggtggggtgcagcttccacttactgattagaagacaccactgccctcccttcccccctccctgtctggtgtcctgtgcccccatctgtctgtctatatttgtctgtactcccctaggagaagtattttgccatatataaaaccactgtcctgtcctttgtggctgcctcccaagcctgcttctttgtcctcgccacatagtcgtcagcgtaggcacctgggagctgctgatatgcacggggagttgaaagggtgggtgcctgaagatgttgtgccctgagtcattgactcaaaagaaaagatgatcctttgattttggccctctgatgtattgtgcccaagccaggagctgcttgggcagtcccagctccacactggccctgagccccttcacttacctgtctctccacaagtagagccaaaggcaatgggaagctcaatgttgctcagtgggtgagatccagacccactggtgcaatgtcttaaatacacatgactgtttttc

SEQ ID NO: 34 - DNA, 1885 bp, Homo Sapiens
ggtggcggcgcggagccttgggcccggctgcggcccggcggcggccccggcgcggtgcgggcgttcgcggcgccccgggagctgcaggggccccgggcggcggcgaggccggagaggggcgggcccgggacaccggcacccggcgccctcggagccaaaggcgcgcggcggacacggcggggccctcgcgcgcctggagacgatgccaaagctgcagggcttcgagttctggagccgcaccctgcgaggggcccgccacgtcgtggcccccatggtggaccagagcgagctggcctggaggctgctgagccggcgccacggggcacagctctgctacacgcccatgctgcatgcccaggtctttgtccgcgacgccaactaccggaaggagaacctgtactgcgaggtgtgccccgaggaccggcccctcatcgtgcagttctgtgccaatgacccggaggtgtttgttcaggcggctctcctggctcaggattactgtgacgccattgacctgaacttgggctgcccacagatgatagccaagagaggtcactatggcgcctttctgcaggacgagtgggacctgctccaaagaatgattttgctggcccacgagaaactctctgttcctgtcacgtgcaaaatccgtgtcttcccggagattgacaagaccgtgaggtacgcccagatgctggagaaggccggctgccagttgctgacggtgcacggacgcaccaaggagcagaaggggcccctgtcgggtgcagcgtcctgggagcatatcaaggctgtgcggaaggctgtggccatccctgtgtttgctaacgggaacatccagtgcctgcaggacgtggagcgctgcctccgggacacgggtgtgcagggcgtcatgagcgcagagggcaacctgcacaaccccgccctgttcgagggccggagccctgccgtgtgggagctggccgaggagtatctggacatcgtgcgggagcacccctgccccctgtcctacgtccgggcccacctcttcaagctgtggcaccacacgctgcaggtgcaccaggagctgcgagaggagctggccaaggtgaagaccctggagggcatcgctgctgtgagccaggagctgaagctgcggtgtcaggaggagatatccaggcaggagggagcgaagcccaccggcgacttgcccttccactggatctgccagccctacatccggccggggcccagggaggggagcaaggagaaggcaggtgcgcgcagcaagcgggccctggaggaagaggagggtggcacggaggtcctgtccaagaacaagcaaaagaagcagctgaggaacccccacaagaccttcgacccctctctgaagccaaaatatgcaaagtgtgaccagtgtggaaacccaaagggcaacagatgtgtgttcagcctgtgccgcggctgctgcaagaagcgagcctccaaagagactgcagactgcccaggtcacggattgctttttaaaaccaaattggagaagtctctggcctggaaagaggcccagcctgagctgcaggagcctcagccagcagcacctggaacaccaggtggcttctccgaagtcatgggcagtgccctggcctgaaggcccacaacccccacccccaggactgctgctggagcctggacacgtcctacttaagaaaatgccttttactcagggaatctcctgctacttaatgtggaaagacacgcccatgtcccccttcggcccactctgggggcctggaaatgctgcagtggggagcaggccccaggctggacctgccctgtcctcagcacgcgtgtgcaaaagtgaacaataaatcatttcaaagatgcgagaaaaaaaaaaaaaaaaaaaaaa

SEQ ID NO: 35 - DNA, 3298 bp, Homo Sapiens
gctagagagggcggggcttggaggggccgcagcgtcacatgaccgcgggaggctacgcgcggggcgggtgctgcttgctgcaggctctggggagtcgccatgcctacaacacagcagtcccctcaggatgagcaggaaaagctcttggatgaagccatacaggctgtgaaggtccagtcattccaaatgaagagatgcctggacaaaaacaagcttatggatgctctaaaacatgcttctaatatgcttggtgaactccggacttctatgttatcaccaaagagttactatgaactttatatggccatttctgatgaactgcactacttggaggtctacctgacagatgagtttgctaaaggaaggaaagtggcagatctctacgaacttgtacagtatgctggaaacattatcccaaggctttaccttttgatcacagttggagttgtatatgtcaagtcatttcctcagtccaggaaggatattttgaaagatttggtagaaatgtgccgtggtgtgcaacatcccttgaggggtctgtttcttcgaaattaccttcttcagtgtaccagaaatatcttacctgatgaaggagagccaacagatgaagaaacaactggtgacatcagtgattccatggattttgtactgctcaactttgcagaaatgaacaagctctgggtgcgaatgcagcatcagggacatagccgagatagagaaaaaagagaacgagaaagacaagaactgagaattttagtgggaacaaatttggtgcgcctcagtcagttggaaggtgtaaatgtggaacgttacaaacagattgttttgactggcatattggagcaagttgtaaactgtagggatgctttggctcaagaatatctcatggagtgtattattcaggttttccctgatgaatttcacctccagactttgaatccttttcttcgggcctgtgctgagttacaccagaatgtaaatgtgaagaacataatcattgctttaattgatagattagctttatttgctcaccgtgaagatggacctggaatcccagcggatattaaactttttgatatattttcacagcaggtggctacagtgatacagtctagacaagacatgccttcagaggatgttgtatctttacaagtctctctgattaatcttgccatgaaatgttaccctgatcgtgtggactatgttgataaagttctagaaacaacagtggagatattcaataagctcaaccttgaacatattgctaccagtagtgcagtttcaaaggaactcaccagacttttgaaaataccagttgacacttacaacaatattttaacagtcttgaaattaaaacattttcacccactctttgagtactttgactacgagtccagaaagagcatgagttgttatgtgcttagtaatgttctggattataacacagaaattgtctctcaagaccaggtggattccataatgaatttggtatccacgttgattcaagatcagccagatcaacctgtagaagaccctgatccagaagattttgctgatgagcagagccttgtgggccgcttcattcatctgctgcgctctgaggaccctgaccagcagtacttgattttgaacacagcacgaaaacattttggagctggtggaaatcagcggattcgcttcacactgccacctttggtatttgcagcttaccagctggcttttcgatataaagagaattctaaagtggatgacaaatgggaaaagaaatgccagaagattttttcatttgcccaccagactatcagtgctttgatcaaagcagagctggcagaattgcccttaagactttttcttcaaggagcactagctgctggggaaattggttttgaaaatcatgagacagtcgcatatgaattcatgtcccaggcattttctctgtatgaagatgaaatcagcgattccaaagcacagctagctgccatcaccttgatcattggcacttttgaaaggatgaagtgcttcagtgaagagaatcatgaacctctgaggactcagtgtgcccttgctgcatccaaacttctaaagaaacctgatcagggccgagctgtgagcacctgtgcacatctcttctggtctggcagaaacacggacaaaaatggggaggagcttcacggaggcaagagggtaatggagtgcctaaaaaaagctctaaaaatagcaaatcagtgcatggacccctctctacaagtgcagctttttatagaaattctgaacagatatatctatttttatgaaaaggaaaatgatgcggtaacaattcaggttttaaaccagcttatccaaaagattcgagaagacctcccgaatcttgaatccagtgaagaaacagagcagattaacaaacattttcataacacactggagcatttgcgcttgcggcgggaatcaccagaatccgaggggccaatttatgaaggtctcatcctttaaaaaggaaatagctcaccatactcctttccatgtacatccagtgagggttttattacgctaggtttcccttccatagattgtgcctttcagaaatgctgaggtaggtttcccatttcttacctgtgatgtgttttacccagcacctccggacactcaccttcaggaccttaataaaattattcacttggtaagtgttcaagtctttctgatcaccccaagtagcatgactgatctgcaatttaaaattcctgtgatctgtaaaaaaaaaaaaaaaaaaaaaaacaaaacccacaagcacttatcttggctactaatgaagctctccttttttttgtttgtttgtttgcttcattgttgattgtgtattttcttcattcctggggagtactaacccaaaagcgtctgtctcttgttttctagtccagtttgagattaatttagaagaaaggaatactgtatgtgaaattcatcttgggctttcccctaaattgcaagataaggccatgtgtaagattttccctaaaactagaatatattaatgcatgtttgagaattttaaagcaccatggtcaaaaccagaagctatattttgcatatttggactcagccatccattaagaacccatgttgtcctctggacatatttatcaatataattgggttttaaatagtataaaagaaaacttgtgatctatataatttatgtatcaccttcattgtaaatttagcaggaaatgcatcacaattatgatttttttttttgcaccagtgaaacaataaagatgctattaacaaaaaaaaaaaaaaa

SEQ ID NO: 36 - DNA, 4029 bp, Homo Sapiens
atcctgcagtagcggggttggggtgggagtgagagagtgaggacgctgggctgggggaaacgggaagccgctgcaagtccaccgcctcagctacccagattgggatctgcccaggcccgctttatggactagtgtgggcggcaggctcctttccgtccctgccctgctgtaccccgctccttggagaccccctgtatccctcccgcaaggtggaatccgcaggctggaggctcccaggggaggcaaacgcctggccctgccctgccccacgccgcaccatgaccctcctgctgctgccccttctgctggcctctctgctcgcgtcctgctcctgtaacaaagccaacaagcacaagccatggattgaggcagagtaccagggcatcgtcatggagaatgacaacacggtcctactgaatccaccactctttgccttggacaaggatgccccgctgcgctatgcaggtgagatctgcggcttccggctccatgggtctggggtgccctttgaggctgtgatccttgacaaggcgacaggagaggggctgatccgggccaaggagcctgtggactgcgaggcccagaaggaacacaccttcaccatccaggcctatgactgtggcgagggccccgacggggccaacaccaagaagtcccacaaggccactgtgcatgtgcgggtcaacgatgtgaacgagtttgccccagtgtttgtggaacggctgtatcgtgcggctgtgacagaggggaagctgtacgatcgcatcctgcgggtggaagccattgacggtgactgctccccccagtacagccagatctgctactatgagattctcacacccaacacccctttcctcattgacaatgacgggaacattgagaacacagagaagctgcagtacagtggtgagaggctctataagtttacagtgacagcttatgactgtgggaagaagcgggcagcagatgatgctgaggtggagattcaggtgaagcccacctgtaaacccagctggcaaggctggaacaaaaggatcgaatatgcaccaggtgctgggagcttggctttgttccctggtatccgcctggagacctgtgatgaaccactctggaacattcaggccaccatagagctgcagaccagccatgtggccaagggctgtgaccgtgacaactactcagagcgggcgctgcggaaactctgtggtgctgccactggggaggtggatctgttgcccatgcctggccccaatgccaactggacagcaggactctcggtgcactacagccaggacagcagcctgatctactggttcaatggcacccaggctgtgcaggtgcccctgggtggccccagtgggctgggctctgggccccaggacagcctcagtgaccacttcaccctgtccttctggatgaagcatggcgtaactcccaacaagggcaagaaggaagaggaaaccatcgtatgtaacactgtccagaatgaggacggcttctctcactactcgctgactgtccacggctgtaggattgccttcctctactggcccctgcttgagagtgcccgcccagtcaagttcctctggaagctggagcaggtctgtgatgatgagtggcaccactacgctctgaacctcgagttccccacagtcacactctataccgacggcatctccttcgaccctgccctcatccatgacaatggcctcatccacccaccccgaagggagcctgctctcatgattggggcctgctggactgaggagaagaacaaagagaaggaaaagggagacaacagtacagacaccacccaaggagaccctttgtcgatccaccactacttccatggctacctggctggtttcagcgtgcgctcaggtcgcctggagagccgcgaggtcatcgagtgcctctatgcatgtcgggaggggctggactatagggatttcgagagcctgggcaaaggcatgaaggtccacgtgaacccctcacagtccctgctcaccctggagggggatgatgtggagaccttcaaccatgccctgcagcatgtggcttacatgaacactctgcgctttgccacgcccggcgtcaggcccctgcgcctcaccactgctgtcaagtgcttcagcgaagagtcctgcgtctccatccctgaagtggagggctacgtggtcgtccttcagcctgacgccccccagatcctgctgagtggcactgctcattttgcccgcccagctgtggactttgagggaaccaacggcgtccctttgttccctgatcttcaaatcacctgctccatttctcaccaggtggaggccaaaaaggatgagagttggcagggcacagtgacagacacacgcatgtcggatgagattgtgcacaacctggatggctgtgaaatttctctggtgggggatgacctggatcccgagcgggaaagcctgctcctggacacaacctctctgcagcagcgggggctggagctcaccaacacatctgcctacctcactattgctggggtggagagcatcactgtgtatgaagagatcctgaggcaggctcgttatcggctgcgacacggagctgccctctacaccaggaagttccggctttcctgctcggaaatgaatggccgttactccagcaatgaattcatcgtggaggtcaatgtcctgcacagcatgaaccgggttgcccaccccagccacgtgctcagctcccagcagttcctgcaccgtggtcaccagcccccgcctgagatggctggacacagcctagccagctcccacagaaactccatgatacccagcgccgcaaccctcatcattgtggtgtgcgtgggcttcctggtgctcatggtcgtcctgggcctggtgcgcatccattcccttcaccgccgcgtctcaggggccggcgggcctccaggggcctccagtgaccccaaggacccagacctcttctgggatgactcagctctcaccatcattgtgaaccccatggagtcctaccagaatcggcagtcctgtgtgacgggggctgttgggggccagcaggaggatgaggacagcagtgactcggaggtggccgattcccccagcagcgacgagagacgcatcatcgagacccccccacaccgctactaaggcctacacctctccccacgcagagggggaattctgccctggtgaaacagacactccagacatgggagaaggactttctgggaacacagagaccaagagggagagaggcttcagaaccagtcctcctttcatttcaaaaccccagcgggccctctggagtccgccctgcccctcccccggccccccatccctcacttctgggctgtcatgctcctggtgtgccccttgcactggggctggctgggttggaaagtgggctggacttcagctgcctttctacccccaatggcagctgcccccttagcactcactgtgttggggagagggtgacgattgcaatggctggggctggggctgggggtgggattgaaggaaaccctctcctctccccttcccttctctctcctgtccatgggaagcttttccccctctgcagggctccctcagctggaccatcgtccctgcttctcttatgatcgccccacctcatttccatttcagtctggggaccccatttctccctcctttccaacttccttcctttcttgtcctgtttcccttcctgcccttgcagtcctgaggtcctgcagccccggcccctcctccgtgacctggtgtggccaggctgcggggacgggaggggacgtgggggccccgggtgtacatatataatgtatattttttcaatgttgtcgtgagtgcagcccatgttcctgcgtgcagctcacggccttgtgtgtatgtgtgtgtgtgtgtgtgtgtgaggcatcgtcatgtcctggggcaggggcggggggttgggtgtggtgagggaggggacatatcctagggttttcaaataaaacaatcagaaaaaaaaaaaaaaaaaaaaaaaaaaaaa

SEQ ID NO: 37 - DNA, 1558 bp, Homo Sapiens
gagtgcaaagcgctctccctccctcgcccagccttcgtcctcctggcccgctcctctcatccctcccattctccatttcccttccgttccctccctgtcagggcgtaattgagtcaaaggcaggatcaggttccccgccttccagtccaaaaatcccgccaagagagccccagagcagaggaaaatccaaagtggagagaggggaagaaagagaccagtgagtcatccgtccagaaggcggggagagcagcagcggcccaagcaggagctgcagcgagccgggtacctggactcagcggtagcaacctcgccccttgcaacaaaggcagactgagcgccagagaggacgtttccaactcaaaaatgcaggctcaacagtaccagcagcagcgtcgaaaatttgcagctgccttcttggcattcattttcatactggcagctgtggatactgctgaagcagggaagaaagagaaaccagaaaaaaaagtgaagaagtctgactgtggagaatggcagtggagtgtgtgtgtgcccaccagtggagactgtgggctgggcacacgggagggcactcggactggagctgagtgcaagcaaaccatgaagacccagagatgtaagatcccctgcaactggaagaagcaatttggcgcggagtgcaaataccagttccaggcctggggagaatgtgacctgaacacagccctgaagaccagaactggaagtctgaagcgagccctgcacaatgccgaatgccagaagactgtcaccatctccaagccctgtggcaaactgaccaagcccaaacctcaagcagaatctaagaagaagaaaaaggaaggcaagaaacaggagaagatgctggattaaaagatgtcacctgtggaacataaaaaggacatcagcaaacaggatcagttaactattgcatttatatgtaccgtaggctttgtattcaaaaattatctatagctaagtacacaataagcaaaaacaaaaagaaaagaaaatttttgtagtagcgttttttaaatgtatactatagtaccagtaggggcttataataaaggactgtaatcttatttaggaagttgacttatagtacatgataaatgatagacaattgaggtaagttttttgaaattatgtgacattttacattaaattttttttacattttttgggcagcaatttaaatgttatgactatgtaaactacttctcttgttaggtaatttttttcacctagatttttttcccaattgagaaaaatatatactaaacaaaatagcaataaaacataatcactctatttgaagaaaatatcttgttttctgccaatagattttttaaaatgtagtcagcaaaatgggggtggggaagcagagcatgtcctagttcaatgttgactttttttttttttaaagaaaagcattaagacataaaattctttcactttggcagaagcatttgttttcttgatgaaattatttttccatctgaggaaaaaaatactaggaaaataaatcaaggtgatgctgaaaaaaaaaaaaaaaaaa

SEQ ID NO: 38 - DNA, 1295 bp, Homo Sapiens
atccctgagctgcttctgccgttgcatcttcgggactccgccccgcgcgcggacctgcagccatggcagtcaccgcccaggcagcccgcaggaaggagcgcgtcctctgcctgtttgacgtggacgggaccctcacgccggctcgccagaaaattgaccctgaggtggccgccttcctgcagaagctacgaagtagagtgcagatcggtgtggtgggcggctctgactactgtaagatcgctgagcagctgggtgacggggatgaagtcattgagaagtttgattatgtgtttgccgagaacgggacggtgcagtataagcacggacgactgctctccaagcagaccatccagaaccacctgggggaggagctgctgcaggacttgatcaacttctgcctcagctacatggccctgctcaggctgcccaagaagcgtggaaccttcatcgagttccggaatggcatgctgaacatctcgcccatcggccggagctgcaccctggaggagaggatcgagttctccgaactggacaagaaagagaagatccgggagaagttcgtggaagccctgaaaacagagtttgctggcaaagggctgaggttctctcgaggaggcatgatcagctttgacgtcttccccgagggctgggacaagcgctactgcctggatagcctggaccaggacagcttcgacaccatccacttctttgggaacgagactagccctggtgggaacgactttgagatctttgccgacccccggactgttggccacagcgtggtgtctcctcaggacacggtgcagcgatgccgggagattttcttcccagagacagctcatgaggcgtgaccggggcccacatctgtgtgtcgtgacttctgaagagtttggcctaggcctaaagagaggtcctggtgttggatagatgccagggcccctcctctggcccaggacgcctgctgcaagcccacccagatggggccagagtctgtgtggacaaccgtccccagccagtctgctcctagtggcactggcttcgtcctcccagggcccagagtgttccccatgctccacctggtggcccaggccacagctgctgcttgtatttcggtacagaagaggtttctttctgcaccaggaggaggcgtgctcaagtatcggtacgagatctagcctgccctgcctgcctgccctgggcgatgaggtacggtggggaaggtgcctattttagagaactttgtcacagtattaaagttcccagaacaaagtaggtgtcagctgaaaaaaaaaaaa

SEQ ID NO: 39 - DNA, 2213 bp, Homo Sapiens
ataggcctcctcctggcgcgcctccgcaccgcattggtggaccggcccccagcccgtccatgggcgttgtggccgccaccgcaggttccgcctcccgttccctccgccctcaacgtacgtcgcaccgcctctctgtagccgcccgcggagcatcgcagccggcccgggcccccgccagcctccctcctcgcgtccctcggtgtcctccgcgggccggcgcgatgcggctgggcccgaggaccgcggcgttggggctgctgctgctgtgcgccgccgcggccggcgccggcaaggccgaggagctgcactacccgctgggcgagcgccgcagcgactacgaccgcgaggcgctgctgggcgtccaggaagatgtggatgaatatgttaaactcggccacgaagagcagcaaaaaagactgcaggcgatcataaagaaaatcgacttggactcagatggctttctcactgaaagtgaactcagttcatggattcagatgtcttttaagcattatgctatgcaagaagcaaaacaacagtttgttgaatatgataaaaacagtgatgatactgtgacttgggatgaatataacattcagatgtatgatcgtgtgattgactttgatgagaacactgctctggatgatgcagaagaggagtcctttaggaagcttcacttaaaggacaagaagcgatttgaaaaagctaaccaggattcaggtcccggtttgagtcttgaagaatttattgcttttgagcatcctgaagaagttgattatatgacggaatttgtcattcaagaagctttagaagaacatgacaaaaatggtgatggatttgttagtttggaagaatttcttggtgattacaggtgggatccaactgcaaatgaagatccagaatggatacttgttgagaaagacagattcgtgaatgattatgacaaagataacgatggcaggcttgatccccaagagctgttaccttgggtagtacctaataatcagggcattgcacaagaggaggcgcttcatctaattgatgaaatggatttgaatggtgacaaaaagctctctgaagaagagattctggaaaacccggacttgtttctcaccagtgaagccacagattatggcagacagctccatgatgactatttctatcatgatgagctttaatctctgagcctgtctcagtagagtactggctccttttataatttgttaccagctttacttttgtgataaaatattgatgttgtattttacactcttaagtcttaaccacagtcagaattatcttaatgtagattataattttggtcttttaggaaaaaaaaacaaaaatctgatatttatttcaaaatgtattgaagcaacaaaatattaatattgtgccatatgacaacaaagtctttcctaaatactccatctgtttagtactgtattgtggaatatttgagttctatttccatacttgaaaacatggaggattttagagatgcctgaacaatattatttaagtagtatgtgaccgagctataaatttttgtttttgttctaagtagatttaatttgggaactgacaggacaatgtttttaggtttagcattttgtttaaaaacctttaaagaaacctttagaaggacttagacctcacatattaatgttgagaagttctgcttaattttaaaatggtttctataaagggttttattgtatgaaatagaactttatatttttgcatatgtatagatagtaattatatttaatgtataactatagcattatggtgagtggaatttgacattgtccaaacctttttcatttttgagtgattaaaaatgaaatgtcctttgtatatgtttgtttgcttttctttaactttcagataaatattgaatttagcataggttttgtggtattgtacattatcttgcctcatccattcctttatgtggatagttcccaaaactgtcaaattattcttgctgcattttcttattttttttttaaataagagaatcatgttataatataattgaatgtgcacctgacacattttaataattggtgttgtagcaaatgtggttttgctctttggggctataaataatcttgagtaacgcaggttggaattaccaatagagctggtcagttatcaacagtagagctcagtatcaattttactgaaattaaaatcatacttgataagca

SEQ ID NO: 40 - DNA, 705 bp, Homo Sapiens
ctctttccagccagcgccgagcgatgggcatctctcgggacaactggcacaagcgccgcaaaaccgggggcaagagaaagccctaccacaagaagcggaagtatgagttggggcgcccagctgccaacaccaagattggcccccgccgcatccacacagtccgtgtgcggggaggtaacaagaaataccgtgccctgaggttggacgtggggaatttctcctggggctcagagtgttgtactcgtaaaacaaggatcatcgatgttgtctacaatgcatctaataacgagctggttcgtaccaagaccctggtgaagaattgcatcgtgctcatcgacagcacaccgtaccgacagtggtacgagtcccactatgcgctgcccctgggccgcaagaagggagccaagctgactcctgaggaagaagagattttaaacaaaaaacgatctaaaaaaattcagaagaaatatgatgaaaggaaaaagaatgccaaaatcagcagtctcctggaggagcagttccagcagggcaagcttcttgcgtgcatcgcttcaaggccgggacagtgtggccgagcagatggctatgtgctagagggcaaagagttggagttctatcttaggaaaatcaaggcccgcaaaggcaaataaatccttgttttgtcttcacccatgtaataaaggtgtttattgttttgttcccaca

SEQ ID NO: 41 - DNA, 833 bp, Homo Sapiens
aaaggatgtacagaggatccccaaccgcctgcgaaacccaagccgccgcgtaggagcgtgcgttcgggccctcttctcccacctgttcgactccccatccccaggatgtcaacctcagtccctcaaggccatacctggacccaacgggtgaagaaagacgatgaggaggaggacccgctggaccagctgatctcccgctctggctgtgctgcctcccactttgcagtgcaggagtgcatggcccagcaccaggactggcggcaatgccagccacaggtgcaggcgttcaaggattgcatgagtgaacagcaggcgaggcggcaagaggagctgcagaggaggcaagaacaagccggtgcccaccactgagaccccaaaccacctatccccagtagatggccctgccaagaccagcacccagcaagattatagaggaagaaatcctaaatgctggtgtgggaggtctaaaacatggggagagtttttggatctggagttgagagccatgggtttggacatgactggcacaaacagctgtcatatgttcatggtcagatgtcatacattctcagctgtcttgttccaccagtatttaccaggaaaacaaagaatgtgttaagggatgctcccccaccccacatcttaagtcagtgtgccaagtactgagatgattttagggacattttattttaaattaaatttacaatctaatggtaaattgattacctaattagtgcctttctctttcatcacttgttctggatgtttcaatcagtttagtggaaggaaaaataaatggggaaactttttattcaaaaaaaaaaaaaaaaaaa

SEQ ID NO: 42 - DNA, 5740 bp, Homo Sapiens
cgccgccgccgcacgccgcctgcctcctgcacgccgccgccgcgcctagcgcccgggcccgcgacaccgcccgctaagcgccgggccgagttcacgcagccgcggtctggcggctccgcggcggcggcgggtgcgggcggcctggccggtgccggttaaagggacgagttgcaaacacttcaggaagtgacaagtcgatttcctcctccccgggagtcgctcgtacaaagcgctcggcgccggcaggcgagcgtgcgcgcggcggacgcgcggcgggcaccccggacgacttggcgagcgctggcggtgacggcgcggggtccgcgcccggagcgccccgccgcgcacaggagttgaccacatttggccatttcccagaagggccccaccccaagggtgagtggccaatggggagctgtttctgctgacatcaattccccaggaggtactcaccccaagtctgcccaagtgaagatggctgatacccaccctgggatggagcccagcgcctgaggcccttatcatggtgatggtcctaagtgaaagcctcagcacccggggagctgactccattgcatgtgggaccttcagccgtgaactgcacacgccaaagaagatgagtcaaggacctacacttttctcttgtggaattatggaaaatgacagatggcgagacctggacaggaaatgccctcttcagattgaccaaccgagcaccagcatctgggaatgcctgcctgaaaaggacagctcactatggcaccgggaggcagtgaccgcctgcgctgtgaccagtctgatcaaagacctcagcatcagcgaccacaacgggaacccctcagcaccccctagcaagcgccagtgccgctcactgtccttctccgatgagatgtccagttgccggacatcatggaggcccttgggctccaaagtctggactcccgtggaaaagagacgctgctacagcgggggcagcgtccagcgctattccaacggcttcagcaccatgcagaggagttccagcttcagcctcccttcccgggccaacgtgctctcctcaccctgcgaccaggcaggactccaccaccgatttggagggcagccctgccaaggggtgccaggctcagccccgtgtggacaggcaggtgacacctggagccctgacctgcaccccgtgggaggaggccggctggacctgcagcggtccctctcttgctcacatgagcagttttcctttgtggaatactgtcctccctcagccaacagcacacctgcctcaacaccagagctggcgagacgctccagcggcctttcccgcagccgctcccagccgtgtgtccttaacgacaagaaggtcggtgttaaaaggcggcgccctgaagaagtgcaagagcagaggccttctctagaccttgccaagatggcacagaactgtcagaccttcagcagcctcagctgcctgagcgcagggacagaggactgcggtccccagagccccttcgcccgccacgtcagcaacaccagggcctggaccgccctgctctcagcctccggcccagggggcaggacccccgctgggaccccggtccctgagcctcttcccccttccttcgacgaccacctcgcctgccaggaggacctgtcctgtgaggagtcagacagctgcgccctggacgaggattgtggcaggagagcggagccggctgcagcctggcgggaccgcggggcccctgggaacagcctctgctccctggacggcgagttggacattgagcagatagagaagaactgagggggtgtgggcccaggcagggctggggtgtgctggcatcgacagcccccactctgggcactaggtgggcccttgaaggggagcccaactcgtgggcctgatgaaagcttcctgagtggtgtcgggtcccagagagggagcccacctgctgcctgggggagagcctggcctggccgcgtcatacagcgggtgtgtcagcctctcaccggctccccgagcgtggcagccaccaggtccacagaactactgcagcccagaggacagctttgaagtttgcgtcttttctgcctctttccctgtgggatgttgggcagtctctgttgtccccggcagagctgggcaccgctctgtatccccctggtggtgggggctgtcagggagggcctggggtgggggccaggggccatctgctatgtcagggcccttcttggcctcactcaggttcacttctggggagtcggccccgcagcttctttcactcagttttactccgtgccttctctcccaggtctccctgcttcaggcttgggaaggttcgggagatgcttccttctgtaacaccagaaccatttggccttaattccaatgtgagagacagaatccctggggtgctggactggccctccagagggtaagccatgtccggagtctcgggcccaaggaacgatttggagggtgcttgttagggcctcccgtgttgggtagaaatttggtggatctgttggctgaaaagacggacttgcttgcctctcctacagcatggagaggctgaccccatggctctgccaccgttggggcagggttagcagatggcagcccttctctgtggctgacaggtcactgagtgataagcatggttggttccggtgagtgtagggatggcacgataccagggcagcctcttgaaaacggcctcgggagacgggagctgcgagcaggtgggcagatgagggccctatgcgcactcaggggtgaagggcgtccgctggccactctgcaggggcccctgcaggattccaggcacctcccgtttgtccttgaggactgctggctgtaaccagggcacatcacccacctcaagacaagcccacgcccttgtcagcttagggggagcccagtcctgagggctgcatctctgttgtaggcccagccaccggcacaaagctggattcatgctccctgcccctaccccaccctggctcctcaccctggggcatccgaggagcctagccccctgagggtttgctctcctctcaaggtttgtagctcctctccggctgccttgcagacaccaccacatgggctctgctctatgggaatctggcttttagcgaatgtggcgtcttctgcaaacaatagcaattgggctggcttaggagcaagtggctcattttcccataaggctaaaaataactggtgcgctcccttgtgttggctgacacgcgcgttcaaagcacttttgtagtcactttgcttttgctcgtcttcatggacgagtgaacgcctcgcttctgcaggttgagtccagatgcttctcaccttctttctcctcaagaaagatgctttttgggaaacgttgtttaaatcttatttttttactacatcaaaaggatggtggttcaagttcccaatatgtgggtggcacttcttaaaaatcagctttaaggagctggcagaaagcccccagccccacagccctgagagatggtgttgctagctcaggtggctgacacatggggtatgccgggcactgggcaggtcccagagccggggaaccagctcacctctggttgctgtagctcctgccggaggcatgtctacttgtgatcccggacagccgaacccaagagctggtggctctgagcagacagagacatcttggcctgtccctgcctgggggtcatggagaccatgtcttcttagagcaaatgtggaggcggccagggcagttgttgggtgaatgtggagagcacatggccatgtcttgcccccggagtaccactgggcgtggggggtcctggcaccacatgcccggtgtggccgagggcacacagcctctatagcaggccttcctgtggaaggcagaggcagtgagggaggtggacggtgccagctgaggctgaggcatgcagcagcccccagctacctttgcttagggctggggtgggaggcacatggtgacaggtatatgtcgtgggactggggtgtgggtgacctgccctcaaaccttgcctgccacctccccattcaggcctggtggcaggaagggacaagctgtggagctggctgagtcacagccacctccccacctccccgcaagctggtcccatcgaccagcaagcccagccccagggcgcttagggagaaatgacccagcctcctcagaccccgcctgcctgtcctgtgcccaccacgcagcagtcaggggagaaaatggtggctatcccttctgcttagagaaagaaatggcctttagctggtttcatgtttgtgttttgactggagggagtagaccctatctataaggtgccaccccatcatccaagctgccacactgcccggagcagcctgttcctgcactccaccctgctggccccaggacttctgatctcagtcctctgggagggaggttcgcctaggaggtgccccccacattggtgtccccatgggcagcaggcagacagctcacccccaccagcatgatggccccagctgggggcagtggcaggagccttacttttgtcacagccttgcccacaaaccctgcctctgaggggagactgaggaagggcagagccagaagcaagccgtgccaggccatctgcctgctcatggggtcctaaagcgcgggctaagcctgcaggaaagccggggcggtggggggggcttagtgccacatgcaccccactcattccaaagccaccaaactgccaggggctgccgtccacccgtggggcccaggggctggggccacagccttgccattttcgttgccataccctcttgccttactcgcggtggaggccggatttgcacgggcagacgtgcacctgggcccgtggggagcttgttctgaccagacgtacagattttcattctcagaaagccttacttttcaaccaaatttttgtagccagttttgtgaatttgtacactgaaagaaaatttaaataaaggggaagtccacattaaaaagaaaacaaaacaaaccctaactaacttccaaatgggtctcctggtgcgggggcgtgagtggccgtgccctgggtgtgctgcctgtctgagcaagcttccctagctgtggaaccccgggccccctgctgcgggctctgccttggtgtcatgcctgctgcacccccgtttccactgacgtgccgtctgtggctatgggggtggtcactggaatgacggtcactccagacgtcagccggcagggatgcagcaggctggccgcgcaccggggctcgggcaccctctggccccacactggcaatgatgccacaccttgccatgtccacgctgttggtcaaacccctctgtcatgcctctttaaagagaaaagaagagaaagattttttttttttttaatggcagaccgaagtggagatcttgtagcctagataggatagtctgaccttctagcatagtctttttggcaaatgatttgtgttttcagtgtgtggggaagctgtcctgggggctggggcgacagatagcacataggctgtttctggggctgcaggggcttccctgagctggatgttgtgggtgttgccgtgcttcaggaagtgtggcgaccagaaagcgtagacccggggcccagggtctgcccgcccctgcagcctggcctccccgcacaggctgtggcttgcactccagccgctctagtctctcaggaatttgcttgttacttgtactgtgtaaataaagcttcctggttcaataccc

SEQ ID NO: 43 - DNA, 1756 bp, Homo Sapiens
ggatgtggggcggggcctgccccaagagagtttcctaaagcgaggaaaccaagccgggcgcctcttgcaatggagacggtcatttcttcagatagctccccagctgtggaaaatgagcatcctcaagagaccccagaatccaacaatagcgtgtatacttccttcatgaagtctcatcgctgctatgacctgattcccacaagctccaaattggttgtatttgatacgtccctgcagtcctgcccctgtggatttgcctttatgattattactgtcttggctacaggtgaagaaagctttttttgctttggtgactaacggtgtacgagctgcccctttatgggatagtaagaagcaaagttttgtgggcatgctgaccatcactgatttcatcaatatcctgcaccgctactataaatcagccttggtacagatctatgagctagaagaacacaagatagaaacttggagagaggtgtatctccaggactcctttaaaccgcttgtctgcatttctcctaatgccagcttgtttgatgctgtctcttcattaattcggaacaagatccacaggctgccagttattgacccagaatcaggcaatactttgtacatcctcacccacaagcgcattctgaagttcctcaaattgtttatcactgagttccccaagccagagttcatgtccaagtctctggaagagctacagattggcacctatgccaatattgctatggttcgcactaccacccccgtctatgtggctctggggatttttgtacagcatcgagtctcagccctgccagtggtggatgagaaggggcgtgtggtggacatctactccaagtttgatgttatcaatctggcagcagaaaagacctacaacaacctagatgtatctgtgactaaagccttgcaacatcgatcacattactttgagggtgttctcaagtgctacctgcatgagactctggagaccatcatcaacaggctagtggaagcagaggttcaccgacttgtagtggtggatgaaaatgatgtggtcaagggaattgtatcactgtctgacatcctgcaggccctggtgctcacaggtggagagaagaagccctgagctgggggaaggggtcatgcagcaccaggggatatgcccaactcactgcctgctggaagctctgtgggaatcagatgaaacttgagggaattgtgactctgttccctgttcagggtcccctgcccttctatctgggagctagggaaggtatgggggaggaaagagaatggatttatagctacccttaccctcacacatacacttgaaaaaactttcagcctagccagttctagcccctgtcctcttagatatatccccctttctgggtgaactataggctctgtgcctctcagacaaattctgatctctaagagatccccagacctcacttgcctctgcctccatcttggccctgattcaaccctaagataatagcacaacaaaattcttcataaagatatttttattcacctgttccgtgctatatggaggaggccaagtccatttagtgacatttcttcccataatgtgagtggggaggattgtggggaggaggggctttgggttcctgtgtttgtgcatatgaagggagatgggggttaggtggaggaggagagcagcgtggttagctaaggttattgctttttgtggcaaatctaattaaatgacaggaatctcttcacgataaaaaaaaaaaaaaaa

SEQ ID NO: 44 - DNA, 1679 bp, Homo Sapiens
ggatcttcaaaccgtgggagtggtgcggcggctagagtccctggactcctcaacctagggagctactcgcgagatgcctacgacttgtaacgggctgcctggtaaaatgagtctatggaaacggttgccagggccggctaacagcggctcccggaagtcctttgatgctttgttaacagtgaagctactggaccaatgaggtgcttcttccggttttgtccgcgctcgcctaattcttctttatcaaggttgcctttgaccccggaaaagagatcttccgggttcctctctccccaagatggctgctgaggacgagttacagctgccgcggctccccgagctgttcgaaactggtagacagttactggacgaagtagaagtggcgactgaacccgccggttcccggatagtccaggagaaggtgttcaagggcttggacctccttgagaaggctgccgaaatgttatcgcagctcgacttgttcagccgaaatgaagatttggaagagattgcttccaccgacctgaagtaccttttggtgccagcgtttcaaggagccctcaccatgaaacaagtcaaccccagcaagcgtctagatcatttgcagcgggctcgagaacactttataaactacttaactcagtgccattgctatcatgtggcagagtttgagctgcccaaaaccatgaacaactctgctgaaaatcacactgccaattcctccatggcttatcctagtctcgttgctatggcatctcaaagacaggctaaaatacagagatacaagcagaagaaggagttggagcataggttgtctgcaatgaaatctgctgtggaaagtggtcaagcagatgatgagcgtgttcgtgaatattatcttcttcaccttcagaggtggattgatatcagcttagaagagattgagagcattgaccaggaaataaagatcctgagagaaagagactcttcaagagaggcatcaacttctaactcatctcgccaggagaggcctccagtgaaacccttcattctcactcggaacatggctcaagccaaagtatttggagctggttatccaagtctgccaactatgacggtgagtgactggtatgagcaacatcggaaatatggagcattaccggatcagggaatagccaaggcagcaccagaggaattcagaaaagcagctcagcaacaggaagaacaagaagaaaaggaggaagaggatgatgaacaaacactccacagagcccgggagtgggatgactggaaggacacccatcctaggggctatgggaaccgacagaacatgggctgatcttcccacaacaccacaggactgcagggtgcacaactcccctgccaaggaaaaccatgcagtcctcccctccctggtctcctgcttcagctctgtacaacgagggcaaagatgctaaatcttgctttgcattcagtaaagtgtcaagtgattaagtgtgtatttgtaccctagatgatatgaaccagcagtcttgttttggcatcatcctcatcatgttgtattccagcttcttaagtggaaggaaaagagtgctgagaaatggctctgtataatctatggctatccgaattctctgaaaaaataataaaagtcccctctattatatgagcctgtacagaaaaaaaaaaaaaaaaaaaaa

SEQ ID NO: 45 - DNA, 1 bp, Homo Sapiens
  misc_feature (1)..(1): n is a, c, g, or t
n

SEQ ID NO: 46 - DNA, 2976 bp, Homo Sapiens
ggaaagagtggtggcaggtgaagtcggagacgacagaggaactggtttcctccgccccgcaaggcacacagcctgccgacgccccattaatacatgtggaaggggaaagagactgaatggaggaatgaatacaacttgatccaggtcgtgcttcggaagcggtcactttacctgtgaacctctctgcctgacaaacgggcaatgtacggaatcaaccaccaagatggcggcgcccgtgaagaatccgcaattaggtcgccgtcatatgtcgcctaggaacgtacggaattcgacccacgtacggaatcggattccaagatgacggcatctatgaggaagtcacgcagtaggtgcagccatgttgcctgtacgtcgaggccgtacaagcagccgccgtacggactctactgacaaggtggcggcgccctcgggaaagccacattagagcgcggccatgttcccggcgaacatatggattcggccaccatacggatacgataagcaagatggcggcgcctgaggggtcttgggggctctaggccggccacctactggtttgcagcggagacgacgcatggggcctgcgcaataggagtacgctgcctgggaggcgtgactagaagcggaagtagttgtgggcgcctttgcaaccgcctgggacgccgccgagtggtctgtgcaggttcgcgggtcgctggcgggggtcgtgagggagtgcgccgggagcggagatatggagggagatggttcagacccagagcctccagatgccggggaggacagcaagtccgagaatggggagaatgcgcccatctactgcatctgccgcaaaccggacatcaactgcttcatgatcgggtgtgacaactgcaatgagtggttccatggggactgcatccggatcactgagaagatggccaaggccatccgggagtggtactgtcgggagtgcagagagaaagaccccaagctagagattcgctatcggcacaagaagtcacgggagcgggatggcaatgagcgggacagcagtgagccccgggatgagggtggagggcgcaagaggcctgtccctgatccagacctgcagcgccgggcagggtcagggacaggggttggggccatgcttgctcggggctctgcttcgccccacaaatcctctccgcagcccttggtggccacacccagccagcatcaccagcagcagcagcagcagatcaaacggtcagcccgcatgtgtggtgagtgtgaggcatgtcggcgcactgaggactgtggtcactgtgatttctgtcgggacatgaagaagttcgggggccccaacaagatccggcagaagtgccggctgcgccagtgccagctgcgggcccgggaatcgtacaagtacttcccttcctcgctctcaccagtgacgccctcagagtccctgccaaggccccgccggccactgcccacccaacagcagccacagccatcacagaagttagggcgcatccgtgaagatgagggggcagtggcgtcatcaacagtcaaggagcctcctgaggctacagccacacctgagccactctcagatgaggacctacctctggatcctgacctgtatcaggacttctgtgcaggggcctttgatgaccatggcctgccctggatgagcgacacagaagagtccccattcctggaccccgcgctgcggaagagggcagtgaaagtgaagcatgtgaagcgtcgggagaagaagtctgagaagaaggtgatggagaggaaggaggagcgatacaagcggcatcggcagaagcagaagcacaaggataaatggaaacacccagagagggctgatgccaaggaccctgcgtcactgccccagtgcctggggcccggctgtgtgcgccccgcccagcccagctccaagtattgctcagatgactgtggcatgaagctggcagccaaccgcatctacgagatcctcccccagcgcatccagcagtggcagcagagcccttgcattgctgaagagcacggcaagaagctgctcgaacgcattcgccgagagcagcagagtgcccgcactcgccttcaggaaatggaacgccgattccatgagcttgaggccatcattctacgtgccaagcagcaggctgtgcgcgaggatgaggagagcaacgagggtgacagtgatgacacagacctgcagatcttctgtgtttcctgtgggcaccccatcaacccacgtgttgccttgcgccacatggagcgctgctacgccaagtatgagagccagacgtcctttgggtccatgtaccccacacgcattgaaggggccacacgactcttctgtgatgtgtataatcctcagagcaaaacatactgtaagcggctccaggtgctgtgccccgagcactcacgggaccccaaagtgccagctgacgaggtatgcgggtgcccccttgtacgtgatgtctttgagctcacgggtgacttctgccgcctgcccaagcgccagtgcaatcgccattactgctgggagaagctgcggcgtgcggaagtggacttggagcgcgtgcgtgtgtggtacaagctggacgagctgtttgagcaggagcgcaatgtgcgcacagccatgacaaaccgcgcgggattgctggccctgatgctgcaccagacgatccagcacgatcccctcactaccgacctgcgctccagtgccgaccgctgagcctcctggcccggaccccttacaccctgcattccagatgggggagccgcccggtgcccgtgtgtccgttcctccactcatctgtttctccggttctccctgtgcccatccaccggttgaccgcccatctgcctttatcagagggactgtccccgtcgacatgttcagtgcctggtggggctgcggagtccactcatccttgcctcctctccctgggttttgttaataaaattttgaagaaaccaaggaaaaaaaaaaaa

SEQ ID NO: 47 - DNA, 11025 bp, Homo Sapiens
acaagatggcggagggcaagtagcaagggggcggggtgtggccgccggaagcctagccgctgctcgggggggacctgcgggctcaggcccgggagctgcggaccgaggttggctcgatgctgttcccaggtactgttgttggctgttggtgaggaaggtgaagcactcagttgccttctcgggcctcggcgccccctatgtacgcctccctgggctcgggtccggtcgcccctttgcccgcttctgtaccaccctcagttctcgggtcctggagcaccggcggcagcaggagctgcgtccggcaggagacgaagagcccgggcggcgctcgtacttctggccactgggcgagcgtctggcaggtccaagggtagccaaggatggctgcagcttcatatgatcagttgttaaagcaagttgaggcactgaagatggagaactcaaatcttcgacaagagctagaagataattccaatcatcttacaaaactggaaactgaggcatctaatatgaaggaagtacttaaacaactacaaggaagtattgaagatgaagctatggcttcttctggacagattgatttattagagcgtcttaaagagcttaacttagatagcagtaatttccctggagtaaaactgcggtcaaaaatgtccctccgttcttatggaagccgggaaggatctgtatcaagccgttctggagagtgcagtcctgttcctatgggttcatttccaagaagagggtttgtaaatggaagcagagaaagtactggatatttagaagaacttgagaaagagaggtcattgcttcttgctgatcttgacaaagaagaaaaggaaaaagactggtattacgctcaacttcagaatctcactaaaagaatagatagtcttcctttaactgaaaatttttccttacaaacagatatgaccagaaggcaattggaatatgaagcaaggcaaatcagagttgcgatggaagaacaactaggtacctgccaggatatggaaaaacgagcacagcgaagaatagccagaattcagcaaatcgaaaaggacatacttcgtatacgacagcttttacagtcccaagcaacagaagcagagaggtcatctcagaacaagcatgaaaccggctcacatgatgctgagcggcagaatgaaggtcaaggagtgggagaaatcaacatggcaacttctggtaatggtcagggttcaactacacgaatggaccatgaaacagccagtgttttgagttctagtagcacacactctgcacctcgaaggctgacaagtcatctgggaaccaaggtggaaatggtgtattcattgttgtcaatgcttggtactcatgataaggatgatatgtcgcgaactttgctagctatgtctagctcccaagacagctgtatatccatgcgacagtctggatgtcttcctctcctcatccagcttttacatggcaatgacaaagactctgtattgttgggaaattcccggggcagtaaagaggctcgggccagggccagtgcagcactccacaacatcattcactcacagcctgatgacaagagaggcaggcgtgaaatccgagtccttcatcttttggaacagatacgcgcttactgtgaaacctgttgggagtggcaggaagctcatgaaccaggcatggaccaggacaaaaatccaatgccagctcctgttgaacatcagatctgtcctgctgtgtgtgttctaatgaaactttcatttgatgaagagcatagacatgcaatgaatgaactagggggactacaggccattgcagaattattgcaagtggactgtgaaatgtatgggcttactaatgaccactacagtattacactaagacgatatgctggaatggctttgacaaacttgacttttggagatgtagccaacaaggctacgctatgctctatgaaaggctgcatgagagcacttgtggcccaactaaaatctgaaagtgaagacttacagcaggttattgcgagtgttttgaggaatttgtcttggcgagcagatgtaaatagtaaaaagacgttgcgagaagttggaagtgtgaaagcattgatggaatgtgctttagaagttaaaaaggaatcaaccctcaaaagcgtattgagtgccttatggaatttgtcagcacattgcactgagaataaagctgatatatgtgctgtagatggtgcacttgcatttttggttggcactcttacttaccggagccagacaaacactttagccattattgaaagtggaggtgggatattacggaatgtgtccagcttgatagctacaaatgaggaccacaggcaaatcctaagagagaacaactgtctacaaactttattacaacacttaaaatctcatagtttgacaatagtcagtaatgcatgtggaactttgtggaatctctcagcaagaaatcctaaagaccaggaagcattatgggacatgggggcagttagcatgctcaagaacctcattcattcaaagcacaaaatgattgctatgggaagtgctgcagctttaaggaatctcatggcaaataggcctgcgaagtacaaggatgccaatattatgtctcctggctcaagcttgccatctcttcatgttaggaaacaaaaagccctagaagcagaattagatgctcagcacttatcagaaacttttgacaatatagacaatttaagtcccaaggcatctcatcgtagtaagcagagacacaagcaaagtctctatggtgattatgtttttgacaccaatcgacatgatgataataggtcagacaattttaatactggcaacatgactgtcctttcaccatatttgaatactacagtgttacccagctcctcttcatcaagaggaagcttagatagttctcgttctgaaaaagatagaagtttggagagagaacgcggaattggtctaggcaactaccatccagcaacagaaaatccaggaacttcttcaaagcgaggtttgcagatctccaccactgcagcccagattgccaaagtcatggaagaagtgtcagccattcatacctctcaggaagacagaagttctgggtctaccactgaattacattgtgtgacagatgagagaaatgcacttagaagaagctctgctgcccatacacattcaaacacttacaatttcactaagtcggaaaattcaaataggacatgttctatgccttatgccaaattagaatacaagagatcttcaaatgatagtttaaatagtgtcagtagtagtgatggttatggtaaaagaggtcaaatgaaaccctcgattgaatcctattctgaagatgatgaaagtaagttttgcagttatggtcaatacccagccgacctagcccataaaatacatagtgcaaatcatatggatgataatgatggagaactagatacaccaataaattatagtcttaaatattcagatgagcagttgaactctggaaggcaaagtccttcacagaatgaaagatgggcaagacccaaacacataatagaagatgaaataaaacaaagtgagcaaagacaatcaaggaatcaaagtacaacttatcctgtttatactgagagcactgatgataaacacctcaagttccaaccacattttggacagcaggaatgtgtttctccatacaggtcacggggagccaatggttcagaaacaaatcgagtgggttctaatcatggaattaatcaaaatgtaagccagtctttgtgtcaagaagatgactatgaagatgataagcctaccaattatagtgaacgttactctgaagaagaacagcatgaagaagaagagagaccaacaaattatagcataaaatataatgaagagaaacgtcatgtggatcagcctattgattatagtttaaaatatgccacagatattccttcatcacagaaacagtcattttcattctcaaagagttcatctggacaaagcagtaaaaccgaacatatgtcttcaagcagtgagaatacgtccacaccttcatctaatgccaagaggcagaatcagctccatccaagttctgcacagagtagaagtggtcagcctcaaaaggctgccacttgcaaagtttcttctattaaccaagaaacaatacagacttattgtgtagaagatactccaatatgtttttcaagatgtagttcattatcatctttgtcatcagctgaagatgaaataggatgtaatcagacgacacaggaagcagattctgctaataccctgcaaatagcagaaataaaagaaaagattggaactaggtcagctgaagatcctgtgagcgaagttccagcagtgtcacagcaccctagaaccaaatccagcagactgcagggttctagtttatcttcagaatcagccaggcacaaagctgttgaattttcttcaggagcgaaatctccctccaaaagtggtgctcagacacccaaaagtccacctgaacactatgttcaggagaccccactcatgtttagcagatgtacttctgtcagttcacttgatagttttgagagtcgttcgattgccagctccgttcagagtgaaccatgcagtggaatggtaagtggcattataagccccagtgatcttccagatagccctggacaaaccatgccaccaagcagaagtaaaacacctccaccacctcctcaaacagctcaaaccaagcgagaagtacctaaaaataaagcacctactgctgaaaagagagagagtggacctaagcaagctgcagtaaatgctgcagttcagagggtccaggttcttccagatgctgatactttattacattttgccacggaaagtactccagatggattttcttgttcatccagcctgagtgctctgagcctcgatgagccatttatacagaaagatgtggaattaagaataatgcctccagttcaggaaaatgacaatgggaatgaaacagaatcagagcagcctaaagaatcaaatgaaaaccaagagaaagaggcagaaaaaactattgattctgaaaaggacctattagatgattcagatgatgatgatattgaaatactagaagaatgtattatttctgccatgccaacaaagtcatcacgtaaagcaaaaaagccagcccagactgcttcaaaattacctccacctgtggcaaggaaaccaagtcagctgcctgtgtacaaacttctaccatcacaaaacaggttgcaaccccaaaagcatgttagttttacaccgggggatgatatgccacgggtgtattgtgttgaagggacacctataaacttttccacagctacatctctaagtgatctaacaatcgaatcccctccaaatgagttagctgctggagaaggagttagaggaggggcacagtcaggtgaatttgaaaaacgagataccattcctacagaaggcagaagtacagatgaggctcaaggaggaaaaacctcatctgtaaccatacctgaattggatgacaataaagcagaggaaggtgatattcttgcagaatgcattaattctgctatgcccaaagggaaaagtcacaagcctttccgtgtgaaaaagataatggaccaggtccagcaagcatctgcgtcttcttctgcacccaacaaaaatcagttagatggtaagaaaaagaaaccaacttcaccagtaaaacctataccacaaaatactgaatataggacacgtgtaagaaaaaatgcagactcaaaaaataatttaaatgctgagagagttttctcagacaacaaagattcaaagaaacagaatttgaaaaataattccaaggtcttcaatgataagctcccaaataatgaagatagagtcagaggaagttttgcttttgattcacctcatcattacacgcctattgaaggaactccttactgtttttcacgaaatgattctttgagttctctagattttgatgatgatgatgttgacctttccagggaaaaggctgaattaagaaaggcaaaagaaaataaggaatcagaggctaaagttaccagccacacagaactaacctccaaccaacaatcagctaataagacacaagctattgcaaagcagccaataaatcgaggtcagcctaaacccatacttcagaaacaatccacttttccccagtcatccaaagacataccagacagaggggcagcaactgatgaaaagttacagaattttgctattgaaaatactccggtttgcttttctcataattcctctctgagttctctcagtgacattgaccaagaaaacaacaataaagaaaatgaacctatcaaagagactgagccccctgactcacagggagaaccaagtaaacctcaagcatcaggctatgctcctaaatcatttcatgttgaagataccccagtttgtttctcaagaaacagttctctcagttctcttagtattgactctgaagatgacctgttgcaggaatgtataagctccgcaatgccaaaaaagaaaaagccttcaagactcaagggtgataatgaaaaacatagtcccagaaatatgggtggcatattaggtgaagatctgacacttgatttgaaagatatacagagaccagattcagaacatggtctatcccctgattcagaaaattttgattggaaagctattcaggaaggtgcaaattccatagtaagtagtttacatcaagctgctgctgctgcatgtttatctagacaagcttcgtctgattcagattccatcctttccctgaaatcaggaatctctctgggatcaccatttcatcttacacctgatcaagaagaaaaaccctttacaagtaataaaggcccacgaattctaaaaccaggggagaaaagtacattggaaactaaaaagatagaatctgaaagtaaaggaatcaaaggaggaaaaaaagtttataaaagtttgattactggaaaagttcgatctaattcagaaatttcaggccaaatgaaacagccccttcaagcaaacatgccttcaatctctcgaggcaggacaatgattcatattccaggagttcgaaatagctcctcaagtacaagtcctgtttctaaaaaaggcccaccccttaagactccagcctccaaaagccctagtgaaggtcaaacagccaccacttctcctagaggagccaagccatctgtgaaatcagaattaagccctgttgccaggcagacatcccaaataggtgggtcaagtaaagcaccttctagatcaggatctagagattcgaccccttcaagacctgcccagcaaccattaagtagacctatacagtctcctggccgaaactcaatttcccctggtagaaatggaataagtcctcctaacaaattatctcaacttccaaggacatcatcccctagtactgcttcaactaagtcctcaggttctggaaaaatgtcatatacatctccaggtagacagatgagccaacagaaccttaccaaacaaacaggtttatccaagaatgccagtagtattccaagaagtgagtctgcctccaaaggactaaatcagatgaataatggtaatggagccaataaaaaggtagaactttctagaatgtcttcaactaaatcaagtggaagtgaatctgatagatcagaaagacctgtattagtacgccagtcaactttcatcaaagaagctccaagcccaaccttaagaagaaaattggaggaatctgcttcatttgaatctctttctccatcatctagaccagcttctcccactaggtcccaggcacaaactccagttttaagtccttcccttcctgatatgtctctatccacacattcgtctgttcaggctggtggatggcgaaaactcccacctaatctcagtcccactatagagtataatgatggaagaccagcaaagcgccatgatattgcacggtctcattctgaaagtccttctagacttccaatcaataggtcaggaacctggaaacgtgagcacagcaaacattcatcatcccttcctcgagtaagcacttggagaagaactggaagttcatcttcaattctttctgcttcatcagaatccagtgaaaaagcaaaaagtgaggatgaaaaacatgtgaactctatttcaggaaccaaacaaagtaaagaaaaccaagtatccgcaaaaggaacatggagaaaaataaaagaaaatgaattttctcccacaaatagtacttctcagaccgtttcctcaggtgctacaaatggtgctgaatcaaagactctaatttatcaaatggcacctgctgtttctaaaacagaggatgtttgggtgagaattgaggactgtcccattaacaatcctagatctggaagatctcccacaggtaatactcccccggtgattgacagtgtttcagaaaaggcaaatccaaacattaaagattcaaaagataatcaggcaaaacaaaatgtgggtaatggcagtgttcccatgcgtaccgtgggtttggaaaatcgcctgaactcctttattcaggtggatgcccctgaccaaaaaggaactgagataaaaccaggacaaaataatcctgtccctgtatcagagactaatgaaagttctatagtggaacgtaccccattcagttctagcagctcaagcaaacacagttcacctagtgggactgttgctgccagagtgactccttttaattacaacccaagccctaggaaaagcagcgcagatagcacttcagctcggccatctcagatcccaactccagtgaataacaacacaaagaagcgagattccaaaactgacagcacagaatccagtggaacccaaagtcctaagcgccattctgggtcttaccttgtgacatctgtttaaaagagaggaagaatgaaactaagaaaattctatgttaattacaactgctatatagacattttgtttcaaatgaaactttaaaagactgaaaaattttgtaaataggtttgattcttgttagagggtttttgttctggaagccatatttgatagtatactttgtcttcactggtcttattttgggaggcactcttgatggttaggaaaaaaatagtaaagccaagtatgtttgtacagtatgttttacatgtatttaaagtagcatcccatcccaacttcctttaattattgcttgtcttaaaataatgaacactacagatagaaaatatgatatattgctgttatcaatcatttctagattataaactgactaaacttacatcagggaaaaattggtatttatgcaaaaaaaaatgtttttgtccttgtgagtccatctaacatcataattaatcatgtggctgtgaaattcacagtaatatggttcccgatgaacaagtttacccagcctgctttgctttactgcatgaatgaaactgatggttcaatttcagaagtaatgattaacagttatgtggtcacatgatgtgcatagagatagctacagtgtaataatttacactattttgtgctccaaacaaaacaaaaatctgtgtaactgtaaaacattgaatgaaactattttacctgaactagattttatctgaaagtaggtagaatttttgctatgctgtaatttgttgtatattctggtatttgaggtgagatggctgctcttttattaatgagacatgaattgtgtctcaacagaaactaaatgaacatttcagaataaattattgctgtatgtaaactgttactgaaattggtatttgtttgaagggtcttgtttcacatttgtattaataattgtttaaaatgcctcttttaaaagcttatataaatttttttcttcagcttctatgcattaagagtaaaattcctcttactgtaataaaaacaattgaagaagactgttgccacttaaccattccatgcgttggcacttatctattcctgaaatttcttttatgtgattagctcatcttgatttttaatatttttccacttaaacttttttttcttactccactggagctcagtaaaagtaaattcatgtaatagcaatgcaagcagcctagcacagactaagcattgagcataataggcccacataatttcctctttcttaatattatagaattctgtacttgaaattgattcttagacattgcagtctcttcgaggctttacagtgtaaactgtcttgccccttcatcttcttgttgcaactgggtctgacatgaacactttttatcaccctgtatgttagggcaagatctcagcagtgaagtataatcagcactttgccatgctcagaaaattcaaatcacatggaactttagaggtagatttaatacgattaagatattcagaagtatattttagaatccctgcctgttaaggaaactttatttgtggtaggtacagttctggggtacatgttaagtgtccccttatacagtggagggaagtcttccttcctgaaggaaaataaactgacacttattaactaagataatttacttaatatatcttccctgatttgttttaaaagatcagagggtgactgatgatacatgcatacatatttgttgaataaatgaaaatttatttttagtgataagattcatacactctgtatttggggagggaaaacctttttaagcatggtggggcactcagataggagtgaatacacctacctggtgccttgaaaatcacatcaagtagttaattatctaccccttacctgtgtttataacttccaggtaatgagaatgattttttttaaagctaaaatgccagtaaataaaagtgctatgacttgagctaagatatttgactccaatgcctgtactgtgtctactgcaccactttgtaaacacttcaatttactatctttgaaatgattgacctttaaatttttgccaaatgttatctgaaattgtctatgaataccatctacttctgttgttttcccaggcttccataaacaatggagatacatgca

SEQ ID NO: 48 - DNA, 3060 bp, Homo Sapiens
gcggtcaaattataatacataaaagttgtcagggcggagagcaagacattactcttctcggattgccggttcgctcgcgagacttgagcgttgctaggagattcggcaggcgggcggagccagactcggcggggcggggaggggtggggctaggctcggcgaggcgaggaagggtgggtggagccaggcttggcgggctgtgcgtgctcgcggtgggcggtggcggcggctgcctcgcgaaggttcgagatccgtcgcgtgcgggaggcgggccgcgatcttgcgcagggtcggtgtgggcgcaggctgcagcgccgcgactcgtgcgggtaggcgtctgcgctcggtttgagggctcggcgcggggtttcctgttcctccttctgcgcggctgcagctcgggacttcggcctgacccagcccccatggcttcagaagagctacagaaagatctagaagaggtaaaggtgttgctggaaaaggctactaggaaaagagtacgtgatgcccttacagctgaaaaatccaagattgagacagaaatcaagaacaagatgcaacagaaatcacagaagaaagcagaacttcttgataatgaaaaaccagctgctgtggttgctcccattacaacgggctatacggtgaaaatcagtaattatggatgggatcagtcagataagtttgtgaaaatctacattaccttaactggagttcatcaagttcccactgagaatgtgcaggtgcatttcacagagaggtcatttgatcttttggtaaagaatctaaatgggaagagttactccatgattgtgaacaatctcttgaaacccatctctgtggaaggcagttcaaaaaaagtcaagactgatacagttcttatattgtgtagaaagaaagtggaaaacacaaggtgggattacctgacccaggttgaaaaggagtgcaaagaaaaagagaagccctcctatgacactgaaacagatcctagtgagggattgatgaatgttctaaagaaaatttatgaagatggagacgatgatatgaagcgaaccattaataaagcctgggtggaatcaagagagaagcaagccaaaggagacacggaattttgagactttaaagtcgttttgggaactgtgatgtgatgtggaaatactgatgtttccagtaagggaatattggtgagctgcatatataaatttgacagatagctatttacatagccttctaagtaaaggcaatgaattctccatttcctactggaggatttatttaaataaaatatgcttattaaacactcctgcaaagatggttttattagtaccctggtcattttgttcaaggaagggttatattgcattctcacgtgaaatataaaaagcaagtcttgcccaataaaaacgctacattgtgtgtattttttgttcagctaagaattggaaaagtatttgcttgccttttaagttactgacatcagcttccaccagtgtaaaaattgagtaaaacctgaagttttgcataaaatgcaaatcggtgcctgtgcttgaaggttgctgtagagcatctgaccccttattaccaccttaagcaatgtatatgccatgcattaccatgcactaattcaatcacaggtgtttctatctagatttaaatatatttgtcaatgaatgtggaatagaaaatctaaacatgacaataatagacatatctttgtatggtaccagttagttttgccgtggatcagatggtttataaaagtaataaccataaagcaaaaaataatttgaaagcccgtctattcctatgctcaataaagttaagtttttcttcattagaacagttttatgatttatttgtctaggagtatgtcagaaaaatcaggcttttagtaggaattactcctattccccctgaagtcaggaccagtgcctgtgatctccattactttattttcctggaggtattagccaacacagttagatcagagaaagcaattgaagccaggcatgaaggctggcgcccgtaatcccagctactaaggctggaggatcacttcagcccaggagtttaaggctgcagtgagctatgatgatgccactgtactgcagcttgggtaacagattgagaacctgtctcattaaaaaaaaaaaaaaaaaaaaagccgttagacacacaggaaaaatccagaagggtaaactaaactaaagctacaattaatatgggaatttggaagaagtggtaggatttaaaatacagaaacagtttatgtataggatagctataagtaaatactgaaacacattatgcctctgtaattggggttgacacatgaacagaatagcagacacaatgcatatgaaagttacagaatatggtaaaagtggggtaaagatgggtttttaatgatactaagataactgaaaataggcatatagatatattccaagccgcctgacgatctaattgtaaaaagtaaagcatacaaatactagaagaaaatggaggaaaacgacattatatgtgacttaaaacctagaagaaataaataaaactattgatcaattttaactacataaaaatgtttataggacaagaaaaaccccaccataacccaaggcaaacaatgtattgacaggattccaataattaagaatacttcatacaaaaagaaatgtaaatgacctttaacatgtaaagatgctcaccttgttcagaagagaataaaccagtgtttttacctttcacttgaaaaagaagtataaaaacaactgtattgagttgaggctgtggagaaataaggacacatatatgggaatggaatgcaaaagttaaactttggttaacaagaatatttgggcaggtgcagtggctcacacctgtaatcccaacaccttgggaggccaaggtgggcggatcacttgaggtcaggagttcaagaccatctggccaacatggtgaaaccctgtctctactgaaaataaaaaaaactagctgggcatggtggcagatgcctgtaactccagctactcgggagactgaaggacaagaatcacttgaacc

SEQ ID NO: 49 - DNA, 2818 bp, Homo Sapiens
cgggttcctgagaattgtcaatcaggcgcgaggcagagaggagggtgtgacgttccaggagctagtggcctcttcaccctggtgacctctgttccgtattctgtcactgagagacgccctgggacatctgtggtggcttttgtcgcgctgggacctaccctgactacgggagttgggaggacccgggacaccgcacagccgggaaatggccctgtgttatggaactttctggggctaccctaagatgctggaagctgccaatctcatggagggcctagtggatatcggcccttgggtcactcttcccagaggacagcctgaggtgttggagtggggcctcccaaaggatcaggactcagtggcctttgaggatgtggctgtgaacttcacccatgaggagtgggctttgctgggtccatcacagaagaatctctacagagatgtgatgcgagaaaccattaggaacctgaactgtataggaatgaaatgggaaaaccagaacattgatgatcagcaccaaaatctcaggagaaatccaaggtgtgatgtggtagagagatttggtaaaagtaaagatggtagtcagtgtggagaaaccttaagccagattcgaaatagtattgtaaacaagaacactcccgccagagtagatgcatgtggaagcagtgtgaatggagaagtcataatgggtcattcatccctgaattgctacatcagagttgatactggacacaaacaccgggagtgtcatgaatatgcagagaagtcatatacacataagcagtgtgggaaaggcttaagttatcgccactcctttcaaacatgtgaaaggcctcacactggaaagaaaccctatgattgtaaggaatgtggaaaaaccttcagttctcctggaaaccttcgaagacatatggtagtaaaaggtggagatggaccttataaatgtgaattgtgtgggaaagcctttttttggcccagtttattacgtatgcatgaaagaactcacactggagagaaaccatatgaatgtaagcagtgttctaaagccttccctgtttacagttcctatctaagacatgaaaaaatacacactggggagaaaccgtatgaatgtaagcagtgttctaaagccttccctgattacagttcatatctaagacatgaaagaactcacactggagagaaaccctacaaatgtaaacaatgtgggaaagccttcagtgtttccggttcccttcgagtacatgaaagaattcacactggagagaaaccctatacatgtaaacagtgtgggaaagcgttttgtcatcttggaagctttcaaagacacatgataatgcacagtggagatggacctcataaatgtaagatatgtgggaaaggctttgattttcctggttcagcacgaattcatgaaggaactcacactctagagaaaccctatgaatgtaagcaatgtgggaaattgttatctcatcgctcaagctttcgaagacacatgatggcacacactggagatggccctcataaatgcacagtatgtgggaaagcctttgattctcctagtgtatttcaaagacatgaaaggactcacactggagagaaaccctatgaatgcaagcaatgtgggaaagccttccgtacttccagttcccttcgaaaacatgaaacaacacacactggagagcaaccctataaatgtaaatgtggaaaagcttttagtgatttattttcctttcaaagtcatgaaacaacacacagtgaagaggagccttatgaatgtaaggagtgtgggaaagcatttagttcttttaaatacttttgtcgccatgaaaggactcacagtgaagaaaaatcttatgagtgtcaaatttgtggcaaagccttcagtcgtttcagttacttaaaaactcatgaaaggactcacacggcagagaagccatatgaatgtaagcaatgcaggaaagcattcttttggccctctttccttctaagacatgaaaggactcacactggagaaagaccctatgaatgtaaacactgtggtaaagccttcagtcgttccagtttctgtcgagaacatgaaagaactcacactggagagaagccctatgaatgtaaggaatgtgggaaagccttcagttctctcagttcctttaatagacataaaaggacacactggaaggatattctataagtgtatggaatgtgggaaagcattcattggttttatcacattcagatacttgaaagaaataaatcctgtgaatgtaaacgtggtaaagccttaagaagtttccaggctgggcgcagcggctcacacctgtaatcccagcactttgagaggccgaggagggcagatcacgaggccaggagatcgagaccagcctggctaacatgggaaaccctgtctctactaaaaatacggaaaaaaaaaaaaatagccaggcatagttgctcacacctgtagtcctagctactcaggaggctgaggcaggagaatcccttgaacccgggaggtggaggttgcagtgagccgagattgcactactgcactccagcttgggtgctagagcgagactccatctcaaaaaaaaaaaaaaaagtttccatttctttcaaatagagttgctgcctgctatatgcaagaagattggttccagtacaccctgagtatacctaaatccacagatgccagctcttttataaaatggaatattcgcatgtacctacccacattctcctgtatactctataaatgtctagattaattaaaatatctcatgcattgtaaaaaaaaaaaaaaaaaaaaaaaaaa

SEQ ID NO: 50 - DNA, 1521 bp, Homo Sapiens
gcggggccgcgggccgggggcggactggggcgggcggaaggagagccaggccggaaggaggctgccggagggcgggaggcaggagcgggccaggagctgctgggctggagcggcggcgccgccatgtccgacagcgagaagctcaacctggactcgatcatcgggcgcctgctggaagggtccagggtcctgacaccccattgcgccccagtgcagggctcgcggcctggcaagaatgtacagctgacagagaacgagatccgcggtctgtgcctgaaatcccgggagatttttctgagccagcccattcttctggagctggaggcacccctcaagatctgcggtgacatacacggccagtactacgaccttctgcgactatttgagtatggcggtttccctcccgagagcaactacctctttctgggggactatgtggacaggggcaagcagtccttggagaccatctgcctgctgctggcctataagatcaagtaccccgagaacttcttcctgctccgtgggaaccacgagtgtgccagcatcaaccgcatctatggtttctacgatgagtgcaagagacgctacaacatcaaactgtggaaaaccttcactgactgcttcaactgcctgcccatcgcggccatagtggacgaaaagatcttctgctgccacggaggcctgtccccggacctgcagtctatggagcagattcggcggatcatgcggcccacagatgtgcctgaccagggcctgctgtgtgacctgctgtggtctgaccctgacaaggacgtgcagggctggggcgagaacgaccgtggcgtctcttttacctttggagccgaggtggtggccaagttcctccacaagcacgacttggacctcatctgccgagcacaccaggtggtagaagacggctacgagttctttgccaagcggcagctggtgacacttttctcagctcccaactactgtggcgagtttgacaatgctggcgccatgatgagtgtggacgagaccctcatgtgctctttccagatcctcaagcccgccgacaagaacaaggggaagtacgggcagttcagtggcctgaaccctggaggccgacccatcaccccaccccgcaattccgccaaagccaagaaatagcccccgcacaccaccctgtgccccagatgatggattgattgtacagaaatcatgctgccatgctgggggggggtcaccccgacccctcaggcccacctgtcacggggaacatggagccttggtgtatttttcttttctttttttaatgaatcaatagcagcgtccagtcccccagggctgcttcctgcctgcacctgcggtgactgtgagcaggatcctggggccgaggctgcagctcagggcaacggcaggccaggtcgtgggtctccagccgtgcttggcctcagggctggcagccggatcctggggcaacccatctggtctcttgaataaaggtcaaagctggattctcgcaaaaaaaaaaaaaaaaaa

SEQ ID NO: 51 - DNA, 7456 bp, Homo Sapiens
cgcgcgcagctggtcggcccgcggcggtgctgcgcggatccggcgtcggggcccggcatggcgggggccggggccaagccgggccggacccggacctaaatgcctctgttcttctccgcgctgttggtcttgctgctagttgcgcttagcgccctctttctaggccggtggcttgtggtccggttggccaccaagtggtgtcagcggaagctgcaggcggagctaaagattggctccttccgctttttttggatccagaatgtcagtcttaagtttcagcaacaccagcaaacagtggaaattgataacctgtggatttccagcaaactccttagccatgatcttccacactatgtggcattgtgctttggagaagtgcgtatcagaacggacctacagaaagtttctgacctgtctgccccattctcccagagcgctggggtggatcaaaaggaactgtccttcagcccatccttattgaagatcttctgccaactattctccattcatgtagatgctataaacatcatggttctcaaggtggatacctctgagtccttatggcatattcagatcagtagaagcagatttcttttggatagtgatgggaaaaggctaatctgtgaggtgagcttatgtaagatcaacagcaaagttctaaagagtggtcagctggaggacacctgcctagtggagctttcactggccctggacctgtgtctaaaggtgggcattagcagtcggcatctcactgctatcactgtggatgtgtggacactccatgctgaactgcatgagggcctcttccagagccaactgctgtgccagggcccaagcctagcatctaagcctgttccctgttcagaggtgacagaaaacttagttgagccaactctgcctggcctattccttctccagcagctgccagaccaggtcaaggttaagatggagaacacaagcgtggtattgtccatgaatagtcaaaagaggcacctgacttggactctgaagctgctgcagttcctgtaccaccgtgatgaggatcagctgccccttcgaagcttcacagcaaactctgatatggcacagatgagcactgaactgctgctggaagatgggttgttgttgtcccagagtcgccaacgcattgtctgcctcaactccctcaaggctagtgtgcaggtgaccaccattgacctctcagcctccctagttctgaacacttgcatcattcactaccggcaccaggaattctctcactggctgcacctgctagcactggaaacccaagggtctagttcacctgttctaaagcaaaggaaaaaaagaaccttcccccaaatcctggctcccatcatctttagcacctccatctccaatgtcaacatttccattcaacttggagatacaccaccttttgccttgggattcaattctatctctctggattaccagcacctcaggccacaaagcatccatcagcggggcgtcctaactgtggaccacctctgctggcgtgtgggcagtgactcccacattcagcgggcgccacacccacccaatatgcatgtttggggtgaggcacttgttctggactccttcacactacagggtagctataaccagcctctgggcctgtccagcacccagtcagataccctttttcttgattgtaccattcgaggacttcaggtggaagcatcagatacctgtgcccaatgtctgtctcgtatcttatccctgatgggtccacaatctgggaagtcagctgtctctaggcactcttcatttggggaatctgtgtcattactgtggaaggtggacttgaaggtcgaagacatgaacttgtttaccctttctgccttggttggtgcttcagaggtacgactggacaccctaactatcctgggcagtgcagagacgtccactgtggggattcaaggacttgtgttagcgctggtgaaatcagtcacggagaagatgcaaccctgttgcaaggcccctgacatccctaccccagtgctcagcctttccatgctctccatcacctatcacagcagcatccgctctctggaggttcagtgtggtgcagggctgaccttactttggagccccccagatcacatgtacctgtaccagcatgtcctggccactctacagtgccgagacctactaagagccactgtgtttcctgagactgtaccatcccttgcactagagacttcaggaactacttctgagctagaaggccgtgcccctgagccattacccccaaagcggctgctaaacctaaccctggaggtgagcacagccaagctcacagcttttgtagctgaggacaagttcattaccctggctgcagagagtgtgtcactgagccggcatggaggttccctgcaggcatactgtccagagctggctgctggctttgatggcaatagtatcttcaacttcaaggaggtggaggtgcagctgctacctgagctggaagagatgatcctccaccggaaccccttccctgcgctgcagaccctccggaaccgtgtttggctcctctctttcggctcagtctcggtggagtttccttatcagtatgacttttctcgaactctagatgaggctgtgggagttcagaagtggctgaagggactacatcaagggactcgtgcttgggcctctccaagccctgtcccactcccacctgatctactcttaaaggttgagcacttctcatgggttttcttggatgatgtttttgaggtgaaacttcatgataactacgagctgatgaaggatgaaagtaaggagagtgccaaaagactacagctactggatgctaaagtggccgcccttcggaagcagcatggggagttgttgcctgcccgcaaaattgaggagctctatgcctctttggaacgcaaaaacattgaaatctacatccagcgttcccgtcgtctctatggcaacacacccatgcgccgggcactgcttacttggagcttagcagggctagaactggtagctctggcagatgcctccttccatggtcctgagcatgtggtagaacaggttcaagagcttgatccaggcagcccttttccccctgagggattagatcttgtcattcagtggtgtcgaatgctcaagtgcaatgtcaagagctttctggttcggatcagggactatccacggtacctgtttgagatccgtgactggcggctaatgggtcgacttgtgggcaccgagcagagtggtcagccttgctcccgtcggcgtcagatcttgcacttggggcttccgtggggtaacgtggcagtggagaggaacatgcccccactcaaattctaccatgactttcactcggaaatattccagtacacagtggtgtggggcccatgctgggatccagcctggacactaattggccagtgtgtggacctcttgaccaagccctcagctgaccccagcccacctttgccctggtgggacaagagccgtcttctgttccatggagactggcacatggacattgaacaggcgaacctgcaccagctggccactgaggatccatacaacacaactgaaaatatgcactgggagtggagccacctgtcttttcattggaaacctggtcagtttgtgttcaagggtgacttggatatcaacgtgagaacagcctctaagtatgacgactgctgcttccttcacctgcctgacctctgcatgacactggacctgcagtggctgtgccatgggaacccccatgatcaccatagtgtcactctgcgggccccagagttcctgcctgaggtgcccttgggccagcttcatgactcctaccgggcctttcgctcggagaacctcaatctctccatcaagatggatctgactcggcacagtggaacaatatcccagccccgaattctgctatatagtagtaccctgcgctggatgcaaaacttctgggcaacttggacaagtgtcacaaggcctatctgcaggggaaagctcttcaataacctgaaacccagcaagaagaaacttggtcagcactacaagcaactttcctatacagccctctttccccagctgcaggtacattattgggcctcatttgcccagcaacggggcatccagattgagtgcagtcagggccatgtcttcactcgggggactcagcggcttatacctcaagcaggcacagtgatgcggcgccttatctctgattggagtgttacccagatggtgagtgacctaagtcaggtgaccgttcacctgatggcctcacccactgaagagaatgctgatcactgtcttgatcccttggtaacaaagacccacctgctgagcttgtcctccctcacctaccaacggcatagcaatcgcacagctgaggaggagctctctgctcgtgatggggatcctacctttcatacacatcagctgcacttagtagatttacggatttcctggacaactaccaatcgagacattgcctttgggttatatgatgggtacaaaaaggcagctgtactcaaacgtaatctttctactgaggccctgaaggggttaaagattgatccacagatgccagccaaaaagccaaagcggggtgtcccaactagtgcctcagccccacctcgtgttaacactcccagcttcagtggacaacctgataaggggtcatcaggaggtgcttacatgttgcagaagctaattgaagagacagataggtttgtagtgttcacagaagaggaatcaggcatgagtgaccagttgtgtggcattgctgcctgccagacggatgacatatacaaccgaaactgccttattgaattggtcaactgtcagatggttcttcgtggagcagagacagaaggctgtgtcattgtgtcagctgccaaagcccaactgctgcagtgccagcaccatccagcctggtatggtgatacattgaagcaaaagacatcctggacttgcctcttggatggcatgcagtactttgccaccactgaaagcagccccacagagcaggatggccgacagctctggttagaggtgaagaatatcgaggagcaccggcagcgtagtctggactctgtgcaggagctgatggagagtgggcaggcagtgggcggcatggttaccacaaccacagattggaaccagccagctgaggcacagcaagcccagcaagtccagcggatcatttcgcgttgcaactgccgaatgtactatattagttacagccatgacattgatcctgaactagcaactcagattaagccacctgaagttcttgagaaccaggaaaaggaagatctcctaaagaagcaggaaggggctgtggataccttcacccttatccaccatgagctggaaatttccaccaacccagctcagtatgccatgatcctggacattgtcaacaacctgctgctccatgtagaacctaagcggaaggaacatagtgagaagaagcaacgggtcaggttccagcttgagatctctagcaatccagaggagcaacgcagcagcatactgcatttgcaggaggctgtgcggcagcatgtggcccaaatacgacagctggagaagcagatgtattctatcatgaagtctttgcaggatgacagcaagaatgagaatctgcttgacctgaaccagaagcttcagttgcagctaaaccaggagaaggccaacctgcagctggaaagtgaagaactgaatatcctcatcaggtgttttaaggatttccaactgcagcgggctaacaagatggagctgcgaaagcagcaagaagatgtgagtgtggtccgtcgcactgagttttactttgctcaggcacggtggcgcctgacagaggaagatggacagctgggaattgctgaattagaactgcagaggttcctctacagcaaggtgaataagtctgatgacacagcagaacatcttctggagttgggctggtttaccatgaacaacctcctccccaatgctgtctataaggtagtactgcggccccagagctcctgccagtctgggcgacagctagctctccgcctcttcagcaaagttcggccccctgttgggggtatctctgttaaggagcattttgaggtaaatgtggtgcctctcaccatccagctgacacaccagttcttccacagaatgatgggctttttctttcctggccgaagtgtggaagatgatgaagttggtgatgaagaggataagtccaaactggtgactactggaataccagtggtgaagcctcggcagctgattgcaacagatgatgcagtaccactgggccctgggaagggtgtggcacagggtttgactcggagttctggggtcagaaggtcatttcgcaaatcgccagagcaccctgtggatgacattgacaagatgaaagagcgagctgccatgaacaactccttcatctacataaagattccacaggttccactgtgtgtcagctacaagggtgagaagaacagtgtggactggggtgaccttaacctggtgctgccctgtctggagtaccacaacaacacatggacatggctagactttgccatggctgtcaaaagggacagccgcaaagccctggttgcccaggtaatcaaagagaagctaaggctgaagtctgcaacaggctctgaggtccggggaaagctagaaactaaatcggacctgaacatgcaacagcaggaagaggaggagaaagcccggctcctcattggtttaagtgtgggcgacaagaaccctggcaagaagtccatctttggcaggcgcaaatgatttggcgattcgagtggctgcagtacaggatctgactctggctcaggctccagggacttgtggggtgggaggggcttcccgttatccacgaggatttgtgggtgtcagagcccataggcatcactcttcagcacctggtctgttcgctgcagggcatggtggacagtaatgctgagttctgtctcacactgatcaggctcagggccagagaggcaacaagagagcaagacccagggaatgggcccagggcaggaccctattcccttggggtcaagtgaaagggtagggggatagtcctgatcaagtgtgataaatttttatagacatatataaatatatatatattatatatatatttctaagtgtaactgtccttcctctgtgccaggaaacgggagggggctgatcctctgatcctcactccactgtcatgtttgaaagaggtattggtgttctggagtgggggtcaacccctccccagtctctgtgctaagttcacttgggaggatggcagtaggagccagggctggccatgggtcccctacccttccccgtaggatataccctggagaatggcaaaatgatttaaagagaaaaaaaaagatattttaaatttgatgctcaaaaaaaaaaaaaaaaaaaaaaaaaa

SEQ ID NO: 52 - DNA, 3353 bp, Homo Sapiens
gcggcgctggagtcggcgcgggtgctggcgccatggaggccgagcggggtcccgagcgccggcctgcggagcgtagcagcccgggccagacgccggaggagggcgcgcaggccttggccgagttcgcggcgctgcacggcccggcgctgcgcgcttcgggggtccccgaacgttactggggccgcctcctgcacaagctggagcacgaggttttcgacgctggggaagtgtttgggatcatgcaagtggaggaggtagaagaggaggaggacgaggcagcccgggaggtgcggaagcagcagcccaacccggggaacgagctgtgctacaaggtcatcgtgaccagggagagcgggctccaggcagcccaccccaacagcatcttcctcatcgaccacgcctggacgtgccgtgtggagcacgcgcgccagcagctgcagcaggtgcccgggctgctgcaccgcatggccaacctgatgggcattgagttccacggtgagctgcccagtacagaggctgtggccctggtgctggaggagatgtggaagttcaaccagacctaccagctggcccatgggacagctgaggagaagatgccggtgtggtatatcatggacgagttcggttcgcggatccagcacgcggacgtgcccagcttcgccacggcacccttcttctacatgccgcagcaggtggcctacacgctgctgtggcccctgagggacctggacactggcgaggaggtgacccgagactttgcctacggagagacggaccccctgatccggaagtgcatgctgctgccctgggcccccaccgacatgctggacctcagctcttgcacacccgagccgcccgccgagcactaccaggccattctggaggaaaacaaggagaagctgccacttgacatcaaccccgtggtgcacccccacggccacatcttcaaggtctacacggacgtgcagcaggtggccagcagcctcacccacccgcgcttcaccctcacccagagtgaggcggacgccgacatcctcttcaacttctcacacttcaaggactacaggaaactcagccaggagaggccaggcgtgctgctgaaccagttcccctgcgagaacctgctgactgtcaaggactgcctggcctccatcgcgcgccgggcaggtggccccgagggcccaccctggctgccccgaaccttcaacctgcgcactgagctgccccagtttgtcagctacttccagcagcgggaaaggtggggcgaggacaaccactggatctgcaagccctggaacctggcgcgcagcctggacacccacgtcaccaagagcctgcacagcatcatccggcaccgagagagcacccccaaggttgtgtccaagtacatcgaaagtcccgtgttgttccttcgagaagacgtgggaaaggtcaagttcgacatccgctacatcgtgctgctgcggtcagtgaggcccctacggttgttcgtgtatgatgtgttctggctgcggttctccaaccgggcctttgcactcaacgacctggatgactacgagaagcacttcacggtcatgaactatgacccggatgtggtgctgaagcaggtgcactgtgaagagttcatccccgagtttgagaagcaatacccagaatttccctggacggacgtccaggctgagatcttccgggccttcacggagctgttccaggtggcctgtgccaagccaccacccctgggcctctgcgactacccctcatcccgggccatgtatgccgtcgacctcatgctgaagtgggacaacggcccagatggaaggcgggtgatgcagccgcagatcctggaggtgaacttcaaccccgactgtgagcgagcctgcaggtaccaccccaccttcttcaacgacgtcttcagcaccttgtttctggaccagcccggtggctgccacgttacctgccttgtctaggcactcgctgtccccaaaacctgtgcttggggcaggattccaacctcagttctctgagctgcttctgcaaaggcccccatgtccctccccacaccggccctgggcatagcctcagccccaggcctctgtcctgccgagccatcctcccggcgccacactccgggagcacagcatcctcctctcacctgtgggtcagagcaggacagtgatggtgtccccagggctgagcaccaccccacgccctgccctcacccctcaccaccatctgtgcactgatgagtctccagtttagccaagggctttgttcctggcatggagaatttgttcctggctgctgtgtttccagggggtgctgggggaagggttccgtggagcgagacaaggtgtcctcgggagcagggttccaccgggaagcgtttgggagccctgtatcacacggggcaggcgggtttctcttccggggtctctgctcttatgcatcaggacgaccccgggacggctgtggggccccacactgcacccacagggctctatgcgacaggggcccaggaacagcctgaggccaccacccagcaagcccgccttatcacccattccagctcacccagaaccttcaccagcaaacctcctgctgaggtcctggcaggaggccaccgtcttgttaccgtttccttttcgtttgctgagggtcacagaccccaacagggaaatcagtatctgtcttcccagtggttgccctgctcgccgggcactccacggggtcccgcccttgtgtgagatgggccaggatccttcggcaaggggcgcctggggctggggctgattgtgggcggtggagcgccagacagaaaaggattccaatgagaacttcaggttaaagtcagatgccacctaccagggtctacagtcaaaatgttggctttttcttattttttaatgtatgggagaaaaatgtaaaattccagttcttttctaattgtgtttctgaaattaggagtcagctgccagcgtttttgtgtggctgcagtgtgcctgggcccagctcacgggcagtgggtggacctaactgcccaggcaggcgagagctacttccagagccttccagtgcatgggagggcagggctaggtgtagcggtgtctcctctttgaaattaagaactatctttcttgtagcaaagctgcacctgatgatgctgcctctcctctctgtgttgtctgggcccttgtttacaagcacgcgttacccttcctgaggggagccatgctctagcccctggagggcctgttgcaggggcagggcgggcccgtcgcctttggcagctcctggagagctgtggacatgcagtccccctcagttcgtgctgcaataaaggccatcttctctta

SEQ ID NO: 53 - DNA, 3209 bp, Homo Sapiens
gcctcgtgcccgcgccggtcggttggtggcgcctttgtcctacggcgggcaggtgggccgacgcggaggcggcagcggcgggcctgaggcgaaggagcggccgggagcccgccgcgctggtagcgatattaataaggcagcggaaagaagaaatatgaatacggctccatcaagacccagccccacacgaagggatccatatggctttggagacagtcgagattcaaggcgtgatcgatccccaattcgaggaagtccaaggagagagcccagggatggcagaaatggccgggatgcccgggacagcagagacattcgagacccccgagacttgcgggaccacagacatagtagagatttgcgggatcacagagacagcaggagtgtgcgcgacgttcgggacgtgagggatcttagagactttcgtgatctaagagactctagggattttcgagatcagcgagaccccatgtacgacagatacagagacatgagagactcccgagatcctatgtacaggagagaaggctcttatgaccgatacctacgaatggatgactattgcaggagaaaggatgactcttattttgaccgttacagagatagctttgatggacggggccctccaggcccagaaagtcagtctcgtgcaaaagagcgtttgaaacgtgaggaacggcgtagagaagagctttatcgtcaatattttgaggaaatccagagacgctttgatgccgaaaggcccgttgattgttctgtgattgtggtcaacaaacagacaaaagactatgctgagtctgtggggcggaaggtgcgagacctgggcatggtagtggacttgatcttccttaacacagaagtgtcactgtcacaagccttggaggatgttagcaggggaggttctccttttgctattgtcatcacccagcaacaccagattcaccgctcctgcacagtcaacatcatgtttggaaccccgcaagagcatcgcaacatgccccaagcagatgccatggtgctggtggccagaaattatgagcgttacaagaatgagtgccgggagaaggaacgtgaggagattgccagacaggcagccaagatggccgatgaagccatcctgcaggaaagagagagaggaggccctgaggagggagtgcgtgggggccaccctccagccatccagagcctcatcaacctgctggcagacaacaggtacctcactgctgaagagactgacaagatcatcaactacctgcgagagcggaaggagcggctgatgaggagcagcaccgactctctgcctggcccgatttcccgccaaccactcggggcgacctcgggtgcctcgctgaagacacagccaagctcccaaccgctccagagcggccaagtgctcccctctgctacacccactccatctgcaccccccacctcccagcaagagcttcaggccaaaatcctcagcctcttcaatagtggcacagtgacggccaatagcagctctgcatccccctcggttgctgccggaaacaccccaaaccagaatttttccacagcagcaaacagccagcctcaacaaagatcacaggcttctggcaatcagcctccaagcattttgggacagggaggatctgctcagaacatgggccccagacctggggctccttcccaagggctttttggccagccttccagtcgcctggcacctgctagcaacatgactagccagaggcctgtgtcttccacaggtatcaactttgacaatccaagtgtacagaaggctctggataccctgatccagagtggccctgctctctcccacctggttagccagaccacagcacagatggggcagccacaggcccccatgggatcttaccagaggcattactgaagctaaatctttcaactctccccagtcccctcatcccctggcctcctcccacttacttgttctaaatagagctgtttggaggatgttctctgcgctcccaggccggcatcgagtgtcatcaatttctaccacctgctctctcttctgcccaaggctgtgttgcttattccttacaaagtttatactgcatttggggctgtatctttttttgttttttgttttgtagaaaataaatatctccgggggcagtacaggtgtctgggcttgtatttgatggggtttctccggtccctgtttctactggatttggagccaggcccagctagccaagtttggaatggcatttgtcatgtcagtagccaccacctttgttcattgtgaacctaccaaggctttccagcttcatacacattgaccagagctcaagctcctgcctgcaactcctgcctagagttgaagaaaagcaaactggccttggcaggcacagtgtcatcataccctcaccccatatgtttggggtctgcttgaggattcataaatcagccactctggattgttgaggaatggccatggcagccacagaaaaaagaatttttctctctgagccaaggttgttttttgtttttttctcttttcttttttgttttcatttcattggaagatctccaatggactgaacagctccagtcagcagcagttaccacaaactgtgaatctgggccccaccactcttccctgttaaccagttctgtcagcatccccctctccagcagcacttccatgaagttggttctgagactctggccgtgaacacccgtttcttcagtgatttgttttgggcttttggctcaaaaccccaggctcttgtttttgtctagactcttattctgtttcctgagcagcaggaggtagggaccactttgatgtcagacttctggtagctggacatgttctcgagatgggtggctgttcgcgacttttgtaccagagtgaaattgttagaaggagggtttctggctgtggttctaaatggagccccaggaagctgccctctccccagggtttgtgctcagtagagccctgtggatcacagtcttgaggtcctctagcaggggtgagggagagcagcgacttcagctgagtccctgccagtggttaagcaaacaatggtttcaaaattcaaggtccccaaatggcagcattttatgttctgacctgtttgtgttatatagtggttttttttttcctctttggaactcttgtgttgttaataaaatgaaatgattactttttaattaaaatgaaaaaagtaaaa

SEQ ID NO: 54 - DNA, 7771 bp, Homo Sapiens
gaggcggggccaggacggcgggaccggccgctgggtcccagcgagggctgagccgggcggtgggaggaggtcaggatggtgggggaacggcatgctggggacctcatggtgcccttagggcctcggctgcaggcatatcctgaagaactcattcgacagaggcctgggcatgacgggcatcctgaatacctgatccgatggagtgtcctgaagtgtggggaagtgggcaaagtgggtgtggaagaaggcaaagcagagcacatcctcatgtggctgtcggctcctgaggtctacgccaactgccctgggctgttaggtgagcgggcactatctaagggacttcagcacgaaccagctggggtttcaggaagctttcctcgagatccaggaggcctggatgaagtggcaatgggagagatggaggctgatgttcaggcgctggtacgcagggcggccaggcagctggcagaaagtgggaccccaagcctcacggccgctgtgcttcacaccatccacgtgctcagtgcctacgccagcatcgggcccctcactggtgtcttcagggagacaggagccctggacctgctcatgcacatgttatgcaatcctgagcctcagatccgccggagtgcaggcaaaatgctgcaggctctggcagcccacgatgctgggagtcgggctcacgtccttctatcactgagccagcaagatggcatcgagcagcacatggattttgacagtcgctatacattgctggagctgtttgcagaaaccacatcctctgaagaacactgcatggcctttgagggcattcatctgcctcagatcccaggaaagctgcttttctccttggtgaagcgctacctttgtgtcacgtccctcctggatcagctgaatagcagtccagagctgggagctggagaccaaagctccccatgtgccacaagagagaaaagccggggacagcgggaactggagttcagcatggctgtgggcaacctcatctctgagcttgtgcggagcatgggctgggcccggaacctcagcgaacagggcatgtcacctccccggccaacccggtccatctttcagccctacatttcaggccccagccttttactccccaccattgtcaccacccccagaagacaagggtgggtcttccgccagcgctctgaattctccagccgtagtggctatggagaatatgtgcagcagacactccagccagggatgcgagtgcggatgctggatgattatgaggagatcagtgctggggacgagggcgagttccggcagagcaacaacggcattccccctgtgcaggttttctggcagtcgacaggccgcacttactgggtgcactggcacatgctggagatcctgggccctgaggaagccactgaggataaggcttcagcagctgtggagaagggggcaggggctactgtgttgggcacagcatttccctcctgggactggaatcctatggatgggctgtaccctttgccgtacctccagcccgaacctcagaagaatgagagagtgggatatctgacccaggctgaatggtgggagctgcttttctttatcaaaaagttggacttgtgtgagcagcagccaattttccagaatctttggaagaacctggatgagaccctgggtgaaaaggccctaggtgagatctctgtgtccgtggaaatggccgagagtctgctgcaggttctcagtagtcgatttgagggcagcactctcaatgacctgctcaactcccagatctacaccaagtatgggctgctgtctaatgaaccaagcagctcgtctacttcacgaaatcactcctgtaccccagatccagaagaggagtccaagtcggaggccagcttctcagaggaagagactgagtccctcaaagcaaaggccgaggcccctaagacagaggccgagcccaccaagacaaggaccgagacccccatggcacagagtgattctcagctgtttaaccagcttctggtgactgaggggatgaccctgcccactgagatgaaggaggcagccagtgaaatggccagagccttgcggggtcccggtcctcgcagctccctggatcagcatgtggcagcggtcgtggccactgtgcagatatccagcttggacacaaacctgcagctttcagggctctctgccctctctcaggctgtggaggaggtcactgagcgggaccaccctctggtccgtcctgacagatcgctgagagagaagctagtgaagatgctggtggagctgctgaccaaccaggtgggagagaagatggtggtcgtgcaggccctgcgcctcctttacctgctcatgaccaagcacgagtggcggccgctctttgccagggagggtggcatctatgctgtgctggtctgcatgcaagaatataagacttctgtcttggtgcagcaggctgggctggcggcactgaagatgctggccgtcgccagctcctcggagatccccacttttgttactggccgagattctatccactctttgtttgatgctcagatgaccagagagatcttcgccagcatcgactcagccacacgcccgggctctgagagcctgctcctcactgtccctgcagccgtgatcctgatgctgaatactgaggggtgctcttctgcagcgagaaatggcttactcctgctcaacctacttttgtgcaaccaccacactctgggagaccagattataacccaagagctgagagacacgttgtttaggcactcagggatagcaccaagaacagaacctatgcctaccacacgcaccatcctcatgatgcttctcaatcgctactcagagccgccgggcagccctgagcgtgcagcactagagacccccatcatccagggtcaggatgggtcccctgagctactgattcgatccctggttgggggcccatctgcagaactactcctggacttggagcgtgtgctgtgccgtgagggcagccccggaggtgccgtgaggcccctcctcaagcgcctccagcaggagacccagcctttcctcctgttgctgcggactctggatgctccggggcccaacaagactctgctgctgtctgtgctgagggtcataacccgactgctggatttccctgaggcaatggtcctcccctggcacgaggtcttggagccctgcctcaactgcctgagtggccctagcagtgactccgagattgttcaggagctgacctgcttcctacatcgcctggcctcgatgcataaggactatgctgtggtgctctgctgcctgggagcaaaagagatcctctccaaagtcctggacaagcactcagctcagctgctgctgggctgtgagcttcgggacctggtgacagagtgtgagaagtacgcacagctctatagcaacctcacctccagcatcctggccggctgcattcagatggtgctgggccagatcgaagaccacagacgaacccaccaacccatcaatatccccttctttgatgtgttcctcaggcatctctgccagggctccagtgtggaagtgaaggaggacaagtgctgggagaaggtggaggtgtcctccaacccgcaccgagccagcaagctgacggaccacaaccccaagacctactgggagtccaacggcagcaccggctcccactacatcaccctgcacatgcaccgtggtgttcttgttaggcagctcactttgctggtggccagtgaggactcaagctacatgccagccagggtggtggtgtttgggggtgacagcaccagctgcatcggcactgagctcaacacggtgaatgtgatgccctctgccagccgggtgatcctcttggagaacctgaaccgcttctggcccatcatccagatccgcataaagcgctgccagcagggcggcattgacacccgggttcggggtgtggaggtcctgggccctaagcccacattctggccactgttccgggagcagctgtgtcgccgaacatgtctcttctacacaattcgggcacaagcctggagccgggacatagcagaggaccaccggcgcctcctccagctctgtcccagactgaacagggttttgcgccacgagcagaattttgctgaccgcttcctccctgatgatgaggccgcccaggcactgggcaagacctgctgggaggccctggtcagccccctggtgcagaacatcacctctcccgatgcggaaggcgtgagtgccctgggatggctgctggatcagtacttagaacagagagagacctctcggaaccccttgagtcgagcagcgtcctttgcttctcgagttcgtcgcctttgccacttgctggtgcatgtggaacctcctcctgggccttctcctgagccatccactcggcccttcagcaagaacagcaagggtcgggaccggagcccggcgccttcgccagtgcttccaagcagcagcctgaggaacataacccagtgctggctgagcgtggtgcaggagcaggtcagcagattcctggctgcagcttggagggccccagactttgtgcctcgttactgtaaactctatgagcacttgcagagagcaggctccgagctgtttgggcctcgggcagccttcatgctggctctgcgcagtggcttctctggcgccttgctgcagcagtccttcctcactgctgctcacatgagtgagcagtttgccaggtacattgaccaacagatccagggtggcctgattggtggagcccctggagtggaaatgctggggcagcttcagcggcacctggaacccattatggtcctttctggtctggaactggccacaacttttgagcacttctatcagcattatatggcggaccgtctcctgagctttggttcgagctggctggagggggctgtgctagagcagattggcctctgttttcccaaccgcctcccacagctgatgctgcagagcctgagcacctctgaggagctgcagcgccagttccacctcttccagctccagcggctcgacaagttgttcttggagcaggaagatgaggaggaaaagagactagaggaagaggaggaggaagaggaggaagaggaagctgagaaagaattatttatcgaagatccaagtccagccatttctatactggtcctgtcaccacgctgctggcccgtctccccactctgctacctgtaccatcccagaaagtgccttcccacagaattctgtgatgcccttgaccgtttctccagtttctacagccagagtcagaaccatccagtcctggacatgggaccacatcggcgactgcagtggacgtggctgggccgggctgagctgcagtttgggaagcagatactgcatgtgtccaccgtgcagatgtggctgctgctgaaattcaatcagacagaggaggtgtcagtagagaccttgctgaaggattctgacctctccccagagctgctgctccaggcactcgtgcccctcacctcagggaatggccctttgaccctgcatgagggccaggactttccacacgggggtgtgctgcggcttcatgagcctgggccccagcgcagtggggaggccctgtggctgatacctccccaggcatacctgaacgtagagaaggatgaaggccgaaccctggaacagaagaggaatctcttgagctgtcttcttgttcgtattctcaaagcccatggggaaaagggcctccacattgatcagctggtttgtctggtgctggaggcctggcagaagggtccaaatcctcctggaaccctgggccacactgttgctgggggtgtggcctgtaccagtacagatgtcctctcttgcatcctgcacctcttaggccagggctacgtgaaacggcgtgatgaccggccccagatcctgatgtatgccgctccagagcccatggggccctgccggggtcaggcagatgtccctttctgtggcagccagagcgaaacctccaagcccagcccagaagctgtggctaccctggcatctctacagctgcctgcaggccgcaccatgagcccccaggaagtagaagggttgatgaagcagacggtgcgtcaggtgcaggagacgctgaacttagagccagatgtcgctcagcaccttttggctcattcccactggggcgctgaacagctgctgcagagctacagtgaggaccctgagccactgctgctggcagctgggctgtgcgtacaccaggctcaggctgtacccgtacggcctgaccactgccccgtctgtgtgagccccctggggtgtgacgacgacctgccctctctctgctgcatgcactattgctgtaagtcttgctggaatgagtacctgacaactcggatcgagcagaaccttgttttgaattgcacctgccccattgccgactgccccgcccagcccaccggagccttcattcgtgccatcgtctcctcgccagaggtcatctccaagtatgagaaggcgctcctgcgtggctatgtggagagctgctccaacctgacctggtgcaccaacccccagggctgcgaccgcatcctgtgccgccagggcctgggctgtgggaccacctgctccaagtgtggctgggcctcttgcttcaactgtagcttccctgaggcacactaccctgctagctgtggccatatgtctcagtgggtcgacgacggtggctactatgacggcatgagcgtggaggcgcagagcaagcacctggccaagctcatctccaagcgctgtcccagctgtcaggctcccatcgagaagaacgaggggtgcctgcacatgacctgtgccaaatgtaaccatggattctgctggcgctgcctcaagtcctggaagccaaatcacaaagactattacaactgctctgccatggtaagcaaggcagctcgccaggagaagcggtttcaggactataatgagaggtgcactttccatcaccaggcgcgggagtttgctgtgaacttgcggaaccgggtgtctgccatccatgaagtgcccccgcccagatccttcaccttcctcaatgatgcctgccagggactggagcaggctcggaaggtgctggcctacgcctgcgtgtacagcttctacagccaggacgcagagtacatggatgtggtggagcagcagacagagaacctggagctgcacaccaatgccctgcagatcctcctggaggaaaccctgctgcggtgcagagacctggcctcctccctgcgcctcctgcgggccgactgcctcagcacgggcatggagctgctccggcggatccaggagaggctgcttgccatcctgcagcattctgcccaggatttccgggttggtcttcagagtccatcagtagaggcctgggaggcaaaaggacccaacatgcctggcagtcagccccaggcctcctcagggccagaggcagaagaggaggaggaagacgatgaggatgatgtgcccgagtggcagcaggatgagtttgatgaggagctggacaatgacagcttctcctacgatgagtctgagaacctggaccaagagactttcttctttggtgatgaggaagaggatgaagatgaggcctatgactgagggggcagatgcaggaaacacctagagcagccccagagtcacggggctgagggggcgggagctgcccctgtcatagggagggggattcccagcgtctgtagtgcttcctgtttgctgaataaaggtctctttctcacacaca

SEQ ID NO: 55 - DNA, 7580 bp, Homo Sapiens
atgacggacaacatcccgctgcagccggtgcgccagaagaagcggatggacagcaggccccgcgccgggtgctgcgagtggctgagatgctgcggtggaggggaggccaggccccgcactgtctggctggggcaccccgagaagagagaccagaggtatcctcggaatgtcatcaacaatcagaagtacaatttcttcacctttcttcctggggtgctgttcaaccagttcaaatactttttcaacctctatttcttacttcttgcctgctctcagtttgttcccgaaatgagacttggtgcactctatacctactgggttcccctgggcttcgtgctggccgtcactgtcatccgtgaggcggtggaggagatccgatgctacgtgcgggacaaggaagtcaactcccaggtctacagccggctcacagcacgaggcacagtgaaggtgaagagttctaacatccaagttggagaccttatcatcgttgaaaagaaccagcgggtccctgccgacatgatcttcctgaggacatcagaaaaaaacgggtcatgcttcttgcggacggatcagctggatggggagacggactggaagctgcggcttcccgtggcctgcacgcagaggctccccacggccgccgaccttcttcagattcgatcgtatgtgtacgcagaagagccaaatattgacattcacaacttcgtgggaacttttacccgagaagacagcgaccccccgatcagcgagagcctgagcatagagaacacgctgtgggctggcactgtggtcgcatcaggtactgttgtgggtgttgttctttacactggcagagaactccggagtgtcatgaatacctcaaatccccgaagtaagatcggcctgttcgacttggaagtgaactgcctcaccaagatcctctttggtgccctggtggtggtctcgctggtcatggttgcccttcagcactttgcaggccgttggtacctgcagatcatccgcttcctcctcttgttttccaacatcatccccattagtttgcgcgtgaacctggacatgggcaagatcgtgtacagctgggtgattcgaagggactcgaaaatccccgggaccgtggttcgctccagcacgattcctgagcagctgggcaggatttcgtacttactcacagacaagacaggcactcttacccagaacgagatgattttcaaacggctccatctcggaacagtagcctacggcctcgactcaatggacgaagtacaaagccacattttcagcatttacacccagcaatcccaggacccaccggctcagaagggcccaacgctcaccactaaggtccggcggaccatgagcagccgcgtgcacgaagccgtgaaggccatcgcgctctgccacaacgtgactcccgtgtatgagtccaacggtgtgactgatcaggctgaggccgagaagcagtacgaagactcctgccgcgtataccaggcatccagccccgatgaggtggccctggtacagtggacggaaagtgtgggcttaaccctggtgggccgagaccagtcttccatgcagctgaggacccctggcgaccagatcctgaacttcaccatcctacagatcttccctttcacctatgaaagcaaacgtatgggcatcatcgtgcgggatgaatcaactggagaaattacgttttacatgaagggagcagatgtggtcatggctggcattgtgcagtacaatgactggttggaggaagagtgtggcaacatggcccgagaagggctgcgggtgctcgtggtggcaaagaagtctcttgcagaggagcagtatcaggactttgaagcccgctacgtccaggccaagctgagtgtgcacgaccgctccctcaaagtggccacggtgatcgagagcctggagatggagatggaactgctgtgcctgacgggcgtggaggaccagctgcaggcagatgtgcggcccacgctggagaccctgaggaatgctggcatcaaggtttggatgctgacaggggacaagctggagacagctacgtgcacagcgaagaatgcacatctggtgaccagaaaccaagacatccacgtttttcggctggtgaccaaccgcggggaggctcacctcgagctgaacgccttccgcaggaagcatgattgtgccctggtcatctcgggagactccctggaggtttgcctcaagtactatgagtacgagttcatggagctggcctgccagtgcccggccgtagtctgctgccgatgtgcccccacccagaaggcccagatcgtgcgcctgcttcaggagcgcacgggcaagctcacctgtgcagtaggggacggaggcaatgacgtcagcatgattcaggaatctgactgcggcgtgggagtggaaggaaaggaaggaaaacaggcttcgttggctgcagacttctccatcactcaatttaagcatcttggccggttgcttatggtgcatggccggaacagctacaagcggtcagccgccctcagccagttcgtgattcacaggagcctctgtatcagcaccatgcaggctgtcttttcctccgtgttttactttgcctccgtccctctctatcaaggattcctcatcattgggtactccacaatttacaccatgtttcctgtgttttctctggtcctggacaaagatgtcaaatcggaagttgccatgctgtatcctgagctctacaaggatcttctcaagggacggccgttgtcctacaagacattcttaatatgggttttgattagcatctatcaagggagcaccatcatgtacggggcgctgctgctgtttgagtcggagttcgtgcacatcgtggccatctccttcacctcgctgatcctcaccgagctgctcatggtggcgctgaccatccagacctggcactggctcatgacagtggcggagctgctcagcctggcctgctacatcgcctccctggtgttcttacacgagttcatcgatgtgtacttcatcgccaccttgtcattcttgtggaaagtctccgtcatcactctggtcagctgcctccccctctatgtcctcaagtacctgcgaagacggttctctccccccagctactcaaagctcacatcataggccgtgcgttcgctggagggggccctggtcttggcgcttccctgatggacagagctcaagttccatttatattaaccgccacctgtggattttgcagtaattgctaacacatgcagttttaatgggaagtggctctgcgcctaaacggagtcctaacgctgcatcaacgggagggagggtcctgaaagagacccatctgggcctgtctgaacccctcgttcttcatgtttaggtgaatatgaatatgttaaagctggtggctcagctgggagatttatatgggtcactgtgcgagcttccttatgacttgaattttgttgtcacatgataaaagtttctgtgtagctgaaggttgtagaaggcttgtgtgtgtgtgtgtgtgtgtgtgtgtgtgtgtgtgtgtttttaaagagtcctaatgtgtatgtactctttatgtctttcttgctcttacaaagaggtgtcagaaaaatagaaagctcttggtgtcggtttgggaggaaaagacagtgacatttggtaaaaagttatccacacaataatctccattcggaaatgctcagtatcgtctccagccagccctgcttatccaggttacactggattcctgggatcgtaaccagtaaatgagaggagagggagagagagtgtcctaagtccaatctgttatccttgatctgattcagcatccatagtgtgtgagttaacttcacctgccacctcgtaaaagaatttcagaggtgtgatcccgctttattgggacctggtaacaatcacaaagccagtggctgtttgagaaggacctcagacattttcagcagagttgttttagcaggaaacgtgccactgaatggcccctaaatgtgtcgacagtgtgataagagactcaactaattctttaggcaacatggcagatgtgactcagatcctccaagaccaaagcggaaaggtcagggggctgggactcttctcttccatagaagcctgtttcctgttaggaggcataatggaagatgaccccacaaaggcagaggcatctttcggaacaacactggtggcagctttcagaacaaggaacccctggtgggaggacgcccaagctacagcgttgggatctgggatctgttccactgccggcagatttcaaggggaacttgctgaaaggcagccagtggtgaagatttctcccctcccaggatggactacatgccggcatgtttcttataaagctgtggctgcttgtttcagaggaagggagtttgcagtcgcgggacgtggtagagcaaggcattcttgggttttcaagttgcttcttgcagaagccacatatgcatgccataagggttaagttggtggatctttaagagccaagtgtggttgagatcttggatttgcgtttacttcttgatgaatacatatccttcaaaccctctgcctggcgctacttctgtgtgcttcagagatgtacatcacagcctggtttctgatgcctactaactcctgctcttggagagctggagacacgaggatcagatagtcccttgcctttggagcactcttgataagcttttgtattttgtgttgtccttttaaaatgttctagaatgactttacgttgcaggtactggttaattggctgttgacaccacatctattttgtcttatgattctgcagttttgcagtacttttctctatctgattcagccatttctgccagagggaaaaggtcggcagaaaagatgtattgagtgaatagttaaggataggatctttgtccaaaaatttcagaaagattgagcaaatctgacgtattcattgagtgagtttctgtgttttcaaaggtggaggagaaatttgtgctggaagtttttaagcctccgttttcttggaaatcagtctgtaacactggcaagtcttaagatagtcccatttagactttgcagatgctgaacctggctctgtaacgctgggaagtcttaagatagtcctgtttagactttgcaaaccctgtacctggctttgctcggagattcgggatgctggctcctgcaggcagggcgtgtgggagcctcgtcagaaagttttagaggtttccagcagaagcagaatgaagatggtctccctggccttttccttaattctcaattttgattgaggtgcacaagttgacttttaaagccaacgcttaagatactgattgacatcttcaagggagaatgctcccaggaggggctgaagaagccatagttggaagtggaaggtactcgtcagtgttctccacaaacctttttactctgttgtctcagccgcactggggcggaggcggtcaagggtgagaagtaccgacactcaagtgcaaactgccacgtcgttggcccatcccatcagtgggcagctggctgacgccattcactggacggtccctgaacacctaggaatgcacacaccgtgcttctcagacactggagacgcaaaggcaggaggatgcagtccggtgagaggacacgatctttacctgcacaatcagactgtaagcccagcagagaaccccaggggcgcctgggtacttctcggaggtcatcttagttgtggtggggaagacaaagaaataagcaaacaagaaactagagttactatacaagaaactctcctgagtttgtaaaccttaagcataaggattcagttgacctttttcttggttcatcaatctggaaagaacttacataaagcgccattgacactgtcacctgggagctccatgggccgtaagtctttgacagccaatttaatttgaggtcagagggccttgaggtacacagtcagcactgtttgaacacttttcctgaaagcaaaactcacagctccctgcgccctctgacaacactagctatttctgccagagtaagaacttctattactattttattattgttcatatgtcttttgatgatggttgtgtgacagggggaagcaggatctatttggtttcttcccctccccccaccccttcctttttgtctctctttttttttctctaagaaaatcaccagactagtttttccatcttgagtaatttcttatgtgggacagttttgatcctcattttgaaagcatgcgtgtgcacatgtgtgttgcctgtggtgccaggtgagacaggtggcactaactccagctgcttggaaggcatcccaagggcgcatcttaaagttggagcagacctcccttttccagcccctggggccattagaccacgtgctggaactagcattgtaaaattcccatcccagttccactcccctgaagtgaaacccttttttttttgtgacagtaaatcttaaaaatcattgtctctttatgaacatttcctcagtttcttctctgctgaaaatgtaagccatgctactttttaatgtattttgaattttgtgctcattggaaattgatatgctaatgcctcccccaccccccgccagacttttctttttatactttgtcttgtttttactggggtaggctgggcatgcgtgcgtgcctttagggcagcattttaaacctttgccaaaattgcaaatgggacatgtacattcttctgctccatcctacttaaacacctatcagctatttttatctttaaccttttctgtatgtttgaagtgtgtggggggtgtgtgtgtgtgtgaaagagcgagagaatgatgtcatctaaagttttttgaagaattatttggttttcattgcattaaaattctatcactcccagctttgttttcatttaaaaaaatatacaaagagctttgtaaatacaacacattttatttctcccccttcttttaatgtacagcttttttgccacttatatatacttaaaatattcccatgaattatgtccagttcttcttggaaaaaaatttggttttgaatgaacctgcaaagcatcctgcagcgtgagcagctcctccacctggagctccgaagcatcttctcaggccaaagcggcattacccgtgaatctgtcttctccgccacagcatggtttgaggcgcagtctgttaatatagctgggccatgtcagtgactgttgtgtttgtggggtcaggtggggggcatggtatttgcaaaaaaaacaaattatggctaatttattattttgttgcagtggggttaactgtaaactcatgtaagagtctgtgatttcctcattggttgatctctctctctgtaatcctcattgcaaattttcaccaggacagcgttttttgattagaggggagctctggcacagtatgctttaatttagcaggaacttccagatgatttaaattctcgatgctgtgatgacacacatatgatctttcgtgtttctgagcgactctactttcattgtttgccagcgtggctcgttgctgttgcccaataaagcttgtgtacgttctgc

SEQ ID NO: 56 - DNA, 1519 bp, Homo Sapiens
cagggtcccagatgcacaggaggagaagcaggagctgtcgggaagatcagaagccagtcatggatgaccagcgcgaccttatctccaacaatgagcaactgcccatgctgggccggcgccctggggccccggagagcaagtgcagccgcggagccctgtacacaggcttttccatcctggtgactctgctcctcgctggccaggccaccaccgcctacttcctgtaccagcagcagggccggctggacaaactgacagtcacctcccagaacctgcagctggagaacctgcgcatgaagcttcccaagcctcccaagcctgtgagcaagatgcgcatggccaccccgctgctgatgcaggcgctgcccatgggagccctgccccaggggcccatgcagaatgccaccaagtatggcaacatgacagaggaccatgtgatgcacctgctccagaatgctgaccccctgaaggtgtacccgccactgaaggggagcttcccggagaacctgagacaccttaagaacaccatggagaccatagactggaaggtctttgagagctggatgcaccattggctcctgtttgaaatgagcaggcactccttggagcaaaagcccactgacgctccaccgaaagtactgaccaagtgccaggaagaggtcagccacatccctgctgtccacccgggttcattcaggcccaagtgcgacgagaacggcaactatctgccactccagtgctatgggagcatcggctactgctggtgtgtcttccccaacggcacggaggtccccaacaccagaagccgcgggcaccataactgcagtgagtcactggaactggaggacccgtcttctgggctgggtgtgaccaagcaggatctgggcccagtccccatgtgagagcagcagaggcggtcttcaacatcctgccagccccacacagctacagctttcttgctcccttcagcccccagcccctcccccatctcccaccctgtacctcatcccatgagaccctggtgcctggctctttcgtcacccttggacaagacaaaccaagtcggaacagcagataacaatgcagcaaggccctgctgcccaatctccatctgtcaacaggggcgtgaggtcccaggaagtggccaaaagctagacagatccccgttcctgacatcacagcagcctccaacacaaggctccaagacctaggctcatggacgagatgggaaggcacagggagaagggataaccctacacccagaccccaggctggacatgctgactgtcctctcccctccagcctttggccttggcttttctagcctatttacctgcaggctgagccactctcttccctttccccagcatcactccccaaggaagagccaatgttttccacccataatcctttctgccgacccctagttccctctgctcagccaagcttgttatcagctttcagggccatggttcacattagaataaaaggtagtaattagaaaaaaaaaaaaaaaaaa

SEQ ID NO: 57 - DNA, 2728 bp, Homo Sapiens
ggcggtcggagatccgagagctctgcttctctgaaaagcgtgtggctttctggacttggtctacacctgacagtcactggaatgctactccaggccttagaagaaagtgaaactaattttaaaggccccttattctttctgttacctgcctgctgaagtgaaaataaatctccctgctcctttattctaaactgattttactttcccatctcaaaaacgtgtgcagggagcaggagccctcctacccgagccccagctgtattggaaaccctcctaagtcagagtgatgggtcaggaatctagcaagcctgtatggcccaatccaacaggagggtatcagtccaatacaggtaggaggtatggaagaaggcatgcttatgtcagtttcaggccacccacgagccagcgggaaaggattgccagccagagaaagacgaactccgaagtcccaatgcacagatcagcccccagtcaaaccaccaagaggagccgatcgccattttccactactcgtcgtagttgggacgacagcgagagttcgggaaccaacctgaatattgataatgaggactattccaggtatccgccaagagagtacagagcttcgggtagcagaagaggaatggcctatggacatattgactcttatggggcagatgatagtgaggaggagggggctgggcctgttgagcgaccgccagtgagagggaaaactggcaagtttaaagatgataagctgtatgacccagagaaaggggcaaggtctttggctgggccacctccacatttctctagttttagccgtgatgtgagagaggagcgagacaagttagacccagtccctgcagcaagatgctcagctagcagagctgacttcctgccacaaagtagtgtggcctcacagtcgtcttctgaaggcaagctggctacaaaaggtgacagctcggagagggagagaagggagcaaaatttacctgcacgtcccagcagggctcctgtgagtatttgtggtggtggggaaaacacctcaaagagtgcagaggaacctgtggtcaggcccaaaatcagaaacctggcaagtccaaactgcgtgaaaccaaaaattttttttgatactgatgatgatgacgatatgccacacagtacttccaggtggagggataccgccaatgacaatgagggccactcggatggcctggcaagaagagggagaggcgagagttcaagtggctatcccgagccaaagtaccctgaagacaaacgggaagcgaggagtgaccaagtgaaaccagaaaaggtgccgagacgacgacgcaccatggccgaccctgacttctggacgcacagtgatgattactacaaatactgcgacgaagactctgacagtgacaaagagtggattgctgctctgcgtcggaaatatcgaagccgagagcaaaccctgtcctccagtggcgaaagctgggagactctgccggggaaagaagagcgggaacctccacaggctaaggtgagtgccagcactggcaccagccctggccccggtgctagtgccagtgccggggctggcgccggggccagtgctggcagcaatggcagcaattaccttgaagaagttcgagaaccatctcttcaggaagagcaggcatccctggaagaaggagaaattccttggctccagtaccatgagaatgacagtagcagtgagggggataatgattctggtcacgagttgatgcaacctggggtattcatgctggatggaaacaacaaccttgaagatgactccagtgtgagcgaagacctagaagtggattggagcctctttgatggatttgcagatgggttaggagtggctgaagccatttcctatgtggaccctcagttcctcacctacatggcacttgaagaacgcctggcccaggcaatggaaactgcccttgcgcacttggagtctctcgcagtggatgtagaggtggccaatccaccagcaagcaaggagagcattgacgctcttcccgagatcctggtcactgaagatcatggcgcagttggtcaggagatgtgctgccccatctgctgtagcgaatatgtgaagggggaggtggcaactgagctgccgtgccaccactatttccacaagccgtgtgtgtccatctggcttcagaagtcaggcacctgccccgtgtgccgctgcatgttccctcccccactctaaagaccaaggccgtttactcctggtctgattattttccccatctgaaatccacaatactgcaggagccctcttgaaattaacaatggaaataaaaccaatcagtcagttagcctaaacctattgattcctcgtgattatttccaatgtgaaaacagttgtgtatgattgcattaaaaatcatatcatcttttagaggttagaaaagggaaaactaaactttctaaatgctacttgagattgcagtaagaagatacgttttctaacctgaaagttaaatcgcatttgttttcttcagtagaatgggaatgtgttgctgttacttgtaatgtcaagtttatctgttaaatatgtccaaaaggcaaaatcatttttgttgcatgttatgggtcgatgttcctgtaattgcagtgccgtaaaagcttattaaagttgttcttttggttttaaaaaaaaaaaaaaaaaaaaaaaaaaaaaaaaaaaaaaaaaaaaaaaaaaaaaaaaaaaaaaaaa

SEQ ID NO: 58 - DNA, 2581 bp, Homo Sapiens
agcgcctgcgcactgcgccgccggctggggtgctgggggcggggcaggggcaggtgtagcctctgtgcctcgttgtcccctggcgctacccggacatctctcagggtgccggcaccatgaagatctggacttcggagcacgtctttgaccacccgtgggaaactgttacaacagctgcaatgcagaaatacccaaaccctatgaacccaagtgtggttggagttgatgtgttggacagacatatagatccctctggaaagttgcacagccacagacttctcagcacagagtggggactgccttccattgtgaagtctcttattggtgcagcaagaacgaaaacatatgtgcaagaacattctgtagttgatcctgtagagaaaacaatggaacttaaatctactaatatttcatttacaaacatggtttcagtagatgagagacttatatacaaaccacatcctcaggatccagaaaaaactgttttgacacaagaagccataattaccgtgaaaggagttagcctcagcagttaccttgaaggactgatggcaagtacgatatcctcaaatgctagtaaaggccgagaagcaatggaatgggtaatacataaattaaatgctgagattgaagaactgacagcctcagcaagaggaaccataaggactccaatggcagcagcagcgtttgcagagaagtgatcgtgacagttggtagacaacatcgggtactccaggtctctccaaactgactatatatttatttgttattttaaaaatacaactatattttgggtagtttttttttttttttttttgataagttggtgtaaggctatgtgacttgatcaaaacagatgcagggcctctaaataaaagggatcatctgaaattaatgttgtttgaaattactatctgattttgagggttccagtatttctgtgaaaattcaacaagaactccttggaaactggtattgatattcagtctccttaaggtagatttttcaagcttttcatacattggaactccacctgactttggaccaaccccagaacagagcagagccacctcctatagacgcccattgccctgctgctgtacacttcagcagcttgcacaagggagctcacttaaaaggagaaattgtgtagttttaaaatatattttgtgtaaaataccttactatgctataaaccaccattaaaaaccagtgttttgatttggtacttaaatatttttggagtgaaaattatcactaaagtaacatgactccaacaaaagtatggtttcattataaaagagtactgtattgatttgcccaagttttgtaacttagtaaaggtattaacttccttggatttgtactttgtgatttagtatgctgtatcgtgggctggttatgttaactgaaaaaaataaagtcattacctgagttttgcagtgctctaacttaaacagaagaacagctgttcacatcttttagcattttacatttgcctaacttaaaaattgccatgtgtcaaaatcatggttttgtaattgctaaggcatgatatgtcaggttatttgaatataattactttttgaagtaattgtgaccacaaaacatcttttttacatgaaggagctgtgtatcatttgaaattactcaaatgatgtcttgctctgaggcataaatcccaggtacttagtgtttttaataatatggtgccactgcaggatttgggggcggtggggaagaacaagcataatggtagggggaggcttggcctgaaactaaccactgagtgaattgcactgcaggttttacttaacgggaattccttatttgggatgtcaagagggcagctgcaaactgaaaaacaatccagtaaatgtactttgttttatgtattgtagcaggcaattaactactaaataatagctttgacatttgcaattgttgcatagagactatttttgctagaagatgattagctcttgcctttattttacagtgcttagtgtgataaacttctagtcatgtttcctatccaagagaccagttaatatatgtacataaaccacagaaatagtataacacactatttttaaattatcgttttcctacttaaattttgtttagcttaagacttcttaggacatttgtaaaagcaggttaaatttaataaggtttctgatttttttttgtaaccggagatagtttttacaagtgaaataacatttcagctaaataaaacatcgctaaataattgatatttgatgaaaatctgctttgtataatttctgtaaattatccttgttctgaaaaaggtgtaatgccctaatatttttaaatccttatcctttgattttttaaaaactgacctattgataaaactataaattttcattttccagtgcagttagttacctttttaaacataaatgcacaacaagcaaatgaatttaagagaactaaactggaataagtgttcataaatgaaacccttggactatttaataaagttgaaatgtgaattaaggaaaacttttgttaataaaaactttcttttaagtgaaaaaaaaaaaaaaaaaaa

SEQ ID NO: 59 - DNA, 1835 bp, Homo Sapiens
ctgccgcgcgccggaagcagcctgggccgctgcgcagaggcgcggcggctgtacaactcggccgttgtcaccatgccggtcgtccggaagattttccgtcgccgccggggcgactcggagtcagaggaagatgagcaggactcagaggaggttcgattaaaactggaagagaccagagaggtacagaacttgaggaagaggcccaacggggtgagtgctgtggccttgctggtgggagagaaggtacaagaggagaccactctagtggatgatccctttcagatgaagacaggtggtatggtggatatgaagaaactgaaggaaaggggcaaagataagatcagtgaggaggaggacctgcacctggggacatcgttttctgcagaaaccaaccgaagggatgaggatgcagacatgatgaagtacattgagacagagctaaagaagaggaaagggatcgtggaacatgaggaacagaaagttaagccaaagaatgcagaggactgtctttatgaacttccagaaaacatccgtgtttcctcagcaaagaagaccgaggagatgctttccaaccagatgctgagtggcattcctgaggtggacctgggcatcgatgctaaaataaaaaatatcatttccacggaggatgccaaggcccgtctgctggcagagcagcagaacaagaagaaagacagcgagacctccttcgtgcctaccaacatggctgtgaattatgtgcagcacaacagattttatcatgaggagctcaacgcgcccatacggagaaacaaagaagagcccaaggcccggcccttgagagtaggtgacacggagaagccagagcctgagcggtcccctcctaaccgcaagcgtcctgctaacgagaaggcaactgatgactatcattatgagaagttcaagaaaatgaataggcggtactgagttgtgcagagtgggatgtaaatatcgccttcctctccctatatccctcccatgaaaaatggcttcctggccgggcgtggtggctcctgcctgtaatcccagcactttgggaggccgaggtgggcggatcacctgaggtcgggagtttgagaccagcctgaccaacatggagaaacccagtctctactgaaaatacagaaaagttagccaggcgtggtggcacatgcctgtaatcccagctgctcaggaggctgaggcaggagaattgcttgaacccaagaggcggaggttgtggtgagccgagattgcacctttgtactccagcctgggcaacgagcaaaaaactctgtctcaaaaaaaaaaaaaaaaaaaaaaaagaaaaagaaaaatggcttccaggacagagcatgctcatttgctggcggacagttccagaaacagaccctgttagtccttctacttacctgctggatttttcaagcactaaatttataactttttgaaacaaaataatgtgtaattttccatttgggggcaaactctattcttgtgagcattattaaatcttgtttgtaaatatattgtctttctcttaatatttgctctgggtcaggaagaagctgttcacggtgtgataatactctttagattgtgctttcattattatagatgcatcatgtcttctgctttcacgtgtctgggatggggtcagaaatgcatcctccagctgacagaaaaatccaggatgagatcagaaggatactggtgttttctgacttttacaaaattacttgtttgttttcattaaaaaaaaagcataaactatgtttcttattactattagaattattaaatttcaaaatgaatccaaccttaaaaaaaaaaaaaaaaaa

SEQ ID NO: 60 - DNA, 1472 bp, Homo Sapiens
gagcctcctggggtgtccacgtgagcgcgcgtgagtccgcccccccagtcacgtgaccgctgactcggggcgttctccactatcgcttacctacctccctctgcaggaacccggcgatatggctgccgctgtgccccgcgccgcatttctctccccgctgcttccccttctcctgggcttcctgctcctctccgctccgcatggcggcagcggcctgcacaccaagggcgcccttcccctggatacggtcactttctacaaggtcattcccaaaagcaagttcgtcttggtgaagttcgacacccagtacccctacggtgagaagcaggatgagttcaagcgtcttgctgaaaactcggcttccagcgatgatctcttggtggcagaggtggggatctcagattatggtgacaagctgaacatggagctgagtgagaaatacaagctggacaaagagagctacccagtcttctacctcttccgggatggggactttgagaacccagtcccatacactggggcagttaaggttggagccatccagcgctggctgaaggggcaaggggtctacctaggtatgcctggttgcctgcctgtatacgacgccctggccggggagttcatcagggcctctggtgtggaggcccgccaggccctcttgaagcaggggcaagataacctctcaagtgtgaaggagactcagaagaagtgggccgagcaatacctgaagatcatggggaagatcttagaccaaggggaggacttcccagcatcagagatgacacggatcgccaggctgattgagaagaacaagatgagtgacgggaagaaggaggagctccagaagagcttaaacatcctgactgccttccagaagaagggggccgagaaagaggagctgtaaaaaggctgtctgtgattttccagggtttggtgggggtagggaggggagagttaacctgctggctgtgagtcccttgtggaatataagggggtagtgggaaaagtggtactaacccacgattctgagccctgagtatgcctggacattgatgctaacatgaccatgcttgggatgtctctagctggtctggggatagctggagcacttactcaggtggctggtgaaatgacacctcagaaggaatgagtgctatagagaggagagaggagtgtactgcccaggtctttgacagatgtaattctcattcaattaaagtttcagtgttttggttaagtggacctgaagccattcttttttcttttcaaattatactttcgtctatgacctgctttcctctttgaatctaagctggtatagactccactttcccagggtaacaaactatcctcataacactgtggaaactggcatacctttgttattttccagtgatattcagactgacatggattgactgtcaatggtaaagtttgtctattttccagtccttaaaactcaatagcagtat

SEQ ID NO: 61 - DNA, 3727 bp, Homo Sapiens
aagtgagagcagcggcagccggcggtgcagcagccggccgacccagagtgtaagtgcgtgtgctggggcgagcgggagcgggcgaggatgggcacaggatagaggcagagccacccacgccgccgcggccccacgctgggcgacagagcctccagttccccttcaatggtggcgggtcgccggagctctgatcgccgggaacccttgccgctgctgtcctgcgaccccaagcaggtatagacacgtgtggccgtttacgctgtaggatcctcattcccactggctttgaacattttggggacttacaatgccgccacccgcggacatcgtcaaggtggccatagaatggccgggcgcctaccccaaactcatggaaattgatcagaaaaaaccactgtctgcaataataaaggaagtctgtgatgggtggtctcttgccaaccatgaatattttgcactccagcatgccgatagttcaaacttctatatcacagaaaagaaccgcaatgagataaaaaatggcactatccttcgattaaccacatctccagctcagaacgcccagcagctccatgaacgaatccagtcctcgagtatggatgccaagctggaagccctgaaggacttggccagcctctcccgggatgtcacgtttgcccaggagtttataaacctggacggtatctctctcctcacgcagatggtggagagcggcactgagcgataccagaaattgcagaagatcatgaagccttgctttggagacatgctgtccttcaccctgacggccttcgttgagctgatggaccatggcatagtgtcctgggatacattttcggtggcgttcattaagaagatagcaagttttgtgaacaagtcagccatagacatctcgatcctgcagcggtccttggccattttggagtcgatggtgctcaatagccatgacctctaccagaaagtggcgcaggagatcaccatcggccagctcattccacacctgcaagggtcagatcaagaaatccaaacctatactattgcagtgattaatgcgcttttcctgaaggctcctgatgagaggaggcaggagatggcgaatattttggctcagaagcaactgcgttccatcattttaacacatgtcatccgagcccagcgggccatcaacaatgagatggcgcaccagctgtatgttctacaagtgctcacctttaacctcctggaagacaggatgatgaccaaaatggacccccaggaccaggctcagagggacatcatatttgaacttcgaagaattgcttttgatgctgagtctgaacctaacaacagcagtggcagcatggagaaacgcaagtccatgtacacgcgagattataagaagcttgggttcattaatcatgtcaaccctgccatggacttcacgcagactccacctgggatgttggctctggacaacatgctgtactttgccaagcaccaccaagatgcctacatccggattgtgcttgagaacagtagtcgagaagacaagcatgaatgtccctttggccgcagtagtatagagctgaccaagatgctatgtgagatcttgaaagtgggcgagttgcctagtgagacctgcaacgacttccacccgatgttcttcacccacgacagatcctttgaggagtttttctgcatctgtatccagctcctgaacaagacatggaaggaaatgagggcaacttctgaagacttcaacaaggtaatgcaggtggtgaaggagcaggttatgagagcacttacaaccaagcctagctccctggaccagttcaagagcaaactgcagaacctgagctacactgagatcctgaaaatccgccagtccgagaggatgaaccaggaagatttccagtcccgcccgattttggaactaaaggagaagattcagccagaaatcttagagctgatcaaacagcaacgcctgaaccgccttgtggaagggacctgctttaggaaactcaatgcccggcggaggcaagacaagttttggtattgtcggctttcgccaaatcacaaagtcctgcattacggagacttagaagagagtcctcagggagaagtgccccacgattccttgcaggacaaactgccggtggcagatatcaaagccgtggtgacgggaaaggactgccctcatatgaaagagaaaggtgcccttaaacaaaacaaggaggtgcttgaactcgctttctccatcttgtatgactcaaactgccaactgaacttcatcgctcctgacaagcatgagtactgtatctggacggatggactgaatgcgctactcgggaaggacatgatgagcgacctgacgcggaatgacctggacaccctgctcagcatggaaatcaagctccgcctcctggacctggaaaacatccagatccctgacgcacctccgccgattcccaaggagcccagcaactatgacttcgtctatgactgtaactgaagtggccgggcccagacatgccccttccaaaactggaacacctagctaacaggagagaggaatgaaaacacacccacgccttggaaccgtcctttggtaaagggaagctgtgggtccacattcccttcagcatcacctctagccctggcaactttcagcccctagctggcatcttgctcaccgccctgattctgttcctcggctccactgcttcaggtcacttcccatggctgcagtccactggtgggacaagagcaaagcccactgccagtaagaaggccaaagggcccttccatcctagccctctgcaggcatgcccttccttcccttgggcaggaaagccagcagccccagactgcccaaaaacttgcccaccagaccaagggcagtgccccaaggcccctgtctggaggaaatggcctagctatttgatgagaagaccaaaccccacatcctcctttcccctctctctagaatcatctcgcaccaccagttacacttgaattaagatctgcgctcaaatctcctcccacctctctccctgcttttgccttgctctgttcctctttggtcccaagagcagcagccgcagcctcctcgtgatcctccctagcataaatttcccaaacagtccacaggtcccatgcccactttgcgtctgcactgtgatcgtgacaaatcttccctcctcaccagctagtctggggtttcctctccctgccccaggccagaactgccttcttcatttccacccacgctcccagcctcttagctgaaagcacaaatggtgaaatcagtagtctcgctccatctctaatagactaaacctaaatgcctctaggacggactgttgctatccaagcgtttggtgttaccttctcctgggaggtcctgctgcaactcaagttccacaggatggtcaagctgtcagacatccaagtttacatcattgtaattattactggtatttacaatttgcaagagttttgggttagtttttttttttttttttgctttgtttttgtacaaaagagtctaacattttttgccaaacagatatatatttaatgaaaagaagagatacataaatgtgtgaatttccagtttttttttaattattttaatcccaaacatcttcctgaaaataacattcccttaaacatgctgtggaataaaatggattgtgatgatttggaaaaaaaaaaaaaaaaaaaaaaaaaaaaaaaaaaaaaaaaa

SEQ ID NO: 62 - DNA, 1 bp, Homo Sapiens
  misc_feature (1)..(1): n is a, c, g, or t
n

SEQ ID NO: 63 - DNA, 1 bp, Homo Sapiens
  misc_feature (1)..(1): n is a, c, g, or t
n

SEQ ID NO: 64 - DNA, 1853 bp, Homo Sapiens
tttccgcctacccgagaccaaatacgggcacacacaatacacaccacacacgcgcgcacacgcacacgggcacacacgcgcgcacgggatcctgctccgctccgcggctcccccgccccggagagctccgcgatcagcacccgggacagcgccaccgcccacgtgcagggggtggggtccgggcggggctggcgcctcggcgtctcccgggagtgtcccgtccagccgccgagcagggtgcttgagtgtctctgcagaaaagactccaggaccccgccaccatgttcccggagcccccaaccccggggcctccatcgcccgacacgcctcccgactccagtcgcatcagccacggcccagtgcccccctgggccctggccaccatcgtgctggtctcaggcctcctcatcttcagctgctgtttctgtctctaccggaagagctgtcggaggcggacaggcaagaagagccaggcccaagcccaggtccaccttcaggaagtgaaggggctgggccagagttacatagacaaggtgcagccagaagtagaggagctggagccagcaccatccgggccagggcagcaggtggcagacaagcatgagctaggacgactgcagtactccctggattatgacttccagagtggccagctgctggtgggcattctgcaagcaatgggattggcagccttggatcttggtggctcctcggacccctatgtgcgggtctacctgctgccggacaaacggaggcggtacgagaccaaggtgcatcggcagacgctgaaccctcactttggggagaccttcgccttcaaggtcccctacgtggagctggggggcagggtgctggtcatggcggtgtacgacttcgaccgcttctctcgcaatgacgccatcggggaggtgcgggtccctatgagctccgtggacctggggcggccagtgcaggcctggcgggagctgcaggcggctccgcgggaggagcaggagaagcttggggacatctgcttctccctccgctatgtccccacggccgggaagctcaccgtcatcgtcctggaggctaaaaacctgaagaagatggacgtaggaggactgtcagatccatacgtcaaggtccacctgctgcagggcggcaaaaaggtgcggaagaagaaaaccaccatcaagaagaacactctgaacccctattacaacgaagctttcagcttcgaggtgccctgtgaccaagtccagaaggtgcaggtggagctgaccgtgctggactacgacaagctgggcaagaacgaggccatcgggagggtggccgtgggggcggccgccggcggggctggcctgcggcactgggcggacatgctggccaacccgcggcggcccattgcccagtggcactcgctgcggcccccggaccgagtgaggctgctgcctgcgccctgactcccaccccaagcccccggccaagcctggactctagcccctgaccccagactcccgagaccggccaaagccaagccagccccacccttaagcttcctctgacggttaccctccccccaccttccaccccaaccatctgaaccattcctgtcttctcacccccaacgatgccaatcacgacaactttccagcacactcccccgaccctcgcggacacacccagatgccccagggaccccgggaagggaaggcagcctggtttctcctgcccccgggtcctgccccctgctttgacaatcagccatcctcgtctgctctcctctctcttccaacacagcccatccctgcactgctcctggggccaaataaatattcagcagctcaaaaaaaaaaaaaaaaaaaaaaaaaaaa

SEQ ID NO: 65 - DNA, 5121 bp, Homo Sapiens
acaaaggcgcccgcccgccgcccgccgcccgcgcccgcgccgccgccatgaagccggggccgccgcaccgtgccggggccgcccacggggccggcgccggggccggggccgcggccgggcccggggcccgcgggctgctcctgccaccgctgctgctgctgctgctggcggggcgcgccgcgggggcccagcgctggcgcagtgagaacttcgagagacccgtggacctggagggctctggggatgatgactcctttcccgatgatgaactggatgacctctactcggggtcgggctcgggctacttcgagcaggagtcgggcattgagacagccatgcgcttcagcccagatgtagccctggcggtgtccaccacacctgcggtgctgcccaccacgaacatccagcctgtgggcacaccatttgaagagctcccctctgagcgccccaccctggagccagccaccagccccctggtggtgacagaagtcccggaagagcccagccagagagccaccaccgtctccactaccatggctaccactgctgccacaagcacaggggacccgactgtggccacagtgcctgccacagtggccaccgccacccccagcacccctgcagcacccccttttacggccaccactgctgttataaggaccactggcgtacggaggcttctgcctctcccactgaccacagtggctacggcacgggccactacccccgaggcgccctccccgcccaccacggcggctgtcttggacaccgaggccccaacacccaggctggtcagcacagctacctcccggccaagagcccttcccaggccggccaccacccaggagcctgacatccctgagaggagcaccctgcccctggggaccactgcccctggacccacagaggtggctcagaccccaactccagagaccttcctgaccacaatccgggatgagccagaggttccggtgagtggggggcccagtggagacttcgagctgccagaagaagagaccacacaaccagacacagccaatgaggtggtagctgtgggaggggctgcggccaaggcatcatctccacctgggacactgcccaagggtgcccgcccgggccctggcctcctggacaatgccatcgactcgggcagctcagctgctcagctgcctcagaagagtatcctggagcggaaggaggtgctcgtagctgtgattgtgggcggggtggtgggcgccctctttgctgccttcttggtcacactgctcatctatcgtatgaagaaaaaggatgagggcagctacacgctggaggaacccaagcaggcgagcgtcacataccagaagcctgacaagcaggaggagttctatgcctagtggagccacagtgcctccctgcagcctcaacaccaccctgctgtccagtccccagcctggccccaccagcccaagcctgggactgggcctggaacctggccccagttcttctctgccctctctcccaaggtctgcccaggctgccagcctcacacagatcttccccgaggaagaggggctgctgccatctgccccagactgtgcccttacgagctcatctcttgttcccctcatccctgccaccagtctggggcttcaggacctcatgtcagatggatgggaggaagaaagctcctgattggctggtggtggaagaaagggtggggcttgagatgagcctgagccctgacttggcacccacagtgctcactgagatctcctttttggggcagagaggcactcaggctggtttccaggacaaacatttggtaaacacagcccttgaaatcatctagacactgcaacctcttgctcgtatcccagggcctctctctagctgggtgagagggtgtcccttgtcaccagcctgttttgtcctggtctctctggggttgttgaatctctcctcttgcctgccaagtacacatgtacccagacttcatttctttctgcatcttcccccaagaaacagcttcctgagggtgctggggcagccactggtgaggaggggctgctctgatgtccctcctatgaggggactctgcacagacaccattgcccacactatcaccatattttcactcagtcacacacaagacaaaagcatgcaatgacaaaaccatacgcaatcctgaccgcccagccaatcaagacatatcacagaacacacgcgtccttccaagaatgtttatcctcatgcatcacttacacacccccagacacgtactgcaatgcaagtcactagtcatggtcacatgacagtgacagtgtggcctcctcctaccccaaatacacccacactctggcaccacacacattgtctccagctttcaggcttactggggagggtggaatcgagccagaacaatcagcccatattgggtccccctaagttgccccgtcatactcagtcccatgccatggtgcccacaccaaccatgcagccgccaaccccagccagtgtcagacacaatcccatgtggatgcacagtctcactccacatgacctgctctcaatgctggagggaaacaggcaggcccttgcctttctcggaaaaagtgtggggccacagcccttttagggcattgcatgcaggtgggcctggcttcacccctacctgcttcctccccaccgcagctggcagagggggaggtttggggccagacccccactagctgggagcctgggggctcctctaaggctgaggaaggaaatttggccccaggttgttggggggtcttgggtctcccaggacggaaggcccagggcagggagggggcatgtggttgggctcctttatctccctgtgtccccttcctgctttgagctagggggctgactctgcctcccaggacacaagtctccaaagtgcctgtgagggcgggccctccgcaccctctgccctctgcctggcaggccaacctcagcccacctgcccagaggccctccctgtggacaccccctcacctatttggccaaacaattctggctgcagcttcaggggccatggctggaagcagcccctgcagatccctcaggccccgaggtcagggtttgagggatgagaccaggtgatagtgggggaggggttacttcctttgttacctagcaagtagggctatttccatcggtattttaaatgtggggtcacagatcttttggggagggtgtgcttggcagggggcctcttggagccaaagggatgtggtgtgagttgcgattggctggcactcacacccccacccctcacccacatcccagattcaagtcaggaaggcaggttttatttcagggcccttttcaagatgccctggcagcagatttctgcaggatgaggggtagcggtgtgtaggcagtgagggggaggttccaggggctgtcccacagcctgtcttttccaggctgggctccatcttccagtcccaaaaccctccttcacagggcccagaggcttgtgaggaagccaggtggacccagccttagaagagtgggcatggggggcccctgatatctggagggggcgggttggcctcagtcatctttggagcagaagggctgggtcctggggccacagaccacaaggctcagcctccctaccctgctccctggggtgctgctgtcttggagagcacagctctggtgagacggcctgggcaggccgaggctgagaaaccagggaggatagaggagaaaagggcttgggcccccagccccagaagatgctggaccccaggtgggagacccaacagtgggtgcagtttctcagtagggctggagccaatggtgggggtggccccggcaggcctggctcctcacatcccaggggttggcttctgatttggggcttgggctccaggcactggcttctcttctctgtgtccttagcatttgagagaagaggccaggggccttgttcatggatccctggacccaaggcagatgtccaggctttatcctcctgaggatgaggagtctgaccagcccaaatctgccctggccggcctgaccggggcaaggcagtccaagagagttcagtgaggaccagctaggctctcccaggtgcaatgtgggtgcagggccctcatgtccccctacccctgcctgtgatggagtgttctgaggggctttggcatttgctggaagcacagggagttccaaatgagagggagcttctgtggcttgagagcctctggggccttggctgccagagcacgaggcaggccaggacctggagagcccagaccctgtctccaggaggccaggaggccagatgggggccttgcctgaaagactggtccccttgatcgctggaggcatgtgggtggcaaccagggctgggcagggcttagggtgtgtgggccaaacccccctggggttggcaaagccgcctgtcaggcctcctggtgggggcccctggacacagggagcagaccctctgcctcatggggtaggagtggctgcctcctgtgttctctggatttcttctcccaacaactacaaccctggacttgcctccccaggcctcttgcctgtaaatagaagcccgcaaactgtacagatttacagaggcatcgagactgggccctgggagttgccatctgagagccgatggccccagcatcccccaggtgcctgcctggcaccacagtgaccctggcctcagcgtggcaaatgcatgtaaatatttttcgtaggcagcgtggctccagagagccccctgaagacagtgtccctccctcctgtgagtcctttctcctgtacagaacctgcctggggtgggtgggggtctgccattccctcccccaggccttccctgccccttctctcccctgtaacctgtttattaaccatacctgtcctgagttcatggccaaaaccttaaataagaaaaacaaaagaaaaagacagtggaaaaaagagaccaaggcgcctgccccactgcgggtactctcctgttccagccttgtgaaggaactggttttgtttttgtttttttttttttttttttttttttgtttgtttgtttttttaacacttcctgtgctgtgcccatttataagaggaaataaaattaagctgaaatga

SEQ ID NO: 66 - DNA, 1027 bp, Homo Sapiens
tctcttctccactatggacagagcctccactgagctgctgcctgcccgccacatacccagctgacatgggcaccgcaggagccatgcagctgtgctgggtgatcctgggcttcctcctgttccgaggccacaactcccagcccacaatgacccagacctctagctctcagggaggccttggcggtctaagtctgaccacagagccagtttcttccaacccaggatacatcccttcctcagaggctaacaggccaagccatctgtccagcactggtaccccaggcgcaggtgtccccagcagtggaagagacggaggcacaagcagagacacatttcaaactgttccccccaattcaaccaccatgagcctgagcatgagggaagatgcgaccatcctgcccagccccacgtcagagactgtgctcactgtggctgcatttggtgttatcagcttcattgtcatcctggtggttgtggtgatcatcctagttggtgtggtcagcctgaggttcaagtgtcggaagagcaaggagtctgaagatccccagaaacctgggagttcagggctgtctgaaagctgctccacagccaatggagagaaagacagcatcacccttatctccatgaagaacatcaacatgaataatggcaaacaaagtctctcagcagagaaggttctttaaaagcaactttgggtccccatgagtccaaggatgatgcagctgccctgtgactacaaggaggaagagatggaattagtagaggcaatgaaccacatgtaaattattttattgtttcatgtctgcttctagatctaaaggacactagcattgccccagatctgggagcaagctaccaacaggggagactctttcctgtatggacagctgctgtggaaatactgcctgcttctcccacctcctcagagccacaggaaagaggaggtgacagagagagagcaaggaaagtgatgaggtggattgatactttctactttgcattaaaattattttctagcctgcagtct

SEQ ID NO: 67 - DNA, 5582 bp, Homo Sapiens
ccgctccgcagcgcagcgcatggagcccggcggggaccaccggagccggagcagcggcggcaggggcggccccgggccagcagtggcctcggcacggggccgacggctgccgcccgccggatcgagcggcagcgcggagccagaggaagacgaaggcgggcaagatcttcagctggaagggggtgccttggggtcctgggggagtgcccccctgccctcctccagggccaggggaccagcatcttcaggcaggaaatattcagaccactgtgaggcccgggcctcgaggcctggaaagagccgcatccctggccgtgaccaccggcgctactaccacgaccactggcggctggagtacctgatggacttcaaccctgcccggcacggcatggtgtgcatggtgtgcggcagctccctggccaccctcaagctcagcaccatcaagcgccacatccgccaaaagcacccctactccttgcattggagtccccgggagaaggaagtcatcagcaacagctgggatgcacacctggggctgggggcctgcggagaggccgagggcctgggggtccagggggctgaggaggaggaggaggaggaagaagaggaggaggaggagggggccggtgtcccagcttgcccgcccaagggcccaggcaaagccccagctggtgggggctgccggcgccagcggcgagggggcccagtggcaccccgggctcggcgtctgcgcctctcagcctcccggagggccgggggcagcagggggctgggggcccggcgcctggagaggaggctgaaggagtccctgcagaactggttccgggccgagtgtctcatggactatgacccgcgggggaaccggctggtgtgcatggcctgtggccgggcactgcccagcctgcacctggacgacatccgtgcccacgtgctggaggtgcaccctggctccctggggctcagcggcccccagcgcagtgccctgctgcaggcctgggggggccagcccgaggcgctgtctgagctcacccagtccccaccaggcgatgacctcgccccccaggacctgaccggaaagagccgggactcggcctccgctgctggagccccctcctctcaggatctcagccccccagacgtaaaggaagaggctggctgggtccctgagaggcccgggcccgcagaggaggaggaggagctggaggagggcgagggcgagagggcgggggtcccgggccggtcgccgcggggccgcgcccaccgccgccacccccaggagcgctggcggctggagtacctcatggagttggacggcggccggcgcggcctggtgtgcggggtgtgcgggggcgcgctggcctcgctcaagatgagcaccatcgagcgccacatccgccggcgccacccgggctccacgcgcctcggcgggcctgtccaggccctcatcgcccgggagtggagcgagaaggccgcccacctgctggccctggggccgccccgccccgagtccccccagggccccatcccccccggcactgccgcagcctccgacgaggggggaggggacgaggaggaggagccagaggaggaggaggaggagtggggcgacgttccgctgtcccctggagctcccttggagcggcccgccgaagaagaggaggacgaagaggacggccaggagcctgggggactcgccttgccgccgccgcctcctcccccgcctccgcccccgccccgcagccgggagcagcggcggaactaccagccgcggtggcggggcgagtacctgatggactacgacggcagccggcgcggcctggtgtgtatggtgtgcgggggcgcgctggccacgctcaaggtgagcaccatcaagcgccacatcctgcaggtgcaccccttctccatggacttcacgcctgaggagcgccagactatcctggaggcctacgaggaggcggcgctgcgctgctacggccacgagggcttcgggccgcccgccccggcgccgcgtgacggcggcgcggacctcaagtctggcgctgtgtgtcgggcgtagcggcctagcgggcccccgggtcaggtcgggtcgggtcggatcggccccgccccgccctgtgctcgcccggcccttcggctgggagaccctcgcgtccggtgttagcgcttcccgcggccgcgccccccgctggccgggccgggcggagacgggggatcgggtggggccaccggcgtctgcgcggtgccacttgggtccctgagccagtcggtgcgctgcgggaagcgcactctcccatcggcccggagccctgccctccccgcgcagggcccacgttttccgagaatcctcagtggcctccacgtgttagcgccgagcgctcccggccgcaccccgcgagggggttctccgcaggccgggactgggggcgccgtcagtcagtattagggccgaaggggggccgtgcgggctctggctctggccctggctgggggcccagttccctgcagccttgcacgctggcaggcacggctcccggcttgggggctgctggctgcccttccctaattgggattctcggcctctcggaggccccggctgcggactggggcttccagcgggaggctgggccgcagggctcgggagccttcccggggtgggaaggcgcgttggaccgagggcggggctacgcgcccggggcccgggctggaccagctgcgcttacctccccggcaggctcagtgagaaccgtgcgcccggcggccccactctcctcccaggccgctgccacgccctccaggaaagctcttgtaaagggattagcacttttttcctttgctcctcttgccccgagggtctctgcttacccctaaaccaagtccgtgggagcccggggcacaggcggtcccggcagtcagccttcgattcccgccccatccccatccccctttgtccgcggtggatgcggcgtccgttctcaacccgcagggcctggggccgggcctcggcctcttttccccgtggcagccgcaggccctgtgtggcagggatggggccccgcgatctcccaggcaggtccgagagggatgtgtagattcattctcctgtggagaacaggtggccccgagatcaggcccttttttgctctttgtattttattttgaaactgtatttaatgcttttatatgaaagggggaggggcggggacagagctgacccagtcacccttatgtgcaaatgtcttatttattatgcgtgtatcagagataagctgtgaggtggtggagggaggacctgaaggaaggaggagcgagggcagaggcggggacgggaggaccccaactagctgtgctgatgttaatcccgctgggagactccgggccctactgtctgctcttcacaaagccaggctgctgcaggaacagttcccgcggtcctaaagccggggcggggaggctagtgggtggaacttgagggttgggtctggaggaagagatgcctgggcagcgtggtccagcccctgcctcggggtggaaaggcagagagcaaagaggaggcccctcttattccggacccccaggccagagcccaggagtgggaaagcagagggcaaagaggaggcccctcctctcatccctgacccccaggccagagcctaaggttcaagtgcctcaggcccagtccccttgacgcttcctgtttgggagttggattttataccacggattttatagcatttttatataattgaggattgtcagaattggaaagggccctggagatcactagtactaccctcctcaccttcacagataggtaaattggagcccaggaaccgagatgatcacacagccaggtagggacagtacaagaactagaatgaaaatcctagctcctgactcagtgttctttgcacgatgccacactgcttcccaattcgctggtcagttattaaaatttgtcaggcctgccgaaggattgacatgctgggcaatgcaggccaccacggtggatctgtgactcctgaaggtggcaaagccctgcacactgccttgggatgagcacactgagctctgcagggcctcagctggaaggcgccatccaatcgtccttcccctccccagcagaactccagaggtggggcggctgccgcagggcccaaggctgcctcggcagggggctttgtgctttttgttgtggaggccaccagggattcaggaagatcctgaatgggttgtcaattgactgaaaagtaaattcccagtgagtttgaacctccacggtttttgagacagtattaaaagcttgagaacggagattatggatggcaccaggctgggcactgccattcttttactttccttcatgcattttttcggatccagagtattaacaccactttttttactctgcccattcaaaaacagtaggcaaattgggggaaccaatttataatcactcaagcccactgccaaagttcggataagccagggcagaggggttagattcccccccctccgtaggcagagagaggcctcaggagagtggacatctttactgagacagccccaaacacaccagtggctctcaaagtgtgtccctgagaccagcagcatcaccttaggaatctgctagaaataaaaattcttgggccataccccagggttactgaatcagaaacttggttggggcctagcagtgttttcatgagccctccattgatcttgatgcagctgaagtgccgggcaccagtgaaagggaagggctgcggtagtgattccattgattcctgctttgatggaagttatggcctcacaggttagacgttgcaagttgagttggccctcttgcctaggtgtgcctccttgccttgggattctgacatgaacaggtgaagtctcttcatgattttttttgttgttgttgttaatggtatgcttgctattatggccaatatgtaaatgttactctgaatacatatttatataccatgttacttagtgacattattcaaacatttgtatgcgtatttgtgaaattgtttgcatcagtcatttaaaaaatatttcagcctaagttttctaagaggtatgttgaatacatttttaaaagccagcttaagggtcacagcagccttagtttaggagaagagctaatcacaggtgaccactcaagttctttcaatgaagacctgatgatgtatttagttcccattttccacggtgattgactcaatttaagtgtattgtggctatatgtaatttacaggctgctttgcgttgcaggtgggaaaatctcccaggctggtgtgaggctgaactggggtaaaagaccccctgacccctcctcattcttctaaggtcaccacctcttagagggtctcttattttctttcagagatcaaatgcacagttatgctgtacaactaaattctgcagtcttgggaatccttacgagtaccaactattagtcactttttaaagtccccaaagtggagtgaggatagggggagtggaagcagtgtttggttcttactttacccaaactgtgtataaagaataaagttagcagaatgatgccacagtca

SEQ ID NO: 68 - DNA, 13566 bp, Homo Sapiens
acctgctccttcctgggcgccccgctacggctcgcggagcagaggagccgcgccgccgagagagagaggagccaccggcgcggcgccttgcctccctgccgccgtcctcgccgcttccccggcggtagcagcctgcagccacgatggaaaaactgagaatcagagagggctagtgatctctcagacacttggtcggtagaaaagatcccgcaccatcctccaggatccaatggccttggagagagggctgcagggcccacggacattgctgactcttcagaacgtgctgacatggagccaggtagactgaaattaccatgtgtccaaattaaaattgcatacttcaaggattatttgaaggactattcttagacccttttaagaagatttaaagaaaaaccactcggccctgagtgcggcgaggaccctgtttgtggatgtggaggagcgcgggccggaggccatggacgtgaaggagaggaagccttaccgctcgctgacccggcgccgcgacgccgagcgccgctacaccagctcgtccgcggacagcgaggagggcaaagccccgcagaaatcgtacagctccagcgagaccctgaaggcctacgaccaggacgcccgcctagcctatggcagccgcgtcaaggacattgtgccgcaggaggccgaggaattctgccgcacaggtgccaacttcaccctgcgggagctggggctggaagaagtaacgccccctcacgggaccctgtaccggacagacattggcctcccccactgcggctactccatgggggctggctctgatgccgacatggaggctgacacggtgctgtcccctgagcaccccgtgcgtctgtggggccggagcacacggtcagggcgcagctcctgcctgtccagccgggccaattccaatctcacactcaccgacaccgagcatgaaaacactgagactgatcatccgggcggcctgcagaaccacgcgcggctccggacgccgccgccgccgctctcgcacgcccacacccccaaccagcaccacgcggcctccattaactccctgaaccggggcaacttcacgccgaggagcaaccccagcccggcccccacggaccactcgctctccggagagccccctgccggcggcgcccaggagcctgcccacgcccaggagaactggctgctcaacagcaacatccccctggagaccagaaacctaggcaagcagccattcctagggacattgcaggacaacctcattgagatggacattctcggcgcctcccgccatgatggggcttacagtgacgggcacttcctcttcaagcctggaggcacctccccgctcttctgcaccacatcaccagggtacccactgacgtccagcacagtgtactctcctccgccccgacccctgccccgcagcaccttcgcccggccggcctttaacctcaagaagccctccaagtactgtaactggaagtgcgcagccctgagcgccatcgtcatctcagccactctggtcatcctgctggcatactttgtggccatgcacctgtttggcctaaactggcacctgcagccgatggaggggcagatgtatgagatcacggaggacacagccagcagttggcctgtgccaaccgacgtctccctatacccctcagggggcactggcttagagacccctgacaggaaaggcaaaggaaccacagaaggaaagcccagtagtttctttccagaggacagtttcatagattctggagaaattgatgtgggaaggcgagcttcccagaagattcctcctggcactttctggagatctcaagtgttcatagaccatcctgtgcatctgaaattcaatgtgtctctgggaaaggcagccctggttggcatttatggcagaaaaggcctccctccttcacatacacagtttgactttgtggagctgctggatggcaggaggctcctaacccaggaggcgcggagcctagaggggaccccgcgccagtctcggggaactgtgcccccctccagccatgagacaggcttcatccagtatttggattcaggaatctggcacttggctttttacaatgacggaaaggagtcagaagtggtttcctttctcaccactgccattgagtcggtggataactgccccagcaactgctatggcaatggtgactgcatctctgggacctgccactgcttcctgggtttcctgggccccgactgtggcagagcctcctgccccgtgctctgtagcggaaatggccaatacatgaaaggcagatgcttgtgccacagtggctggaaaggcgctgagtgcgatgtgcccaccaaccagtgtatcgatgtggcctgcagcaaccatggcacctgcatcacgggcacctgcatctgcaaccctggctacaagggcgagagctgtgaggaagtggactgcatggaccccacatgttcaggccggggtgtctgcgtgagaggcgaatgccactgctctgtgggatggggaggcaccaactgcgagacccccagggccacatgcttagaccagtgttcaggccacggaaccttcctcccggacaccgggctttgcagctgtgacccaagctggactggacacgactgttctatcgagatctgtgctgccgactgtggtggccatggcgtgtgcgtagggggcacctgccgctgcgaggatggctggatgggggcagcctgcgaccagcgggcctgccacccgcgctgtgccgagcatgggacctgccgcgacggcaagtgcgagtgcagccctggctggaatggcgaacactgcaccatcgctcactatctggatagggtagttaaagagggttgccctgggttgtgcaatggcaacggcagatgtaccttagacctgaatggttggcactgcgtctgccagctgggctggagaggagctggctgtgacacttccatggagactgcctgcggtgacagcaaagacaatgatggagatggcctggtggactgcatggaccctgactgctgcctccagcccctgtgccatatcaacccgctgtgccttggctcccctaaccctctggacatcatccaggagacacaggtccctgtgtcacagcagaacctacactccttctatgaccgcatcaagttcctcgtgggcagggacagcacgcacataatccccggggagaacccctttgatggagggcatgcttgtgttattcgtggccaagtgatgacatcagatggaacccccctggttggtgtgaacatcagttttgtcaataaccctctctttggatatacaatcagcaggcaagatggcagctttgacttggtgacaaatggcggcatctccatcatcctgcggttcgagcgggcacctttcatcacacaggagcacaccctgtggctgccatgggatcgcttctttgtcatggaaaccatcatcatgagacatgaggagaatgagattcccagctgtgacctgagcaattttgcccgccccaacccagtcgtctctccatccccactgacgtccttcgccagctcctgtgcagagaaaggccccattgtgccggaaattcaggctttgcaggaggaaatctctatctctggctgcaagatgaggctgagctacctgagcagccggacccctggctacaaatctgtcctgaggatcagcctcacccacccgaccatccccttcaacctcatgaaggtgcacctcatggtagcggtggagggccgcctcttcaggaagtggttcgctgcagccccagacctgtcctattatttcatttgggacaagacagacgtctacaaccagaaggtgtttgggctttcagaagcctttgtttccgtgggttatgaatatgaatcctgcccagatctaatcctgtgggaaaaaagaacaacagtgctgcagggctatgaaattgacgcgtccaagcttggaggatggagcctagacaaacatcatgccctcaacattcaaagtggcatcctgcacaaagggaatggggagaaccagtttgtgtctcagcagcctcctgtcattgggagcatcatgggcaatgggcgccggagaagcatctcctgccccagctgcaacggccttgctgacggcaacaagctcctggccccagtggccctcacctgtggctctgacgggagcctctatgtgggtgatttcaactacattagaaggatcttcccctctggaaatgtcaccaacatcctagagctgagaaataaagatttcagacatagtcacagtccagcacacaaatactacctggccacagaccccatgagtggggccgtcttcctttctgacagcaacagccggcgggtctttaaaatcaagtccactgtggtggtgaaggaccttgtcaagaactctgaggtggttgcggggacaggtgaccagtgcctcccctttgatgacactcgctgcggggatggtgggaaggccacagaagccacactcaccaatcccaggggcattacagtggacaagtttgggctgatctacttcgtggatggcaccatgatcagacgcatcgatcagaatgggatcatctccaccctgctcggctctaatgatctcacatcagcccggccactcagctgtgattctgtcatggatatttcccaggttcacctggagtggcccacagacttagccatcaacccaatggacaactcactttatgtcctcgacaacaatgtggtcctgcaaatctctgaaaaccaccaggtgcgcattgtcgccgggaggcccatgcactgccaggtccctggcattgaccacttcctgctaagcaaggtggccatccacgcaaccctggagtcagccaccgctttggctgtttcacacaatggggtcctgtatattgctgagactgatgagaaaaagatcaaccgcatcaggcaggtcaccactagtggagagatctcactcgttgctggggcccccagtggctgtgactgtaaaaatgatgccaactgtgattgtttttctggagacgatggttatgccaaggatgcaaagttaaataccccatcttccttggctgtgtgtgctgatggggagctctacgtggccgaccttgggaacatccgaattcggtttatccggaagaacaagcctttcctcaacacccagaacatgtatgagctgtcttcaccaattgaccaggagctctatctgtttgataccaccggcaagcacctgtacacccaaagcctgcccacaggagactacctgtacaacttcacctacactggggacggcgacatcacactcatcacagacaacaatggcaacatggtaaatgtccgccgagactctactgggatgcccctctggctggtggtcccagatggccaggtgtactgggtgaccatgggcaccaacagtgcactcaagagtgtgaccacacaaggacacgagttggccatgatgacataccatggcaattccggccttctggcaaccaaaagcaatgaaaacggatggacaacattttatgagtacgacagctttggccgcctgacaaatgtgaccttccctactggccaggtgagcagtttccgaagtgatacagacagttcagtgcatgtccaggtagagacctccagcaaggatgatgtcaccataaccaccaacctgtctgcctcaggcgccttctacacactgctgcaagaccaagtccggaacagctactacatcggggccgatggctccttgcggctgctgctggccaacggcatggaggtggcgctgcagactgagccccacttgctggctggcaccgtcaaccccaccgtgggcaagaggaatgtcacgctgcccatcgacaacggcctcaacctggtggagtggcgccagcgcaaagagcaggctcggggccaggtcactgtctttgggcgccggctgcgggttcacaaccgaaatctcctatctctggactttgatcgcgtaacacgcacagagaagatctatgatgaccaccgcaagttcacccttcggattctgtacgaccaggcggggcggcccagcctctggtcacccagcagcaggctgaatggtgtcaacgtgacatactcccctgggggttacattgctggcatccagaggggcatcatgtctgaaagaatggaatacgaccaggcgggccgcatcacatccaggatcttcgctgatgggaagacatggagctacacatacttagagaagtccatggtgctgctactacacagccagaggcagtatatctttgagttcgacaagaatgaccgcctctcttctgtgacgatgcccaacgtggcgcggcagacactagagaccatccgctcagtgggctactacagaaacatctatcagccccctgagggcaatgcctcagtcatacaggacttcactgaggatgggcacctccttcacaccttctacctgggcactggccgcagggtgatatacaagtatggcaaactgtcaaagctggcagagacgctctatgacaccaccaaggtcagtttcacctatgacgagacggcaggcatgctgaagaccatcaacctacagaatgagggcttcacctgcaccatccgctaccgtcagattgggcccctgattgaccgacagatcttccgcttcactgaggaaggcatggtcaacgcccgttttgactacaactatgacaacagcttccgggtgaccagcatgcaggctgtgatcaacgagaccccactgcccattgatctctatcgctatgatgatgtgtcaggcaagacagagcagtttgggaagtttggtgtcatttactatgacattaaccagatcatcaccacagctgtcatgacccacaccaagcattttgatgcatatggcaggatgaaggaagtgcagtatgagatcttccgctcgctcatgtactggatgaccgtccagtatgataacatggggcgagtagtgaagaaggagctgaaggtaggaccctacgccaataccactcgctactcctatgagtatgatgctgacggccagctgcagacagtctccatcaatgacaagccactctggcgctacagctacgacctcaatgggaacctgcacttactgagccctgggaacagtgcacggctcacaccactacggtatgacatccgcgaccgcatcactcggctgggtgacgtgcaatacaagatggatgaggatggcttcctgaggcagcggggcggtgatatctttgagtacaactcagctggcctgctcatcaaggcctacaaccgggctggcagctggagtgtcaggtaccgctacgatggcctggggcggcgcgtgtccagcaagagcagccacagccaccacctgcagttcttctatgcagacctgaccaaccccaccaaggtcacccacctgtacaaccactccagctctgagatcacctccctctactacgacttgcaaggacacctctttgccatggagctgagcagtggtgatgagttttacatagcttgtgacaacatcgggacccctcttgctgtctttagtggaacaggtttgatgatcaagcaaatcctgtacacagcctatggggagatctacatggataccaaccccaactttcagatcatcataggctaccatggtggcctctatgatccactcaccaagcttgtccacatgggccggcgagattatgatgtgctggccggacgctggactagcccagaccacgagctgtggaagcaccttagtagcagcaacgtcatgccttttaatctctatatgttcaaaaacaacaaccccatcagcaactcccaggacatcaagtgcttcatgacagatgttaacagctggctgctcacctttggattccagctacacaacgtgatccctggttatcccaaaccagacatggatgccatggaaccctcctacgagctcatccacacacagatgaaaacgcaggagtgggacaacagcaagtctatcctcggggtacagtgtgaagtacagaagcagctcaaggcctttgtcaccttagaacggtttgaccagctctatggctccacaatcaccagctgccagcaggctccaaagaccaagaagtttgcatccagcggctcagtctttggcaagggggtcaagtttgccttgaaggatggccgagtgaccacagacatcatcagtgtggccaatgaggatgggcgaagggttgctgccatcttgaaccatgcccactacctagagaacctgcacttcaccattgatggggtggatacccattactttgtgaaaccaggaccttcagaaggtgacctggccatcctgggcctcagtggggggcggcgaaccctggagaatggggtcaacgtcactgtgtcccagatcaacacagtacttaatggcaggactagacgctacacagacatccagctccagtacggggcactgtgcttgaacacacgctacgggacaacgttggatgaggagaaggcacgggtcctggagctggcccggcagagagccgtgcgccaagcgtgggcccgcgagcagcagagactgcgggaaggggaggaaggcctgcgggcctggacagagggggagaagcagcaggtgctgagcacagggcgggtgcaaggctacgacggctttttcgtgatctctgtcgagcagtacccagaactgtcagacagcgccaacaacatccacttcatgagacagagcgagatgggccggaggtgacagagaggaccaaggacttcttgccaaagacagctactcttttgtggccgcatacctgactgtgttgtacttttaaaaaaatgattttttaacaagtgcagaaacaaaaagatactggttgcattgtaactcatgcaacatccttttttttagaaaagaaaaacacagatttggccttcgcacattttttgcaaagaacagaaggtatttttttctgtagtgtgatcacaatgaaaactttattgtcttttgttccctttttccttgaggatttttcccttgtcgtttggggtatgtatctcctctctgagatgcatctcctggggtgtgtcctcgtctgtccctaggtacccagtgtgatgtgggacatgaatgtctgtgctaacttgtctcatgtgcaaccctttcttcttcgactggggtcgggcaggagtaaagggagtgatgggccagtacaacaccccttccaagggggcctgggaggagggtctgtaggacctgaggctccttggcagggctcctgcagaagagtggtggatttcttctcaccttgttctctgcctccagaggatcatagatggcttcatcttgctccagggaatttcatggtgttgttcagcaccttttttaagctgccccaaactcctgttcaagctttctattttgatgctgaatgaaaccccctaccacttttgcaaatcctgtgtagttgtcggtgccacccccatgctgggatagagaaagtgtctcccaggtcctttcccccagaccagtgacataacatcctgggctcagagtcccatcctcccgggagggaaagcacccaggatgcctgtgattggttggtcctccatgatgttcctgttcatctcctcctttctcccaaagccagatgtgagaacgagcactgcacagcaagccttcaatgtgggcaccatgtccacagaacagaaggccacccatggcaaaggcatggcagtggtggcgagggcaccagcctgccttccgaggcaaagccctctctctatgactttgagtatcttccctccaccactcagccgccaccactgagacgtaggaatgtggagggaggtgcttggtggcctttgattctggaaaaatgcttaacaaaaaaagccagccaaagagaggaaggcataagctaagcatccttctaaccagttcccaaagtcccatctgcctccatgtaccagctgatcgcagagctggactggggcaggctgggcttccaggaaattcctgaagttctgaaacagcttcccctctagagaagcccacccaatgtgttttttagtgacaggaagaaaggagggaagagctgatgtggtgtggcctgcccatatcatacaaccccaccaggagcagggcagttcccaaggtgggtgcccgtagatctgggaggccaggctggcatgattcctgtgaagaactgtgcctgtgtcgtcagggagaggcctgagccctctcagaagcagggacagcccacacctgaagagcacgcccaagctgaggcagcagccagcaggctgggggagcagtgagggcagggggagtcacagccagagctgggagccccttgttcaaggattccattcctggttcatccgcctaattaccattgtcattaccactcacaggaggctctgggagatgggaggggaagccaaatgcttccttttaagctgggcttcttagaaaatggaacttttatgggttacatttacattaagtgtggaaaatgaattctgagtctgagctattccccgtggaaaccttgttggactgataagctcatggcacctctatagccttactcacatagtcttcagaatattacacaagttaatgaaactgagaaggtctgactgcatgaggatcggagcagcatgtagtctgggttctgcctggcagagggaggcaaccaaaacttcttggggagaggagatttcgccttaacgtcatcccactgggattagaggatgtgtttcgctaagtgctcttcctgtttccaaaaaaaaagccaccctgctgcagcagtgcgctttggcctgcttgtccactggttgcccattgcccctggatccagagctctactgagtcagatacagtgctctgcaggcctgctgtgggaggcatgagctggagatgggggctcccatctggcaggatcattcttggatgagatggaaaacagtttggcctgaagaacacaagttttgtcctccagaagggacttacgcctctcaaaatgtactcttcataccaagggcccttgggcaaagtgctcctgcccagttgatcagtcccatcctggctgcctgacatcagtgaagacctgctggggatgtctgctcagaggtcaggaacggcatgcggtccacaggaaccagctccctacgcttcccccacgccctgtccctcctccacagccccctccccaaaggaatagggtggacttttagggatcaaaaacagaattattgggtgtttcatttatttttttctttctttcttttttttttcatagagatggggtctcactatgttgcccaggctgttctcaaactcctggcctcaggcgatccaccttggcctcctgaagtgctggggttacaggtgtgagccactgcgcctggactgagtgtttgtttctttaaaggatcttatatttttcctgtgctacataccaccacagcagcccagcttctgtggggagagaagttgaaggatcccgaagctttagaaaaaggatctcagctgtggcacaggcagtgttatgcgcctcactgccacattggtgctgttgtattgaaggtggtgcttctggccttggcccttttgagttggtttccatttgggctgcaggtgactcagtgactccctcctcaagctgtcctcctgctaagaccagcagtcacaaacccatggcaagggtgagtgtgaaggcctaaccctgtgcctatgtaataggctccaagcatcgactcccatcctgagaggaccggcccttttgacactcaccaaccaaatctgttcattcgatagagtgaccaggcctccctcacctgcccaggtgtatgatcctacagttcctgccttctctcctaccccgcacagctgccaactggtcctacatcctcagcccctctgccaccaccttaaataggactttactgattccccaactttgtttttttgtaggatgagatttcctttttatcccacccccccacaccccaaacagacattgctggagggcagactggaggaaggggaaggcatgcaggtaaattactgccttgtcagcctctgaccctcatctctcagaattgttggctgagaattaacccaaggaccacaccagtgcctgatttctacttagggagagaggattggaaacgatccctaagaaactgactgagggtgagaatggccaggaggtgtgtgtccaaataaccaggagggggcacagaagatgatggcaaggcagactgggcagtgttttgtagacacagaacaaagaatcagaatttgaaaaaagaagaaaaacaaatcttcgcagctgcaactttaaagtatcacctttatagatggcagggatttccattatgcaaatggaatctaagatttcaatgtgaaatcttagaatgcagttttaccacttgcagtcttgtatttgtggtggccatgtggtgagggcggtgatgctgagctttctgcccaggaggaatgagctttcaagctctcagcagggtgtcaggcttggggatttgagcatccactgctcaaagtccaggctattctccagtcctcacggcagccactaagcccaggagccagacctggcccggggacacatctcctgagggatcccagaaagaacccagtctttcctttcccttggggtccttgttagaatgaaaacctctctatttaaggcacatcattcccagctaggtttatacacttgtctatattttactggaggaaagggaattaaaaaagaactctgcagttcaaggccctttcatttaaccttccaaaaacagcaaactcattttaaagactcattgctgaggtgatagagagaaaccttatcctctccaaccttcacattcacaaaaaccatccttgtgtacttgactgccctagacagtggtgactcttaggtttcattacgaatgtggaatatcagagtgtgggaaggcccaggcgagggccaatgttgtgtttcttaccccctctggaatgccaaaggcaaggtactaggtgacctcctggtccccaagaaaatgtgatttattctgagggcgaacagccaagggaggactagtctggagcacgctcggccgtcctggcaggagctgagcctcaggtgtctggcggtgccccagcagccctggattcacccaacaccagaatcccacttttctaaatccacctgttgttctgagcacctctgaacccgcagcttcggcaaaaggagtctgtaccaagctgcttctggatgaccaacactggagactctggccttaccatgtggaaatcattttcctgaagtctggaactaattttgagaagtttttttctcaacacttttgtgtttctaacactgtatcttgactgtgtaaataccaacaaggctgtaaataaatgcagatgtagataccttctagaaaaaaaaaagcataaaaacaaaaccagaagtgatcccgtgtagccttcgttgacaaataaagactattttgtgtttaaaaaaaaaaaaaaaaaaa

SEQ ID NO: 69 - DNA, 14089 bp, Homo Sapiens
gtgtgccaggtggtgccaatgccagccaatcacctccccattggcagcaccatgagcactgtgcacctgtcttcagatggcacttacttctattggatctggtctcctgccagcctgaatgagaaaacaccgaagggacattctgtcttcatggacatttttgaacttgtggttgaaaatggtgtatttgtagccaacccacttcaggaacgtacaattctaatgagaaaagagggcgaatctgccaaaagcattaatgagatgcttctaagtagactttctcggtatagagcctccccgtcagcaacgcttgctgccctgactggttccaccatctccaacacactgaaagaggatcaagcagcaaatactagctgtgggctgcctctaaaaatgctgcggaagacacccatatatacctgtggcacctacttggtgatgctggtgcctcctccagggggatcaggcagctctgccacccgatctctttttggtggaacaagtggtttgtcatctttaaaaagagcgtgttatgacacagtgaacaacatgctatggacatgctcaaatgactatatcgatcagtggtgtaaccctgggaatcaagccttccattatgtctgccagagacttggagtcagtcacattatcactgagcccaaagaagaggctataaccacgaatgaggttataaaccaattattgcaccacgttggtgcgatgtgcatacaccaactcaatcttcttgccaccaaccccaatcttccaatcacaagtgtcttgggcaagcagcatccaattgaagcacatcatcttagcagtatttgtgacattatggagaaggccatggttaatggagatacctgtattatacgctgcattctcgttgtctttcaggtggtatttaaatttttcttcagcccacaaactgaaaggaatcgagacatcattcgacggtcgggattgcttctttggcagttgttgatggctccaaaagatcaaatttgccctgaaattcagaaggaagtctgccttgccatcagctctggtttaaatatcttgtacccaggtgaaactgaaatcaataacttacttaaactggtcttaacagaaggagagagaaacagtggactctcccagctacgggatgtgatcctaaccaacctggctgaacagctccaaaacaaccgatttggcagtgatgaggatgatcattacagactaaatgatgaacttttacactacattctgaagattgttgtacgagaatcctgtatcttaatcaccaagtgccaaactgtctctaaagatgattttcaaaagctcctttcaactgtgcctgctgcatcctcctgcctgcgctatctgatggcagttcagaatcaccttctcagtaacactattttgattaaacctgatgagaatgatgacagtgacagctccttgcagggagagacattgaaggtacaggagctaaaagtcagtattttggctcttgccacccaaatcctgactggatgtgatgaagtgttggaaatgctacagcaggtcacaactgccctcataaatagtgacatagcagaccgtgagcagaggttaaaaggcttggaacaagttactaaggctactatgcttggtcaccttcttccagtgttactgacctccttgatgcatccaaatttacagactctgatcatggcggatgccctgatgcctcagctagtgcagctggtactctataccagccagacggcgttgctgcttaaaacccagtgtccggtttttgctgaggtgggctgttccccgtgtggtgcaccagaccagaagtgcaggctgttccctgatgagagaatgttagaagagaaggaagagccaggatttctcactggtttaaagattcctgccccatgggctgctggaaagactgtggaaacagtccaccccgtcagagacaactataaatttaaagaaacggtccatatcccaggagctcgctgcctgtaccttagatttgatagcagatgctcttcgcaatatgactatgacaaattggtgatatatgcggggcctaacacaaacagtaggaaggttgctgaatatggaggcaacacactgggatatggcagccgtagtgtcttaggaactggttggccgaaagacttggtgaagtgcatttcccccccttccttaaattttaaggtggaaggagatacagtcaccttctcctttgaaatgagaagtggccgtgaacacaacactcctgataaagccatgtggggctttgcttgcacagttcgcgctcaggagtcttcggaggatgtctcaggaggcttgccctttctggtagacctggctttaggtctgtctgtgttagcttgttccatgttaagaatcctgtacaatggaccagaaattaccaaagaagaagaagcctgtcaggagctattgcggtccaaacttttacaaaggtgccagtggcaggtggaggccaatggcgtgatctcccctgcccttactccgagcccctctccactgcctctgaccatagaggaagacagagaattcacctacccctctgatgtcctcgtgcctcctgttggaaactactttgatctgcctcggatcagactgcctccaggaatcatgataaagctcagggaaatttctgggcgtgctagacctcaatttagaccaagtataaaagaagtgattcagccagacgtgatggaggaaatggtggtatcttgtgttattaagcacttgaacttggttgatgcactgcagtctctaataaatttccaatatcaagaagaacatgctgaagaatatgatttattatgtaaaattatgggagagacctttaagaaactcaatgccatggagagacagctgcagagtgttgcagaactggaacaaaaatggcaaagtgaagttgatgatgccatgcaggggaaactggagaacaacatgcctttcttttatgattaccattttaatgagaacaaaatgaaagaactagaacttttatgttcaatgaaggaagtctcctttgatgggaatgatcttgaaaacatggtcctatcactgagggagaagttcctacaagaagtgaattctcttattcagaaaccctcacacccactggctaaaacaaagacgttagtgaagagtttaatgaaccgagccgagctgttgctgcatgtcaccatcgcagcccagtcgggcctcacgagaagcatctctgggacccctgctgaaacaccagcttgtaaatcagcttctgaaacaaaagtgatatctcacgctgtcaggcagcctgtttttcttcgcagcatgtcagctccttctgacctggaaatgattggtaatgaagatttggaatttactagagcaaatcagaggcgtcgccacgtgaccagccaccgcagcagctcctttacactcctgcagtcgctggccattgaggacagcagggacaagcccacctacagtgtcctgctagggcagctgtttgctttcatcggcaccaaccctgaccaagctgtgtccagcagcagtttccttttggctgcacagacaaggtggcggcggggaaacactcgcaagcaggcactggtgcacatgcgggaattgctgacagctgccgtacgagtcgggggagtgacgcatcttgtgggtccagtgacgatggtccttcagggaggacccagaattgaagaactcacatgtggtgggatggtcgagcaggtccaggaagcctttggcgagaccatgacctctgttgtgtctctgtgtgctcgttaccctatcgcttgcgcaaatagcattggactcttatgtaccataccttacaccaggagcgaagagaagtgcctggtacgcagtggccttgtgcagctcatggatcgactgtgtagcttgagcaatcagaccgagtccagctccagtgagaaacagaccaagaagcagaaggtggccaccatggcctgggctgccttccaggtgcttgccaaccgctgtgttgagtgggaaaaagaggaaggtggctccacagaggctgtgcactcaggtctggcccggcaggtgtccagccttctcactaaccatcttgcccgagccacagagtgctgtggcaaccaggctgctgggaatgacgcgctccaggatgtccttagtcttctcaatgatctctcaaggagccacataggtaaagccatcctgagccagccagcttgtgtgtccaaactcctctccctgctgcttgaccaacgcccgtctccaaagctagtccttattattctccagctgtgccgggcggcgctgcccctgatgagcgtagaagactgtggaaacgtggagctcccaccctggagctactctgtcccctccttaaacagtgagcaggaggatcccagcgacccagcttccaagatcgcctccctgctcttagcaaagctggcagattatgtggttccaggatgtcagacagttctttctccaaccgcttctgaacctgacaccacattgacaaaaaccagtcccaagaattccttgaaaggagataaagatcctggagaagagagtgaggctgtggatggcaagctctcgatatttatccacaagcgggaagaccagtcatcccatgaagtcctccagccattgctaagtagttcagaaggacggcccttccgacttggtactggcgccaacatggagaaagttgtgaagatggatcgagacatgaccaagggtggctgttgcgaagtgattacagaagaggctgcagccgccctgcggaaagccaccaagtgggcacagtcaggcctcatcgtcagcattgggccacctgtagagtctatcaacccagagactgtgagtggactatccacaggcgacaaaaagaaaactgcccaaacttccatttgccgagagaggaactcggagcttgcaaggactgatcctgtgcgtcccttcatcagtgggcatgtggcaaacagcatggctgcagaagtgatcgccttgctacatagcttgctcatggcacctgaatcaaatgctgctcaaatatggaccacaacagcagagaaggttctgtctagagcactgatgtacattccacaattggggaaatacgcagaaagcattctggaaaatggcagcagcagtggcaggaaacttgccaaacttcagagaattgcacgccaggccgttgccgcactgtgtgcacttggaggcttcaaagagacaatcaagataggatccgaggttcaggttttaggtagaggaatttcaggaagcattggagtagtggcttctatcaatgaacaggaaggtatagctacagtcagattcccacccatagactgtagaaagacttcgcaagcgtcagacacattgactattccattgtctagactttgtgttccaagatcagaggcattgcctcttcataaactgtccattactgagaaggtagtacaggcagtccagtccatgttgcttcctcaggagggaagtctctctattcacacctcacttcctgcaacaggagatgggtcagctcctgtgatggcagtcgttcggctccttgctgaaataaggacaagagcatgcctggtcatggcccagcttttagaagacagcttattttgtgaagaattcatacaacaatgtccagcagctgttgaagttcttaacctagtagcccaggaatgtagtgctggagagcgacttgcagttgtggaggtacagtgtgaacggctgaggatgctctaccgggactgtgctcggcccccaccacctcctttgcaggctgaccgaagacagcccaaagagattacttggagcccctcgcgagtgtttccgcctgttcgagcctgcatgttctcatctcaccttacctcagtcaccttcctggctgaccccagcgctgggggaggcctgccccggggcacttttatctatgccacttcaccactgccagttcaggccccgtctttttactgggaaattgaaatcgtttcctatggagacaccgatgatgacaccggacccatagtttcctttggcttcactacagaagcagagaagcgagatggggcttggactaatccagtgggcacttgtcttttccataacaacggccgagccgtgcactataatggctccagtttgttacagtggaagagcgttcgcttagacgtgactctctcccccggtgacgtggcaggaattggctgggagagaactgaggggactccacctcctccgggacagccagccaagggccgggtgtacttcacatactgcgggcagcgcctctcaccatatcttgaagacgtctctggtggcatgtggccagtggttcacattcagaaaaagaacaccaaaacccgagctaactttggctcccggccgtttgcctacgcggaagggcaggcccaccgcaatgctgctgacctgtgcactgacctagcagaagagatcagcgctaactttgaggccctgcctttcgccatggcatctgacagtgacaatgatgctggcaccagtattgcatcagacccaggcactcatgggccaccatgccggattgctgccgtggccaccgctcagcaacaatatgatagtgacacctcctgtcattataaagtcgagctcagctatgagaatttcatcacctctggcccagaccctcacccgcctcccattgcagatgatgaaagcgatgatgatgacgatgatgacatccctcaggaggaccactacgccctgctggtgaaagcatgggagaccaaggtttttcctaccatccgaagacgcttccgcaatgaagcagagcggaaatcgggcctggaccagataaagggggccttacaactaggtatggtggatattgcccgacagacggttgaatttctctacgaagagaatggtggcatcccaagagacctttatcttcccaccattgaagacattaaagacgaagcaaacaagttcacaattgataaagttcgaaaaggtctcacagtagtaacccgctctccagacagcaataatgtagccagcagtgctgttggaactgctctgccaaaatttgccatccgagggatgctgaaaacctttgggcttcatggagtcgtcttagatgttgattcagtgaatgaactggtgcaggtagaaacgtacctccgcagtgaaggtgtgctggtgcgatactggtatcctattgacatgttggaaaggcccccagcaggctaccgaaggactgccaccaatgggctggtcacactggacaataccaaccttcaaattcacagggagctgctgcgctgcgaggctgcgctggccaggctgtactgccgcatggccctgctcaatatcttcgccccgaagttgcctcacttgttcactcgcctcttccacatccctgccatccgggacattaccctggagcacctgcaactgctgtccaatcagctcctcgcacctcctctcccagacggcaccatcagctccagctcgatcctcctggcgcagtctttacagcattgcatccattcccagaactgctccgccacggacctcttttaccagggcaactcccagacagtgagagagtggctcaacgtggccatcacccggaccctgcaccagggcgaggagagccttttagagctgacgaaacagatctgctctttcctgcagacagcaccagagcagttcccctccgaagagttcccaatttccgaatccaaagtcaacatggacgtgaatttccccggggcagcttttgttgttgtgtcttgtaaagaaagtcaatctggattccgcaaagactcctctctgtacaaggcaccgtgggcacgggtgctcgtatatggcctcggccacaaagtgaagcgaaatggccagctgaacctcatcgaggccgcctgttacccgcgggacgcgtccccagccaacactgggcttgcacctccccccaccgctgaccagtacccctctgtggtcctctccacagacagggtccacatcaaactgggggtgtctccacctcctggagcagtcctggtgttacattccctgcccctggagttcccactggctatggccttcgcagagcagctgctgtcctggaaatcagaggacagtgaagggaagtccgaagatgagcctgacaccattccgacatccgtcctcctgcaggtggtggagctgctaggaaacttcttgtggaccacggacatggcagcctgcgtgaaggagcttgttttccatctcctggcagagctcctgcgcacggtgcacaccctggagcagaggcggcaccccgctggcctgtcctcctcaatcgccctccagctgaacccctgcctggccatgctgatggccttgcagtcggagctccacaagctgtacgacgaggagacgcagaactgggtctcaggcggcgcctgcgggggctccgggggggcggcggccggtgaccagggcaggttctctacgtattttcatgcactcatggaagggtgcctggctgtggccgaagtgaccctgcctactaacatgagtgtcacagccagtggggtgacctcagcgaccgccccaaatctcagtgactcgtcctcctcctcctcgtcctccccaggacagaccccacagagtcccagcctcctctccaagaggaaaaaagtcaagatgaagcgggaaaaggcctcctcgtcgggcaagcgccagtcttcccgcaccgtggactcggaccccaccgtgctcagcatcggaggcagcaagcccgaggacatgctgtggttccaccgcgcactcaccctgctcatcatcctccgccacctcaccaggaaggacccacaggggctgggcgtgacgagtgacgccatcgccgatgcctgccaggccctggtgggccccaccgcccacagccgcttgctggtgatctccgggatccccacccacctggacgagggcgtagtcagaggcgccatccgcaaggcctgcaacgcccacggcggggtcttcaaagacgagatctacatcccgctgcaggaagaagacaccaagaagccaaaagacaaggccgagggcggggacgggaaagttgagcccgagaagacactggccttccccggcacagacagcatggaggtcagcacgtccagcagcctgacccccgccatgagcatcagcgcctccgcctccaccagccaggcctccatctgcagctcgcagggcatctcccaaaccgtcagcgacctctctgtggatccgctgcctgccggcctcgagctgcccatccctccgggcctgttggagccccacgcggtgtccagccaggaaagcctggacatttccctgtgcagcaccggcagcctgggcagcctgggcagcctgggggagcccctggacaatgcagagacggcctcggtgtcggacatgggctccatgtacacagtcacttccctggacaaccagcccctcgccgcccgccccatcaaaggcttcgcagtcgtggagataagatcccgagccaaaattgagaaaattcgagcaagtttatttaacaataatgacttgattggtttgtcaagtttggatggtgaagatgaattgatggaaatgtcaacagaagagattctaaccgtgtctgtagtaaatcagagtctctttgatactcaagggagcccagggttagaagattatttcaatgataagtcaattaaaggggagaagctggtgcccggagccagagaggttctgacggagatatttaagagttgtgcccattcagagcagacgctgagcctgacaccagcgaagcccatcagagtctctgacatttatcttagcaaagagcagatcaactcccagaccccaggcaacctcctccacctcttcttcaccaatgtccggccgccaaaaaaggtgctggaggatcagctcacccagatcctgaggaagtatggcgtgccaaagcccaagtttgacaagagcaagtacagcaaggccgggaaggagcagcaccccgtgaaggtggtgagcaccaagcggcctatcaccaagccgcccgccaaggacaaggctgtgctcaacagcgtcagcaggactgccttaagtgagaagaagccaactgtgaagccaaaatcaccagaaaagagcaaaccagatgaaaaggacccagaaaagtcacctaccaaaaaacaagaagtccctgaggaaaaatacctgacgctggaaggatttcacaaatttgttattgaccgagccaggcaagatatccgtagcgtctggagggcgatcttgtcctgtggttacgatcttcactttgagaggtgcgcatgcatcgatgtccgacatgcacagaaggcctcaagaaagtggaccctggagatggacgtggcacttgtgcagtacatcaaccagctatgccgccacctcgccatcacacccgcacggctccatccccatgaggtgtacctggaccccgcggatgctgctgaccccagagtggcctgtctcctgaacgtgcccatcgagagcctgcgcctgcgcttcgccttgctgcagtccctcaacaccacactggagaccttcttcctgcccctggtggagctgcgccagacacccatgtatacccacagcatcgccgccctgctgaaggaggccaaagggctgatcttctatgacacgaaggtgaccgtgatgaatcgagtgctgaatgccactgtgcagaggacagcggaccacgcggcccctgagatcaccttggacccactggaaattgtgggaggggaaatcagagcttctgaaaactcctacttctgtcaggctgccaggcagctggcctcagtgccgtcgtctcagctctgcgtcaagctggccagtggcggtgaccccacatatgccttcaacatccgcttcactggcgaggaggtccatggcaccagcggctctttccgccacttcctgtggcaggtgtgtaaggagctgcagagttcctcgctgtcgctgctgctgctgtgccccagctcagctgtcaataagaacaagggcaagtatatcctgaccccgagccccatcacctacggggaggagcagctgctgcacttcctggggcagctgctggggattgcaattcgggcagacgtcccgctgcccctggacctcctgccctccttctggaagacgctggtgggcgagcccttggaccctgagcaagacctgcaggaagcggatatcctcacctacaattacgtcaagaagtttgagagcatcaatgatgagaccgagctggaggccctgtgcgctgagatcgcctcccagcacctggccacggagagccctgacagccccaacaagccctgctgcaggttcacctacctgaccatgacgggcgaggaggtggagctgtgcagccggggccggcacatccttgtggcgtgggagaacaaggacatctacgcggcagccatccggagcctgcggctgcgggagctgcagaatgtggagtgcgtgacggccgtgcgggccggcctgggctccatcatccccctgcagctgctgaccatgctcagcccactggagatggagctgcgcacctgcggcctcccctacatcaacctcgagttcctcaaggcccacaccatgtaccaagtggggctgatggagacggaccagcacatcgagttcttctggggggccctggagatgttcacccaggaggagctgtgcaagttcatcaagtttgcctgcaaccaggagcgcatcccgttcacctgcccctgcaaagatgggggtcccgacactgcccatgtgcccccgtaccccatgaagatcgcccccccagatggcacagcaggttccccagactctcgctacatccgcgtggagacctgcatgttcatgatcaagcttccccagtactcctctctggaaatcatgctggagaaacttcgttgtgccattcactaccgtgaagaccccctcagtggctgatgggagggagccccagaattaggctgtcactgaggcacccactctgctggcttgggaagccaccactgcggcccgtccctccagggccctgcgtgaggagttggcaacattttgcttttccaaactttcgtccacattccagggcctcctggaagacttaaccttttgtctttgtacgtttcgtgatgggttggttcttttgctgcctgtttgtggtctatttgtaggatagtttagttcccagacagtttgtgtctaatttgatcttcttggacattgtccctcatggccaccagattctaatgccataaggccccagctggttccccatcacagaaccacccagcaggaagccgggggtacaatgacctcggccacacagagcgctcgtgctttcagcagagcgcctccacagacaagcctgtggccagccctgccctccagcctcgagctggagttgctccagaggcagccccagcaggcctccctccacatagaggtggctgggccaattgcccaaacacgtgagacacacagggagctttatgtgttcatcttcctgctttagaacttgctcccggtcttggtttttctgaggaaaagcccacagtggttcccctgcccctcccatacctccctatctgccgtctgtctctttgggccctggtctgacagttttcatctgaggcctcctcgggagcaggagacttaagggttcatcccgaccttagttcacagagcctagctgggtgcatcccagccgcagggggtgagaagacacccagagatgggggacaatgctcaggtgggggcctcctccgagactctggttgagaggaaagcacatgattcaagcctaccccacaaaaaaggagcacaaaatgctcagaaatggcccttcctccctgcagtgacgtaggacaagggaaagggccacacccattttcaaaagagtggactgaggtgctctgctcaatttggggtctgctttagtgacccagacactcaagtccagatggagactccaggggggtccttctgcccctctggccagccccacccagcactccccatcaccccatgtaagtgtgtatgccagggctgagctgcctccaggctcacccactgcatctttgccccaaataggtctttgtccagtggtactttgttcatgagcagcacaggccatcttgttggacactgtcactttgggccttgccaggtctcacagaatcacatcgctgtatttattgtataatattgtgaatattggaagttttgagtgagtgctgtctagaaggttttggagtgtggatgctggtccaagaaagaagatgtgccctggcctgctggaaagattgtgaattctagagatagagccgttagcatccatctcctccctgtaactcttaggaaatgcatcaaggaccattatagaaaggatcccctgacctaaggatgaaatcgacctagggttaatcatgacagctgcatcagttgtattggatgcaagtcaactctggaggtgagtgcccgcaagcagttcccctgctttgaaagaagatggtcagcccgctgcctccccagcggccacagctcctttgagtgtggggggtcacagccaggatgtattcctgacaataaggatccttttattttcatttctgcataatgaaagagcctttcgatttattagaagtggtttttcctccctacatctttaaattcttggttctctttagtcctcatcccttgaatggacttgtcagctacctccccaggaggagttcagaagcttctgttggccatcacttgagtagatgacaagctgtaaggtatctgctgctaacgtggctgcttctccgagagcacattgaggtccagacagatccaaaccttggccctaaaaaatgtgtgctgtaaagttacttgatgtatatttattataattatttatggttgcatttaacaaacttttcattcaatctgatgctatttacaccatgctgtgtaaaggaagctcactaaaggaaaaaagtcacaccaataaataaccttcatctaattttgatttacctta

SEQ ID NO: 70 - DNA, 1974 bp, Homo Sapiens
atttcgcccaccggaatgatcaccaagacacacaaagtagaccttgggctcccagagaagaaaaagaagaagaaagtggtcaaagaaccagagactcgatactcagttttaaacaatgatgattactttgctgatgtttctcctttaagagctacatccccctctaagagtgtggcccatgggcaggcacctgagatgcctctagtgaagaaaaagaagaagaaaaagaagggtgtcagcaccctttgcgaggagcatgtagaacctgagaccacgctgcctgctagacggacagagaagtcacccagcctcaggaagcaggtgtttggccacttggagttcctcagtggggaaaagaaaaataagaagtcacctctagccatgtcccatgcctctggggtgaaaacctccccagaccctagacagggtgaggaggaaaccagagttggcaagaagctcaaaaaacacaagaaggaaaaaaagggggcccaggaccccacagccttctcggtccaggacccttggttctgtgaggccagggaggccagggatgttggggacacttgctcagtggggaagaaggatgaggaacaggcagccttggggcagaaacggaagcggaagagccccagagaacacaatgggaaggtgaagaagaaaaaaaaaatccaccaggagggagatgccctcccaggccactccaagccctccaggtccatggagagcagccctaggaaaggaagtaaaaagaagccagtcaaagttgaggctccggaatacatccccataagtgatgaccctaaggcctccgcaaagaaaaagatgaagtccaaaaagaaggtagagcagccagtcatcgaggagccagctctgaaaaggaagaaaaagaagaagaggaaagagagtggggtagcaggagacccttggaaggaggaaacagacacggacttagaggtggtgttggaaaaaaaaggcaacatggatgaggcgcacatagaccaggtgaggcgaaaggccttgcaagaagagatcgatcgcgagtcaggcaaaacggaagcttctgaaaccaggaagtggacgggaacccagtttggccagtgggatactgctggttttgagaacgaggaccaaaaactgaaatttctcagacttatgggtggcttcaaaaacctgtccccttcgttcagccgccccgccagcacgattgcaaggcccaacatggccctcggcaagaaggcggctgacagcctgcagcagaatctgcagcgggactacgaccgggccatgagctggaagtacagccggggagccggcctcggcttctccaccgcccccaacaagatcttttacattgacaggaacgcttccaagtcagtcaagctggaagattaaactctagagttttgtccccccaaaactgccacaattgctttgattattccatttatgctggagattacaaattttttttgtgaaaaaatcagatcttggtgaggacctcgagcagtaagatataaataactcccataagcttagcgttccagtaatggaacactaggcataaatggtttattcagttgtgcaaatgaaagccatctgacagttggctcacattgaacacctgtggagattaaggacgaggacaactatattgatgggcttggatgaactggggcagggcagctcatatttcgggagccaggagaacgagtgagtgctaaaacctcctgttttctgtgttaaacattccgtccctgtttgagacatcagtatgtacagttaacttttgttgagtgtttagcaggtactagggacatactagtgttttccttaatgtatttaatcttcataattatgaaatgggtgctattattagccccatcttatagatgaggcaactgaggttcagggataaagtaataaaattgcctggggtcacccagccactaaaaaaaaaaaaaaaaaaaaaaaaaa

SEQ ID NO: 71 - DNA, 5220 bp, Homo Sapiens
gcagccgcagctcgggggcggtgcctgccttgcagcctcccctcggcgatcgcgcagccccatctttgtccggcctccgcgctttgttctcggcgcccgggccttggccagcctggccagccgccgagcagcccccacgccgcgctggcgtcgtcctcgcctccctcgccgccgccccccgcgcgcggccgggccttgccccccatggtgtcccggccagagcccgagggcgaggccatggacgccgagctggcggtagcgccgccgggctgctcgcacctgggcagcttcaaggtggacaactggaagcagaacctgcgggccatctaccagtgcttcgtgtggagcggcacggctgaggcccgcaagcgcaaggccaagtcctgtatctgccatgtctgtggcgtccacctcaacaggctgcattcctgcctctactgtgtcttcttcggctgtttcacaaagaagcatattcacgagcatgcgaaggcgaagcggcacaacctggccattgatctgatgtacggaggcatctactgttttctgtgccaggactacatctatgacaaagacatggaaataatcgccaaggaggagcagcgaaaagcttggaaaatgcaaggcgttggagagaagttttcaacttgggaaccaaccaaacgggagcttgaactgctgaagcacaacccgaaaaggagaaagatcacctcgaactgcaccataggtctgcgtgggctgatcaaccttgggaacacatgcttcatgaactgcatcgtgcaggccctgacccacacgccacttctgcgggacttcttcctgtctgacaggcaccgctgtgagatgcagagccccagctcctgtctggtctgtgagatgtcctcactgtttcaggagttttactctggacaccggtcccctcacatcccgtataagttgctgcacctggtgtggacccacgcgaggcacctagcaggctacgagcagcaggacgcccacgagttcctcatcgcggccctggacgtgctccaccgacactgcaaaggtgatgacaatgggaagaaggccaacaaccccaaccactgcaactgcatcatagaccagatcttcacaggcgggttgcagtcagacgtcacctgccaagtctgccatggagtctccaccaccatcgaccccttctgggacatcagcttggatctccccggctcttccaccccattctggcccctgagcccagggagcgagggcaacgtggtaaacggggaaagccacgtgtcgggaaccaccacgctcacggactgcctgcgacgattcaccagaccagagcacttgggcagcagcgccaagatcaagtgcagcggttgccatagctaccaggagtccacaaagcagctcactatgaagaaactgcccatcgtagcctgttttcatctcaaacgatttgaacactcagccaagctgcggcggaagatcaccacgtatgtgtccttccccctggagctggacatgacccctttcatggcctccagcaaagagagcaggatgaatggacagtaccagcagcccacggacagtctcaacaatgacaacaagtattccctgtttgctgttgttaaccatcaagggaccttggagagtggccactacaccagctttatccggcagcacaaagaccagtggttcaagtgtgacgatgccatcatcaccaaggccagcatcaaggacgtcctggacagcgaagggtacttgctgttctatcacaaacagttcctggaatacgagtagccttatctgcagctggtcagaaaaacaaaggcaatgcattggcaagcctcacaaagtgatcctccctggcccccccctcccccaagtctcccgccgcctccccggcctggtgacaccacctcccatgcagatgtggcccctctgcacctgggacccatcgggtcgggatggaccacacggacggggaggctcctggagctgctttgaagatggatgagatgaggggtgtgctctgggtgggaggagcagcgtacacccgtcaccagaacatctcttgtgtcatgacatgggggtgcaacgggggcctcacagcacagagtgaccgctgcctggcgttccccagcactcggtgtggaaaggcccctacctgctgtaagattatgggtccatgaaagcagtaagctggacacagaggtgtagtgtgcgggacagagggccttgcagatgcctttctgttggtgttttagtgttaaaatacggagagtatggaactcttcacctccattttctcagcggctgtgaagcagcctcctagcttcggaagtacggacactacgtcgcgttttcaagcgtgtctgttctgcaggtaacagcatcaagctgcacgtggaagcatctcgcggttttctagaaacaggcattttcttatccctctcccgctcctttttccacaaaggtgaatttcataaatgtaatactagtaaagtgaatgaattactgagtttatacagaaatttaggtaacttctcctttagtctcaagagcgagtcttgctttttaatgggtgccgtttatgttgctgcccgccctgtgtgcctggctcctctgggtgccttggtgtctgctggtggctggcagtgggcgcagcggaggagagttgtgctgcagctcatacggtgtgtctgtcatctcagtctggagtaaatgcagtgtctgccggtgtctgatgggttctgtccctcgtattttctttgccttctatcccattgcctggctaccgctgcctggcagccaagggtgttggtcgcgaagctggagtggcctctggtggagcctgcatcttgtctcgtctgcctctgctttacatttggtgtactttcgggcgtggtggcagtaaaatgacaccgtgattgagcttgtcagcagagctgaaagagaaagtagaaggatgtgcattgtttcttgtaagatatcttgcatgtatctgtgtattcaaattcaaacagagatggtttgtccatttgtccactgagaaattagaaactagggacaagggggaggaaaagtactgaaatacagtttatgaagcaagtgtgtctcgggctgtgcttgtcccaggagccccagcagcatctgaactgaggcttcttcagtcctgcaggaacaggatcatctgtctcagcggtgggcagatgttttcatagacagccagggagtaaacactgttggctctgtgggctgtatggtctctgccataaatagtacagagatgtggctgtgtctagtacaacttttagacacagaaatctgaatgacatatattgttctgtgtcaagaaacttagattttttttttaactatttaaaaacgtgaaacctattcttagctcacaggccatggagaagctggtggggaccagacccagctccttagctggctgggctggggagggggtagtgacagtggcagctgctactcactgctcagtgtggaaaacacaggacttggcaatcacagcccgcagaaccatcatgtgtggcagaagcctgagggatgcggtttcttgcccacgtgctctgttcattttctgttgtttttctgcacttaaagaattcacatggaagcatgttttataaaatgaattaccagagaaacagagatgggccgagattttcagaaatggtcccatgtgaccaagttctgctgtttgggtgacagtgctttgaagatctcctttgaggatgtgcagtctttttttttttttttttgagatggagtttgttgcccaggctggagtgagtggcacagtctcggctcactgcaacctccacctcctgggttcaagcagttctcgtgccgcagcctcccaagtagctgggactacaggcatgcaccaccacgccaggctaatttttgtatttttagtagagatggggtttcaccatgtctcaaactcctgacctcaggcgatccacccacctcagcgtcccaaagtgctgggattataggcgtgagccaccgcacctggcctatgagtggtcttttaattaggaacaaatctaatggaaaggagagttgactgaagttggcccacaggattgtgagctgggcagtgccttcatgaaggcttgccaccttgggacgccccagtttactggggtgtcttgcggagtgcagaaggctttctggcagctgcctgggtttggccagaccctgcctcccctcccgccggccaacccctagtccccttcctgtctccacttgcattcaggggtggctgctgttctgagaacattagaactgggaagagagatggagtcacatggatttttggtgggcattattctaaactttcgtatccaagttagtcccccttattccactgtggcattgccgttctaagcagttacctgatgcctgctgctgaagagctgctcacaggaggcggcggcggccctggcactgccccttgcattaggtcttgtgtttgatgtgttcttgtgaatttactttgtcagaacaaaatatttacgcgttgggttcaggaatttcttttagctccccatctggctgtgaaattcaggaaacctcccgttgcctagtaatcaccccatgtaggtgtacattgtgacaaagtgcatctgaccactaaggggcccccttggtgaccccagcacattcacagcagtgttaaaatggcctgcattttggagatgctggctggcctttcagtgcctcccaggaagacacatggcctttccctcttcagatgcctgaagggagtgctttgaggcaggtgatgtgctgggagtgtgggcggcctccctctggccccggggccctctgtggaccttggctccctccgtggacctgggcttcgtggtgagcactgcagcctccctgggcattccctccagcgccagcaccactgcaacatatagacctgagtgctattgtattttggcttggtgtgtatgctcttcattgtgtaaaattgctgttcttttgacaatttaagtgattgttttgtttactgtaagtttgaaaataaaaatgaagaaaaaaattccaatgactgtgctgtggttggagactttatttaccaagatgtttactcttcctttccccttccattttgaggagctgtgtcactcctcctcccccccagtgctttgtagtctctcctatgtcataataaagctacattttctctgagaa

SEQ ID NO: 72 - DNA, 8672 bp, Homo Sapiens
gaatcggttcccgggtgatcctcgcgcctgccgctgctcggccgccgccgctgacgaggagctgcagcgcgccgggccgaggcctcgagccgccccgggagctggagctgaaggcgccgcgcggagcgcgcacctcagccctgagcccggcggcggcaggcgtcgctgtcttttctccttttccccaatatggcagcggcggacggcggcgggcctggtggggcctctgtggggactgaggaggatggcggaggcgtcggccacaggacggtgtacttgtttgatcggcgcgaaaaggagtccgagctcggggaccggcctctgcaggtcggggagcgctcggactacgcgggatttcgcgcgtgtgtgtgtcagacacttggcatttcacctgaagaaaaatttgttattacaacaacaagtaggaaagaaattacctgtgataattttgatgaaactgttaaagatggagtcaccttatacctgctacagtcggtcaatcagttactactgacagctacgaaagaacgaattgacttcttacctcactatgacacactggttaaaagtggcatgtatgaatattatgccagtgaaggacaaaatcctttgccatttgctcttgcggaattaattgacaattcattgtctgctacttctcgtaacattggggttagaagaatacagatcaaattgctttttgatgaaacacaaggaaaacctgctgttgcagtgatagataatggaagaggaatgacctctaaacagcttaacaactgggccgtgtataggttgtcaaaattcacaaggcaaggtgactttgaaagtgatcattcaggatatgttcgtccagtaccagtgccacgcagtttaaatagtgatatttcctattttggtgttgggggcaagcaagctgtcttctttgttggacaatcagccagaatgataagcaaacctgcagattcccaagatgttcacgagcttgtgctttctaaagaagattttgagaagaaggagaaaaataaagaggcaatatatagtggatatattagaaacagaaagccctctgattctgttcacattacaaatgatgatgaaagatttctacatcatcttatcatagaggagaaggaaaaagatagctttactgctgtggttatcacaggggtacaaccagaacacatacagtacttgaaaaattatttccacctttggacacgacagttagcgcatatttatcactactatattcatggcccaaaaggaaatgaaatacgaacatcaaaagaagttgaacctttcaacaatattgatattgaaatttctatgtttgaaaaagggaaggtacctaagattgtcaacctaagggaaatacaagacgacatgcagacgttgtatgtaaacacagcagctgatagttttgaattcaaagctcatgttgaaggagatggtgtagtggaagggattatccgttatcatccattcttatatgatagagaaacttaccctgatgatccatgctttccatcaaaattaaaagatgaagatgatgaagatgattgtttcatacttgagaaagcagctagagggaaaaggcctatttttgaatgtttttggaatggacgattaataccatatacatcagttgaagactttgactggtgtactcctcctaagaagagagggcttgcaccaattgaatgctacaataggatatctggtgcattattcactaatgacaaattccaggtcagcacaaataaattgacgtttatggatcttgagctaaaattgaaagataagaacaccctttttacaaggattttaaatggacaggaacagcgaatgaaaattgacagagaatttgctttgtggctgaaggactgtcatgagaagtatgataaacaaataaaatttacactttttaagggagtaattacacgtcctgatcttccttctaaaaagcaaggtccctgggcaacatatgcagcaatagaatgggatggaaagatatacaaagcaggacagctggtcaagacaatcaagacacttcccctcttttatggaagcatagtaagattttttctttatggcgatcatgatggagaagtatatgctacaggaggagaggttcaaattgcaatggaacctcaggcactatatgatgaagtaagaactgtgccaattgcaaagctggataggacagttgctgagaaagctgttaaaaaatatgtagaagatgaaatggcaaggctccctgatagattgtcagtaacttggcctgaaggagatgaattattgcctaatgaggttaggcctgctggaacccctattggtgcgttaagaattgaaatactgaataaaaaaggggaagcaatgcaaaagcttccaggaacaagccatggagggtcaaagaaactcctggttgagctcaaagttattttacattcttcaagtggaaataaagagattatttcgcatattagtcaacatggaggaaaatggccttactggtttaaaaaaatggaaaatattcagaagttggggaattataccttgaaattacaagttgtgttgaatgaaagtaatgcagacacttatgcaggaagaccactaccatctaaagcaattaagttttctgttaaagagggtaagccagagaaattttcatttggtcttctggatcttccttttcgtgttggagttccatttaatatccctctggagtttcaggatgaatttggtcataccagtcaactagtaactgatattcagccagttcttgaagcaagtggtttatctttacattatgaagaaataaccaaaggaccaaattgtgtaattcgaggtgttacagccaagggccctgtaaactcttgtcaaggcaagaattataatctgaaggttactctgcctggcttaaaagaagactcacagattttgaaaattagattactacctggtcaccctcgtcgactgaaagtgaaacctgattctgaaattttagttatagaaaatggaacagctttcccatttcaggtggaagttttagatgaatcagacaacataacagcacaaccaaaattgattgttcattgtaagttttcaggtgctccaaaccttccagtctatgttgtagattgcagtagttctggaaccagtattttaacaggatctgcaattcaagttcagaatattaaaaaagaccagacgcttaaagcaagaattgaaatacctagttgtaaagatgtggcacctgtggagaagactattaagttgcttcccagtagccatgttgcaagactacaaatattcagtgtagaaggacaaaaggcaattcagatcaaacatcaggatgaggttaattggatagcgggtgatattatgcataatcttatttttcaaatgtatgatgaaggagaaagagaaatcaatataacatcagctttagcagaaaaaattaaagttaattggactcctgagattaacaaagaacacttgctacagggtctgcttcctgatgtgcaagtaccaacatctgtaaaagatatgcgctattgccaggtttcattccaagatgatcatgtgtctttggaaagtgcgtttacagtaagaccacttcctgatgaacctaaacatttaaaatgtgaaatgaaaggaggaaaaacagtacagatgggccaagagcttcaaggagaagtagttataataattacagatcagtacggaaatcagattcaagcattttcaccaagttctttatcttctttgtcaattgctggggttggacttgatagctcaaatttgaaaacaacctttcaggaaaacacacagagtataagtgtaagaggcatcaaatttattccaggtcctcctggaaataaggatctttgttttacttggcgtgagttttctgactttattcgagtgcaactaatttctggacctcctgctaaacttctccttatagactggccagaactaaaggagtccattccagtgattaatggaagagatttacagaaccctattattgttcaactttgtgatcagtgggataatccagcaccggtacaacatgttaaaataagtcttacaaaagctagcaatttaaagctcatgccttcaaaccaacagcataaaacagatgagaaaggcagggctaatttgggagtattcagtgtttttgcccctaggggagagcatactcttcaggttaaagccatctataacaaaagtatcatagaaggacctataattaagttaatgattcttccagacccagaaaaacccgttcgtctcaatgttaaatatgacaaagatgcatccttcttagcagggggtcttttcactgattttatgattagtgttatttctgaagatgacagtatcattaaaaacattaatccagcacgtatttccatgaaaatgtggaagctgtctaccagtgggaaccgacccccagcaaatgcagaaacatttagttgtaataaaataaaagataatgacaaagaagatggctgcttctatttcagggataaagtaattcctaataaagtggggacatattgtatccagtttggttttatgatggataaaacaaatattctcaacagtgaacaggttatagttgaagtcctgcctaatcaacctgtgaagttagtacctaaaattaaaccacctacaccagctgtttcaaatgttcgctcagttgccagtaggaccttggtcagagatctacatcttagtatcacggatgactacgacaaccatactggaattgatttggttggcactataatagccaccattaaaggctctaatgaggaagatactgataccccactttttattgggaaagttagaacacttgaattccccttcgtgaatggttcggctgaaatcatgagtctggtgctggcagaaagtagtcctggaagggatagtactgaatattttattgtatttgagccccggctaccacttttatcaagaaccttagaaccatatatcctaccgttcatgttttacaatgatgttaagaagcagcaacaaatggcagcacttacaaaagaaaaggaccaattatctcagtctattgttatgtataaaagtttatttgaagccagccaacagcttcttaatgaaatgaaatgtcaagttgaagaagcaagattaaaagaggcccaattgcgaaatgaactaaaaatacataatattgacattcctacaacacaacaggtgccacacattgaagcacttctgaaaagaaagctatcagaacaagaagaactgaagaaaaaacctagaagatcgtgtactcttccaaactatactaaaggcagtggagatgttttgggaaagattgcacatctagcacaaattgaagatgatagagctgcgatggttatttcttggcatctggcaagtgacatggactgtgtagtcaccctaaccactgacgctgcacgtcgtatctatgatgaaacccaaggtcgtcagcaggtgttgccccttgattctatttacaagaagactcttccagattggaaaagatctctacctcatttccgaaatggaaaattgtattttaaacccattggagatccagtctttgctcgagacttgttaacatttccagataatgtagaacattgtgaaacagtatttggtatgctgttaggagacaccattattttggataatctggatgcggccaatcattatagaaaagaggttgttaaaattacacactgtcctacactgctgaccagagatggagatcgaattcgaagtaatggaaagtttgggggccttcagaataaagctcctccaatggataaacttcggggaatggtatttggagctccagttccaaaacagtgtctgatcttaggggaacaaatagatcttcttcagcagtatcgttctgctgtgtgcaaactagacagtgtgaataaggatcttaacagtcaattagagtaccttcgcactccggatatgaggaagaaaaagcaagaacttgatgaacatgagaaaaatctcaaactaatagaggaaaaactaggtatgactcccatacgtaagtgtaatgactcattgcgtcattcaccaaaggttgagacgacagattgtccagttcctcctaaaagaatgagacgagaagctacaagacaaaataggattataaccaaaacagatgtatgagaggtgacagagagaagaggccattggtctcagtaagaatgccctgctttctgcatctctgtttcagaagaccaagagggtgacttaccagactgagtatttctggggacaatacaagtacctgggcatgaatttccatttcgattcagatgggactggaaacaaccattcaattttatgaatcttactggacattatggatttactggaattattccagacattatgccctttggttgtcactaccttgcaaatgtgtaagaggaaaatgtgctaatgtggcagtgactgtaaaactggcacatggcatttattaatcctgaagaaaagtacatgtactatttttcagtataaatataatgaacatgtcagaactatttcttgaaaacctttttattacttttgcgtgaatttatttaacaaagatgttttgtcttttgtgtaagggaggttctagaggctagatgtttaattgtaaatatgtgaggaaactcaatgcagaattcaggataaaaattttaaaagcacaggtatttgggaattgaaatgttaagatacccagaacaacattaaatcaatgagtgaacttgtgacagtggtagcatttcaaatttcaaaagacttatcctgtgtgtgtgtgtgtgtgtatatatatatatatatataaatatatatatataaaatattcagcagcaccaagttttataactattgtttgtttgactttattaatactagaatatgtagtctcagccttaattttacatttacattattttgtaattttttattactatttttaaggggttaaagagaacatacattctcacattagtgtactttctggtagaaagttgctgcaaaaacatttgaaatgtatattaacctaatgtatgtcatatatatgtctttgtgtaagttcaagactattgatctgtgaagttattttgtaaggacatacatttggtaagtaagtttgtgtcccaggaaatgtatgtgtttttaaaccctttctaaatatgcaggccattaataaataagattgtttcttccctactgaatagataagtgtttttcttttttaaaattggaagcttcataaaagttatcttgttaaaaaacgatgatgatgttaacctatctatctttataattggaaattatttaaactgtttgttgttacagaagaaacaaaatggtaattacagaattagctgtggggaagattggctcccatggtactacaggttgagtatcccttattcaaaatggttgggacctgaagtgttttggattttggttttttgtggggtttttaaattattattttggaatatttgcattatatttaccaatttagcatccctaatccaaaaatctttcattagaaattggaaatgcttcaatgagcatttcccttatgtgtcatatctgcgctcaaatgttttgaattttggaacatttcttgtttctgacttttagattagggatactcaccccgtaccaatatttggagtccttagacattagattatatgaaaatgattgattgataggtaagaaaggttaaagagaaatgactttttaggaactagacttgaacgtataattaatatgtggaactagtttgcttttataattcattgtatcaagaaggagtcatgttttaaatccaaggcattgagactatctagaagcaaaaaagttggttttaaaaattctttttattagaagtgtgtttaaaaacatgtctttttttcccttgagcgacagtggcctcactacattgcccaggctagtcttgaactcctgggttcaagcagtcttcctgccttggcctcctaagtagcagggattacaggcatgcacccacatgccaatttttattgcttaaaatggcgagttctatggatattatctagccccaagcccatatctgtacacttttgttcattttataataccagaaagaatgttctatcagtaaaagaaggtttttaagtatgaatctccatttttgtggagtttttctaccctgtaaaaattaactttgtggttcccagtaattacagtaaggagtttttctatattttcacagttggatttatctaaggatatttctcagcatattaaggaatccttttctacatttgagcaaatactgaggttcatgttgtaccaaataataataaattgcttttgtgtttaatatgtaacacgtaagaacaattgaaattttcttctaagatttaatactagtcttttagtataaaggaatgtaactggagaaaaaaattaatgctacagccatttatcctgtgttatgtgttatataatctgaaatttgtcacaatgttacaatcaggaagttttttttctggtttcttcttccaaaggaaaataatagcctacttgtattttgaagtaactgaaataaaactctctccaagcctttttgcacatta

SEQ ID NO: 73 - DNA, 4201 bp, Homo Sapiens
gcggcggtagcagcagcgggcccggctggggcgcgagcgcggcgcagcccagcccagcccagtccgagcgcggacccggcgcccgcagccccggcgccgccatggtggaggcggcgccccccgggcccgggccgctgcggaggacctttctagtgcccgagatcaagtcgctggaccagtacgatttctcgcgggccaaggcggcggccagcctggcgtgggtgctgcgggccgcgttcgggggcgcagagcacgtgcccccggagctgtgggagcccttctataccgaccagtacgcgcaggagcatgtgaagcccccggtgacacggctgctgctctcagccgagctctactgcagagcctggcgccaggcactgccacagcttgaaacaccccccaacccctctgcactgctggccctgctggcgcggaggggcacagtgcctgctttgcccgagcgcccggtgcgcgaggccgacctgaggcaccagcccattctcatgggagcccacctagctgtcattgatgccctcatggctgcctttgccttcgagtggacaaagaccctgccaggtcccttggccctgaccagcttggagcacaagctgcttttctgggtggacacgaccgtccggcggctgcaggagaagaccgagcaggaagcggcccagcgagcctctccagcagcccctgcagacggggcggccccggcgcagccctcgtgccctacgcgctggtactggaagctggttcctcacgcaattgccttctgtttgaaggagtcggggagcaaaccccccatgatccgataccgcaaggaccgtgtggtggcgcgacgtgccccctgcttcccgacggtgaccagcctccaggacctggccagtggggccgcgctggccgccaccatccactgctattgtccccagctgcttcgacttgaggaggtgtgcttgaaggaccccatgtctgtggcggacagcctgtacaacctccagctcgtgcaggatttctgtgcctctcgccttcctcgtggctgccccctgtcccttgaggacttgctgtacgtcccaccgccactcaaggtcaacttggtggtgatgctggccgagttgttcatgtgttttgaggtgctcaagcccgactttgtgcaagtgaaggacttgcccgatggtcacgctgcctccccccggggcactgaggcctccccacctcagaacaacagcggcagtagttctcctgtcttcaccttccgccacccgcttctgtcatctggtggcccccagtccccactccgaggatccacaggctccctgaagtcttccccgtccatgtcccatatggaggccctgggcaaggcctggaaccggcagctcagccgtcccctctcccaggctgtgtcattcagcaccccctttggcctggacagcgacgtggatgtcgtcatgggagaccctgtgctcctccgctctgtgagctcggacagcctgggccccccgcgtcccgcgccggccaggacccccacccagccacccccggagcctggtgacctgcccaccatcgaggaagctctgcagatcatccacagtgccgagccccggctcctcccagatggggcggccgacggcagcttctacctccactcccctgaggggccctccaagccatccctggcctccccctacctgcccgaggggacctccaaaccactgtccgacaggcccaccaaagcaccagtgtacatgccacaccccgagaccccctcgaaaccatctccctgtctggtgggggaggcatcgaaaccgccagccccatccgaggggtccccgaaggcggtggcttcgtccccagcagccaccaactccgaggtgaaaatgaccagctttgcagaacgcaagaaacagctggtgaaggcagaggctgaggccggagcggggtcccccacgtccactccggccccgccggaggccctgagctcggagatgagtgagctcagcgcccggctggaggagaaacgcagagccatcgaggctcagaagcgacggattgaggccatattcgccaagcaccgccagcggctgggcaaaagcgccttcctgcaggtgcagccgcgggaagcctctggggaggcggaagcagaggcggaggaggccgattccggtccagtccctggtggggagcggcccgcaggcgagggccagggtgagccaacctcacggcccaaggcagtgaccttctcgccagacctgggcccggtgccccacgaggggctgggggaatacaatcgagcggtcagcaagctgagtgccgccttgagctcgctgcagcgggacatgcagaggctcacggaccagcagcagcggctcctggccccgcccgaggcccccggatccgccccaccacctgctgcgtgggtcatccctggccccacgacggggcccaaagctgcatcccccagccccgcccggcgagtcccggccacccggcgcagccctgggcccgggcccagccagtcaccccgcagcccgaaacacacgcggccagcggagctgcggctggcacccttgaccagggtgcttacgccaccccacgacgtagacagcctcccccacctgcgcaagttctcgccgagccaggtgcccgtgcagacgcgctcttccatcctcctggcggaggagacgccccccgaggagccagccgcccggccgggcctcatcgagatcccgctgggcagcctggcagatcccgccgccgaggacgagggagacgggagccccgctggtgctgaggattccttggaggaggaggcgtcttcggagggggagccccgggtggggctggggttcttctacaaggatgaagacaagcctgaggacgagatggcccaaaagcgggccagcctgctggagcggcagcagcggcgagcagaggaggcgcggcggcgcaagcagtggcaggaggtggagaaggaacagcggagggaggaggccgcgaggctggcccaagaggaggccccgggcccagccccgcttgtgtccgcagtcccgatggcgactccagcccctgctgcccgggctccagccgaggaggaggtgggcccccggaagggggacttcacgcggcaggagtacgagcgccgggcccagctgaagctgatggacgacctcgataaggtgctgcggccccgggctgcggggtccgggggtccaggtcggggcgggcggagggccacccggcctcgctcgggttgctgtgacgactcagccctggcacgaagcccagcccgcggcctgctgggctctcggctgagcaaaatctattcccagtccaccctgtcactgtccactgtggccaacgaggcccacaataacctcggggtgaagaggcccacgtctcgggctccctccccgtcaggtctcatgtccccaagccgcctgcctggaagccgcgaacgggactgggaaaatggcagcaatgcctcctccccagcgtcagtgcccgagtacacaggtccacggctgtacaaagaacccagcgccaagtccaacaagttcatcatccacaatgccctatcacactgctgcctggcgggcaaggtgaacgaaccgcagaagaatcgcattctggaggaaattgagaaaagcaaggccaaccacttcctgatcctctttcgcgactcgagctgccagttccgggcgctctacacgctgtcgggggagacagaggagctgtcgcggctggcagggtatgggccccggaccgtcacgcccgccatggtggaaggcatctacaagtacaactcggaccgcaagcgcttcacccagatccccgccaagaccatgtccatgagcgtcgatgccttcaccatccagggacacctctggcagggcaagaaacccaccactcccaagaagggcggcggcacccccaaatagccccacccgggcggtccacgggccgggccctgtgtgctgcggccgccatcccctggaggacagtcagtcggtattcctgggtcctgtctgtccccaaccgtgtctgggtggggctggagtctccaccctctgactttgagtccagtcctgctgtgggggctgagctgggaggttcagggactcagggctcagctcagtccccttgtctgtcctcccccacttcttgaataaaataatttaaagagaagttgaaaaaaaaaaaaaaaaaa

SEQ ID NO: 74 - DNA, 1 bp, Homo Sapiens
  misc_feature (1)..(1): n is a, c, g, or t
n

SEQ ID NO: 75 - DNA, 2284 bp, Homo Sapiens
cctgggcagagagtgaggagcacccaagtggggccagaggaacgttgtgtgtggcagcaaggagcccgcagaggaacatggcgctgctctgggggctcctggtgctcagctggtcctgcctgcaaggcccctgctccgtgttctcccctgtgagcgccatggagcccttgggccggcagctaactagcgggccgaaccaggagcaggtgtccccacttaccctcctcaagttgggcaaccaggagcctggtggccagactgccctgaagagtcccccaggagtctgcagcagagaccccaccccagagcagacccacaggctggcccgggccatgatggccttcactgccgacctgttctccctggtggctcaaacgtccacctgccccaacctcatcctgtcacccctgagtgtggccctggcgctgtctcacctggcactaggtgctcagaaccacacgttgcagaggctgcaacaggtgctgcacgcaggctcagggccctgcctcccccatctgctgagccgcctctgccaggacctgggccccggcgcgttccgactggctgccaggatgtacctgcagaaaggatttcccatcaaagaagatttcctggaacaatccgaacagctatttggggcaaagcccgtgagcctgacgggaaagcaggaagatgacctggcaaacatcaaccaatgggtgaaggaggccacggaggggaagattcaggaattcctctctgggctgccggaagacaccgtgttgcttctcctcaacgccatccacttccagggtttctggaggaacaagtttgacccgagccttacccagagagactccttccacctggacgagcagttcacggtgcccgtggaaatgatgcaggcccgcacgtacccgctgcgctggttcttgctggagcagcctgagatccaggtggctcatttcccctttaagaacaacatgagctttgtggtccttgtacccacccactttgaatggaacgtgtcccaggtactggccaacctgagttgggacaccctgcacccacctctggtgtgggagaggcccaccaaggtccggctgcctaagctgtatctgaaacaccaaatggacctggtggccaccctcagccagctgggcctgcaggagttgttccaggccccagacctgcgtgggatctccgagcagagcctggtggtgtccggcgtgcagcatcagtccaccctggagctcagcgaggtcggcgtggaggcggcggcggccaccagcattgccatgtcccgcatgtccctgtcctccttcagcgtgaaccgccccttcctcttcttcatcttcgaggacaccacaggccttcccctcttcgtgggcagcgtgaggaaccccaaccccagtgcaccgcgggagctcaaggaacagcaggattccccgggcaacaaggacttcctccagagcctgaaaggcttcccccgcggagacaagcttttcggccctgacttaaaacttgtgccccccatggaggaggattacccccagtttggcagccccaagtgaggggccgtggctgtggcatccagagtccctgcctggaccagcctctccactcatgtgactctttccaaccggctttgtggcactggggcaggggccgggggcagtctgagagaggccattctttcccaacacctcttggggagtttagggtggggggggggcgcggctgggaggagggcaggcatcggggagccgggagcctgaccctcatctttcttccaaacaggctcagagggtgtcctgcaccggggcctgggcaggagggaggtgcttctagttctgccaggagacaggttagctgctccccacgtcagctgggacaccccgacttttgtttaccagagaaaaagggagggggagagggctgcctttggacttgtcccgggacacctaggctagggtggggagagacgggccctggtggtggctcgggaggcgaagcgttgtcctcagccccgcgtggaactcgtgtctggcacagcctggctgtggcctaacctgccgagagtccatcagcctccatcctaccccctgtgccttgtcacgccagacttcccacggctcctcgagatcccaacactgccagcatttcccttccttcctctcctgtctccctcctctgcccgggagctcaggaaccgaggcagggaaggatcccatgagctccttaaggctcttttgtaaggtttttgtagtgatttttatgccacctgaataaagaatgaatgggc

SEQ ID NO: 76 - DNA, 3190 bp, Homo Sapiens
ggaggcacttccgctccaggaaggcgaggtcggatctgagatatctcccagggaggttcacttccccggaactctgccttttcccagaaggaggaggggaaaaatgaccaagttccaggaggcagtgacattcaaggatgtggctgtggccttcactgaggaggagctggggctgctggactctgcccagaggaagctgtaccgagatgtgatgctggagaactttaggaacctggtttcagtgggacatcagtccttcaaaccagatatgatatcccagttggagagggaagaaaagctttggatgaaggagcttcaaacccaaagaggtaagcattcaggagacaggaatcaaaatgagatggcaactcttcacaaagcaggattaaggtgcttttcactgggagagctttcatgctggcaaatcaagagacacattgcgagcaaattagccagaagtcaagactccatgataaatattgaaggaaagagctctcagttccccaagcaccatgattccccctgtcaagtgggagcaggagaatctattcaagcttctgtggatgacaactgtctagtgaatcacataggggatcattccagtatcattgaaaatcaagaatttccaactgggaaagttccgaattcttggagtaaaatatatctgaatgagacacagaattatcagagaagttgtaagcagactcagatgaaaaacaaactatgtatatttgctccatatgttgacattttcagttgtatttcacaccaccatgatgataatatagtgcacaaaagagataaagttcatagcaatagtgattgtggtaaagataccctaaaggtatcacctcttacccagcgtagtattcacacaggacagaaaacctaccagggtaatgaatgtgaagaagccttcaatgatagctccagtcttgaacttcataaacaggtacacttgggaaagaagtctccagcgtgtagtacacatgagaaggacaccagttatagctcaggtattcctgttcaacaaagtgttcgtactgggaaaaaacgctattggtgtcatgaatgtggtaaaggtttcagtcagagctcaaatctgcaaactcatcagagagtccacacaggggagaaaccctatacatgccacgagtgtggtaagagctttaatcagagctcacatctttatgctcatttgcctattcacacaggagagaagccctatagatgtgacagttgtgggaagggcttcagtcgtagcacagatcttaacattcattgcagagttcacactggagagaaaccttataaatgtgaggtgtgtgggaagggcttcactcagagatcacatcttcaggcccatgaaagaattcacactggagagaaaccatataaatgtggggattgtggtaaacgctttagttgtagctcaaatcttcatacccatcagagagtccacactgaagaaaaaccatacaaatgtgatgagtgtggtaagtgctttagtttgagctttaatcttcatagtcatcaacgagtccacacaggagaaaaaccatataaatgtgaagagtgtggtaagggttttagttcagcctcaagtttccagagccatcagagggtccatacaggagagaaaccatttcgatgcaacgtgtgtgggaaaggcttcagtcagagttcatactttcaagcacatcagagagtccacactggagaaaaaccatacaaatgtgaagtgtgtgggaagcgcttcaattggagcttgaatcttcacaatcatcagagagtccacaccggagagaaaccctacaaatgtgaagagtgtggtaagggtttcagtcaggcttcaaatcttcaagcccatcagagcgtccacactggggaaaaaccattcaagtgtgatgcatgtcagaagcgattcagtcaggcctcacaccttcaagcccatcagagagtccacaccggagagaaaccatataaatgtgacacttgtggtaaggccttcagccagaggtcaaatcttcaagtccatcagataattcacactggagagaaaccatttaaatgtgaggaatgtgggaaagaattcagttggagtgctggtctcagtgcccatcagagggtccacacaggagagaaaccctatacgtgtcagcagtgtgggaagggcttcagtcaggcctcacattttcacacacaccagagagtccacactggagagaggccttacatatgtgatgtctgttgtaagggcttcagtcagaggtcacatctcatctaccatcagagagtccacactggagggaatctgtagaaatgagaggtgtggttcagccttcagttagagctcacatctttgtctccgttgggaagtccatgctgatgattgtgaaaagttcctttaaaactagaagcttcaaagaatcttgacaggaaagaagtctctcaaatgctgtgttttagacttggttaggacatgaattctttacaaacgtcatatttcacagatgcgagaaaactttgttctgtaaatatgatcagtgtttatatcagagtaccaggtgtcccggttctcaagatgtaacacagcagaaaagtcttgtcggagtctgcacaggagagaggccttcctttaacaaaagtatgattgacagaaaaaatggatgtcaactaaaatgtaacctctatgtaaggaggtgtttttcaccactctatctctaccatgtagaattgtgcttggctcataatagggcccagcaattactgaagaaagtgaagaaaatacctataattaggacaaatacttgaaaattctagtctgttttctactctaaatttatattaatttatattcaaaaggaatcctgcaagtagccttaataacgttagtttcagtaagtactgaaaagtatataatactgccatccatactaacacaaatttggaaaaaagacatgaatggctcccatccttcagccttagttctttgtacagtgtatcatcagttgtgtacagtatgatttttagtgtcagtttatagactgaacaatactgtttttatctaatgtgaccctgcaatttacatgattagaatttttggacactaagctgtactgtaactctgaaagtgttaaaagtagttactgatgacaaaaagtttcttagtaaacttgaattgttaata

SEQ ID NO: 77 - DNA, 5673 bp, Homo Sapiens
tgccggggccggcgagccaaagaggagccggccgcgcgggccgggaggggacggccgccggagccgcgaggccaactgtcgcctggttgggcccggaaatgggacgtcgcgctttctcagggagcgtagaagcagccagggcctctccaagccgctgctgtgacagaaagtgagtgagctgccggaggatgtccaccgccacgacagtcgcccccgcggggatcccggcgaccccgggccctgtgaacccaccccccccggaggtctccaaccccagcaagcccggccgcaagaccaaccagctgcagtacatgcagaatgtggtggtgaagacgctctggaaacaccagttcgcctggcccttctaccagcccgtggacgcaatcaaattgaacctgccggattatcataaaataattaaaaacccaatggatatggggactattaagaagagactagaaaataattattattggagtgcaagcgaatgtatgcaggacttcaacaccatgtttacaaattgttacatttataacaagcccacagatgacatagtgctaatggcccaagctttagagaaaatttttctacaaaaagtggcccagatgccccaagaggaagttgaattattaccccctgctccaaagggcaaaggtcggaagccggctgcgggagcccagagcgcaggtacacagcaagtggcggccgtgtcctctgtctccccagcgaccccctttcagagcgtgccccccaccgtctcccagacgcccgtcatcgctgccacccctgtaccaaccatcactgcaaacgtcacgtcggtcccagtccccccagctgccgccccacctcctcctgccacacccatcgtccccgtggtccctcctacgccgcctgtcgtcaagaaaaagggcgtgaagcggaaagcagacacaaccactcccacgacgtcggccatcactgccagccggagtgagtcgcccccgccgttgtcagaccccaagcaggccaaagtggtggcccggcgggagagtggtggccgccccatcaagcctcccaagaaggacctggaggacggcgaggtgccccagcacgcaggcaagaagggcaagctgtcggagcacctacgctactgcgacagcatcctcagggagatgctatccaagaagcacgcggcctacgcctggcccttctacaagccagtggatgccgaggccctggagctgcacgactaccacgacatcatcaagcacccgatggacctcagcaccgtgaaaaggaagatggatggccgagagtacccagacgcacagggctttgctgctgatgtccggctgatgttctcgaattgctacaaatacaatcccccagaccacgaggttgtggccatggcccggaagctccaggacgtgtttgagatgaggtttgccaagatgccagatgagcccgtggaggcaccggcgctgcctgcccccgcggcccccatggtgagcaagggcgctgagagcagccgtagcagtgaggagagctcttcggactcaggcagctcggactcggaggaggagcgggccaccaggctggcggagctgcaggagcagctgaaggccgtgcacgagcagctggccgccctgtctcaggccccagtaaacaaaccaaagaagaagaaggagaagaaggagaaggagaagaagaagaaggacaaggagaaggagaaggagaagcacaaagtgaaggccgaggaagagaagaaggccaaggtggctccgcctgccaagcaggctcagcagaagaaggctcctgccaagaaggccaacagcacgaccacggccggcagacagctgaagaaaggcggcaagcaggcatctgcctcctacgactcagaggaagaggaggagggcctgcccatgagctacgatgaaaagcgccagcttagcctggacatcaaccggctgcccggggagaagctgggccgggtagtgcacatcatccaatctcgggagccctcgctcagggactccaaccccgacgagatagaaattgactttgagactctgaaacccaccactttgcgggaactggagagatatgtcaagtcttgtttacagaaaaagcaaaggaaaccgttctcagcaagcgggaagaaacaggcagccaagtcgaaagaggagctagctcaggaaaagaagaaggagctggaaaagcgtctgcaggatgtcagcgggcagctgagcagcagcaagaagcccgcccggaaagagaagcccggctcagcaccctcagggggcccgtccaggctcagcagcagcagctcctccgagtctgggagcagcagctccagcgggtccagctctgacagcagtgactcagaatgaactggcttcggacagaacaggacagatggatgtcgcacacgccgagactctgccgtacccctctgtggttcatattactacttctgttccatggtgtgcaggtctgcttcttaattcagtgttatgatatcttccagtttttgctttcataggtcagagatctatcttgtgtgtgcgttagacttgatgagaaggtgtgaactctgcagaaagtctcttcttcatcactgaattcagtcacttggagatgacaacttcaaatgctaacccgatgaccccagaaaaccgtgtgagattcgtaccgaagaaccttgtggaatccctttgcttaggcccaacctggtcgatagctcgagaaagaattttttccaaggaaatgtctcggatatgggtactgtatttgaaagctgttagctttgtcaacacgcattgtccttgtcatttgggccccgagctctgaccctcgtgtctgacgcggccacctctttctggaggggctgaggacagatgtgcctgcttgtggagaccaggctgggcctaagcgaagggtcatcgcagccccagcccggagcgtggagcccttggggggtggtcgggtgggatgtgcgttctccgctcgtggtgatgtcaggagctcctcggagggaacagagcggctgtgtatgcagcctgcaggtttccatacactgaagcttttacctcaactttaaaaaaaaaaaaagaagaaaagatttaaaaaaaaaaaaaaaggagactttttttgtaaggttcggcaattttctacggaagtccagcccgctgtgagtccccgcctggctagcgctgcccctgctgctgctgccgcgccacccttgggaaccacttcccgagcttatgtgtatataaatagttatttattaacatcattggtcatttttaaaaaaaagaaaataagaaaaaaccgcagaagaaatgcattcacacagtcgcagagatgcaggccttgccagtggtgtgccgggcgcgggtcctgtctggcggcggcctgtcgtctccaggtgctaactcctgccaccgcgcggtgctcacccacgtctgttcgcgcgctcgcccctgggtttgttgggttttttggtttttttctttgtggtttttttttttttttttttttgtatgaaacttggaggcttacaggtatagacagctttcagctacagcacattctaattttttattttgtttagttcttttgtattcacttctggtctctttaagactgttttaaaagaaatcaatttagggaaccccagttatataatataaactttgtaatctgagagaaaaaatgtatagtaaatctaagtcttgatttttaactttctattgtaaaaaataataatatacagagtttaatagaaggtgatgttttggttttgttttcccagaggctgccatatggtctttgagtacggggatgtcccaaactggcccaccaatgagcatggcggctccggccaggaatgccagagttagcctcccaggcttgcgggtggacatgcctgctccctgccagcctccagtggcctggccaggccctcccgagcctgtctgccctccccaggggtggaggagtctctgggccccaggaggattccctcccggagactcgcacggtgctccctgctcacgcgttgtcacagttagtccggaaatgactgaaaccaggcattctcccggacctcagcgtgggggagcctccaggcagacgctgggtatggagctgtggtgtggtctgtcctgtatggtggccagtgctttctgccagcatttctggatggatatagggactatcattagtatcctaatacacggtgattttaaaacaaccataaaattgattcagagtccactgacccttacagatgtaggtatacccttactggagagggaactctgatgaggagatgctggtaaattatcattttttaaattgctggtgagtctgacacttggtgagttttcagccagtttgttaaacttttaattaagttttgtttataataaaaatataaatggatttgaaagtttccattttttaaagttaccctcgttttcaaaggtattttctaaacagatctttaatggactatttaaaccgaatttaaggaattcacacacgacagttgacaggtcttcacgcaggctggttggtaacgtgctgccagcacagggctgggtgatacgtacaccctaagccgggggtgcctggggctggggggcgctccttgcaatgcccctccagccacagggcagtgaggtgctgcctgtgtgagccgtcgggggagcggccggctgtgggggcagcgcagcaggagcatcgtggggcctttccttctcggctggttctctgtgacggtggcgtcggctcgcctctgctcctttcatctagaaagaagccactgaccctgacagcccacggcgggtacactgagcagctgcattggtgctgtcacttttttaaggctttctgtccagacttcaacactggtttcttttcagagtttcgaaggattaatgacttcctcagcgcccttgctggcgggctgagggtgacagtcacgtccgtttcttctgtattagaaggctgcggtgattcaattagattgtcccactgctgagacctgtagggcagcttctaacatgcttttttcaaggggagaggagtagtgacaagtcgtgtgtcggaattggatttgagaacactctgaatgacccctggaggccgagggggcaggcttcgggcgtgaactgaactccagacccctctttgtgttgggcagtgtcatcttgcttacaaactgtaagacacatttttttgtgtgtttgtttttgttgttgttcttttgcagcactcacgcctctgacagtcttttgggaaagagtaacacccacatacagaatttgtcacatccagagtagcactgttccttaatactggcataatgcttccaggaagtttttcttttttatatttaaaatgttacttttctgtatgatgtgcatgcaagtttaccgtaacttttcttaaactttttagtgccgtttctagtatattcctgtaaatgtcagttactgaaaatgagtccaatgtaagtagtttagcttgtttattgcaatgctggcctcaacacaacagaataaaaatggtagaaagtactctttgatgtttctggtaatcatggacccttctcctggggcatttgttttgttttcataataaaaagcaaaaaaaaaaaaaaaaaaaaaaaaaaaaaaaaaaaaaaaa

SEQ ID NO: 78 - DNA, 3448 bp, Homo Sapiens
acggtttccccgcccctttcaggcctagcaggaaacgaagcggctctttccgctatctgccgcttgtccaccggaagcgagttgcgacacggcaggttcccgcccggaagaagcgaccaaagcgcctgaggaccggcaacatggtgcggtcggggaataaggcagctgttgtgctgtgtatggacgtgggctttaccatgagtaactccattcctggtatagaatccccatttgaacaagcaaagaaggtgataaccatgtttgtacagcgacaggtgtttgctgagaacaaggatgagattgctttagtcctgtttggtacagatggcactgacaatcccctttctggtggggatcagtatcagaacatcacagtgcacagacatctgatgctaccagattttgatttgctggaggacattgaaagcaaaatccaaccaggttctcaacaggctgacttcctggatgcactaatcgtgagcatggatgtgattcaacatgaaacaataggaaagaagtttgagaagaggcatattgaaatattcactgacctcagcagccgattcagcaaaagtcagctggatattataattcatagcttgaagaaatgtgacatctccctgcaattcttcttgcctttctcacttggcaaggaagatggaagtggggacagaggagatggcccctttcgcttaggtggccatgggccttcctttccactaaaaggaattaccgaacagcaaaaagaaggtcttgagatagtgaaaatggtgatgatatctttagaaggtgaagatgggttggatgaaatttattcattcagtgagagtctgagaaaactgtgcgtcttcaagaaaattgagaggcattccattcactggccctgccgactgaccattggctccaatttgtctataaggattgcagcctataaatcgattctacaggagagagttaaaaagacttggacagttgtggatgcaaaaaccctaaaaaaagaagatatacaaaaagaaacagtttattgcttaaatgatgatgatgaaactgaagttttaaaagaggatattattcaagggttccgctatggaagtgatatagttcctttctctaaagtggatgaggaacaaatgaaatataaatcggaggggaagtgcttctctgttttgggattttgtaaatcttctcaggttcagagaagattcttcatgggaaatcaagttctaaaggtctttgcagcaagagatgatgaggcagctgcagttgcactttcctccctgattcatgctttggatgacttagacatggtggccatagttcgatatgcttatgacaaaagagctaatcctcaagtcggcgtggcttttcctcatatcaagcataactatgagtgtttagtgtatgtgcagctgcctttcatggaagacttgcggcaatacatgttttcatccttgaaaaacagtaagaaatatgctcccaccgaggcacagttgaatgctgttgatgctttgattgactccatgagcttggcaaagaaagatgagaagacagacacccttgaagacttgtttccaaccaccaaaatcccaaatcctcgatttcagagattatttcagtgtctgctgcacagagctttacatccccgggagcctctacccccaattcagcagcatatttggaatatgctgaatcctcccgctgaggtgacaacaaaaagtcagattcctctctctaaaataaagaccctttttcctctgattgaagccaagaaaaaggatcaagtgactgctcaggaaattttccaagacaaccatgaagatggacctacagctaaaaaattaaagactgagcaagggggagcccacttcagcgtctccagtctggctgaaggcagtgtcacctctgttggaagtgtgaatcctgctgaaaacttccgtgttctagtgaaacagaagaaggccagctttgaggaagcgagtaaccagctcataaatcacatcgaacagtttttggatactaatgaaacaccgtattttatgaagagcatagactgcatccgagccttccgggaagaagccattaagttttcagaagagcagcgctttaacaacttcctgaaagcccttcaagagaaagtggaaattaaacaattaaatcatttctgggaaattgttgtccaggatggaattactctgatcaccaaagaggaagcctctggaagttctgtcacagctgaggaagccaaaaagtttctggcccccaaagacaaaccaagtggagacacagcagctgtatttgaagaaggtggtgatgtggacgatttattggacatgatataggtcgtggatgtatggggaatctaagagagctgccatcgctgtgatgctgggagttctaacaaaacaagttggatgcggccattcaaggggagccaaaatctcaagaaattcccagcaggttacctggaggcggatcatctaattctctgtggaatgaatacacacatatatattacaagggataatttagaccccatacaagtttataaagagtcattgttattttctggttggtgtattattttttctgtggtcttactgatctttgtatattacatacatgctttgaagtttctggaaagtagatcttttcttgacctagtatatcagtgacagttgcagcccttgtgatgtgattagtgtctcatgtggaaccatggcatggttattgatgagtttcttaaccctttccagagtcctcctttgcctgatcctccaacagctgtcacaacttgtgttgagcaagcagtagcatttgcttcctcccaacaagcagctgggttaggaaaaccatgggtaaggacggactcacttctctttttagttgaggccttctagttaccacattactctgcctctgtatataggtggttttctttaagtggggtgggaaggggagcacaatttcccttcatactccttttaagcagtgagttatggtggtggtctcatgaagaaaagaccttttggcccaatctctgccatatcagtgaacctttagaaactcaaaaactgagaaatttactacagtagttagaattatatcacttcactgttctctacttgcaagcctcaaagagagaaagtttcgttatattaaaacacttaggtaacttttcggtctttcccatttctacctaagtcagctttcatctttgtggatggtgtctcctttactaaataagaaaataacaaagcccttattctctttttttcttgtcctcattcttgccttgagttccagttcctctttggtgtacagacttcttggtacccagtcacctctgtcttcagcaccctcataagtcgtcactaatacacagttttgtacatgtaacattaaaggcataaatgactcatctctctgtgaaaaaaaaaaaaaaaaaaaa

SEQ ID NO: 79 - DNA, 1796 bp, Homo Sapiens
ccttttcccctgcctgcccttcgggcacctcaggaaggcaccttcctctgtcagaatggccaccatggtaccatccgtgttgtggcccagggcctgctggactctgctggtctgctgtctgctgaccccaggtgtccaggggcaggagttccttttgcgggtggagccccagaaccctgtgctctctgctggagggtccctgtttgtgaactgcagtactgattgtcccagctctgagaaaatcgccttggagacgtccctatcaaaggagctggtggccagtggcatgggctgggcagccttcaatctcagcaacgtgactggcaacagtcggatcctctgctcagtgtactgcaatggctctcagataacaggctcctctaacatcaccgtgtacaggctcccggagcgtgtggagctggcacccctgcctccttggcagccggtgggccagaacttcaccctgcgctgccaagtggaggatgggtcgccccggaccagcctcacggtggtgctgcttcgctgggaggaggagctgagccggcagcccgcagtggaggagccagcggaggtcactgccactgtgctggccagcagagacgaccacggagcccctttctcatgccgcacagaactggacatgcagccccaggggctgggactgttcgtgaacacctcagccccccgccagctccgaacctttgtcctgcccgtgacccccccgcgcctcgtggccccccggttcttggaggtggaaacgtcgtggccggtggactgcaccctagacgggctttttccagcctcagaggcccaggtctacctggcgctgggggaccagatgctgaatgcgacagtcatgaaccacggggacacgctaacggccacagccacagccacggcgcgcgcggatcaggagggtgcccgggagatcgtctgcaacgtgaccctagggggcgagagacgggaggcccgggagaacttgacggtctttagcttcctaggacccattgtgaacctcagcgagcccaccgcccatgaggggtccacagtgaccgtgagttgcatggctggggctcgagtccaggtcacgctggacggagttccggccgcggccccggggcagccagctcaacttcagctaaatgctaccgagagtgacgacggacgcagcttcttctgcagtgccactctcgaggtggacggcgagttcttgcacaggaacagtagcgtccagctgcgagtcctgtatggtcccaaaattgaccgagccacatgcccccagcacttgaaatggaaagataaaacgagacacgtcctgcagtgccaagccaggggcaacccgtaccccgagctgcggtgtttgaaggaaggctccagccgggaggtgccggtggggatcccgttcttcgtcaacgtaacacataatggtacttatcagtgccaagcgtccagctcacgaggcaaatacaccctggtcgtggtgatggacattgaggctgggagctcccactttgtccccgtcttcgtggcggtgttactgaccctgggcgtggtgactatcgtactggccttaatgtacgtcttcagggagcaccaacggagcggcagttaccatgttagggaggagagcacctatctgcccctcacgtctatgcagccgacagaagcaatgggggaagaaccgtccagagctgagtgacgctgggatccgggatcaaagttggcgggggcttggctgtgccctcagattccgcaccaataaagccttcaaactccctaaaaaaaaaaaaaaaaaa

SEQ ID NO: 80 - DNA, 4310 bp, Homo Sapiens
gtcgcgggcagctggcgccgcgcggtcctgctctgccggtcgcacggacgcaccggcgggccgccggccggagggacggggcgggagctgggcccgcggacagcgagccggagcgggagccgcgcgtagcgagccgggctccggcgctcgccagtctcccgagcggcgcccgcctcccgccggtgcccgcgccgggccgtggggggcagcatgcccgcgcgcgctgcctgaggacgccgcggcccccgcccccgccatgggcgcccctgcctgcgccctcgcgctctgcgtggccgtggccatcgtggccggcgcctcctcggagtccttggggacggagcagcgcgtcgtggggcgagcggcagaagtcccgggcccagagcccggccagcaggagcagttggtcttcggcagcggggatgctgtggagctgagctgtcccccgcccgggggtggtcccatggggcccactgtctgggtcaaggatggcacagggctggtgccctcggagcgtgtcctggtggggccccagcggctgcaggtgctgaatgcctcccacgaggactccggggcctacagctgccggcagcggctcacgcagcgcgtactgtgccacttcagtgtgcgggtgacagacgctccatcctcgggagatgacgaagacggggaggacgaggctgaggacacaggtgtggacacaggggccccttactggacacggcccgagcggatggacaagaagctgctggccgtgccggccgccaacaccgtccgcttccgctgcccagccgctggcaaccccactccctccatctcctggctgaagaacggcagggagttccgcggcgagcaccgcattggaggcatcaagctgcggcatcagcagtggagcctggtcatggaaagcgtggtgccctcggaccgcggcaactacacctgcgtcgtggagaacaagtttggcagcatccggcagacgtacacgctggacgtgctggagcgctccccgcaccggcccatcctgcaggcggggctgccggccaaccagacggcggtgctgggcagcgacgtggagttccactgcaaggtgtacagtgacgcacagccccacatccagtggctcaagcacgtggaggtgaatggcagcaaggtgggcccggacggcacaccctacgttaccgtgctcaagtcctggatcagtgagagtgtggaggccgacgtgcgcctccgcctggccaatgtgtcggagcgggacgggggcgagtacctctgtcgagccaccaatttcataggcgtggccgagaaggccttttggctgagcgttcacgggccccgagcagccgaggaggagctggtggaggctgacgaggcgggcagtgtgtatgcaggcatcctcagctacggggtgggcttcttcctgttcatcctggtggtggcggctgtgacgctctgccgcctgcgcagcccccccaagaaaggcctgggctcccccaccgtgcacaagatctcccgcttcccgctcaagcgacaggtgtccctggagtccaacgcgtccatgagctccaacacaccactggtgcgcatcgcaaggctgtcctcaggggagggccccacgctggccaatgtctccgagctcgagctgcctgccgaccccaaatgggagctgtctcgggcccggctgaccctgggcaagccccttggggagggctgcttcggccaggtggtcatggcggaggccatcggcattgacaaggaccgggccgccaagcctgtcaccgtagccgtgaagatgctgaaagacgatgccactgacaaggacctgtcggacctggtgtctgagatggagatgatgaagatgatcgggaaacacaaaaacatcatcaacctgctgggcgcctgcacgcagggcgggcccctgtacgtgctggtggagtacgcggccaagggtaacctgcgggagtttctgcgggcgcggcggcccccgggcctggactactccttcgacacctgcaagccgcccgaggagcagctcaccttcaaggacctggtgtcctgtgcctaccaggtggcccggggcatggagtacttggcctcccagaagtgcatccacagggacctggctgcccgcaatgtgctggtgaccgaggacaacgtgatgaagatcgcagacttcgggctggcccgggacgtgcacaacctcgactactacaagaagacaaccaacggccggctgcccgtgaagtggatggcgcctgaggccttgtttgaccgagtctacactcaccagagtgacgtctggtcctttggggtcctgctctgggagatcttcacgctggggggctccccgtaccccggcatccctgtggaggagctcttcaagctgctgaaggagggccaccgcatggacaagcccgccaactgcacacacgacctgtacatgatcatgcgggagtgctggcatgccgcgccctcccagaggcccaccttcaagcagctggtggaggacctggaccgtgtccttaccgtgacgtccaccgacgagtacctggacctgtcggcgcctttcgagcagtactccccgggtggccaggacacccccagctccagctcctcaggggacgactccgtgtttgcccacgacctgctgcccccggccccacccagcagtgggggctcgcggacgtgaagggccactggtccccaacaatgtgaggggtccctagcagcccaccctgctgctggtgcacagccactccccggcatgagactcagtgcagatggagagacagctacacagagctttggtctgtgtgtgtgtgtgtgcgtgtgtgtgtgtgtgtgtgcacatccgcgtgtgcctgtgtgcgtgcgcatcttgcctccaggtgcagaggtaccctgggtgtccccgctgctgtgcaacggtctcctgactggtgctgcagcaccgaggggcctttgttctggggggacccagtgcagaatgtaagtgggcccacccggtgggacccccgtggggcagggagctgggcccgacatggctccggcctctgcctttgcaccacgggacatcacagggtgggcctcggcccctcccacacccaaagctgagcctgcagggaagccccacatgtccagcaccttgtgcctggggtgttagtggcaccgcctccccacctccaggctttcccacttcccaccctgcccctcagagactgaaattacgggtacctgaagatgggagcctttaccttttatgcaaaaggtttattccggaaactagtgtacatttctataaatagatgctgtgtatatggtatatatacatatatatatataacatatatggaagaggaaaaggctggtacaacggaggcctgcgaccctgggggcacaggaggcaggcatggccctgggcggggcgtgggggggcgtggagggaggccccagggggtctcacccatgcaagcagaggaccagggccttttctggcaccgcagttttgttttaaaactggacctgtatatttgtaaagctatttatgggcccctggcactcttgttcccacaccccaacacttccagcatttagctggccacatggcggagagttttaatttttaacttattgacaaccgagaaggtttatcccgccgatagagggacggccaagaatgtacgtccagcctgccccggagctggaggatcccctccaagcctaaaaggttgttaatagttggaggtgattccagtgaagatattttatttcctttgtcctttttcaggagaattagatttctataggatttttctttaggagatttattttttggacttcaaagcaagctggtattttcatacaaattcttctaattgctgtgtgtcccaggcagggagacggtttccagggaggggccggccctgtgtgcaggttccgatgttattagatgttacaagtttatatatatctatatatataatttattgagtttttacaagatgtatttgttgtagacttaacacttcttacgcaatgcttctagagttttatagcctggactgctacctttcaaagcttggagggaagccgtgaattcagttggttcgttctgtactgttactgggccctgagtctgggcagctgtcccttgcttgcctgcagggccatggctcagggtggtctcttcttggggcccagtgcatggtggccagaggtgtcacccaaaccggcaggtgcgattttgttaacccagcgacgaactttccgaaaaataaagacacctggttgctaacctggaaaaaaaaaaaaaaaaa

SEQ ID NO: 81 - DNA, 1865 bp, Homo Sapiens
ctgcgcaatgcgcgcggtgatggagcgctaaccgggggcgcggcggcggcgagggctcggcgggccattggctaccggccgcggcaaaggcagcttggggacccagcgtgcgcggggcccgcgggccgggccggggtgacctgggctgcagccatggaagaacagagggaggccctgaggaagatcatcaaaacactggctgtgaagaatgaagaaattcagagctttatctactccctgaaacagatgctgctgaacgtggaggcgaactcggcgaaggtgcaggaggacctcgaagcagagttccagtccctcttctccctcctggaggagctgaaagaaggcatgcttatgaagataaaacaggaccgtgccagccgtacctacgagctgcagaaccagctggctgcctgcacgcgggccctggagagctccgaggagcttctggagacagccaaccagactctgcaggccatggacagcgaggactttcctcaggctgccaagcaaatcaaagatggagtgaccatggcccctgccttccggctatcattgaaagcgaaggtcagtgacaacatgagtcacctcatggtggacttcgcgcaagagcggcagatgctacaggcactcaagttcctgcctgtgcccagcgcacccgtgatcgacctggctgagtccctggtggcagataactgtgtgaccctggtgtggcgcatgccggatgaggacagcaagattgaccactacgtgctggagtaccggcggaccaacttcgagggcccgccccgcctcaaggaggaccagccctggatggtcatcgagggcatccggcagacagagtacaccctgacaggtctcaagtttgacatgaaatacatgaacttccgtgtgaaggcctgtaacaaggcagttgcaggagagttctctgagccggtgactctggagacaccagcgttcatgttccgcctggatgcgtccacatcccaccagaacctgcgggtggatgatctctccgtggagtgggacgctatgggcgggaaggtgcaggatatcaaggctcgcgagaaagatggcaaggggcggacggcgtctcccatcaactccccagccagaggtactccatctcccaagaggatgccctcaggtcgtgggggacgggaccgcttcaccgctgagtcctacacagttctgggggacacgctgatcgacggcggggagcattactgggaggtgcgctacgagccggacagcaaggcgttcggcgtgggcgtggcctaccgcagcctgggccgcttcgagcaactgggcaagacggccgcctcctggtgcctgcacgtcaacaattggctgcaggtcagcttcacggccaagcacgccaacaaggtcaaggtgctggacgcccccgtgcccgactgcctgggtgtgcactgtgacttccaccaaggcctcctgtccttctacaatgcccgcaccaaacaagtgctgcacactttcaagaccaggttcacacagccgctgctgcctgctttcacggtatggtgtggcagcttccaggtgacgacaggcctgcaggtccccagtgctgtgcgctgcctgcaaaagcgaggcagtgctaccagcagctccaacaccagcctcacctaggcccccaggcacccacccagctggggtgtttttgggggagtcgccgccaagcccaggctgctggagccaggcaccctcctctgtcacttgctgcttggagccttaactccagatgggggggtcaccaagagggagtgggcaccctggcgggccctctccccacctcacctcttaataaaggtcagacactggccaggcgaggcaaaaaaaaaaaaaaaaaa

SEQ ID NO: 82 - DNA, 3343 bp, Homo Sapiens
tttgcagtgcgcaggcgcatcaatgaggtactgcaatgtcccggaccgtatagtttccaggacgtctcgccgcgcgcatgcgcagaaacactgggcacagggggaggtaactgcagtaagtcccgcttggccctggagtccacgcggattttcgaagctggggctggcaagaggccgctggacaccacgctccagtcgtcagcccacttcctagctgaacagcgcgaggcggcggcagcgagccgggtcccaccatggccgcgaattattccagtaccagtacccggagagaacatgtcaaagttaaaaccagctcccagccaggcttcctggaacggctgagcgagacctcgggtgggatgtttgtggggctcatggccttcctgctctccttctacctaattttcaccaatgagggccgcgcattgaagacggcaacctcattggctgaggggctctcgcttgtggtgtctcccgacagcatccacagtgtggctccggagaatgaaggaaggctggtgcacatcattggcgccttacggacatccaagcttttgtctgatccaaactatggggtccatcttccggctgtgaaactgcggaggcacgtggagatgtaccaatgggtagaaactgaggagtccagggagtacaccgaggatgggcaggtgaagaaggagacgaggtattcctacaacactgaatggaggtcagaaatcatcaacagcaaaaacttcgaccgagagattggccacaaaaaccccagtgccatggcagtggagtcattcatggcaacagccccctttgtccaaattggcaggtttttcctctcgtcaggcctcatcgacaaagtcgacaacttcaagtccctgagcctatccaagctggaggaccctcatgtggacatcattcgccgtggagactttttctaccacagcgaaaatcccaagtatccagaggtgggagacttgcgtgtctccttttcctatgctggactgagcggcgatgaccctgacctgggcccagctcacgtggtcactgtgattgcccggcagcggggtgaccagctagtcccattctccaccaagtctggggataccttactgctcctgcaccacggggacttctcagcagaggaggtgtttcatagagaactaaggagcaactccatgaagacctggggcctgcgggcagctggctggatggccatgttcatgggcctcaaccttatgacacggatcctctacaccttggtggactggtttcctgttttccgagacctggtcaacattggcctgaaagcctttgccttctgtgtggccacctcgctgaccctgctgaccgtggcggctggctggctcttctaccgacccctgtgggccctcctcattgccggcctggcccttgtgcccatccttgttgctcggacacgggtgccagccaaaaagttggagtgaaaagaccctggcacccgcccgacacctgcgtgagccctaggatccaggtcctctctcacctctgacccagctccatgccagagcaggagccccggtcaattttggactctgcactccctctcctcttcaggggccagacttggcagcatgtgcaccaggttggtgttcaccagctcatgtcttccccacatctcttcttgccagtaagcagctttggtgggcagcagcagctcatgaatggcaagctgacagcttctcctgctgtttccttcctctcttggactgagtgggtacggccagccactcagcccattggcagctgacaacgcagacacgctctacggaggcctgctgataaagggctcagccttgccgtgtgctgcttctcatcactgcacacaagtgccatgctttgccaccaccaccaagcacatctgtgatcctgaagggcggccgttagtcattactgctgagtcctgggtcaccagcagacacactgggcatggacccctcaaagcaggcacacccaaaacacaagtctgtggctagaacctgatgtggtgtttaaaagagaagaaacactgaagatgtcctgaggagaaaagctggacatatactgggcttcacacttatcttatggcttggcagaatctttgtagtgtgtgggatctctgaaggccctatttaagtttttcttcgttactttgctgcttcatgtgtactttcctaccccaagaggaagttttctgaaataagatttaaaaacaaaacaaaaaaaacacttaatatttcagactgttacaggaaacaccctttagtctgtcagttgaattcagagcactgaaaggtgttaaattggggtatgtggtttgattgataaaaagttacctctcagtattttgtgtcactgagaagctttacaatggatgcttttgaaacaagtatcagcaaaaggatttgttttcactctgggaggagagggtggagaaagcacttgctttcatcctctggcatcggaaactcccctatgcacttgaagatggtttaaaagattaaagaaacgattaagagaaaaggttggaagctttatactaaatgggctccttcatggtgacgccccgtcaaccacaatcaagaactgaggcctgaggctggttgtacaatgcccacgcctgcctggctgctttcacctgggagtgctttcgatgtgggcacctgggcttcctagggctgcttctgagtggttctttcacgtgttgtgtccatagctttagtcttcctaaataagatccacccacacctaagtcacagaatttctaagttccccaactactctcacacccttttaaagataaagtatgttgtaaccaggatgtcttaaatgattctttgtgtaccttttctgtcatattcagaaaccgttttgtgcctgctgggagtaattcctttagcaattaagtatttggtagctgaataaggggtcagaacttctgaaaccagagatctgtaatcatctctattggcctggggtgcctgtgctataaatgagtttcttcacatgaaaaacacagccagcccaagatgacttatctgggtttaggattcaatagtattcactaactgcttattacatgagcaatttcatcaaatctccaaactcttaaaggatgctttcggaaaacacgctgtatacctagatgatgactaaatgcaaaatccttgggctttggtttttttctagtaaggattttaaataactgccgacttcaaaagtgttcttaaaacgaaagataatgttaagaaaaatttgaaagctttggaaaaccaaatttgtaatatcattgtattttttattaaaagttttgtaataaatttctaaattatca

SEQ ID NO: 83 - DNA, 2618 bp, Homo Sapiens
gtgaacgggttgtgggacctgtcgctgtgtgggggctgtcgagcactccccagaacgtaacaaatcctcaggggaactgatgggcggtcgcgcgggcactgggtcctccacaccctggagagccgttttccgttgccactcggctctggccggggtcacattctgcagcatgtctgttcattcccctgggcggggccctgcaccgactccagcccagcccctgctccctctgcggggaacgtggccccaggcagtgctgggccattggctgtcagtgctggtcctggcggctgcattcccagtccccttggtctctgtgacagtgggcggggccggccctcccaggatctgacggcgcaggtcctccccttctgtgtcctgcagatggacacccgctccgggagccagtgttccgtcaccccagaagccatactcaataatgaaaagctggtcttgccgccccgcatctccagagtgaacggctggtcgttacccctgcactacttccaggtggtgacctgggctgtcttcgtgggcctttcctcggccaccttcgggatcttcattcccttcctgcctcacgcgtggaaatacattgcctacgtggtgaccggggggatcttctcgttccacctcgtcgtccacctgatcgcgtcctgcatcgacccggccgactccaatgtcagactcatgaagaactattctcagcccatgcccctcttcgacagatcaaaacatgcacacgtgatccagaatcagttctgccacctgtgcaaggtcaccgtgaacaagaaaaccaaacactgcatttcctgcaataagtgtgtgtccggcttcgaccaccactgcaaatggatcaacaactgcgtgggaagccggaattattggttcttcttcagcactgtggcctcggccacagctggcatgctctgcctgatcgccatcctgctgtatgtcctcgtccagtacctcgtgaaccccggggtgctccgcacggaccccaggtatgaagatgtcaagaatatgaacacgtggctgctgttcctccccctgttcccggtgcaggtgcagaccctgatagtcgtgatcatcgggatgctcgtgctcctgctggactttcttggcttggtgcacctgggccagctgctcatcttccacatctacctgaaggccaagaagatgaccacctttgagtatctcattaataaccgcaaagaagagagttcaaaacatcaagcagtgaggaaagatccatacgtgcaaatggacaaaggagttctccagcaaggagctggcgccctgggctcatctgcacagggagtcaaagccaagagctccctgctgattcacaagcacttatgtcacttctgcacttcagtaaaccaggatggggattcgacggcacgggaaggggatgaagacccgtgtccatctgcacttggagccaaggccaggaactcccggctgatttgcaggcgcctgtgtcagttctccactcgtgtacacccagacgggggctcgatggcacaggaagcagatgatgccccgagtatatctacacttgggctgcaacaagaaacaacagagcccatgaaaactgacagtgctgaaagtgaagactgagattcaggagctcaggtgcccctgtgatccaggtcttctaccctgaaaccccaccctccatcaaggtcctgcctgtagagtctaccttgcaaagcctcctgctcctacccatgctacaggccaggaaccagagcccatcatctcagaggcccctggatgtccttcgaaggaaccaggaccctcagagcccagcatccatctctgtcatcatcttcatcacacccaaagaagagccagccttgcaggagggtttacatctccaggaagatgggctgccagcaactgcagaggatgcagccacctgcttaactgtgctgtccagccagccagccagctgcagggcctcttgctgcttaagagctgatgggccgggcatgttggctcacacctgtgagcacagtactgggaaatgggagcacagtactaggaaatgggagcacagtactgggaaatgggagcacagtactgggaaatgggggctcacagcactgcaaaatgggagcacagtattgggaaatgggagcacagtactgggaagtgggagcacagtactgagaagtgggagcacagtactgagaaatgggagtacactactgagaaatgggagcacagtactgggaaatgggcatacagtactgagaaatgggagcacacagtactgggaaatgggagcacagtactgggaaatgggagcccacagtactgggaaaggggagttcacagtactcggaaatgggagcatagtactgggaaatgggagcacagtactgggaaatgggagcatagtactgggaaaccccagacctggattctgagtttttcagcctagcccagacttcttatcttagtagacaaaaagagtcaataccagagaaccagaggcatcctctgtattttaatgaactctgcattttaatctgtttagtagtcattttttaaaagataatcagttttccaaatatatctataagttactacgtgcaaaaaaaaaaaaa

SEQ ID NO: 84 - DNA, 2477 bp, Homo Sapiens
cttgtagcggacattttgtttctgtcaggctgtccctggccggggttctgtaacgcttgtgtgggccgcaggtggaggtgttgggaaagcgcggaggagatgttgtccccagtgtcccgagacgcgtctgatgctctgcagggacggaagtgcctgcgtccccgatcgagacgcctgccgctcccggcagctgtccgcgcccacggtcctatggcggagctaacggactccgcgcggggctgtgtggtctttgaggatgtgtttgtatacttctctcgggaagaatgggagcttcttgatgatgctcagagacttttgtaccatgatgtgatgctggagaactttgcacttttagcctcactgggaattgcattttccagatcacgtgcagtcatgaaactagagcgaggagaagagccctgggtgtatgaccaggtggatatgacttcagccacagaaagagaggcccagaggggacttagacctggttgttggcatggagtggaggatgaagaggtatcttctgagcagagcatttttgtagcaggagtgtcagaggtcaggactctcatggcagagctggagtctcacccatgtgacatatgtggcccaatattgaaagataccttacacctggctaaataccatgggggaaaagccaggcagaaaccatacttgtgtggggcatgtggaaagcaattctggttcagtacagactttgaccagcaccagaaccagcccaatggagggaaacttttcccaaggaaggagggcagagactctgtgaaaagctgcagagtccatgtgccagagaagaccctcacatgtgggaaaggtaggagagacttttcagccacatctggccttcttcagcatcaggcctctctcagcagcatgaagccccacaagagcactaagcttgtgagtggctttctcatgggacagaggtatcacaggtgtggtgaatgtgggaaagccttcacccgcaaagacacacttgctcggcatcagagaatccacactggagaaaggccttatgagtgtaacgaatgtgggaaattcttcagccaaagctatgacctctttaaacaccagacagttcacactggagaaaggccatacgagtgcagcgaatgtgggaaattctttagacaaatctccggcctgattgagcacaggcgagttcacacgggtgaaagactctatcagtgtggcaaatgtgggaaattttttagcagtaagtctaatctcattcgacaccaggaagttcacacaggagccaggccttatgtatgcagcgaatgtgggaaagagttcagtcggaaacacacacttgttctgcaccaacgaactcacactggagaaaggccttatgagtgcagtgaatgtgggaaggcctttagccaaagctcccaccttaatgtacactggagaattcacagcagtgattatgagtgtagcagatgtggtaaagctttcagctgcatctccaaactcattcagcaccagaaagttcactctggagaaaagccttatgagtgcagcaagtgcgggaaagccttcactcaaagacccaacctcatcaggcactggaaagtccacactggggaaaggccttatgtgtgtagtgagtgcgggagagaattcatccggaaacagacacttgttctgcaccagagggttcatgctggagaaaagctttaagagtgtagcaaatgtgggggaaagtcttaggccaatgcccctgacttactatatggtggggaactagcagtagttaatgagtgcagcagatgcaggaaagccttcccctggaggctgaaccttacccgccattgggaatttcacaccggacacaggccttagcagtctaagcaatgtgctgtctctgttcagcccaacagctcaccctagagtggaactctgggagcagccattgggagggaaccatcagtaagaagtgaaacttcatagatatggacattcccactggggagattccctgtgagtgtcaagtatgtgagatgctttcagcagctgtgttgcactttttaaatggctattggcctttgctggggcaggagccatctgctcctaccatctggcagaatcatactgcgtttaccatttaccccagcatgcttgtgacgggcagacctctcttctctccccagtccctaaaaggtgttgtgagtggtctcacagcccactaggggtcttaatttcctctcttttgatgtaaatggcatggaaataatcagctttgttcaagaggacacagaaggattctgcaaatagcctgcagagacttacctgtgttgattgatttcatatgatgctcgttatggatatatccaatatccaagtcacccagctctggaactgcctgcttcacattgctcatgataataaaggcctgttctttaagccaccaaaaaaaaaaaaaaaaaaaaaaaaaaaaaaaaaaaaaaaaaaaa

SEQ ID NO: 85 - DNA, 2195 bp, Homo Sapiens
ggggcggaagtgacgtcgtgtggggcgggtccgaccgcgcacaatgggccatggagttcccgttcgatgtggacgcgctgttcccggagcggatcacggtgctggaccagcacctgaggcccccagcccgccgacccggaaccacaacgccggcccgtgttgatctacagcagcaaattatgaccattatagatgaactgggcaaggcttctgccaaggcccagaatctttccgctcctatcactagtgcatcaaggatgcagagtaaccgccatgttgtttatattctcaaagacagttcagcccgaccggctggaaaaggagccattattggtttcatcaaagttggatacaagaagctctttgtactggatgatcgtgaggctcataatgaggtagaaccactttgcatcctggacttttacatccatgagtctgtgcaacgccatggccatgggcgagaactcttccagtatatgttgcagaaggagcgagtggaaccgcaccaactggcaattgaccgaccctcacagaagctgctgaaattcctgaataagcactacaatctggagaccacagtcccacaggtgaacaactttgtgatctttgaaggcttctttgcccatcaacatcggccccctgctccctctctgagggcaactcgacactctcgtgctgctgcagtcgatcccacgcccgctgctccagcaaggaagctgccacccaagagagcagagggagacatcaagccatactcctctagtgaccgagaatttctgaaggtagctgtggagcctccttggcccctaaacagggcccctcgccgcgccacacctccagcccacccacccccccgctccagcagcctgggaaactcaccagaacgaggtcccctccgcccctttgtgccagagcaggagctgctgcgttccttgcgcctctgccccccacaccctaccgcccgccttctgttggctgctgaccctgggggcagcccagctcaacgtcgtcgcaccagctcccttccccgctctgaggagagtcgatactaacagctaccctctccctgccctgggagacctggggtgggcagggaacccctccctgagaacctcagacccactcttccattgcatcctgtaggacccagtggaacctgacagagcccataggattccctcttctactttcttagacagcagggatgtcagggtctcaaactgcctaacactttgtagcttttcttaacacaaaagcaccccttctctcctaacttgggctctgaatactttcccaacaggaagtctgatctgttgccagacttcttggttagatggctcatacatttatctagagaagcacactcttgcttgctgtcaaactttagaccaccatggaaggtctaagggcatcctgtgccagggaaactttttaaggaattttatctatgggataaaccccatattccctctagtgtctactggtggctctaatactgctttgtgctgcctgccacacttgccctttgagcctgcgaatggccgctagtgagcaagctctgcttcagagcagtctagttaggtagaacagggacttaccagcttcccaaagggatctactcaccattgccaaactcttcatttccacattttgtgtaggtgtcagggaaccccaaactggtgttgctttggggtctctaaaggagattggctgacaccaccatttcccccagatccagattctctgagggaggttgtttcttgagagtagatccagagtgtcaaggatctgttagatcctggaatcccttcttgcatccatccctccctggtagctaggtcccgatatactcctgtcttgtgagattgtcgagatgagatgggggaccactcttcctctgtccttcctctctcctttcctccatagcaaggacgaccttccctgctccatgcccagagtatagctagatcccttcccctccctaccctctgaatgtgtgctagatcaggtgccccactgtgtttcctgaaatccttgggagccggatctccccatctcccctactcactcttcccttttcttctctcagtgttgtctgaataaagtgtgaaatcttttgtgttttctaaattgacattttcaatgaaaaaaagaatcacaaaaaaaaaaaaaaaaaaaaaaaaaaaaaaaaaaaa

SEQ ID NO: 86 - DNA, 5046 bp, Homo Sapiens
tgcccccactcccaactcccgccccaagccgcccaccagcccccttcccctccggccggagcctgaaccgagcccggctggctgtgctgcgcggtgccgccgggaaagatggtcgtggcgctgcggtacgtgtggcctctcctcctctgcagcccctgcctgcttatccagatccccgaggaatatgaaggacaccatgtgatggagccacctgtcatcacggaacagtctccacggcgcctggttgtcttccccacagatgacatcagcctcaagtgtgaggccagtggcaagcccgaagtgcagttccgctggacgagggatggtgtccacttcaaacccaaggaagagctgggtgtgaccgtgtaccagtcgccccactctggctccttcaccatcacgggcaacaacagcaactttgctcagaggttccagggcatctaccgctgctttgccagcaataagctgggcaccgccatgtcccatgagatccggctcatggccgagggtgcccccaagtggccaaaggagacagtgaagcccgtggaggtggaggaaggggagtcagtggttctgccttgcaaccctcccccaagtgcagagcctctccggatctactggatgaacagcaagatcttgcacatcaagcaggacgagcgggtgacgatgggccagaacggcaacctctactttgccaatgtgctcacctccgacaaccactcagactacatctgccacgcccacttcccaggcaccaggaccatcattcagaaggaacccattgacctccgggtcaaggccaccaacagcatgattgacaggaagccgcgcctgctcttccccaccaactccagcagccacctggtggccttgcaggggcagccattggtcctggagtgcatcgccgagggctttcccacgcccaccatcaaatggctgcgccccagtggccccatgccagccgaccgtgtcacctaccagaaccacaacaagaccctgcagctgctgaaagtgggcgaggaggatgatggcgagtaccgctgcctggccgagaactcactgggcagtgcccggcatgcgtactatgtcaccgtggaggctgccccgtactggctgcacaagccccagagccatctatatgggccaggagagactgcccgcctggactgccaagtccagggcaggccccaaccagaggtcacctggagaatcaacgggatccctgtggaggagctggccaaagaccagaagtaccggattcagcgtggcgccctgatcctgagcaacgtgcagcccagtgacacaatggtgacccaatgtgaggcccgcaaccggcacgggctcttgctggccaatgcctacatctacgttgtccagctgccagccaagatcctgactgcggacaatcagacgtacatggctgtccagggcagcactgcctaccttctgtgcaaggccttcggagcgcctgtgcccagtgttcagtggctggacgaggatgggacaacagtgcttcaggacgaacgcttcttcccctatgccaatgggaccctgggcattcgagacctccaggccaatgacaccggacgctacttctgcctggctgccaatgaccaaaacaatgttaccatcatggctaacctgaaggttaaagatgcaactcagatcactcaggggccccgcagcacaatcgagaagaaaggttccagggtgaccttcacgtgccaggcctcctttgacccctccttgcagcccagcatcacctggcgtggggacggtcgagacctccaggagcttggggacagtgacaagtacttcatagaggatgggcgcctggtcatccacagcctggactacagcgaccagggcaactacagctgcgtggccagtaccgaactggatgtggtggagagtagggcacagctcttggtggtggggagccctgggccggtgccacggctggtgctgtccgacctgcacctgctgacgcagagccaggtgcgcgtgtcctggagtcctgcagaagaccacaatgcccccattgagaaatatgacattgaatttgaggacaaggaaatggcgcctgaaaaatggtacagtctgggcaaggttccagggaaccagacctctaccaccctcaagctgtcgccctatgtccactacacctttagggttactgccataaacaaatatggccccggggagcccagcccggtctctgagactgtggtcacacctgaggcagccccagagaagaaccctgtggatgtgaagggggaaggaaatgagaccaccaatatggtcatcacgtggaagccgctccggtggatggactggaacgccccccaggttcagtaccgcgtgcagtggcgccctcaggggacacgagggccctggcaggagcagattgtcagcgaccccttcctggtggtgtccaacacgtccaccttcgtgccctatgagatcaaagtccaggccgtcaacagccagggcaagggaccagagccccaggtcactatcggctactctggagaggactacccccaggcaatccctgagctggaaggcattgaaatcctcaactcaagtgccgtgctggtcaagtggcggccggtggacctggcccaggtcaagggccacctccgcggatacaatgtgacgtactggagggagggcagtcagaggaagcacagcaagagacatatccacaaagaccatgtggtggtgcccgccaacaccaccagtgtcatcctcagtggcttgcggccctatagctcctaccacctggaggtgcaggcctttaacgggcgaggatcggggcccgccagcgagttcaccttcagcaccccagagggagtgcctggccaccccgaggcgttgcacctggagtgccagtcgaacaccagcctgctgctgcgctggcagcccccactcagccacaacggcgtgctcaccggctacgtgctctcctaccaccccctggatgaggggggcaaggggcaactgtccttcaaccttcgggaccccgaacttcggacacacaacctgaccgatctcagcccccacctgcggtaccgcttccagcttcaggccaccaccaaagagggccctggtgaagccatcgtacgggaaggaggcactatggccttgtctgggatctcagattttggcaacatctcagccacagcgggtgaaaactacagtgtcgtctcctgggtccccaaggagggccagtgcaacttcaggttccatatcttgttcaaagccttgggagaagagaagggtggggcttccctttcgccacagtatgtcagctacaaccagagctcctacacgcagtgggacctgcagcctgacactgactacgagatccacttgtttaaggagaggatgttccggcaccaaatggctgtgaagaccaatggcacaggccgcgtgaggctccctcctgctggcttcgccactgagggctggttcatcggctttgtgagtgccatcatcctcctgctcctcgtcctgctcatcctctgcttcatcaagcgcagcaagggcggcaaatactcagtgaaggataaggaggacacccaggtggactctgaggcccgaccgatgaaagatgagaccttcggcgagtacaggtccctggagagtgacaacgaggagaaggcctttggcagcagccagccatcgctcaacggggacatcaagcccctgggcagtgacgacagcctggccgattatgggggcagcgtggatgttcagttcaacgaggatggttcgttcattggccagtacagtggcaagaaggagaaggaggcggcagggggcaatgacagctcaggggccacttcccccatcaaccctgccgtggccctagaatagtggagtccaggacaggagatgctgtgcccctggccttgggatccaggcccctccctctccagcaggcccatgggaggctggagttggggcagaggagaacttgctgcctcggatccccttcctaccacccggtccccactttattgccaaaacccagctgcaccccttcctgggcacacgctgctctgccccagcttgggcagatctcccacatgccaggggcctttgggtgctgttttgccagcccatttgggcagagaggctgtggtttgggggagaagaagtaggggtggcccgaaagggtctccgaaatgctgtctttcttgctccctgactgggggcagacatggtggggtctcctcaggaccagggttggcaccttccccctcccccagccactccccagccagcctggctgggactgggaacagaactcggtgtccccaccatctgctgtcttttctttgccatctctgctccaaccgggatgggagccgggcaaactggccgcgggggcaggggaggccatctggagagcccagagtccccccactcccagcatcgcactctggcagcaccgcctcttcccgccgcccagcccaccccatggccggctttcaggagctccatacacacgctgccttcggtacccaccacacaacatccaagtggcctccgtcactacctggctgcggggcgggcacacctcctcccactgcccactggccggcctcttccagccgcccccaccccccaggaccccttagcagccctgccctccctatcgtctgaacagttgtcttcctcagcctcctcccgcccccaccttgggaatgtaaatacaccgtgactttgaaagtttgtacccctgtccttccctttacgccactagtgtgtaggcagatgtctgagtccctaggtggtttctaggattgatagcaattagctttgatgaacccatcccaggaaaaataaaaacagacaaaaaaaaaggaaagattggttctcccagcactgctcagcagccacagcctccctgtatgcctgtgcttggtctactgataagccctctacaaaaaaacaaaagtatatatatatatgtacataatatcagaattataacaggcaaataaaacctgaaaatcaaaaaaaaaaaaaaaaaaa

SEQ ID NO: 87 - DNA, 2561 bp, Homo Sapiens
ggccacccccgggcggcttgtagccggtgcgcggggtggctggggctacgtgcagagctgtcgcggagccggagcagcagcggtgaagcccctcggctcggccgagaccgccgtgcccattgctcgcctcggttgccgccgctttagccgcagccgctgctgccgccgccgggggagaggcagcctattgtctttctccgcggcgaaggtgaggagctgtctcggctcggcccgcgggggagccccgggagccgcacggagatggaggaggacatctggacagtgagcaggaggcgcttcggcccatgccgaacatcccaggggacctggagagccgggaggccatggtggcatttttcaactccgctggagccaatgcccaggaggaacaaagggtgtgctgccagcccctggctcacccagtggcctcgtcccagaaaaagccagaggtagcggccccagccccagagagtgggggtgagtctgtgtttggggagacccaccgggccctgcagggggccatggagaagctgcagcgactttatggaaggagaaggtggacctgaaggagcgggtagagaaactagagcttcaattcatccacctctcaggacagacagacaccatagggagaaagtacatcagccagggggcagtgtcagagacgcagcactgggagaggaggacatcgtcaggctggcccaggaccaggaggagatgaaggtgaacctgcaggagctgcggggcaggtgttgcagcttgtgggagaccacaaggaggggcatggcaaattctgaccattgcccagaaccctgctgatgagcccactctaggagccccaatagcccaggagcttgggtgtgctgacgagcagggtgatcaccactggattgctgacagatagaggacgtgggaccgtgactatcacccctaatctgcagtggatttggctctcggcactcccaggctgggagctggatacctgccctggcagcatgactcagactgcatgacagtcacagactcgcctctgctcctgtggtccagtggccggacaccccctgggatggctcaaaggagtcaggacttggaagtggggacatcagggtagctgaaggaaatccacacacccagagcatctcggagttcagactctcagacctgaagtaggcgcccccgggactgggctaggagttggacggaatggaggatggaggacagcgagaagaaaggaagagaaatgcaacgtgtgggcagccgccaagagtgaaaatagagggaagtgtcatgcaagtgctggacagaaggcggcaggtgggacgagccccacagccccctcctcaaaaacgaccacctccaggactcagtgatccctggggggcaggctctgccagccctcggccacacgtggctccggcacccatggtcccagtgccttggatggagacggccagttctggcggccagatgtggtgctctggaatccagtcccatttccttcctggccacgcctgtccagcggcctcttcagccgcattcagcccctacttacctggggaccccggctggggcacgagagcaccaggggggtagggcccaaagggatcaggggaagcctctggcctggagggtatggggcacgcttccccaagggcggacccggcaggaggaagcccaggagctgggtcctgccgcccaggagctgggccctgccacccaggccgggctagggacatggcagggcctgggcatcctgacgctggacttgggcgacctgggaggcacagggaggggagagatgggcgaccccgccccagcgcagtgccggccacaccccaaggcggttgccagagcttaagccccgcccccagcagcgagaacatcccagctccacaccccccccccccccccccggcagccagtgctccttgtcaagctccccccgtcactccaggtgggagccaccccggtgagggggtgtgccacttgcccccagggcactcctctgggcatcccgggtgggggattttggggccgtggggggcagtctttggtacctgtgttcgtcagggatgctctgacaaccaggtgtcgtccacgggcgggggcatgggcatggtgacagtggtcctgttgatgtcaccgatgatgctgagcgcctccttcagcgcgtggtgcatgtgcagcatctcgtcatgctgctgtgcctgctctgccaactcctccatcagtgtgttctggttcccacatgagtacatattggccagcggctccgagatgatgaactccggggtctgagagtgggcaaacagggaagaaggttgggacctggtgcctgtgccgccctggctgccttgctgggcccttctgggactgtgcgctggacttggagccccttggagtatggcttttcacacgggcttctataccgcttcgactggaagatccacctccccactgccttttctcactcagatggggacaccgaggtccagaggaaaagacacctgtcaaatgtcacagatctgggaggggacttaagacttatcatgccaagagga

SEQ ID NO: 88 - DNA, 3769 bp, Homo Sapiens
atagagcggctcccagcgttccctgcggcgtaggaggcggtccagactataaaagcggctgccggaaagcggccggcacctcattcatttctaccggtctctagtagtgcagcttcggctggtgtcatcggtgtccttcctccgctgccgcccccgcaaggcttcgccgtcatcgaggccatttccagcgacttgtcgcacgcttttctatatacttcgttccccgccaaccgcaaccattgacgccatgtcgggttattcgagtgaccgagaccgcggccgggaccgagggtttggtgcacctcgatttggaggaagtagggcagggcccttatctggaaagaagtttggaaaccctggggagaaattagttaaaaagaagtggaatcttgatgagctgcctaaatttgagaagaatttttatcaagagcaccctgatttggctaggcgcacagcacaagaggtggaaacatacagaagaagcaaggaaattacagttagaggtcacaactgcccgaagccagttctaaatttttatgaagccaatttccctgcaaatgtcatggatgttattgcaagacagaatttcactgaacccactgctattcaagctcagggatggccagttgctctaagtggattggatatggttggagtggcacagactggatctgggaaaacattgtcttatttgcttcctgccattgtccacatcaatcatcagccattcctagagagaggcgatgggcctatttgtttggtgctggcaccaactcgggaactggcccaacaggtgcagcaagtagctgctgaatattgtagagcatgtcgcttgaagtctacttgtatctacggtggtgctcctaagggaccacaaatacgtgatttggagagaggtgtggaaatctgtattgcaacacctggaagactgattgactttttagagtgtggaaaaaccaatctgagaagaacaacctaccttgtccttgatgaagcagatagaatgcttgatatgggctttgaaccccaaataaggaagattgtggatcaaataagacctgataggcaaactctaatgtggagtgcgacttggccaaaagaagtaagacagcttgctgaagatttcctgaaagactatattcatataaacattggtgcacttgaactgagtgcaaaccacaacattcttcagattgtggatgtgtgtcatgacgtagaaaaggatgaaaaacttattcgtctaatggaagagatcatgagtgagaaggagaataaaaccattgtttttgtggaaaccaaaagaagatgtgatgagcttaccagaaaaatgaggagagatgggtggcctgccatgggtatccatggtgacaagagtcaacaagagcgtgactgggttctaaatgaattcaaacatggaaaagctcctattctgattgctacagatgtggcctccagagggctagatgtggaagatgtgaaatttgtcatcaattatgactaccctaactcctcagaggattatattcatcgaattggaagaactgctcgcagtaccaaaacaggcacagcatacactttctttacacctaataacataaagcaagtgagcgaccttatctctgtgcttcgtgaagctaatcaagcaattaatcccaagttgcttcagttggtcgaagacagaggttcaggtcgttccaggggtagaggaggcatgaaggatgaccgtcgggacagatactctgcgggcaaaaggggtggatttaatacctttagagacagggaaaattatgacagaggttactctagcctgcttaaaagagattttggggcaaaaactcagaatggtgtttacagtgctgcaaattacaccaatgggagctttggaagtaattttgtgtctgctggtatacagaccagttttaggactggtaatccaacagggacttaccagaatggttatgatagcactcagcaatacggaagtaatgttccaaatatgcacaatggtatgaaccaacaggcatatgcatatcctgctactgcagctgcacctatgattggttatccaatgccaacaggatattcccaataagactttagaagtatatgtaaatgtctgtttttcataattgctctttatattgtgtgttatctgacaagatagttatttaagaaacatgggaattgcagaaatgactgcagtgcagcagtaattatggtgcactttttcgctatttaagttggatatttctctacattcctgaaacaatttttaggttttttttgtactagaaaatgcaggcagtgttttcacaaaagtaaatgtacagtgatttgaaatacaataaatgaaggcaatgcatggccttccaataaaaaatatttgaagactgaattaagtggaaattgtactttattttatataatgtcatgtaaaactttgcttaagatggtctggttttttttttgtttttgtttggttttttttttccatgaaaacaaatgactgttcctttttatttaatttgggaggcagggggaatcagaaggcccttctttataatgagctattcatattgcaggagtcagaatgaattgatacaggtgaatttttagttacaggctaaattgcataaaagctttgtcagcttccagcatcaggggagtcatttaatagcctttttccttatttgctagtatggttaaatgagaaaatagtaaaatagatacaaagtcatctatatagtgtgagaacgtgggtgactttttcaaagtttataatttaaaaagctccaaataactggctttttcaagagacttatactcatgctcttggctatactgtgaattactgaaatgttgaacaaacctgtgaaagacatacattagccctttaagatggccaggagctaagcttgagtctcctttactgaatttcgttcttagtgcaggttacttgtagattctagtcttcacaggctccctggggctcttaactagtcacactgggagtcatgaatgtctttccaataattcagggaattctagagatcctcaaactgtaaggtctattcatactcaacacaaggaaaaaacctcattaaaattaatgactaatcaggaggcaacgtaaccaaaagcacagtgaatgaaagttttcatggtaggttcaacatgggtttattgctagaaagatccaggggatagctttaggtttaacttcggctcaccaacgtaactttctaatcatttatttcagtaatagctagaagtgggtctgaatgttttcccagagtctgatacgtgtttttttttgccagaagagaggtcttcaggagacttcatttaaattctgattattaaactgaggctttaattgatgttaatgccttatgtcaaatgtaaagttagaatttgctagggctgggatagggagtgatatttctaggacttagacattgaaaactaattcagcctgtagtaacctggatggttttcaatggcatggttagtcaaattcatggttttaaacttagaagcagctttcgggggagagggtaggttggagcatttattacatattttactgtttaatgtcttaaccgtgggccttttaatttgtaaacactgaaatgattgttgggctgtggaaaacatttacctatttaccttggaagttttaaaagacagtccactttttagcatgtgtgttgtgtccagcctgtggtcgtcttaactaataaatgtgatttttctcccaaaaaaaaaa

SEQ ID NO: 89 - DNA, 1497 bp, Homo Sapiens
gtggcggcgcgagcccggaagcggacgggggcggtggcggaggagcctcgggtgggccggggttgctgcgccgtcctccactactggctactggcgctgcagccatgcagcccccgcccccgggcccgctgggcgactgcctgcgggactgggaggatctacagcaggacttccagaacatccaggagacccatcggctctaccgcctgaagctggaggagctgaccaaacttcagaacaattgcaccagctccatcacgcggcagaagaagcggctccaggagctggccctcgccctgaagaaatgcaaaccctccctcccagcagaggccgagggggccgcacaggagctggagaaccagatgaaagagcgccaaggcctcttctttgacatggaggcctatttgcctaagaagaatggattgtacctgagcctggttctggggaacgtcaacgtcacgctcctgagcaagcaggctaagtttgcctacaaggacgagtatgagaagttcaagctctacctcaccatcatcctcatcctcatctccttcacttgccgcttcctgctcaactccagggtgacagatgctgccttcaacttcctgctggtctggtactactgcaccctgaccatccgggagagcatcctcatcaacaacggctcccggatcaaaggctggtgggtgttccatcactacgtgtccaccttcctgtcgggagtcatgctgacgtggcccgacggtctcatgtaccagaaattccggaaccaattcctctccttttccatgtaccagagcttcgtgcagtttctccagtactactaccagagcggctgcctctaccgcctgcgggcgctgggcgagcggcacaccatggacctcactgtggagggcttccagtcctggatgtggcggggcctcaccttcctgctgccttttcttttctttggacacttctggcagctttttaacgcgctgacgttgttcaacctggcccaggaccctcagtgcaaggagtggcaggtgcttatgtgcggctttcccttcctcctccttttcctcggcaatttcttcaccaccctgagggttgtgcaccacaagtttcacagtcagcggcacgggagcaagaaggattgaggctgggccttcccctgccggcccagaggggcttctgtcctgtgtgttgtgggaggggatgggaggcgcccctcgagtgtgcgtgtatcagggggtctcttctattctcccttgggttttatgggcgctgtgggccctgaaggaagacctgggcccagtgccctcaataaagagaggcccagaggtggcctgagcgtgtgtgttctcctgggggaggggagggctgggtggccccaccacatgggttcctggggtctgagttagttaagttgatgcaggtggaggtcccagatctactcacacaataccaggcaaatacagaaaacagaactttaaaaaaaaaaaaaaaaaaaaaaaaaaa

SEQ ID NO: 90 - DNA, 2795 bp, Homo Sapiens
atcagcgagggattcacggcgaaatgagactgttcgtgagtgatggcgtcccgggttgcttgccggtgctggccgccgccgggagagcccggggcagagcagaggtgctcatcagcactgtaggcccggaagattgtgtggtcccgttcctgacccggcctaaggtccctgtcttgcagctggatagcggcaactacctcttctccactagtgcaatctgccgatatttttttttgttatctggctgggagcaagatgacctcactaaccagtggctggaatgggaagcgacagagctgcagccagctttgtctgctgccctgtactatttagtggtccaaggcaagaagggggaagatgttcttggttcagtgcggagagccctgactcacattgaccacagcttgagtcgtcagaactgtcctttcctggctggggagacagaatctctagccgacattgttttgtggggagccctatacccattactgcaagatcccgcctacctccctgaggagctgagtgccctgcacagctggttccagacactgagtacccaggaaccatgtcagcgagctgcagagactgtactgaaacagcaaggtgtcctggctctccggccttacctccaaaagcagccccagcccagccccgctgagggaagggctgtcaccaatgagcctgaggaggaggagctggctaccctatctgaggaggagattgctatggctgttactgcttgggagaagggcctagaaagtttgcccccgctgcggccccagcagaatccagtgttgcctgtggctggagaaaggaatgtgctcatcaccagtgccctcccttacgtcaacaatgtcccccaccttgggaacatcattggttgtgtgctcagtgccgatgtctttgccaggtactctcgcctccgccagtggaacaccctctatctgtgtgggacagatgagtatggtacagcaacagagaccaaggctctggaggagggactaaccccccaggagatctgcgacaagtaccacatcatccatgctgacatctaccgctggtttaacatttcgtttgatatttttggtcgcaccaccactccacagcagaccaaaatcacccaggacattttccagcagttgctgaaacgaggttttgtgctgcaagatactgtggagcaactgcgatgtgagcactgtgctcgcttcctggctgaccgcttcgtggagggcgtgtgtcccttctgtggctatgaggaggctcggggtgaccagtgtgacaagtgtggcaagctcatcaatgctgtcgagcttaagaagcctcagtgtaaagtctgccgatcatgccctgtggtgcagtcgagccagcacctgtttctggacctgcctaagctggagaagcgactggaggagtggttggggaggacattgcctggcagtgactggacacccaatgcccagtttatcacccgttcttggcttcgggatggcctcaagccacgctgcataacccgagacctcaaatggggaacccctgtacccttagaaggttttgaagacaaggtattctatgtctggtttgatgccactattggctatctgtccatcacagccaactacacagaccagtgggagagatggtggaagaacccagagcaagtggacctgtatcagttcatggccaaagacaatgttcctttccatagcttagtctttccttgctcagccctaggagctgaggataactataccttggtcagccacctcattgctacagagtacctgaactatgaggatgggaaattctctaagagccgcggtgtgggagtgtttggggacatggcccaggacacggggatccctgctgacatctggcgcttctatctgctgtacattcggcctgagggccaggacagtgctttctcctggacggacctgctgctgaagaataattctgagctgcttaacaacctgggcaacttcatcaacagagctgggatgtttgtgtctaagttctttgggggctatgtgcctgagatggtgctcacccctgatgatcagcgcctgctggcccatgtcaccctggagctccagcactatcaccagctacttgagaaggttcggatccgggatgccttgcgcagtatcctcaccatatctcgacatggcaaccaatatattcaggtgaatgagccctggaagcggattaaaggcagtgaggctgacaggcaacgggcaggaacagtgactggcttggcagtgaatatagctgccttgctctctgtcatgcttcagccttacatgcccacggttagtgccacaatccaggcccagctgcagctcccacctccagcctgcagtatcctgctgacaaacttcctgtgtaccttaccagcaggacaccagattggcacagtcagtcccttgttccaaaaattggaaaatgaccagattgaaagtttaaggcagcgctttggagggggccaggcaaaaacgtccccgaagccagcagttgtagagactgttacaacagccaagccacagcagatacaagcgctgatggatgaagtgacaaaacaaggaaacattgtccgagaactgaaagcacaaaaggcagacaagaacgaggttgctgcggaggtggcgaaactcttggatctaaagaaacagttggctgtagctgaggggaaaccccctgaagcccctaaaggcaagaagaaaaagtaaaagaccttggctcatagaaagtcactttaatagatagggacagtaataaataaatgtacaatctctata

SEQ ID NO: 91 - DNA, 3715 bp, Homo Sapiens
gaagagaaaagcataggaaaggaaacagtggtaataggaattggggtaaaatgaggatccttccccacaaacattgctattattcagctcatttcaaaggattccgctgctgccatttgtgagagccgctggaggctgagtgaaagtcattttgaaagactgatccaaagaagaatggaggccagagtggagcgtgctgtgcagaaaaggcaagtcttatttctttgtgtatttctgggaatgtcttgggctggcgccgaaccgcttcggtattttgtggcggaggaaaccgagagaggcacctttcttaccaacttggcaaaagacctagggttaggggtaggggaactgagagcccggggaactagaattgtttcagaccagaacatgcaaattttactgctcagttcgcttactggtgatctacttctaaatgagaaattggaccgagaggaactgtgtggccccagagagccctgtgtgctgcctttccagttgttattggaaaaaccttttcagattttccgtgctgaactatgggtcagagacatcaatgatcacgctccagtatttctagacagagagatttccttgaaaatattagaaagtaccactccaggggcggcatttctcctagagagtgcacaggattcagatgttggaaccaacagcctgagtaactacaccatcagccccaatgcctatttccatattaatgtccatgatagcggggaggggaatatctatcccgaattggtgctgaatcaagtgctggatcgggaagagataccagagttcagtttaaccctcaccgctttagacggcggctctcctccaagatcagggaccgccctcgtgcgcattctggttctagacgtaaatgacaacgcccctgattttgtgcggtcgctctacaaggtgcaggtgcccgaaaatagccccgttggttccatggttgtctccgtgtcagccagagatttagataccggaagtaatggggaaatagcctatgcattttcttacgccactgaaagaattctcaaaacgtttcaaatcaatccaacatctggcagtcttcatcttaaagcgcaattggactatgaggcaattcaaacttacacattaactattcaggccaaagacggcggcgggctttctggaaaatgcactgtagtggttgatgtaacagatataaacgataatcgacccgagctgctcctgtcttcacttactagcccaattgcagaaaactcacccgagacagtcgtggctgtttttaggattagagacagagattccgggaacaatggaaagacagtgtgctccatccaggacgatgtccccttcatcctgaagccatctgtcgaaaacttctatactctggtaacagagaaacctttggatcgagagaggaacactgagtacaacatcaccatcaccgtcaccgacttggggacacccaggctgaaaaccgagcacaacataaccgtgctggtctccgacgtcaatgacaacgctcccgccttcacccaaacctcctacaccctgtttgtccgtgagaacaacagccccgccctgcccatcggcagtgtcagcgccacagacagagactcgggcaccaacgcccaggtcatctactccctgctgccgtcccaggacccgcacctgcccctcgcctccctggtctccatcaacgcggacaacggccacctgtttgccctcaggtccctggactacgaggccctgcaggcgttcgagttccgcgtgggcgccacagaccgcggctcccccgcgctgagcagcgaggcgctggtgcgcgtgctggtgctggacgccaacgacaactcgcccttcgtgctgtacccgctgcagaacagctccgcgccctgcaccgagccgttgccccgggcggccgagccgggctacctggtgaccaaggtggtggcggtggacggcgactcgggccagaacgcctggctgtcgtaccagctgctcaaggccacggagcccgggctattcggcgtgtgggcgcacaatggcgaggtgcgtaccgccaggctgctgagcgagcgcgacgcagccaagcagaggctggtggtgctggtcaaggacaatggcgagcctccgcgctcggccaccgccacgctgcacgtgctcctggtggacggcttctcccagccctacctgcggctcccggaggcggccccggaccaggccaactcgctcaccgtctacctggtggtggcgttggcctcggtgtcttcgctcttcctcctctcggtgctcctgttcgtggcggtgcggctgtgcaggaggagcagggcggccccggtgggtcgctgctcggtgcctgagggcccctttccacgacatctggtggacttgagcggcaccgggaccctatcccagagctaccagtatgaggtgtgcctgactggaggctccgggacaaatgagttcaagtttctgaaaccaattatccccaacctgctaccccagagcacaggcagggaagtggaagaaaatcgcccatttcagaataatttgggtttctgataaagaatgtaaactaaatccgcgtctgtgaatacgtttctgattaggaacttattgcgaggttcccttaagggagtgtctttacatcatttcaaatatgtactcttgaagtcaagcaataaatttctatacataaaataggatcctgatttagtatcaagaacccttcacaaagcatgaaatgtatatgtgtaatgttttatgtcaaacaattatgcttaatatacagtctattaaatgtaagtcttgtttgagatattttaaattgctttccattgttttcaatctctactgagacttcctgagttgattagaaagctgtatgagtgtacctaccctagtctcagaagcatagactgtagagtatctttttaagcatttttaaaaaatgcttttaatgcatcatacactattttaacacttttaatctgagaagaagcatatgaggcatggtattttaggaatgaacaaatagatggtcttagagattcagtaagttcactaagttccactaactaataagtgacaaaactgagcatccatcccagatctgtctgactctgggtcagtgaccctgctccgattccatactgttttctgtcattagatatcacctggcaagtttctgcctaattaaggagaagtcttttatcatatttatactgctgtccaatcttttctatatttagaaataataatgtacatatttatctatggttttattttcttatacaccaaaagtcctgcttttctgggtcaattttcaactattattactaatgctctgatctgtccaaactcaagcggaaaacaaaattgaaagggcaacctgtgccttctcctttcttcagaacatatgactttcatttcccagaaaaaagattaatggtcctgagtaggaatattacataattttgattgcatcattagttaattattttcttcatattgtagattttctgcagtcacccatacttaacatttgtaatacattttcctgatttgaaagtttgtttttaaaagttttctattaattatagtgcactattgaatcaggaaaatttaagaaaaagaatagttagttttaaatgcataatatcaaagagaatcatagatgatcattaaatttttagaaattctcggaagttaaggagaagca

SEQ ID NO: 92 - DNA, 4872 bp, Homo Sapiens
agaatgggctctaggcgccgctgctcaccaatcagggaatgggaagctgcgcgccattgagtccctccctcccccgcctctaccacacaaagcggaatgagatggatactcacagatcctgacactggagacttagaagtattttccttcgctttctgatatattttggatgtagtcggcctaggacttcatagatacataagccgattcacaaccaaccagctcgagaaaccgcggaatatcggcttagagcctgccatggcgaatcggctacagcgcggggaccgcagtcggctgctgctgctgctgtgcattttcctggggacgctgcgggggttccgggccaggcagatccgatattcggtgccagaagagaccgaaaagggctccttcgtgggcaatatctccaaggacctggggctggagccccgggagctggcgaagcgcggagtccgcatcgtctccagagggaagacacagcttttcgctgtgaatccgcgaagcggcagcttgatcacggcaggcaggatagaccgggaggagctctgtgagacggtgtcctcctgttttttaaatatggaacttctcgtggaagacaccttgaagatttacggagtggaggtggaaataatagatattaatgataacgcccccagcttccaggaggacgaagtggagataaaagtcagtgagcacgcaattcctggggcgcgatttgctcttcctaatgctagggatccagatgtgggcgtgaactccctccagagctaccagctcagccctaataattacttttccttgcaactgcggggcagaacggatggggccaagaatccagagctagtactggagggaagcctggaccgagagaaagaggctgctcacctgctcctcctcacagctttagatggaggcgatcccatccgaaagggcgcagttcccattcgtgtggtggtcctcgatgtaaatgatcacatcccaatgtttacacagtccgtatatcgcgtgagtgttccagaaaacatcagctccggaactcgggtgctgatggttaatgcaacggatccagacgagggaatcaacggggaagtaatgtattcatttcggaacatggaaagcaaggcttctgaaatattccaattggattcacaaactggagaagttcaagtacgggggtctctggattttgaaaaatatagattctatgagatggaaattcaaggccaagatggtggaggtctctttaccaccacgacgatgttgatcactgttgtggatgtgaatgataacgctccagaaataactatcacctcttctattaattcaattctggaaaactctcctccaggtacagtgattgctcttctaaatgtgcaagatcaagattctggagaaaatggtcaagtctcctgttttattcctaaccacctgccttttaaattagaaaagacttatggaaattattacaaattgataacaagcagagtgctggacagggagttggtccagagctacaatataacgttgacagccacagaccagggaagcccgcctttgtctgcagaaactcatgtctggctgaatgtggcagatgacaacgataaccctcccgtttttcctcactcctcttactctgcctacattcccgaaaacaaccccaggggtgcctccatcttctcagtgaccgccctcgacccggacagcaaacagaatgccctggtcacttactctctgacggatgacactgtccagggggtgcctctgtcctcctatgtctctattaactccaacactggtgttctctatgccctacaatccttcgactatgagcagtttcgagacttagaactgagagtgatagcacgtgacagcggggacccgcccctcagcagcaacgtgtcgctgagcctgttcgtgctggaccagaacgacaatgcgcccgagatcctgtaccctgccctccccacagacggctccactggcgtggagctggcgccccgctctgcggaacctggctacctggtgaccaaggtggttgcggtggacaaagattcaggccagaacgcctggctgtcctatcgcctgcttaaggccagcgagccgggactcttcgcggtgggggagcacacgggcgaggtgcgtacagcgcgggcactgctggacagagacgcgctcaagcagagcctcgtggtggccgtccaggaccacggccagccccctctctcggccaccgtcacgctcaccgtggctgtggccgacagcatccccgaagtcctggcggacctcggcagcctcgagtctctggctaactctgaaacctcagacctctcgctgtacttggtggtggcggtggccgcagtctcctgcatcttcctggtctttgtcatcgtgctgctggcactcaggctgtggcgctggcataagtcacgcctgctgcaggcttctgaaggcgggttggcaggtatgcccacgtcacattttgtaggcgtggacggggtacaggctttcctgcaaacctattcccacgaggtctctctcattgcggactcgcagaagagtcacctgattttcccccagcccaactatggggacacgctcatcagccaggagagctgtgagaaaagcgagccactcttgatagctgaagactcagctatcattttaggcaaatgtgacccgacaagtaatcagcaagccccgcccaacacggactggcgtttctctcaggcccagagacccggcaccagcggctcccaaaatggcgatgacaccggcacctggcccaacaaccagtttgacacagagatgctgcaagccatgatcttggcgtccgccagtgaagctgctgatgggagctccaccctgggagggggtgccggcaccatgggattgagcgcccgctacggaccccagttcaccctgcagcacgtgcccgactaccgccagaatgtctacatcccaggcagcaatgccacactgaccaacgcagctggcaagcgggatggcaaggccccagcaggtggcaatggcaacaagaagaagtcgggcaagaaggagaagaagtaacatggaggccaggccaagagccacagggcggcctctccccaaccagcccagcttctccttacctgcacccaggcctcagagtttcagggctaacccccagaatactggtaggggccaaggccatgctccccttgggaaacagaaacaagtgcccagtcagcacctaccccttcccccccagggggttgaatatgcaaaagcagttccgctgggaacccccatccaatcaactgctgtacccatgggggtagtggggttactgtagacaccaagaaccatttgccacaccccgtttagttacagctgaactcctccatcttccaaatcaatcaggcccatccatcccatgcctccctcctccccaccccactccaacagttcctctttcccgagtaaggtggttggggtgttgaagtaccaagtaacctacaagcctcctagttctgaaaagttggaagggcatcatgacctcttggcctctcctttgattctcaatcttcccccaaagcatggtttggtgccagccccttcacctccttccagagcccaagatcaatgctcaagttttggaggacatgatcaccatccccatggtactgatgcttgctggatttagggagggcattttgctaccaagcctcttcccaacgccctggggaccagtcttctgttttgtttttcattgtttgacgtttccactgcatgccttgacttcccccacctcctcctcaaacaagagactccactgcatgttccaagacagtatggggtggtaagataaggaagggaagtgtgtggatgtggatggtgggggcatggacaaagcttgacacatcaagttatcaaggccttggaggaggctctgtatgtcctcaggggactgacaacatcctccagattccagccataaaccaataactaggctggacccttcccactacataatagggctcagcccaggcagccagctttgggctgagctaacaggaccaatggattaaactggcatttcagtccaaggaagctcgaagcaggtttaggaccaggtccccttgagaggtcagaggggcctctgtgggtgctgggtactccagaggtgccactggtggaagggtcagcggagccccagcaggaagggtgggccagccaggccattcttagtccctgggttggggaggcagggagctagggcagggaccaaatgaacagaaagtctcagcccaggatggggcttcttcaacagggcccctgccctcctgaagcctcagtccttcaccttgccaggtgccgtttctcttccgtgaaggccactgcccaggtccccagtgcgccccctagtggccatagcctggttaaagttccccagtgcctccttgtgcatagaccttcttctcccacccccttctgcccctgggtccccggccatccagcggggctgccagagaaccccagacctgcccttacagtagtgtagcgccccctccctctttcggctggtgtagaatagccagtagtgtagtgcggtgtgcttttacgtgatggcgggtgggcagcgggcggcgggctccgcgcagccgtctgtccttgatctgcccgcggcggcccgtgttgtgttttgtgctgtgtccacgcgctaaggcgaccccctcccccgtactgacttctcctataagcgcttctcttcgcatagtcacgtagctcccaccccaccctcttcctgtgtctcacgcaagttttatactctaatatttatatggctttttttcttcgacaaaaaaataataaaacgtttcttctgaaaagctg

SEQ ID NO: 93 - DNA, 3653 bp, Homo Sapiens
gatgagcttccccattccggccgcagccgacctagatcccagccctgccctttgctctcctgcttttcactgagtcccgaggctctggagggtgggcgtgagggtagccctggctgaggctcggaggtcctcccgggctgttcagagggccccaagcggtagccacgttctgatactggctagaagccaggggagggagcttggggtaaggggagggccctgagggaggggtcagacgctttaggaaagagttaatgcgaagagggggaggggataggacgaagaaaccgaagggaaagctcagggccgccaacttccagctgcagcggcgactttcagtttcatttccacggaccctcctgcctgggccgcagccgccgccgcgatgcccagtaagttcagctgccggcagctccgggaggcgggccagtgtttcgagagtttcctggtcgttcggggactggacatggagacagatcgcgagcggctgcggaccatttataaccgcgacttcaagatcagctttgggacccccgcccctggcttctcctccatgctgtatggaatgaagattgcaaatctggcctacgtcaccaagactcgggtcaggttcttcagactcgaccgctgggccgacgtgcggttcccagaaaagaggagaatgaagctggggtcagatatcagcaaacaccacaagtcactgctagccaagatcttttatgacagggctgagtatcttcatgggaaacatggtgtggatgtggaagtccaggggccccatgaagcccgagatgggcagctccttatccgcctggatttgaaccgcaaagaggtgctgaccctgaggcttcggaatggcggaacccagtctgttaccctcactcacctcttcccactctgccggacaccccagtttgctttctacaatgaagaccaggagttgccctgtccactgggccccggtgaatgctatgaactccatgtccattgtaagaccagctttgtgggctacttcccagccacagtgctctgggagctgctgggacctggggagtcgggttcagaaggagccggcacattctacattgcccgcttcttggctgccgtcgcccacagccccctggctgcacagctgaagcccatgactcccttcaagcggacccggatcaccggaaaccctgtggtgaccaatcggatagaggaaggagagagacctgaccgcgctaagggctatgacctggagttaagtatggcgctggggacatactacccacctccccgcctcaggcagctgctccccatgcttcttcagggaacaagtatcttcactgcccctaaggagatcgcagagatcaaggcccagctggagacagccctgaagtggaggaactatgaggtgaagctgcggctgctgctgcacctggaggaactgcagatggagcatgatatccggcactatgacctggagtcggtgcccatgacctgggaccctgtggaccagaaccccaggctgctcacgctggaggttcctggagtgactgagagccgcccctcagtgctacggggcgaccacctgtttgcccttttgtcctcggagacacaccaggaggaccccatcacatataagggctttgtgcacaaggtggaattggaccgtgtcaagctgagcttttccatgagcctcctgagccgctttgtggatgggctgaccttcaaggtgaactttaccttcaaccgccagccgctgcgagtccagcaccgtgccctggagctgacagggcgctggctgctgtggcccatgctctttcctgtggcacctcgggacgtcccgctgctgccctcagatgtgaaactcaagctgtacgaccggagtctggagtcaaacccagagcagctgcaggccatgaggcacattgttacgggcaccacccgtccagccccctacatcatctttgggcctccaggcaccggcaagactgtcacgttagtggaggcaattaagcaggtggtgaagcacttgcccaaagcccacatcttggcctgcgctccatccaactcaggggctgacctactctgtcaaaggctccgggtccaccttcctagctccatctaccgcctcctggcccccagcagggacatccgcatggtacctgaggacatcaagccctgctgcaactgggacgcaaagaagggggagtatgtatttcccgccaagaagaagctgcaggaataccgggtcttaattaccaccctcatcactgccggcaggttggtctcggcccagtttcccattgatcacttcacacacatcttcatcgatgaggctggccactgcatggagcctgagagtctggtagctatagcagggctgatggaagtaaaggaaacaggtgatccaggagggcagctggtgctggcaggagaccctcggcagctggggcctgtgctgcgttccccactgacccagaagcatggactgggatactcactgctggagcggctgctcacctacaactccctgtacaagaagggccctgatggctatgacccccagttcataaccaagctgctccgcaactacaggtctcatcccaccatcctggacattcctaaccagctctattatgaaggggagctgcaggcctgtgctgatgtcgtggatcgagaacgcttctgccgctgggcgggcctacctcgacagggctttcccatcatctttcacggcgtaatgggcaaagatgagcgtgaaggcaacagcccatccttcttcaaccctgaagaggctgccacagtgacttcctacctgaagctgctcctggccccctcctccaagaagggcaaagctcgcctgagccctcgaagtgtgggcgtcatctccccgtaccggaaacaggtggagaaaatccgttactgcatcaccaaacttgacagggagcttcgaggactggatgacatcaaggacttgaaggtgggttcagtagaagaattccaaggccaagaacgaagcgtcatcctcatctccaccgtgcgaagcagccagagctttgtgcagctggatctggactttaatctgggtttccttaagaaccccaagaggttcaatgtagctgtgacccgggccaaggccctgctcatcatcgtggggaacccccttctcctgggccatgaccctgactggaaagtattcctggagttctgtaaagaaaacggagggtataccgggtgtcccttccctgccaaactggacctgcaacagggacagaatttactgcaaggtctgagcaagctcagcccctctacctcagggccccacagccatgactacctcccccaggagcgggagggtgaagggggcctgtctctgcaagtggagccagagtggaggaatgagctctgaagacacagcacccagccttctcgcaccagccaagccttaactgcctgcctgaccctgaaccagaacccagctgaactgcccctccaagggacaggaaggctgggggagggagtttacaacccaagccattccaccccctcccctgctggggagaatgacacatcaagctgctaacaattgggggaaggggaaggaagaaaactctgaaaacaaaatcttgttctatgcaaaagccttgaaaaaaaaaaaaaaaaaa

SEQ ID NO: 94 - DNA, 2017 bp, Homo Sapiens
agacggggcagcgctcgagttcctgcgcgggactgccaaggcacgaccacgggccggaaggctgccaggcccagtgggcaagcgaagaaatgaaccaccgcaacgcgggcgcttcggggcggggccgagtgcgaacctgagccccaaatcccgacccaggcaggggcggggcccggagcggggccttggaggcccagcccgcgcggcgacgtctccgcgtggcgtcacggcaccgactgacggccacccaccatggccgcagaccagcgcccgaaggccgacacgctggccctgaggcaacggctcatcagctcttcctgcagactcttttttcccgaggatcctgttaagattgtccgggcccaagggcagtacatgtacgatgaacagggggcagaatacatcgattgcatcagcaatgtggcgcacgttgggcactgccaccctctcgtggtccaagcagcacatgagcagaaccaggtgctcaacaccaacagccggtacctgcatgacaacatcgtggactatgcgcagaggctgtcagagaccctgccggagcagctctgtgtgttctatttcctgaattctgggtcagaagccaatgacctggccctgaggctggctcgccactacacgggacaccaggacgtggtggtattagatcatgcgtatcacggccacctgagctccctgattgacatcagtccctacaagttccgcaacctggatggccagaaggagtgggtccacgtggcacctctcccagacacctaccggggcccctaccgggaggaccaccccaacccagctatggcctatgccaacgaggtgaaacgtgtggtcagcagtgcacaggagaagggcaggaagattgcagccttcttcgctgagtctctgcccagtgtgggagggcagatcattccccctgctggctacttctcccaagtggcagagcacatccgcaaggccggaggggtctttgttgcagatgagatccaggttggctttggccgggtaggcaagcacttctgggccttccagctccagggaaaagacttcgtccctgacatcgtcaccatgggcaagtccattggcaacggccaccctgttgcctgcgtggccgcaacccagcctgtggcgagggcatttgaagccaccggcgttgagtacttcaacacgtttgggggcagcccagtgtcctgcgctgtggggctggccgtcctgaatgtcttggagaaggagcagctccaggatcatgccaccagtgtaggcagcttcctgatgcagctcctcgggcagcaaaaaatcaaacatcccatcgtcggggatgtcaggggtgttgggctcttcattggtgtggatctgatcaaagatgaggccacaaggacaccagcaactgaagaggctgcctacttggtatcaaggctgaaggagaactacgttttgctgagcactgatggccctgggaggaacatcctgaagtttaagcccccaatgtgcttcagcctggacaatgcacggcaggtggtggcaaagctggatgccattctgactgacatggaagagaaggtgagaagttgtgaaacgctgaggctccagccctaagccagccctgctctgcctaagtgtactccagaagaaactcatctcatccaaatacacgctattgagaaggcgagcctgacctccctcttacagataaagtcagctttcagaggctcagggtgggggggcctgcccgaggccataatgctacccaccccctcctcctaaccactggtctgttggaataacccagatgtctgcatcccctcaagtcagtcaatttcctttctgtccactgggggtggaatggggtagggtgggatactttaaagtgctcctgcttaaataaattagaccagaccagtgtatttctaaagaaaatcctgacatgcacacccattaaaaatagtacattttacagtgtcccagtcatacttttaattggcaaattaaaataatgcaatctgaaaaa

SEQ ID NO: 95 - DNA, 5210 bp, Homo Sapiens
gggaagcgggaggagagccacacggtcaagttgcacaggttcttgcagcttctggaatcaagaccatgggcaccctcataagtcagtgtgggcagggactgccccagggccaatccaagatccagaggtagccatagggtgtgacaagttgtgcagattacaacactcaccccttgcaataacgtcactgcctgtgactcggggccaggcccaggccaaagcccttcctacatcatttcgtttaatcctcacagtttcctgctgaaagggctactattcttactcccatccccactctacagatgaggtaatggaggcccaggaaagttaagtgacttgtcccagatgacaccgctggtaagttgcaaagtcagaatttgaactcaggcagtttacctctgatggctgctctgttaatcacagctgctttccagtgagacaaaaacgggtgatcagggcagagtcaagacagagaggtaaacaagattgggaaaaagacaggaatgagaggggaacaatgggggaaaagataggaacaaagagagttggggaaggggagagaaacaggaaacatgacttgcccgggaggggcatcagtccacgtgcaagcaggtggaggctcaagttttctgctcacttggtgatgcagaggctccctttccctcagcagccgccttgctgcgtggacagcagcttcccatctggcctgtccccggagccccggcctcatcctcctcagcggcaggccacttagcttcacaggaaatgctctttctctaattggcattgaaactcacagccctcccttttcctgtaggtggggtttccataggaaaaagctgcttctctgtttccccagcctagcaactgtttggcagtcagagtcccacatcctgctcaactgggtcaggtccctcttagaccagctcttgtccatcatttgctgaagtggaccaactagttccccagtagggggtctcccctggcaattcttgatcggcgtttggacatctcagatcgcttccaatgaagatggccttgccttggggtcctgcttgtttcataatcatctaactatgggacaaggttgtgccggcagctctgggggaaggagcacggggctgatcaagccatccaggaaacactggaggacttgtccagccttgaaagaactctagtggtttctgaatctagcccacttggcggtaagcatgatgcaacttctgcaacttctgctggggcttttggggccaggtggctacttatttcttttaggggattgtcaggaggtgaccactctcacggtgaaataccaagtgtcagaggaagtgccatctggtacagtgatcgggaagctgtcccaggaactgggccgggaggagaggcggaggcaagctggggctgccttccaggtgttgcagctgcctcaggcgctccccattcaggtggactctgaggaaggcttgctcagcacaggcaggcggctggatcgagagcagctgtgccgacagtgggatccctgcctggtttcctttgatgtgcttgccacaggggatttggctctgatccatgtggagatccaagtgctggacatcaatgaccaccagccacggtttcccaaaggcgagcaggagctggaaatctctgagagcgcctctctgcgaacccggatccccctggacagagctcttgacccagacacaggccctaacaccctgcacacctacactctgtctcccagtgagcactttgccttggatgtcattgtgggccctgatgagaccaaacatgcagaactcatagtggtgaaggagctggacagggaaatccattcattttttgatctggtgttaactgcctatgacaatgggaacccccccaagtcaggtaccagcttggtcaaggtcaacgtcttggactccaatgacaatagccctgcgtttgctgagagttcactggcactggaaatccaagaagatgctgcacctggtacgcttctcataaaactgaccgccacagaccctgaccaaggccccaatggggaggtggagttcttcctcagtaagcacatgcctccagaggtgctggacaccttcagtattgatgccaagacaggccaggtcattctgcgtcgacctctagactatgaaaagaaccctgcctacgaggtggatgttcaggcaagggacctgggtcccaatcctatcccagcccattgcaaagttctcatcaaggttctggatgtcaatgacaacatcccaagcatccacgtcacatgggcctcccagccatcactggtgtcagaagctcttcccaaggacagttttattgctcttgtcatggcagatgacttggattcaggacacaatggtttggtccactgctggctgagccaagagctgggccacttcaggctgaaaagaactaatggcaacacatacatgttgctaaccaatgccacactggacagagagcagtggcccaaatataccctcactctgttagcccaagaccaaggactccagcccttatcagccaagaaacagctcagcattcagatcagtgacatcaacgacaatgcacctgtgtttgagaaaagcaggtatgaagtctccacgcgggaaaacaacttaccctctcttcacctcattaccatcaaggctcatgatgcagacttgggcattaatggaaaagtctcataccgcatccaggactccccagttgctcacttagtagctattgactccaacacaggagaggtcactgctcagaggtcactgaactatgaagagatggccggctttgagttccaggtgatcgcagaggacagcgggcaacccatgcttgcatccagtgtctctgtgtgggtcagcctcttggatgccaatgataatgccccagaggtggtccagcctgtgctcagcgatggaaaagccagcctctccgtgcttgtgaatgcctccacaggccacctgctggtgcccatcgagactcccaatggcttgggcccagcgggcactgacacacctccactggccactcacagctcccggccattccttttgacaaccattgtggcaagagatgcagactcgggggcaaatggagagcccctctacagcatccgcagtggaaatgaagcccacctcttcatcctcaaccctcatacggggcagctgttcgtcaatgtcaccaatgccagcagcctcattgggagtgagtgggagctggagatagtagtagaggaccagggaagcccccccttacagacccgagccctgttgagggtcatgtttgtcaccagtgtggaccacctgagggactcagcccgcaagcctggggccttgagcatgtcgatgctgacggtgatctgcctggctgtactgttgggcatcttcgggttgatcctggctttgttcatgtccatctgccggacagaaaagaaggacaacagggcctacaactgtcgggaggccgagtccacctaccgccagcagcccaagaggccccagaaacacattcagaaggcagacatccacctcgtgcctgtgctcaggggtcaggcaggtgagccttgtgaagtcgggcagtcccacaaagatgtggacaaggaggcgatgatggaagcaggctgggacccctgcctgcaggcccccttccacctcaccccgaccctgtacaggacgctgcgtaatcaaggcaaccagggagcaccggcggagagccgagaggtgctgcaagacacggtcaacctccttttcaaccatcccaggcagaggaatgcctcccgggagaacctgaaccttcccgagccccagcctgccacaggccagccacgttccaggcctctgaaggttgcaggcagccccacagggaggctggctggagaccagggcagtgaggaagccccacagaggccaccagcctcctctgcaaccctgagacggcagcgacatctcaatggcaaagtgtcccctgagaaagaatcagggccccgtcagatcctgcggagcctggtccggctgtctgtggctgccttcgccgagcggaaccccgtggaggagctcactgtggattctcctcctgttcagcaaatctcccagctgctgtccttgctgcatcagggccaattccagcccaaaccaaaccaccgaggaaataagtacttggccaagccaggaggcagcaggagtgcaatcccagacacagatggcccaagtgcaagggctggaggccagacagacccagaacaggaggaagggcctttggatcctgaagaggacctctctgtgaagcaactgctagaagaagagctgtcaagtctgctggaccccagcacaggtctggccctggaccggctgagcgcccctgacccggcctggatggcgagactctctttgcccctcaccaccaactaccgtgacaatgtgatctccccggatgctgcagccacggaggagccaaggaccttccagacgttcggcaaggcagaggcaccagagctgagcccaacaggcacgaggctggccagcacctttgtctcggagatgagctcactgctggagatgctgctggaacagcgctccagcatgcccgtggaggccgcctccgaggcgctgcggcggctctcggtctgcgggaggaccctcagtttagacttggccaccagtgcagcctcaggcatgaaagtgcaaggggacccaggtggaaagacggggactgagggcaagagcagaggcagcagcagcagcagcaggtgcctgtgaacatacctcagacgcctctggatccaagaaccaggggcctgaggatctgtggacaagagctggtttctaaaatcttgtaactcactagctagcggcggcctgagaactttagggtgactgatgctacccccacagaggaggcaagagccccaggactaacagctgactgaccaaagcagccccttgtaagcagctctgagtcttttggaggacagggacggtttgtggctgagataagtgtttcctggcaaaacatatgtggagcacaaagggtcagtcctctggcagaacagatgccacggagtatcacaggcaggaaagggtggccttcttgggtagcaggagtcagggggctgtaccctgggggtgccaggaaatgctctctgacctatcaataaaggaaaagcagtgattcaaaaaaaaaaaaaaaaaaaaaaaaaaaaa

SEQ ID NO: 96 - DNA, 2623 bp, Homo Sapiens
atttcttttagtgtctcagggtaagggaaaggctaggtacctaccatgtatgtgcttattgttttaattctcatcactctttggagatgggaatttgtatccccttctacagatggagaagctgaggctcagagggttgaatgggctccccaggcttacacagctcgtgagacacacataagcaccctggtcagagtgatgtgtggcgctcaaggtccatgcagtctctttcctctgggagtttgactagcccagctctggggtccccatgtaagggcaggggcagggtggactgggctcctctcgaacccctctttggctgccccagcgagagccggccaggttgcagcgcggacacactcgcaggtcgctgtggccccagcctcgcctgacagaatgagcggctcggacgggggactggaggaggagccagagctcaacatcaccctcacgctgcggatgctgatgcacgggaaggaagtgggcagcatcatcgggaagaagggcgagactgtaaagcgaatccgggagcaggtgaggatggagtttgggggaggagcccagggcacctgatgtggaggggagatccctgccccactttctctctgaaccactccttctgggctgaccagtgagtcccccagagggtggcagttttgagccttgcctcaggcctggtgagtggggcaggcagacaagttccggcaagggagcagggaagatgccccgctgcccggcgctcattctatatctgcagagcagtgcccggatcaccatctccgagggctcctgccctgaacgcatcaccaccatcaccgggtctacagcagctgtcttccatgcagtctccatgattgctttcaaactggatgaggacctttgtgctgctcctgcaaatggtggaaatgtctccaggcctccagtgaccctgcgccttgtcatccctgccagtcagtgtggctcactgattgggaaggctggcaccaagatcaaggagatccgagaggtgaggggcgagatataccacccacagggaatccggggcaagggagcagttgtaagaggggtgttgggcttatggcgtcctccccacctagagagctctgagcctgggcagcccttttctgggttatgggagcagccagaagtggcccctgttctctgtttgcagactacgggtgcccaggtacaggtggcaggggacctgctccccaactccacagagcgagctgttacggtatctggggtgcctgatgccatcatcctgtgtgtgcgccagatctgcgctgttatcctggagtccccacccaaaggagccactatcccctaccatccgagcctctccctaggtactgttcttctctctgccaaccagggcttctctgtccagggtcagtatggggctgtgaccccagctgaggtcaccaagctccagcagctctcaagccatgcggtcccctttgccacacccagcgtggtgccaggactggatcccggcacacagaccagctcacaggagttcttggttcccaacgatttgattggctgtgtgatcgggcgccagggcagcaagatcagcgagatccggcagatgtcaggggcacatatcaagatcgggaaccaagcagagggcgctggggagcggcatgtcaccatcactggctctccggtctccatcgccctggcccagtacctcatcactgcctgtctagagacggccaagtctacctctggggggacgcccagctcggcccccgcagacctgcctgcccccttctcgccacccctgacggccctgcccacagctccccctggcctgctgggcacaccctatgccatctccctctccaacttcatcggcctcaagcccatgcccttcttggctttaccacctgcttccccagggccgccgccgggcttggcggcctacactgccaagatggcagcagctaatgggagcaagaaggctgagcggcagaaattctccccctactgaggccagctgaggtacaggcaggggcaggcaggaccaccagcagggggctgcctctgcaccctacccgcccaaggagactccaccctggggtcccaaacgccgctaacgcccagacgcatggatgcaccccctaccctgcctccatctatgggagttctttctctcagagtgggggcagtttctggcccaggggtctgagctgcggcagccccagggcagggggccctacctcctcagctctgtgcttggatacagggagcagccaggagactccctagtgcccccaccatggcgggtgtcactcacgcactccccatcccttagggcttcctggcctactgcatccttgtgggagtcagggaggagggcccgttgggtagctggggccaggcttctctccccaccacctgcagatttcttgctgcttccactgatacccttttgactggaatgaactggctgggcttgtcagggggcaccccaaagagggggcactgccaggtagctgggggagtggcatggggcaggggcccagttctcagcagcagacactctgtacagttttttcaatccctgtttttgaataaatattctcagcgaccaaaaaaaaaaaaaaaaaaaaaaaaa

SEQ ID NO: 97 - DNA, 2989 bp, Homo Sapiens
ggcgcgcgggcgagcggttgtgcttgtgcttgtggcgcgtggtgcgggtttcggcggcggctgaggaagaagcgcgggcggcgccttcgggaggcgagcaggcagcagttggccgtgccgtagcagcgtcccgcgcgcggcgggcagcggcccaggaggcgcgtggcggcgctcggcctcgcggcggcggcggcggcagcggcccagcagttggcggcgagcgcgtctgcgcctgcgcggcgggccccgcgcccctcctccccccctgggcgcccccggcggcgtgtgaatggcggcctccgcggcggcagcctcggcagcagcggcctcggccgcctctggcagcccgggcccgggcgagggctccgctggcggcgaaaagcgctccaccgccccttcggccgcagcctcggcctctgcctcagccgcggcgtcgtcgcccgcggggggcggcgccgaggcgctggagctgctggagcactgcggcgtgtgcagagagcgcctgcgacccgagagggagccccgcctgctgccctgtttgcactcggcctgtagtgcctgcttagggcccgcggcccccgccgccgccaacagctcgggggacggcggggcggcgggcgacggcaccgtggtggactgtcccgtgtgcaagcaacagtgcttctccaaagacatcgtggagaattatttcatgcgtgatagtggcagcaaggctgccaccgacgcccaggatgcgaaccagtgctgcactagctgtgaggataatgccccagccaccagctactgtgtggagtgctcggagcctctgtgtgagacctgtgtagaggcgcaccagcgggtgaagtacaccaaggaccatactgtgcgctctactgggccagccaagtctcgggatggtgaacgtactgtctattgcaacgtacacaagcatgaaccccttgtgctgttttgtgagagctgtgatactctcacctgccgagactgccagctcaatgcccacaaggaccaccagtaccagttcttagaggatgcagtgaggaaccagcgcaagctcctggcctcactggtgaagcgccttggggacaaacatgcaacattgcagaagagcaccaaggaggttcgcagctcaatccgccaggtgtctgacgtacagaagcgtgtgcaagtggatgtcaagatggccatcctgcagatcatgaaggagctgaataagcggggccgtgtgctggtcaatgatgcccagaaggtgactgaggggcagcaggagcgcctggagcggcagcactggaccatgaccaagatccagaagcaccaggagcacattctgcgctttgcctcttgggctctggagagtgacaacaacacagcccttttgctttctaagaagttgatctacttccagctgcaccgggccctcaagatgattgtggatcccgtggagccacatggcgagatgaagtttcagtgggacctcaatgcctggaccaagagtgccgaggcctttggcaagattgtggcagagcgtcctggcactaactcaacaggccctgcacccatggcccctccaagagccccagggcccctgagcaagcagggctctggcagcagccagcccatggaggtgcaggaaggctatggctttgggtcaggagatgatccctactcaagtgcagagccccatgtgtcaggtgtgaaacggtcccgctcaggtgagggcgaggtgagcggccttatgcgcaaggtgccacgagtgagccttgaacgcctggacctggacctcacagctgacagccagccacccgtcttcaaggtcttcccaggcagtaccactgaggactacaaccttattgttattgaacgtggcgctgccgctgcagctaccggccagccagggactgcgcctgcaggaacccctggtgccccacccctggctggcatggccattgtcaaggaggaggagacggaggctgccattggagcccctcctactgccactgagggccctgagaccaaacctgtgcttatggctcttgcggagggtcctggtgctgagggtccccgcctggcctcacctagtggcagcaccagctcagggctggaggtggtggctcctgagggtacctcagccccaggtggtggcccgggaaccctggatgacagtgccaccatttgccgtgtctgccagaagccaggcgatctggttatgtgcaaccagtgtgagttttgtttccacctggactgtcacctgccggccctgcaggatgtaccaggggaggagtggagctgctcactctgccatgtgctccctgacctgaaggaggaggatggcagcctcagcctggatggtgcagacagcactggcgtggtggccaagctctcaccagccaaccagcggaaatgtgagcgtgtactgctggccctattctgtcacgaaccctgccgccccctgcatcagctggctaccgactccaccttctccctggaccagcccggtggcaccctggatctgaccctgatccgtgcccgcctccaggagaagttgtcacctccctacagctccccacaggagtttgcccaggatgtgggccgcatgttcaagcaattcaacaagttaactgaggacaaggcagacgtgcagtccatcatcggcctgcagcgcttcttcgagacgcgcatgaacgaggccttcggtgacaccaagttctctgctgtgctggtggagcccccgccgatgagcctgcctggtgctggcctgagttcccaggagctgtctggtggccctggtgatggcccctgaggctggagcccccatggccagcccagcctggctctgttctctgtcctgtcaccccatccccactcccctggtggcctgactcccactccctggtggccccatcccccagttcctcacgatatggtttttacttctgtggatttaataaaaacttcaccagttaaaaaaaaaaaaaaaaaaaaaaaaaaaaaa

SEQ ID NO: 98 - DNA, 2335 bp, Homo Sapiens
gggctacgcccgggcgcaagcgccaagagcggctgcgtctatggtcatgacgtctgacagagcgtccacccgtcttcgacaggactctatggttcttacgcgcgcagacagaccgcctatataagccatgcgcaggcggaggagcgcctctttcccttcggtgtgccactgaagatcctggtgtcgccatgggccgccgccccgcccgttgttaccggtattgtaagaacaagccgtacccaaagtctcgcttctgccgaggtgtccctgatgccaagattcgcatttttgacctggggcggaaaaaggcaaaagtggatgagtttccgctttgtggccacatggtgtcagatgaatatgagcagctgtcctctgaagccctggaggctgcccgaatttgtgccaataagtacatggtaaaaagttgtggcaaagatggcttccatatccgggtgcggctccaccccttccacgtcatccgcatcaacaagatgttgtcctgtgctggggctgacaggctccaaacaggcatgcgaggtgcctttggaaagccccagggcactgtggccagggttcacattggccaagttatcatgtccatccgcaccaagctgcagaacaaggagcatgtgattgaggccctgcgcagggccaagttcaagtttcctggccgccagaagatccacatctcaaagaagtggggcttcaccaagttcaatgctgatgaatttgaagacatggtggctgaaaagcggctcatcccagatggctgtggggtcaagtacatccccaatcgtggccctctggacaagtggcgggccctgcactcatgagggcttccaatgtgctgcccccctcttaatactcaccaataaattctacttcctgtccacctatgtctttgtatctacattcttgacggggaaggaacttcctctgggaacctttgggtcattgccctttcacttcagaaacaggttgacaactcagccctgctcatgaggcagcaaaccctgcaaagggctgggactggtggccttatgtcagttgtctactctggagcttgacttggacctccccaggtcctaggcagtaggttgaaaaacactgaagtgcttttcatgaagcacagctgcagcaaagccttgcaatcccaggctggggtcagcctacagttgtgttgcttattacaacacatgcggaccaagaggggcttgtgggctagaggctgaccagcagcgtttatttagcaagggtaggtgtgcatcacattgggcttgttctcacccatctggtttggccattcctccttggtgggaatcatccaggtactgctgaggtcacctgcgatttgccccatttcctatctctagcaacctcctgggccccatgcccccaccccttctagaacctgcattcccagggccttcaccacctgaccaaaggtctaggctaacctttggtcatttgtaacaagacctcggaacagacacgtgtgtggcatggtttggcctggggatcttagatgtctgacctgaactattgtagaacagcgctggcttttgggggagcagcaaaaatgagaggagtgctaggtgggtggcctgagcatctgtatccagggacaggactccaaaggcttttggtcccagagctggggtatgttggccccagcccccagcctgtggctcccaaaaggcctctggttttttgtaatctcagtttacagccatttcttaggtttttaattacctttattttattttgccaaacatacctgggaataccttttattttttttttaccttggggtgatggttccaaaccataaatgtgattatagttaacacatgacccttctagcgtcccagccagtgtttttcctgacctctgttctttggagaggaggatggaagggaggggtccggcacgctgctggcattttgctgtgtcctgcagcccctttccgggacacctgggttcacacagctttttagcttacataactggtgcagattttctgtgtggagatgttgccttgaccagccttggctggactttaccaggcatgcagaagcctgtaccaacacagactacagcacccaggaggtgcgagtgtggctgctcagcggttataacaggcctgactgcattgttcaccggattataatgagccaaaatgtttcccggtgtttgctggtttcagggaaggagtttgatatagcagattaaccaccctccttgtagctattggggcttaatggtttcctggtgattcttaccaatccacaataaacatggcccattggcatatctgcaaaaaaaaaaaaaaaaa

SEQ ID NO: 99 - DNA, 715 bp, Homo Sapiens
tccccacccctcagcgcgctgtggtacgtcccgcgctccgcttggcccaagatggcggcctccgtgtgcagcgggttgctggggccacgggtgctgtcctggagccgagagctgccttgcgcttggcgcgccctgcacacctccccggtctgcgccaagaaccgggcggcccgagtacgcgtaagcaagggggacaagccggtgacctacgaggaggcacacgcgccgcactacatcgcccaccgtaaaggctggctgtcgctgcacacaggtaacctggatggagaggaccatgccgcagagcgaacggtggaggatgttttccttcgcaagttcatgtggggtaccttcccaggctgcctggctgaccagctggttttaaagcgccggggtaaccagttggagatctgtgccgtggtcctgaggcagttgtctccacacaagtactacttcctcgtgggctacagtgaaactttgctgtcctacttttacaaatgtcctgtgcgactccacctccaaactgtgccctcaaaggttgtgtataagtacctctagaacaatccccttttttccatcaagctgtagcctgcagagaatggaaacgtgggaaaggaatggtatgtgggggaaatgcatcccctcagaggactgaggcatagtctctcatctgctattgaataaagaccttctatcttgaaaaaaaaaaaaaaaaaaa

SEQ ID NO: 100 - DNA, 1129 bp, Homo Sapiens
tggcgacccggaagttgtacttgcaactgcggctttccttctcccacaatccttcgcgctcttcctttccaacttggacgctgcagaatggctcccgcaaagaagggtggcgagaagaaaaagggccgttctgccatcaacgaagtggtaacccgagaatacaccatcaacattcacaagcgcatccatggagtgggcttcaagaagcgtgcacctcgggcactcaaagagattcggaaatttgccatgaaggagatgggaactccagatgtgcgcattgacaccaggctcaacaaagctgtctgggccaaaggaataaggaatgtgccataccgaatccgtgtgcggctgtccagaaaacgtaatgaggatgaagattcaccaaataagctatatactttggttacctatgtacctgttaccactttcaaaatttctgtgctaaacagtgttacagtcgccaagagcccataaagggagccctcctggaagtggatgaggccttgggtctcggctcttcattgcttcctgagctgcagcagatgcctttacaaccaagctcaccgaggacgtctgtctcccatattaccctggcagagggccaggcctgttctacacggccggggtttcaacaaggtactgatgtcttctgcccttgcctcttcgacaggcaagtaataagacttaagtgaagagaattctttaggcacacaaattcacatttgatgtaatctcattatacttcctgatctgtgattgaaaactttcatttcgtaactagtatgtctgtcccacctttaaaaagtttttcattatgaaagtaagtatttgttagaattaagtctatttaaatgaaaaaaacttagatatgagtctgcatggcctcaggaaaatgatgttttaaaatagagattttaggttgtctgcactctagcttttttgtcgttttcttaaggcttttttaactgcatcaaaaattcagatacgaaacatacactaaaaaataatacatcatatcttaatttccactgaacttgatttaaattcagagttacacagtatgaatatcacaatcagatatgttcaaaaaggtctgaacaattgattttctgaaaccatgaaggactac

SEQ ID NO: 101 - DNA, 1812 bp, Homo Sapiens
tagctaggcaggaagtcggcgcgggcggcgcggacagtatctgtgggtacccggagcacggagatctcgccggctttacgttcacctcggtgtctgcagcaccctccgcttcctctcctaggcgacgagacccagtggctagaagttcaccatgtctattctcaagatccatgccagggagatctttgactctcgcgggaatcccactgttgaggttgatctcttcacctcaaaaggtctcttcagagctgctgtgcccagtggtgcttcaactggtatctatgaggccctagagctccgggacaatgataagactcgctatatggggaagggtgtctcaaaggctgttgagcacatcaataaaactattgcgcctgccctggttagcaagaaactgaacgtcacagaacaagagaagattgacaaactgatgatcgagatggatggaacagaaaataaatctaagtttggtgcgaacgccattctgggggtgtcccttgccgtctgcaaagctggtgccgttgagaagggggtccccctgtaccgccacatcgctgacttggctggcaactctgaagtcatcctgccagtcccggcgttcaatgtcatcaatggcggttctcatgctggcaacaagctggccatgcaggagttcatgatcctcccagtcggtgcagcaaacttcagggaagccatgcgcattggagcagaggtttaccacaacctgaagaatgtcatcaaggagaaatatgggaaagatgccaccaatgtgggggatgaaggcgggtttgctcccaacatcctggagaataaagaaggcctggagctgctgaagactgctattgggaaagctggctacactgataaggtggtcatcggcatggacgtagcggcctccgagttcttcaggtctgggaagtatgacctggacttcaagtctcccgatgaccccagcaggtacatctcgcctgaccagctggctgacctgtacaagtccttcatcaaggactacccagtggtgtctatcgaagatccctttgaccaggatgactggggagcttggcagaagttcacagccagtgcaggaatccaggtagtgggggatgatctcacagtgaccaacccaaagaggatcgccaaggccgtgaacgagaagtcctgcaactgcctcctgctcaaagtcaaccagattggctccgtgaccgagtctcttcaggcgtgcaagctggcccaggccaatggttggggcgtcatggtgtctcatcgttcgggggagactgaagataccttcatcgctgacctggttgtggggctgtgcactgggcagatcaagactggtgccccttgccgatctgagcgcttggccaagtacaaccagctcctcagaattgaagaggagctgggcagcaaggctaagtttgccggcaggaacttcagaaaccccttggccaagtaagctgtgggcaggcaagcccttcggtcacctgttggctacacagacccctcccctcgtgtcagctcaggcagctcgaggcccccgaccaacacttgcaggggtccctgctagttagcgccccaccgccgtggagttcgtaccgcttccttagaacttctacagaagccaagctccctggagccctgttggcagctctagctttgcagtcgtgtaattggcccaagtcattgtttttctcgcctcactttccaccaagtgtctagagtcatgtgagcctcgtgtcatctccggggtggccacaggctagatccccggtggttttgtgctcaaaataaaaagcctcagtgacccatgag

SEQ ID NO: 102 - DNA, 1297 bp, Homo Sapiens
ggggcggggcttcgggcgagagggagggcagcaggagaaaggataagaaagggagtgggactggcgcctacggtggccgaagtgggacgcgccgagccggaggctgcaggatgatgcggttcatgctattattcagccggcagggaaaactgcggctgcaaaaatggtacctggccacttcggacaaggaacggaagaagatggtgcgcgagctcatgcaggttgtcctggctcgaaagcccaagatgtgcagcttcctggagtggagggacctcaaagttgtctataagagatatgccagcctctacttctgctgcgccatcgagggccaagacaatgagctcatcacactggagctgatccaccgatacgtggagctcttagacaaatactttggcagtgtgtgcgagctggacatcatcttcaactttgagaaggcctacttcatcctggatgagtttttgatggggggggatgtccaggacacctccaagaagagtgtgctgaaagccatcgagcaggctgacctactgcaagaggaggatgagtcgccacggagtgtgctggaggagatgggtttggcatagcccctgctgggccggggtgtggcgatggggtcctggcagcgtggcgggaacggctgcttctcctctgcccagggccctgttcttggtgggactcggctgcccctcctctgctgcctcacctttcggagtgagctgtgggctcaggcccttcaaacattccctccctccaccccctacctccactttccccttttcccactgaaggttttagaagctaggaggcaggaaaatgtgacccagatgggggtgctatttggcttttattccctgcctttgcagaactgatgtcaccccagatgtccttccctccctaataactgtaaatatataaatatgtcaggttaaagggaaaaggtgttcagggcacttcttgtcctctctgtcccataacctacctccaccctccccctagccagccaggcagcttctctgcctgggaggggagcctggacccccctctttctccttggctgcagtggggcctttatccagtgccagggaggaacaacatagttaatttttttctaaccttgccactttgagggaaggaagggttgggggaagggcaagctttatgggaccctggtcctggccctggcctttcactccagttctgggtgaggcaggagctgggaggggtggggagggggagggggaagtgtctgcctttatgtcctttcttctgaaataaaagtaaaagcatttctgga

SEQ ID NO: 103 - DNA, 6531 bp, Homo Sapiens
gcccagccagcttgcgtcaccgcttcagagcggagaagagcgagcaggggagagcgagaccagttttaaggggaggaccggtgcgagtgaggcagccccgaggctctgctcgcccaccacccaatcctcgcctcccttctgctccaccttctctctctgccctcacctctcccccgaaaaccccctatttagccaaaggaaggaggtcaggggaacgctctcccctccccttccaaaaaacaaaaacagaaaaacccttttccaggccggggaaagcaggagggagaggggccgccgggctggccatggagctgctgtgccacgaggtggacccggtccgcagggccgtgcgggaccgcaacctgctccgagacgaccgcgtcctgcagaacctgctcaccatcgaggagcgctaccttccgcagtgctcctacttcaagtgcgtgcagaaggacatccaaccctacatgcgcagaatggtggccacctggatgctggaggtctgtgaggaacagaagtgcgaagaagaggtcttccctctggccatgaattacctggaccgtttcttggctggggtcccgactccgaagtcccatctgcaactcctgggtgctgtctgcatgttcctggcctccaaactcaaagagaccagcccgctgaccgcggagaagctgtgcatttacaccgacaactccatcaagcctcaggagctgctggagtgggaactggtggtgctggggaagttgaagtggaacctggcagctgtcactcctcatgacttcattgagcacatcttgcgcaagctgccccagcagcgggagaagctgtctctgatccgcaagcatgctcagaccttcattgctctgtgtgccaccgactttaagtttgccatgtacccaccgtcgatgatcgcaactggaagtgtgggagcagccatctgtgggctccagcaggatgaggaagtgagctcgctcacttgtgatgccctgactgagctgctggctaagatcaccaacacagacgtggattgtctcaaagcttgccaggagcagattgaggcggtgctcctcaatagcctgcagcagtaccgtcaggaccaacgtgacggatccaagtcggaggatgaactggaccaagccagcacccctacagacgtgcgggatatcgacctgtgaggatgccagttgggccgaaagagagagacgcgtccataatctggtctcttcttctttctggttgtttttgttctttgtgttttagggtgaaacttaaaaaaaaaattctgcccccacctagatcatatttaaagatcttttagaagtgagagaaaaaggtcctacgaaaacggaataataaaaagcatttggtgcctatttgaagtacagcataagggaatcccttgtatatgcgaacagttattgtttgattatgtaaaagtaatagtaaaatgcttacaggaaaacctgcagagtagttagagaatatgtatgcctgcaatatgggaacaaattagaggagacttttttttttcatgttatgagctagcacatacacccccttgtagtataatttcaaggaactgtgtacgccatttatggcatgattagattgcaaagcaatgaactcaagaaggaattgaaataaggagggacatgatggggaaggagtacaaaacaatctctcaacatgattgaaccatttgggatggagaagcacctttgctctcagccacctgttactaagtcaggagtgtagttggatctctacattaatgtcctcttgctgtctacagtagctgctacctaaaaaaagatgttttattttgccagttggacacaggtgattggctcctgggtttcatgttctgtgacatcctgcttcttcttccaaatgcagttcattgcagacaccaccatattgctatctaatggggaaatgtagctatgggccataaccaaaactcacatgaaacggaggcagatggagaccaagggtgggatccagaatggagtcttttctgttattgtatttaaaagggtaatgtggccttggcatttcttcttagaaaaaaactaatttttggtgctgattggcatgtctggttcacagtttagcattgttataaaccattccattcgaaaagcactttgaaaaattgttcccgagcgatagatgggatggtttatgcaagtcatgctgaatactcctcccctcttctcttttgccccctcccttcctgcccccagtctgggttactcttcgcttctggtatctggcgttctttggtacacagttctggtgttcctaccaggactcaagagacaccccttcctgctgacattcccatcacaacattcctcagacaagcctgtaaactaaaatctgttaccattctgatggcacagaaggatcttaattcccatctctatacttctcctttggacatggaaagaaaagttattgctggtgcaaagatagatggctgaacatcagggtgtggcattttgttcccttttccgtttttttttttttattgttgttgttaattttattgcaaagttgtattcagcgtacttgaatttttcttcctctccacttcttagaggcattcagttagcaaagaggttggagcaacaacttttttttttttttttgcacaattgtaattgacaggtaatgaagctatttgttaaaatatttgcctttttaagtaaaaaagaaaaatcagaacagggctatttgaagaattattttatacacagattctgccttgtttcatagtatgagggttgaagacggaaaacaatctaagggtctctcatttttttaattttgttttgttcagtttggtttttttttttttttgcgctgctaagaagctaaagtcatccatccttattcacgttgacagtacctagctgtaatgtttcacagagtgtgctgctattttataaacatttttataatatattattttactgcttaaattccaagtcctgaagtagatggttgagatatgagttcttcgtactggaaaagcccttccgtagtttgttttcttctggtagcatattcatggttgtttttttttttcttttttggttttttggttttttttttttcctctgatcacattcttcaaagacggagtattctttacctcaggtttactggacaaaatcaataactacaaaaggcaatgattcacgcttttgttttcataatacctcacaaccgtacagtttctgcttgggagcccattcgcatgaggaatacagaagcagtgtgagcagggctgactccctctcaggtggaaggcagggcggtctcactcccagggacctttttggtcatggaggccatcgggctcccagttagaccctggtatcctcatcatgatggaaaaaatacattgaaccaagggatcctccctccccttcaaggcagacgttcagtacaaacatttatgcggtaggctcagatgtcgtaatttgcacttaggtaccaggtgtcaggaaacagactaaaaagaattccaccaggctgtttggagatcctcatcttggagctttttcaaaagcggggcttcatctgcaaagggccctttcatcttgaagtttttcccctccgtctttcccctcccctggcatggacaccttgtgtttaggatcatctctgcaggtttcctaggtctgaatctgcgagtagatgaacctgcagcaagcagcgtttatggtgcttccttctccctcctctgtctcaaactgcgcaggcaagcactatgcaagcccaggccctctgctgagcggtactaaacggtcgggttttcaatcacactgaattggcaggataagaaaaataggtcagataagtatgggatgatagttgaagggaggtgaagaggctgcttctctacagaggtgaaattccagatgagtcagtctcttgggaagtgtgtttagaagggttcaggactttgtgagttagcatgaccctaaaattctaggggatttctggtgggacaatgggtggtgaattctgaagttttggagagggaagtggagcagccagcaagtaagctagccagagttttctcaagagccagctttgctcagcacactctcctgggccccaaggagtcccacggaatggggaaagcgggaaccctggagttcttgggaatcttggagcctaaagagaaaccgaggtgcaaattcatttcatggtgactgacccttgagcttaaacagaagcagcaaatgaaagaaccggacaaataaggaagggcacaagcctacccgactctatttacagtctgtaactttccactcttcctgtagtcccgaggcccctgggtccttctagcttttctctttcccatccttggggccttgtgtgatgatgggtgtggggctgccgatgggaaagtcgggggttgttaggcttttctgcctgctcctgcttaaacacaagaaggaatcctggattttgccctctccttagctcttagtctctttggtaggagttttgttccagaggagctctcccccttggatttgaacttgctctttttgttgttgttgttctttctcttctttttcttacctcccactaaaggggttccaaattatcctggtctttttctaccttgttgtgtttctatctcgtctttacttccatctgtttgtttttttctccatcagtgggggccgagttgttcccccagcctgccaaattttgatccttcccctcttttggccaaatcctagggggaagaaatcctagtatgccaaaaatatatgctaagcataattaaactccatgcgggtccataacagccaagaagcctgcaggagaaagccaagggcagttccctccgcagaacaccccatgcgtgctgagaggcgagctccttgaagaaggggctgttcttccaggaggccttattttgaactgcctcaggaccccactggagagcacagcatgccttactactgggtcatccttggtctatgtgctctgtactggaggctctgttctgcctcttatcagccaggtcaggggcacacatggcttaagtgacaaagccagaggagaagacaaccctgacagcatcacgctgcatcccattgctagcaggattggcaactcttcagacggagctgcgcttccctgcagtctagcacctctagggcctctccagactgtgccctgggagctctgggactgaaaggttaagaacataaggcaggatcagatgactctctccaagagggcaggggaattttctctccatgggccacaggggacagggctgggagaagaaatagacttgcaccttatgtcatgtaaataattgattttctagttcaagaagataatattggtagtgtgggaattggaggtaggaaggggaggaagtctgagtaagccagttggcttctaagccaaaaggattcctctttgtttatctctgagacagtccaaccttgagaatagctttaaaagggaaattaatgctgagatgataaagtccccttaagccaacaaaccctctgtagctatagaatgagtgcaggtttctattggtgtggactcagagcaatttacaagagctgttcatgcagccatccatttgtgcaaaatagggtaagaagattcaagaggatatttattacttcctcataccacatggcttttgatgattctggattctaaacaacccagaatggtcatttcaggcacaacgatactacattcgtgtgtgtctgcttttaaacttggctgggctatcagaccctattctcggctcaggttttgagaagccatcagcaaatgtgtacgtgcatgctgtagctgcagcctgcatcccttcgcctgcagcctactttggggaaataaagtgccttactgactgtagccattacagtatccaatgtcttttgacaggtgcctgtccttgaaaaacaaagtttctatttttatttttaattggtttagttcttaactgctggccaactcttacatccccagcaaatcatcgggccattggattttttccattatgttcatcacccttatatcatgtacctcagatctctctctctctcctctctctcagttatgtagtttcttgtcttggacttttttttttcttttctttttctttttttttttgctttaaaacaagtgtgatgccatatcaagtccatgttattctctcacagtgtactctataagaggtgtgggtgtctgtttggtcaggatgttagaaagtgctgataagtagcatgatcagtgtatgcgaaaaggtttttaggaagtatggcaaaaatgttgtattggctatgatggtgacatgatatagtcagctgccttttaagaggtcttatctgttcagtgttaagtgatttaaaaaaataataacctgttttctgactagtttaaagatggatttgaaaatggttttgaatgcaattaggttatgctatttggacaataaactcaccttgacctaaattaaaaaaaaaa

SEQ ID NO: 104 - DNA, 1534 bp, Homo Sapiens
ggaacgccaaccgcctgggcctagcgcagcttcctccgcccaccacggaagtgaggcggggatactaaagcgacggagcccggtggacggaagtgggtgttggaggctttaaggtagctttaaattcgtgttgtcctgggagctcgcccttttcggctggagtcgggctttacggcgccggatggctctggacgtgaagtctcgggcaaagcgttatgagaagctggacttccttggggagggacagtttgccaccgtttacaaggccagagataagaacaccaaccaaattgtcgccattaagaaaatcaaacttggacatagatcagaagctaaagatggtataaatagaaccgccttaagagagataaaattattacaggagctaagtcatccaaatataattggtctccttgatgcttttggacataaatctaatattagccttgtctttgattttatggaaactgatctagaggttataataaaggataatagtcttgtgctgacaccatcacacatcaaagcctacatgttgatgactcttcaaggattagaatatttacatcaacattggatcctacatagggatctgaaaccaaacaacttgttgctagatgaaaatggagttctaaaactggcagattttggcctggccaaatcttttgggagccccaatagagcttatacacatcaggttgtaaccaggtggtatcgggcccccgagttactatttggagctaggatgtatggtgtaggtgtggacatgtgggctgttggctgtatattagcagagttacttctaagggttccttttttgccaggagattcagaccttgatcagctaacaagaatatttgaaactttgggcacaccaactgaggaacagtggccggacatgtgtagtcttccagattatgtgacatttaagagtttccctggaatacctttgcatcacatcttcagtgcagcaggagacgacttactagatctcatacaaggcttattcttatttaatccatgtgctcgaattacggccacacaggcactgaaaatgaagtatttcagtaatcggccagggccaacacctggatgtcagctgccaagaccaaactgtccagtggaaaccttaaaggagcaatcaaatccagctttggcaataaaaaggaaaagaacagaggccttagaacaaggaggattgcccaagaaactaattttttaaagagaacactggacaacattttactactgagggaaatagccaaaaaggcaaataatggaaaaatagtaaacattaagtaaatgctgtagaagtgagtttgtaaatattctacacatgtaaaatatgtaaaactatgggttatttttattaaatgtattttaaaataaaaatttaattctggtttttctgattagagtgcaaaagtgagaaaagttcaatactcttgaaatgtagaattgaaaatgcattagggaaaacttaataaaaattattaccagttatttggaagatctgaaaaaaaaaaaaaaaaaa

SEQ ID NO: 105 - DNA, 1879 bp, Homo Sapiens
gcttggctgtgtttatctcgttggggactaaggcgtcggttggcgcgcaacgggttctaggctgcaggcagctcgaggacccgcggccccgccccggctcggcctggcagatagcagaggcagcaggccgtgccgggggggcatgttgctgtaaccagtggcccaggggatgttacggtggacagtgcacctggagggcgggccccgcagggtgaaccatgctgcagtggctgtcgggcatcgggtatactccttcgggggttactgctctggtgaagactatgagacactgcgtcagatagatgtgcacattttcaatgcagtgtccttgcgttggacaaagctgcccccggtgaagtctgccatccgtgggcaagctcctgtggtaccctacatgcgctatggacactcaaccgtcctcatcgacgacacagtcctcctttggggcgggcggaatgacaccgaaggggcctgcaatgtgctctatgcctttgacgtcaatacgcacaagtggttcacaccccgagtgtcagggacagttcctggggcccgggatggacattcagcctgtgtcctaggcaagatcatgtacatttttgggggctacgagcagcaggcggactgtttttccaatgacattcacaagctagataccagcaccatgacatggactcttatctgtacaaagggcagccctgcacgctggagggacttccactcagccacaatgctgggaagtcacatgtatgtctttgggggccgtgccgaccgctttgggccattccattccaacaatgagatttactgcaaccgcattcgagtctttgacaccagaactgaggcttggctggactgtcccccgactccagtgctgcctgaggggcgccggagccactcggcctttggctacaatggggagctgtacatctttggtggttataatgcaaggctgaaccggcacttccatgacctctggaagtttaatcctgtgtcctttacctggaaaaagattgaaccgaaggggaaggggccatgtccccgccggcgccagtgctgctgtattgttggtgacaagattgtcctctttgggggtaccagtccatctcctgaggaaggcctgggagatgaatttgaccttatagatcattctgacttacacattttggactttagccctagtctgaagactctgtgcaaactggccgtgattcagtataacctagaccagtcctgtttgcctcatgatatcaggtgggagctgaatgccatgaccaccaacagcaatatcagtcgccccatcgtctcctcccatgggtaggaggaagtttctgccacctcccctcctgagcctgctgtcatcttcactgcccctgcccatctgtcacccacctgctcctttgacccctggacttggtatacctccatgtggagttgttgggcgagaggtgttctctgtgctgtgaattcagtggggagctgtagcggggtgggggctaggttcctccccccttgggccgagggccccttccccttggtgctctgtccccatccacctcctttcagctgctcctgggcctcagctctgcccagggccagccaggttctgctgggaagggaagggaatggggagaagggagaagcaagcagtgtctgagcctcaggagcttccccctccccctttgcctatcccctcccctctgcttgagccttgagccttgactgggagctgaaaggagttgcagctgttggcatgagacctccttctccccgtcttggggaggtggggaccagcagataaatcccacccttccttgagctgtcgctgtactctgaagttcagccagctcagattttataaaaattaattaaaatctccaaa

SEQ ID NO: 106 - DNA, 3350 bp, Homo Sapiens
gctagccttcccctaagagctgcctggaaagctgtatttgctgcacgtggaaatctccgttattttccagcacccaacagtagcgtaatgggagtaacggacttaacctcatttctctttcagagcatttagccttcatatgcccttccctgcatgcttcccccaggccgtcaagacttgagttctgcctcgcttcccggcgcggtcgcagccctcagcccacttaggataatggcgacagctgaggtactgaacattggtaaaaaattatatgagggtaaaacaaaagaagtctacgaattgttagacagtccaggaaaagtcctcctgcagtccaaggaccagattacagcaggaaatgcagctagaaaaaaccacctggaaggaaaagctgcaatctcaaataaaatcaccagttgtatttttcagttattacaggaagcaggtattaaaactgccttcaccagaaaatgtggggagacagctttcattgcaccgcagtgtgaaatgattccaattgaatgggtttgcagaagaatagcaactggttcttttctcaaaagaaatcctggtgtcaaggaaggatataagttttacccacctaaagtggagttgtttttcaaggatgatgccaataatgacccacagtggtctgaggaacagctgattgctgcaaaattttgctttgctggacttcttataggccagactgaagtggatatcatgagtcatgctacacaggctatatttgaaatactggagaaatcctggttgccccagaattgtacactggttgatatgaagattgaatttggtgttgatgtaaccaccaaagaaattgttcttgctgatgttattgacaatgattcctggagactctggccatcaggagatcgaagccaacagaaagacaaacagtcttatcgggacctcaaagaagtaactcctgaagggctccaaatggtaaagaaaaactttgagtgggttgcagagagagtagagttgcttttgaaatcagaaagtcagtgcagggttgtagtgttgatgggctctacttctgatcttggtcactgtgaaaaaatcaagaaggcctgtggaaattttggcattccatgtgaacttcgagtaacatctgcgcataaaggaccagatgaaactctgaggattaaagctgagtatgaaggggatggcattcctactgtatttgtggcagtggcaggcagaagtaatggtttgggaccagtgatgtctgggaacactgcatatccagttatcagctgtcctcccctcacaccagactggggagttcaggatgtgtggtcttctcttcgactacccagtggtcttggctgttcaaccgtactttctccagaaggatcagctcaatttgctgctcagatatttgggttaagcaaccatttggtatggagcaaactgcgagcaagcattttgaacacatggatttccttgaagcaggctgacaagaaaatcagagaatgtaatttataagaaagaatgccattgaattttttaggggaaaaactacaaatttctaatttagctgaaggaaaatcaagcaagatgaaaaggtaattttaaattagagaacacaaataaaatgtattagtgaataaatgcttctctagatccatattaataaacatgagcatctaacccctcctttcttaggctagacaccaagatatttcagccagcctttatcattcctcttactttatcctttttccttaagtattggtggtcactactattgagtttcttccttaacactgattaaatgatcttaactccctcagctaaaactggcattactgactcccagctatatttctccagacttgcatttttttttttttttttgagacagggtctcactgtcgcccaggctggagtgcagtggcgtgatctcagttcactgctgctttccctcctgggctcaagcagttctcccacctcagcctctcgactaacagggactataatcttgcagcaccatgccgagctaattttattttttgtagagatgagctctcactatgtcacccaggttcgtctcaaactcctgaaccctagtaattctcctatctcagcctcccaaagtgctagggttacagacatgagccactgtgcctgtctagacttgtactttcaactgtccatttctccctgtctgtcccatgggcactcatgaaaaaacagaatgctcccaactttattcatcttccaagcctgtagctcttggtatactcactgttgcaagtcagaagcttgatttcatcattgatgtttttctcacgtttcacatctcactcatcaccaagtcatgttggtgttaatttctgattaacccttgaatttaccgtcttctcatcctctgtacaaaagcctcaagtgagggtcaaattcaacattatcctgatctagacagcccccattctcaatccacccttttccaagttgattgcccaaggacttctaacaataaactctcttttgcaccacagacttctttgaaaatatacatgctgttgaccctctctgtagaaaaccgcacacataaaacttaccaacagatttcattggttcttgggttctcccgaagcctatccatggtttatagattaagaattgatgaggtagctgggcacagtggctcacacctacgatcacagcacttcgggaggctgaagcaagcagatcacttgaggtcaggagtttgagaccagcctggccaacatggtgaaaccctgtctctactaaaaatacaaaaagtagccagccgtgatgacaggcacctgtaatcccagctactcgggaggctgaggcatgagaattgcttgaacccgggaggcggaggttgcagtgagcctagatcatgccactgcactccaacctgggcagcagagcaagactctgtctcaaaaggggaaaaaaaaaattgctgatgtgacccatgaagggaactcattttcctcgtaattttggactgccacacattggtacctttagttctctgaaggcccacgtttttatcattaagacctatttgttagctagtagagctttatgttcgctgtccatgaaaccttctgtaaccacagtgactacaagtagttctttctctattgaattattaggtccagaatagaagatgtcattgtacactttatttccctcacactgtgttatgctctgatgtgctatgcttagctatctgtcagagattagtaaattataaaactcatgtgtactacttaagtttatatcttatgctagtttataagaacaattaaaaggacttagaagattaactttggtaaaaaaaaaaa

SEQ ID NO: 107 - DNA, 3928 bp, Homo Sapiens
ttggccgccgcggcgctcggcgaggcgctcacggcctcaggcggctgcgcctagtgcaggctgcacccgcccgccagccgcgcccgggcccccggcccgcgcttgcaggggtccacggtcgctcaaccgggcttcgaggtcgcggcccccagcctgggtcaattccccgggctcacgcggcggtggcggcggcggcatcccgggctcaccatggtggcagcgcgcgccgagtgcccgcgcgtcgccggccgcccgagccgcagcgcgggctgagcgcagtctgcccgcagccccctggcccctgcccggccctgccgggcccgcgcgtcccctccggccgccgctgtctatggcgcagcccccctccctggatcatgcacagaaactttcgcaagtggattttctacgtgtttctctgctttggcgtcctgtacgtgaagctcggagcactgtcatccgtggtggccctgggagccaacatcatctgcaacaagattcctggcctagccccgcggcagcgtgccatctgccagagtcggcccgatgccatcattgtgattggggagggggcgcagatgggcatcaacgagtgccagtaccagttccgcttcggacgctggaactgctctgccctcggcgagaagaccgtcttcgggcaagagctccgagtagggagccgtgaggctgccttcacgtacgccatcaccgcggctggcgtggcgcacgccgtcaccgctgcctgcagccaagggaacctgagcaactgcggctgcgaccgcgagaagcagggctactacaaccaagccgagggctggaagtggggcggctgctcggccgacgtgcgttacggcatcgacttctcccggcgcttcgtggacgctcgggagatcaagaagaacgcgcggcgcctcatgaacctgcataacaatgaggccggcaggaaggttctagaggaccggatgcagctggagtgcaagtgccacggcgtgtctggctcctgcaccaccaaaacctgctggaccacgctgcccaagttccgagaggtgggccacctgctgaaggagaagtacaacgcggccgtgcaggtggaggtggtgcgggccagccgtctgcggcagcccaccttcctgcgcatcaaacagctgcgcagctatcagaagcccatggagacagacctggtgtacattgagaagtcgcccaactactgcgaggaggacgcggccacgggcagcgtgggcacgcagggccgtctctgcaaccgcacgtcgcccggcgcggacggctgtgacaccatgtgctgcggccgaggctacaacacccaccagtacaccaaggtgtggcagtgcaactgcaaattccactggtgctgcttcgtcaagtgcaacacctgcagcgagcgcaccgaggtcttcacctgcaagtgaggccaggcccggaggcggccgcgggcaccctggaacccggcggcattttgcacatccactcctcaccttccctgccttggtgctgccagcagcagacatagacgggtgcagaagcggggagctccaggtgcaggagggcaccggccggggcccacgccctctgcccgcctccctggggctccttcctgccacctcctcccatcacctcctgcggcagaacagcacccgtgacccacccagagagcaaggccaggggtcttggtgctccccgacggggcccggcaagttctctttcttctctctgggaaaatgaacgtccaggacacacctgtatcccagagagcaaagtgatgaggagactgagcgtccccagccccacctggcggcatggacacagaaaagctacgccggctggcctctccagaccagttcccaggctgggtctgccgctgggccctggggcggtggggacagatgttgacacaaattatttatgttttcttagtatcagaagaggattctcggcactaacacatagccagtcctaactccgtactctgtgtcagcccatcccctagacaccctctgtttcctttcccggccccacctggccggccctctgcccctgcagagctgaggcagcctggggttgatggggaccacgcggtgcctgcaggtcctagaagtgagctgggcaggggctcttcagaccacacagccctgaccgggccttggaggagagccatggacaggctcctccatgccgtctttccttcttttgaaaatcctatcaatggctgggcgcggtggctcacacctgtaatcccagcactttgggagaccgaggcaggtggatcacctgaggtcaggagttcgagaccagcctggccaacgtggtgaaaccctgtctctactaaaaatacaaaaattagctgggcgtggtggcgtgcacctgtaatcccagctactcaggaggctgagacaggacacttgcttgaacccgggaggtggaggttgcaatgagccaagattgtgccactgtattccaacttgggtgacagagcacgactctgtctcaaaaaaagaaaagaaaataatatcaagcaaatcaaaatatcacccacgtcaggttccaggagtccttcgttccctccctcatcctgtcaccctcccggcctggcacctccagtttacagagacccccttccccctggagccagcctgacccctgggacagtgctgccgcgggggtcaggcaggtggtgagtggtcagggatgtttgtcccacttgacagatgggaactctgaggcccagagtggcacaaggacctaccagagaccctgcagctgtgactggaggcttccacctttctcctgcccagcctggggctctggacctgggagaacacatcaggatgcccggggtggcagtaggtagctcccatgccttgaggcacttggctgctccctccaccccctgacagcctcattggggcctgcactcccctcggtgcctttgaggcttcgcctagccctgtcctggtccttttaccctgaccccagtgctgagaaaatctggatccagagctggacatgtcctttctggatgctcccacccctgtctctgaggagcatgagtgacagagggaggaacttgtccgaggccagagaggatggtctgcagctggctcctggtgcacccccactgcccacggcctggcccccatttagggtgtgttctcttggaagcccgtaggaatgtgttcttgagcagccgacaagccaagggcctgggctcagcctggggcaagtgggtccctcctgggctctggccctgtggtccagcccatgtgcctctaaccatgcctggacgctctgagtctccgggccaccgtgaatgccccaccctcagcctggccccatccccttaccttccccaagtcccagaacacacctgagtccataggcccggcagcctctgcaaggaacctggttaacttatgttgttatatagcgtcgaaatgtctatagtgtctttaaattattgtgacctacactgggtaccggagagggggatggctgcggcccccatccctcatcccccatcccatcccatccctcatctcatccctcatcccatcccccatcccatccctgaccccatcccccatcccatccctcatccctattccccatacccaccccccatcccatcccccatctcccgaaccaggctcctcctgcttcaacagacccttggggcccctgatgccaccgagacactcgcactgtcccttggctgccgggcaccccactgagcccctgcccaccccaaagtctgccagcaacaggccctttgcctgggtgagacgggggtcagggtggcccagatgggggtgatggcgaccaaggtgctgcgtccccacccttctgacggcagcctcccctggaggggagtgctcggcccaataaaagctggaatcggaaaaaaaaaaaaaaaaaa

SEQ ID NO: 108 - DNA, 2200 bp, Homo Sapiens
agcggccgccttgctcctctaggtcccaggcgctctgcggagctttcgctgcccggtgagcggcgccgggcttgaggtcgcccagacgtcggaggagccgggtcacgaggctggagcttcctgcttgcagagtgcggcggggaggcgcggcccgggaacgcgggatcctggggagatctgccttctggagactgcgccgtcctcccgggagagccagaaagaggacatggctgctgggcagcgggaagcgaggccccaggtgtcactgacattcgaggacgtggctgtgctctttacctgggatgagtggagaaagctggctccttctcagagaaacttgtaccgggatgtgatgctggagaactataggaacctggtctcactgggactctcatttaccaaaccaaaagtcatctccctgttgcagcaaggagaagatccctgggaggtggagaaagacagttctggtgtctcctctctaggatgtaagagcacacctaaaatgacaaagtcaactcaaactcaggattcatttcaggagcagataaggaaaagattgaaaagggatgaaccctggaacttcatatcagaaagatcctgcatatatgaagagaaattaaagaaacagcaggacaaaaatgaaaatttacaaataatttcagttgcccatacaaaaatccttactgtagatagaagccataaaaatgttgaatttggccaaaacttctacctgaaatcagtcttcattaagcaacagagatttgctaaagaaaaaactccatcaaaatgtgaaatacaaagaaatagtttcaagcagaattcaaatttacttaaccaatcaaaaatcaaaacagcagagaaacgctataaatgcagtacatgtgaaaaagccttcattcacaattcatcccttcgtaaacatcagaaaaaccacactggagaaaaattatttaaatgtaaagaatgtttaaaagctttcagccaaagttctgctcttattcaacatcaaagaactcatacaggagagaaaccctatatatgtaaagaatgtgggaaagccttcagccatagtgcatccctttgtaagcatttaaggacccatactgtggagaaatgctatagatgtaaagaatgtggtaaatccttcagtcgaaggtctgggctttttatacatcaaaaaatccatgctcaagaaaatccccataaatacaatccaggcaggaaggcatccagttacagcacttccctttctggaagtcagaaaattcatctcagaaagaagtcctacttatgtaatgaatgtggcaacacctttaagtctagctcatcccttcgttatcatcagagaattcacactggagagaagccttttaaatgtagtgaatgtgggagagccttcagccagagtgcctctcttattcaacatgaaagaattcacaccggagaaaagccctatagatgcaatgaatgtgggaaaggctttacttctatttcacgacttaatagacaccgaataattcatactggagagaaattgtataattgtaatgaatgtggtaaagccttaagctcccactcaacacttattattcatgagcgaattcatactggagaaaaaccatgtaaatgtaaagtatgtggaaaagccttcagacagagttccgctctcattcaacatcagagaatgcatactggagaaagaccctataagtgtaacgaatgtgacaaaacattcaggtgtaactcatcgcttagtaatcaccagagaattcatactggagagaaaccatatcgatgtttagaatgtgggatgtcttttggccaaagtgcagctcttatacaacatcagaggattcatacaggagaaaaaccctttaaatgtaatacatgtggaaaaacttttagacaaagctcatcacttattgcacatcaaagaattcatactggagagaaaccctatgaatgtaatgcatgtgggaaactctttagccagaggtcatcccttactaatcattataaaattcacattgaagaggactccttaaaagccgatttgcatgtgtgaaagccttaaaccaaaactcatcagagaatacatgcttgagagtgatttattaaatataatgaatatgagaaaactcttagttctcatcagatactaagttttaagaataaactttagctatgtaataacttaaaa

SEQ ID NO: 109 - DNA, 2769 bp, Homo Sapiens
ctaggtgggtgtcccctcggtgcttcccagctgccgtctgcaccagccatggactgctacacggcgaactggaacccactcggggactctgccttttaccggaaatatgagctgtacagcatggactgggacctgaaggaggaactcagggattgcctggtggctgctgcaccctatgggggccccattgcactgctgaggaacccctggcggaaggagaaagctgctagtgtgaggccagtgctcgatatatactctgcttccggcatgcctctggccagcctgctgtggaagagtggacccgtggtgtccctgggctggtcagctgaggaggagctgctctgtgtgcaggaagatggtgctgtactggtttatgggcttcatggtgacttccggagacacttcagcatgggcaatgaagtgctccagaaccgggttctggatgcccggatctttcacactgagtttggttccggagtggccatcctcacaggggcccaccgcttcaccctcagtgccaatgtgggtgacctcaaactccgccggatgccagaggtgccaggtctgcaaagtgcaccctcctgctggactgtgctgtgccaggaccgagtggcacacattcttctggctgtggggcctgacctttacctcttggaccatgcagcctgctccgcagtgacgccccctggcctggccccaggagtaagcagcttcctacagatggctgtctccttcacctaccgacacctggcactcttcacagacacaggctacatctggatggggacagcatcactcaaggagaagctatgtgagttcaactgcaacatccgggcacctccaaagcagatggtctggtgcagccgtcctcgtagcaaggagagggccgtggtggtggcctgggaaaggcggctgatggtggtgggcgatgcacccgagagcatccagtttgtgctggatgaggactcctacctggtgcctgagctcgatggggtccgcatcttctcccgcagcacccacgagttcctgcatgaggttccagcggccagcgaggaaatcttcaaaattgcctcaatggcccccggggcgctgctcctggaggctcagaaggagtatgagaaagagagccagaaggcggacgagtacctgcgggagatccaggagctgggccagctgacccaggccgtgcagcagtgcattgaggctgcaggacatgagcaccagccagacatgcagaagagtctgctcagggccgcctccttcggaaagtgtttcctggacagatttccacccgacagcttcgtgcacatgtgtcaggacctgcgtgtgctcaatgctgttcgggactatcacatcgggatcccgctcacctatagccaatataagcagctcaccatccaggtgctgctggacaggctcgtgttgcggagactttaccccctggccatccagatatgcgagtacttgcgccttcctgaagtacagggcgtcagcaggatcctggcccactgggcctgctacaaggtgcaacagaaggatgtctcagatgaggatgtggctcgagccattaaccagaagctgggggacacgcctggtgtctcttactccgacattgctgcacgagcctatggttgtggccgcacggagctggccatcaagctgctggagtatgagccacgctcaggggagcaggtaccccttctcctaaagatgaagaggagcaaactggcactaagcaaggccatcgagagcggggacactgacctggtgttcacggtgttgctgcacctgaagaacgagctgaaccgaggagattttttcatgacccttcggaatcagcccatggccctcagtttgtaccgacagttctgtaagcatcaggagctagagacgctgaaggacctttacaatcaggatgacaatcaccaggaattgggcagcttccacatccgagccagctatgctgcagaagagcgtattgaggggcgagtagcagctctgcagacagccgccgatgccttctacaaggccaagaatgagtttgcagccaaggctacagaggatcaaatgcggctcctacggctgcagcggcgcctagaagacgagctggggggccagttcctagacctgtctctacatgacacagttaccaccctcattcttggcggtcacaacaagcgtgcagagcagctggcacgtgacttccgcatccctgacaagaggctctggtggctgaagctgactgccctggcagatttggaagattgggaagagctagagaagttttccaagagcaagaaatcacccattggctacctgccttttgtggagatctgcatgaaacaacataacaaatacgaagccaagaagtatgcttcccgcgtgggtcccgagcagaaggtcaaggctttgcttcttgttggcgatgtggctcaggctgcagatgtggccatcgaacaccggaatgaggctgagctgagcctcgtattgtcccactgcacgggagccacagatggggccacagctgacaagattcaacgggccagggcacaagcccagaagaagtgaggagtccatcctgtacatctcaagcaaggggttcctcccctagcacctgggcttggcagaagggccatagttcatccagctcctcccctagagcaatgctgaggagcgggggcatggtagcagggctgtctggttttaaataaagttggaacacttcaaaaaaaaaaaaaaaaaaaaaaaaaaaaaaaaaaaaaaaaaaaa

SEQ ID NO: 110 - DNA, 1946 bp, Homo Sapiens
atcgcgcgagacagcggaaggagcaagagtgggaggcgcgcgcggaggccgcgacggacgcaagatggcgacggcgaccatagctctccaggtcaatggccagcaaggaggggggtccgagccggcggcggcggcggcagtggtggcagcgggagacaaatggaaacctccacagggcacagactccatcaagatggagaacgggcagagcacagccgccaagctggggctgcctcccctgacgcccgagcagcaggaggcccttcagaaggccaagaagtacgccatggagcagagcatcaagagtgtgctggtgaagcagaccatcgcgcaccagcagcagcagctcaccaacctgcagatggcagcagtgacaatgggctttggagatcctctctcacctttgcaatcgatggcggctcagcggcagcgggcgctggccatcatgtgccgcgtctacgtgggctctatctactatgagctgggggaggacaccatccgccaggcctttgccccctttggccccatcaagagcatcgacatgtcctgggactccgtcaccatgaagcacaagggctttgccttcgtggagtatgaggtccccgaagctgcacagctggccttggagcagatgaactcggtgatgctggggggcaggaacatcaaggtgggcagacccagcaacatagggcaggcccagcccatcatagaccagttggctgaggaggcacgggccttcaaccgcatctacgtggcctctgtgcaccaggacctctcagacgatgacatcaagagcgtgtttgaggcctttggcaagatcaagtcctgcacactggcccgggaccccacaactggcaagcacaagggctacggcttcattgagtacgagaaggcccagtcgtcccaagatgctgtgtcttccatgaacctctttgacctgggtggccagtacttgcgggtgggcaaggctgtcacaccgcccatgcccctactcacaccagccacgcctggaggcctcccacctgccgctgctgtggcagctgctgcagccactgccaagatcacagctcaggaagcagtggccggagcagcggtgctgggtaccctgggcacacctggactggtgtccccagcactgaccctggcccagcccctgggcactttgccccaggctgtcatggctgcccaggcacctggagtcatcacaggtgtgaccccagcccgtcctcctatcccggtcaccatcccctcggtgggagtggtgaaccccatcctggccagccctccaacgctgggtctcctggagcccaagaaggagaaggaagaagaggagctgtttcccgagtcagagcggccagagatgctgagcgagcaggagcacatgagcatctcgggcagtagcgcccgacacatggtgatgcagaagctgctccgcaagcaggagtctacagtgatggttctgcgcaacatggtggaccccaaggacatcgatgatgacctggaaggggaggtgacagaggagtgtggcaagttcggggccgtgaaccgcgtcatcatctaccaagagaaacaaggcgaggaggaggatgcagaaatcattgtcaagatctttgtggagttttccatagcctctgagactcataaggccatccaggccctcaatggccgctggtttgctggccgcaaggtggtggctgaagtgtacgaccaggagcgttttgataacagtgacctctctgcgtgacagtggtccctctccccggacttgcacttgttccttgtttcctctgggttttatagtgatacagtggtgtccccggggccaggcgcgctctgcccagcccagcctacagtgcggataaaggtgcggatgctgctggccctgaaaaaaaaaaaaaaaaaaaaaaaaaaaaaaaaaaaaaaaaaaaaaaaaaaaaaaaaaaaaa

SEQ ID NO: 111 - DNA, 2409 bp, Homo Sapiens
attcctgacagcacctcccggaccggacataacggtccccgcgcggctccccgaaccggaagtggaggtgagctgtcgcgggcggcgcccggccttgctcaacgcccagcagtccccaccgtcgctgccgccgccaccgccctcggccgctgccgaggcctcctgcagccatcatgtccgccagcgccgtctacgtgctggacctgaagggcaaggtgctcatctgccggaactaccgtggcgacgtggacatgtcagaggtggagcacttcatgcccatcctgatggagaaggaggaggaggggatgctgtcgcccatcctggcccacgggggggtccgtttcatgtggatcaaacacaacaacctgtatctggttgccacatccaagaagaacgcgtgcgtgtcgctggtcttttctttcctctataaggtggtgcaggtgttttccgagtacttcaaggagctggaggaggagagcatccgggacaactttgttatcatctacgagctgctggacgagctcatggacttcggctacccccagaccaccgacagcaagatcctgcaggagtacatcactcaggaaggccacaagctggaaacaggggccccgcggccaccagccaccgtcaccaacgcggtgtcctggcggtccgaaggcatcaagtatcggaagaatgaggtgttcttggacgtcatcgagtctgtcaacctcttgggtaaatacccaggagtgggatggctgggtcacacggtcagcgccaacggcaatgtcctgcgcagcgagatcgtgggctccatcaagatgcgagtcttcctctcgggcatgcccgagctgcgcctgggcctcaacgacaaggtcctctttgacaacacgggccgcggcaaaagcaaatccgtggagctggaggatgtgaagttccaccagtgtgtgcggctatcacgcttcgagaatgaccgcaccatctccttcatcccacccgacggcgagttcgagctcatgtcctaccgtctcaacacccacgtcaagcctttgatatggatcgagtcggtgatcgagaagcactcccacagccgcatcgagtacatgatcaaggccaaaagccagttcaagcggcggtcaacagccaacaacgtggagatccacattcccgtgcccaatgatgccgactcacccaagttcaagacgacggtggggagcgttaagtgggtccccgagaacagcgagatcgtgtggtccatcaagtccttcccgggcggcaaggagtacctgatgcgggcccacttcggcctgcctagtgtggaggccgaagacaaggagggcaagcccccgatcagtgtcaagttcgagatcccttacttcactacctccggcatccaggtgcgctacctgaagatcattgagaagagtgggtaccaggccctgccctgggtgcgttatatcacgcagaatggagattaccagctccggacccagtgaggggctgtcgcagccaacaccccggcctcggggctcctggtggcagcaccaggggacacacctgccaaacccaccagatggaggggccctccctggtctctggccaccctcccagcctctgcccagggacccctgccttccccaggccatctgctctgccgtcgacactcgtctcagaagcccctttcccagaagaggctggtcttcaagaagtctcgtttctttgcccctgaagtcagtttcaggggaaggatgtgaaatttttccgtgtagaggttacagccttttatgctgttgagctcccaggtaccaaaaagcttggccaacgcttgccagccagccagctgcaggtggcatctgccacgaaggaagcgccagcctcgccaggccagcaggggcgtcgttttgttgccattttgttgaacgttatgggtttatgggtgttcctggaacttgtctttgtgcattcgttgctgtttgtgttaccctcactgtccccatgtcccacccacgtcctacggcactcaggaagcacttggtgaggacgagccctcacccttcttgtcttccttcccggcagcgcccgcagcgggccatttacacgtcgaggctggcacctggcgcgctcgggggccactgtagcgtctgcctgctccctggactcgcaggcctcgcctgtggcgccttcccagggccagcctgggtcacgagatgctgtcactcagccagatcagtattgacccaccaggggaggtggggtttggtgagagacgccagcctcagactttttcccactgagggtccagagagcggggccacgtgtcacccacgtctgcgcttggtcacccgtcctccccaccctgtgtgtgtttatgtcatagttacattaaattccattcattgaatactcaaaaaaaaaaaaaaaaaa

SEQ ID NO: 112 - DNA, 2639 bp, Homo Sapiens
gagatctaggaagtcgcttctttttctggtagaaggcggggttctcctcgtacgctgcggagtctctgcggggtgtagaccggaatcctgctgacgggcagagtggatcagggagggagggtcgagacacggtggctgcaggtctgagacaaggctgctccgaggtagtagctctcttgcctggaggtggccattcattcctggagtgctgctgaggagcgagggcccatctggggtctctggaagtcggtgcccaggcctgaaggatagccccccttgcgcttccctgggctgcggccggccttctcagaacgaagggcgtccttccaccccgcggcgcaggtgaccgctgccatggcttttccccatcggccggacgcccctgagctgcctgacttctccatgctgaagaggctggctcgagaccagctcatctatctgctggagcagcttcctggaaaaaaggatttattcattgaggcagatctcatgagccctttggatcgaattgccaatgtctccatcctgaagcaacacgaagtagacaagctatacaaggtggagaacaagccagccctcagctccaatgaacaattgtgcttcttggtcagaccccgcatcaagaatatgcgatacattgccagtcttgtcaatgctgacaaattggctggccgaactcgcaaatacaaagtgatcttcagccctcaaaagttctatgcgtgtgagatggtgcttgaggaagagggaatctatggagatgtgagctgtgatgaatgggccttctctttgctgcctcttgatgtggatctgctgagcatggaactaccagaatttttcagggattactttctggaaggagatcagcgttggatcaacactgtagctcaggccttacaccttctcagcactctctatggaccctttccaaactgctatggaattggcaggtgcgccaagatggcatatgaattgtggaggaacctggaggaggaggaggatggcgaaaccaagggccgaaggccagagattggacatatctttctcttggacagagatgtggactttgtgacagcactttgctcccaagtggtttatgagggcctagtagatgacaccttccgcatcaagtgtgggagtgtcgactttggcccagaagtcacatcctctgacaagagcctgaaggtgctactcaatgccgaggacaaggtgtttaatgagattcggaacgagcacttctccaatgtctttggcttcttgagccagaaggcccggaacttgcaggcccagtatgatcgccggagaggcatggacattaagcagatgaagaatttcgtgtcccaggagctcaagggcctgaaacaggagcaccgcctgctgagtctccatattggggcctgtgaatccatcatgaagaagaaaaccaagcaggatttccaggagctaatcaagactgagcatgcactgctagaggggttcaacatccgggagagcaccagctacattgaggaacacatagaccggcaggtgtcgcctatagaaagcctgcgcctcatgtgccttttgtccatcactgagaatggtttgatccccaaggattaccgatctctgaaaacacagtatctgcagagctatggccctgagcacctgctaaccttctccaatctgcgaagagctgggctcctaacggagcaggcccccggggacaccctcacagccgtggagagtaaagtgagcaagctggtgaccgacaaggctgcaggaaagattactgatgccttcagttctctggccaagaggagcaattttcgtgccatcagcaaaaagctgaatttgatcccacgtgtggacggcgagtatgatctgaaagtgccccgagacatggcttacgtcttcggtggtgcttatgtgcccctgagctgccgaatcattgagcaggtgctagagcggcgaagctggcagggccttgatgaggtggtacggctgctcaactgcagtgactttgcattcacagatatgactaaggaagacaaggcttccagtgagtccctgcgcctcatcttggtggtgttcttgggtggttgtacattctctgagatctcagccctccggttcctgggcagagagaaaggctacaggttcattttcctgacgacagcagtcacaaacagcgctcgccttatggaggccatgagtgaggtgaaagcctgatgtttttcccggccagtgttgacatcttccctgaacacattcctcagtgagatgcaggcatctggcacccagctgctataaccaagtgtccaccaactacctgctaagagccgggagcatggaacgtgttgggatttagagaacattatctgagaaaagagttcacttcctgctcccaggatatttctcttttctgtttatgaagtacaacccatgctgctaagatgcgagcaggaagaggcatcctttgctaaatcctgtttgaatgtcattgtaaataaagcctctgctctcagatgtaatacgttggtcgttctggacacgcacttccatctttattagtgaaagcccattggagcttgctacaggggcttcctgtgcttcttggcctggactttgtagtggctccaggcctggtctggttcttccct

SEQ ID NO: 113 - DNA, 2075 bp, Homo Sapiens
gccataaaggccgccgcgcgcccacgcgcctcgcttgctgcgcgctgccggcgctccttcctcctcggctcgcgtctcactcagtgtaccttctagtcccgccatggccgctctcacccgggacccccagttccagaagctgcagcaatggtaccgcgagcaccgctccgagctgaacctgcgccgcctcttcgatgccaacaaggaccgcttcaaccacttcagcttgaccctcaacaccaaccatgggcatatcctggtggattactccaagaacctggtgacggaggacgtgatgcggatgctggtggacttggccaagtccaggggcgtggaggccgcccgggagcggatgttcaatggtgagaagatcaactacaccgagggtcgagccgtgctgcacgtggctctgcggaaccggtcaaacacacccatcctggtagacggcaaggatgtgatgccagaggtcaacaaggttctggacaagatgaagtctttctgccagcgtgtccggagcggtgactggaaggggtacacaggcaagaccatcacggacgtcatcaacattggcattggcggctccgacctgggacccctcatggtgactgaagcccttaagccatactcttcaggaggtccccgcgtctggtatgtctccaacattgatggaactcacattgccaaaaccctggcccagctgaaccccgagtcctccctgttcatcattgcctccaagacctttactacccaggagaccatcacgaatgcagagacggcgaaggagtggtttctccaggcggccaaggatccttctgcagtggcgaagcactttgttgccctgtctactaacacaaccaaagtgaaggagtttggaattgaccctcaaaacatgttcgagttctgggattgggtgggaggacgctactcgctgtggtcggccatcggactctccattgccctgcacgtgggttttgacaacttcgagcagctgctctcgggggctcactggatggaccagcacttccgcacgacgcccctggagaagaacgcccccgtcttgctggccctgctgggtatctggtacatcaactgctttgggtgtgagacacacgccatgctgccctatgaccagtacctgcaccgctttgctgcgtacttccagcagggcgacatggagtccaatgggaaatacatcaccaaatctggaacccgtgtggaccaccagacaggccccattgtgtggggggagccagggaccaatggccagcatgctttttaccagctcatccaccaaggcaccaagatgataccctgtgacttcctcatcccggtccagacccagcaccccatacggaagggtctgcatcacaagatcctcctggccaacttcttggcccagacagaggccctgatgaggggaaaatcgacggaggaggcccgaaaggagctccaggctgcgggcaagagtccagaggaccttgagaggctgctgccacataaggtctttgaaggaaatcgcccaaccaactctattgtgttcaccaagctcacaccattcatgcttggagccttggtcgccatgtatgagcacaagatcttcgttcagggcatcatctgggacatcaacagctttgaccagtggggagtggagctgggaaagcagctggctaagaaaatagagcctgagcttgatggcagtgctcaagtgacctctcacgacgcttctaccaatgggctcatcaacttcatcaagcagcagcgcgaggccagagtccaataaactcgtgctcatctgcagcctcctctgtgactcccctttctcttctcgtccctcctccccggagccggcactgcatgttcctggacaccacccagagcaccctctggttgtgggcttggaccacgagcccttagcagggaaggctggtctcccccagcctaacccccagcccctccatgtctatgctccctctgtgttagaattggctgaagtgtttttgtgcagctgacttttctgacccatgttcacgttgttcacatcccatgtagaaaaataaagatgccacggaggaggt

SEQ ID NO: 114 - DNA, 3832 bp, Homo Sapiens
tggggcgatgcttaagtgtccacgcatccgtagtgcgacgcacgcaggcgtagtacggtcccccgggcgacagcggtggcggctcctcggggtgctcggctccctcccacctaggccggccccggcccgactcgccctcagaaactcactgtttggggctgcggactttctcgtcgtgccccacaaaagtaaagcttggggacctggggggagccggaagtatcgcttcgagatccccaaatactatcggggaaacggaagtggccgtcggtggcaggtttgggggagaccggaagtgacgagacctgtcggccatggagcctaatgatagtaccagtaccgctgtggaggagcctgacagcttggaggtgttggtgaagaccttggactctcaaactcgtacctttattgtgggggcccagatgaatgtaaaagagtttaaggagcacattgctgcctctgtcagcatcccatctgaaaaacaacggctcatttaccagggacgagttctgcaagatgataagaagcttcaggaatacaatgttgggggaaaggttatccacctggtggaacgggctcctcctcagactcacctcccttctggggcatcttctgggacggggtctgcctcagccactcatggtgggggatccccccctggtactcgggggcctggggcctctgttcatgaccggaatgccaacagctatgtcatggttggaaccttcaatcttcctagtgacggctctgctgtggatgttcacatcaacatggaacaggccccgattcagagtgagccccgggtacggctggtgatggctcagcacatgatcagggatatacagaccttactatcccggatggagactctcccctaccttcagtgtcgaggagggccccaaccgcagcacagtcagccgcccccgcagccaccggctgtgaccccggagccagtagccttgagctctcaaacatcagaaccagttgaaagtgaagcacctccccgggagcccatggaggcagaagaagtggaggagcgtgccccagcccagaacccggagctcactcctggcccagccccagcgggcccaacacctgccccggaaacaaatgcacccaaccatccttcccctgcggagtatgtcgaggtgctccaggagctacagcggctggagagtcgcctccagcccttcttgcagcgctactacgaggttctgggtgctgctgccaccacggactacaataacaatcacgagggccgggaggaggatcagcggttgatcaacttggtaggggagagcctgcgactgctgggcaacacctttgttgcactgtctgacctgcgctgcaatctggcctgcacgcccccacgacacctgcatgtggtccggcctatgtctcactacaccacccccatggtgctccagcaggcagccattcccatacagatcaatgtgggaaccactgtgaccatgacaggaaatgggactcggccccccccaactcccaatgcagaggcacctccccctggtcctgggcaggcctcatccgtggctccgtcttctaccaatgtcgagtcctcagctgagggggctcccccgccaggtccagctcccccgccagccaccagccacccgagggtcatccggatttcccaccagagtgtggaacccgtggtcatgatgcacatgaacattcaagattctggcacacagcctggtggtgttccgagtgctcccactggccccctgggaccccctggtcatggccaaaccctgggacagcaggtgccaggcttcccaacagctccaacccgggtggtgattgcccggcccactcctccacaggctcggccttcccatcctggagggcccccagtctctgggacactgcagggcgccggtctgggtaccaatgcctcgttggcccagatggtgagcggccttgtggggcagcttcttatgcagccagtccttgtggctcaggggaccccaggtatggctccaccgccagcccctgccactgcttctgccagtgctggcaccaccaacacagctaccacagctggccccgctcctggggggcctgcccagcctccacccacccctcaaccctccatggctgatcttcagttctctcagcttctggggaacctgctagggcctgcagggccaggggctggagggtctggtgtggcttctcccaccatcactgtggcgatgcctggtgtccctgcctttctccaaggcatgactgacttcttgcaggcaacacagacagcccctccaccacccccacctcctccacccccaccacctgccccagagcagcagaccatgcccccaccaggctccccttctggtggcgcagggagtcctggaggcctgggtcttgagagcctgtcaccggagttttttacctcagtggtgcagggtgtgctcagctccctgctgggctccctgggggctcgggctggcagcagtgaaagtattgctgccttcatacaacgcctcagtggatccagcaacatctttgagcctggagctgatggggcccttggattctttggggccttgctttctcttctgtgccagaacttctctatggtggacgtagtgatgcttctccatgggcatttccagccactacaacggctccagccccagctgcgatccttcttccaccagcactacctgggtggtcaggagcccacacccagtaacatccggatggcaacccacacattgatcacggggctagaagagtatgtgcgggagagtttttccttggtgcaggttcagccaggtgtggacatcatccggacaaacctggaatttctccaagagcagtttaatagcattgctgcgcatgtgctgcattgcacagatagtggatttggggcccggttgctggagttgtgtaaccaaggcctgtttgaatgcctggccctaaacctgcactgcttggggggacagcagatggagcttgctgctgttatcaatggccgaattcgtcgtatgtctcgtggggtgaatccctccttggtgagctggctgaccactatgatgggactgaggcttcaggtggtactggagcacatgcctgtaggccctgatgccattctcagatacgttcgcagggttggtgatcccccccagccacttcctgaggagccaatggaagttcagggagcagaaagagcttcccctgagcctcagcgggagaatgcttccccagcccctggaacaacagcagaagaggccatgtcccgaggtccacctcctgctcctgaggggggctcccgggatgaacaggatggagcttcagctgagacagaaccttgggcagctgcagtccccccagaatgggtccctattatccagcaggacattcagagccagcggaaggtgaaaccgcagccccctctgagtgatgcctacctcagtggtatgcctgccaagagacgcaagacgatgcagggtgagggcccccagctgcttctctcagaggctgtgagccgggcagctaaggcagccggagctcggcccctgacgagccccgagagcctgagccgggacctggaggcaccagaggttcaggagagctacaggcagcagctccggtctgatatacaaaaacgactgcaggaagaccccaactacagtccccagcgcttccccaatgcccagcgggcctttgctgatgatccttagctctttgctctatggcccttcctcatcaggggaccgtttcccccctcttccttcacagtatttaagaaataaaagtcggatttttctggctgctttctctctaaaaaaaaaaaaaaaaa

SEQ ID NO: 115 - DNA, 3058 bp, Homo Sapiens
gaaacctgggctggagtgaggtggaaggatgtttgctgccacatggcgaccgcgaagtgactcccttaccgccgcgggtcgcggaggaggcagggggaaggtgcccatctggttcctaggcctcctctccctgctggcagatgggaacaggttcttcttgaggaaactgaggcaaagaggagggcaggtctgagggaccccgcttgggctggcctcacccgcacactgggagggcagccaggtggggactctgacctgggggcttctggaggagaggatgagatggctgggcatccatggcatggtactgcagcactggccagcagccaggcctggagggatggacgcgagagacaagctctcgtgtcctgcagggctctgtacacatatgaagatggctccgatgacctcaagcttgcagcatcaggagaagggggcttgcaggagctttcgggacactttgagaaccagaaggtgatgtacggcttctgcagtgtcaaggactcccaagctgctctgccaaaatacgtgctcatcaactgggtgggcgaagatgtgcctgatgcccgcaagtgcgcttgtgccagccacgtggctaaggtggcggagttcttccagggtgtcgacgtgatcgtgaacgccagcagcgtggaagacatagacgcgggtgccatcgggcagcggctctctaacgggctggcgcgactctccagccctgtgctgcaccgactgcggctgcgagaggatgagaacgcagagcccgtgggcaccacctaccagaagacggatgcagctgtggaaatgaagcggattaaccgagagcagttctgggagcaggccaagaaggaagaagagctgcggaaggaggaggagcggaagaaggccctggatgagaggctcaggttcgagcaggagcggatggagcaggagcggcaggagcaagaggagcgcgagcggcgctaccgggagcgggagcagcagatcgaggagcacaggaggaaacagcagactttagaagcggaagaggccaagaggcggttgaaggagcagtctatctttggtgaccatcgggatgaggaggaagagacccacatgaagaagtcagagtcggaggtggaggaggcagcagctattattgcccagcggcctgacaacccaagggagttcttcaagcagcaggaaagagtcgcatcggcctctgcgggcagctgtgatgtaccctcgcccttcaaccatcgaccaggcagccacctggacagccaccggaggatggcgcccactcccatccccacgcggagcccgtctgactccagcaccgcctccacccctgtcgctgagcagatagagcgggccctggatgaggtcacctcctcgcagcctccaccactgccaccgccacccccaccagcccaagagacccaggagcccagccccatcctagacagtgaggagaccagagcagcagcccctcaggcctgggccggccccatggaggagccccctcaggcacaggcgcctccccgggggccaggcagccctgcagaggacttgatgttcatggagtctgcagagcaggctgtcctggctgctcccgtggagcctgccacagctgacgccacggagatccacgatgcagctgacaccattgaaactgacactgccactgctgacaccactgttgccaacaacgtaccccccgccgccaccagcctcattgacctatggcctggcaacggggaaggggcctccacactccagggtgagcccagggcccccacgccaccctcgggtactgaggtcaccctggcagaggtgcccctgctggatgaggtggctccggagccactgctgccagcaggcgaaggctgtgccacccttctcaactttgatgagctgcctgagccgccagccaccttctgtgacccagaggaagtggaaggggagcccctggctgccccccagaccccaactctgccctcagcccttgaggagctggagcaagagcaggagccggagccccacctgctaaccaatggcgagaccacccagaaggaggggacccaggccagtgaggggtacttcagtcaatcacaggaggaggagtttgcccaatcggaagagctctgtgccaaggctccgcctcctgtgttctacaacaagcctccagagatcgacatcacatgctgggatgcagacccagttccagaagaggaggagggcttcgagggtggtgattagcggtggcgccagccctaggctacccttgccaaggccgcccacctgcatcagcctctggccagacggcccgccgtgcctgcattcgcagcagctccgcctggcacccactccggattccggccctggctggggacttggccgcttccctacccacagggcctgacttttacagcttttctctttttttaaaaagttgataggagacttgtacagttgactggctttcctctcgttggtagttgagacgctgttgcaaattccacccctccttccctggtccagattgtagctcttagtcctccctgctcagctggccgggttggaggcctcaccctgcttggggcctggcgtggggggagctctggtgggaaaatgtcccccacctcttttcctagttttatgtttcttgggaaaatatcactttgtattctctgtccagggcttcagatattttgcacgaattttaaaacatggcaataaatggctcgtgggctctggctccctgggaccccctccccgcccttcttttgaccccttcctgtctggcccaaaggaagtagcaggcccagctggggcccctcggctaccccccgtctcctgccgggcaggtcccaggttggaggccctaggcgcggttcaggtcagggctatggatggggcccaggggctttggtggcccctccccaactccttcctctttgcttgggttcctttttcacgtttagtaactgttttttttttttttttttttttttttttggaaagcacaaacttctgtaacgggtcgtgctcatgtctgttaataaagaaatccagatcc

SEQ ID NO: 116 - DNA, 2431 bp, Homo Sapiens
gtgggcaggcgaggagcgggaagaccatctctgcaagtgcagcatagcctcggcctaggacagcgggagtgcgtggccaaagctgtgagcagaggcacaggtggtggcagacagtagaggcgccccatggggaacatactgacctgtcgtgtgcaccctagcgtcagcctcgagtttgaccagcagcaggggtcggtgtgtccctctgaatctgagatctatgaggcaggagctggggacaggatggcaggagcgcccatggctgctgctgtacagcctgctgaggtgactgttgaagttggtgaggacctccacatgcaccacgttcgtgaccgggagatgcctgaagctttggagtttaacccttctgccaatccagaggcaagcacaatattccagaggaactctcaaacagatgttgtagaaataagaagaagcaactgtacaaaccatgtatctactgtgcgtttcagtcaacaatacagcttgtgttcgacaatattccttgatgacagcacagccatccagcattatcttacaatgacaataatatctgtgaccttggagatacctcatcatatcacacaaagagatgcagatagatctttgagcatacctgatgaacagttacactcatttgcggtttccaccgtgcacattatgaagaaaagaaatggaggtgggagtttaaataactattcctcctccattccatcgactcccagcaccagccaggaggaccctcagttcagtgttcctcccactgccaacacacccacccccgtttgcaagcggtccatgcgctggtccaacctgtttacatctgagaaagggagtgacccagacaaagagaggaaagccccggagaatcatgctgacaccatcgggagcggcagagccatccccattaaacagggcatgctcttaaagcgaagtgggaaatggctgaagacatggaaaaagaaatacgtcaccctgtgttccaatggcgtgctcacctattattcaagcttaggtgattatatgaagaatattcataaaaaagagattgaccttcagacatctaccatcaaagtcccaggaaagtggccatccctagccacatcggcctgcacacccatctccacctctaaaagcaatggcctatccaaggacatggacaccgggctgggtgactccatatgcttcagccccagtatctccagcaccaccagccccaagctcaacccgcccccctctcctcatgccaataaaaagaaacacctaaagaagaaaagcaccaacaactttatgattgtgtctgccactggccaaacgtggcactttgaagccacgacgtatgaggagcgggatgcctgggtccaagccatccagagccagatcctggccagcctgcagtcatgcgagagcagtaaaagcaagtcccagctgaccagccagagcaaggccatggccctgcagtcgatccaaaacatgcgtgggaacgcccactgtgtggactgtgagacccagaatcctaagtgggccagtttgaacttgggagtcctcatgtgtattgaatgctcaggaatccaccgcagtcttggcacccgcctttcccgtgtgcgatctctggagctggatgactggccagttgagctcaggaaggttatgtcatctattggcaatgacctagccaacagcatctgggaagggagcagccaggggcagacaaaaccctcagaaaagtccacgagggaagagaaggaacggtggatccgttccaaatatgaggagaagctctttctggccccactaccctgcactgagctgtccctgggccagcagctgctgcgggccaccgctgatgaggacctgcagacagccatcctgctgctggcacatggctcccgtgaggaggtgaacgagacctgtggggagggagacggctgcacggcgctccatctggcctgccgcaaggggaatgtggtcctggcgcagctcctgatctggtacggggtggacgtcatggcccgagatgcccacgggaacacagcgctgacctacgcccggcaggcctccagccaggagtgcatcaacgtgcttctgcagtacggctgccccgacaagtgtgtgtagtatctgttttatttgactgcagtctccttggtgcaaaaacaaaatgggaaaaataaggataactcagaatttcaaaaggaaatcacaaattcagctaataatagcattttcagtacttttcgtaaactaagtaaatacacaaaatgttgatttttctgaccataagacgtattttatgtccttttgccaaggtggatttgttagtctcaggccctcctggccacattgcccaagtcacacaggcttctgtattatgtatttagataaaatgtgtgaaaatatatttgaaataaagttcataaatatgcattga

SEQ ID NO: 117 - DNA, 1743 bp, Homo Sapiens
ggcgcggggacgcgggtttctgcctcaggccctgccctgctctactctgcgctctctgcccgcgccgccgccgcctcagcctcggccctgcgctgcgcgcccggcccgtgctgccatggcctgccgcccgcgaagcccgccgaggcatcagagccgctgcgacggtgacgccagcccgccgtcccccgcgcgatggagcctgggacggaagcgcagagccgacggcaggcgctggaggcccgaagacgccgaggaggcagagcaccgcggcgccgagcgcagacccgagagctttaccactcctgaaggccctaaaccccgttccagatgctctgactgggcaagtgcagttgaagaagatgaaatgaggaccagagttaacaaagaaatggcaagatataaaaggaaactcctcatcaatgactttggaagagagagaaaatcatcatcaggaagttctgattcaaaggagtctatgtctactgtgccggctgactttgagacagatgaaagtgtcctaatgaggagacagaagcagatcaactatgggaagaacacaattgcctacgatcgttatattaaagaagtcccaagacaccttcgacaacctggcattcatcccaagacccctaataaatttaagaagtatagtcgacgttcatgggaccagcaaatcaaactctggaaggtggctctgcatttttgggatcctccagcggaagaaggatgtgatttgcaagaaatacaccctgtagaccttgaatctgcagaaagcagctccgagccccagaccagctctcaggatgactttgatgtgtactctggcacacccaccaaggtgagacacatggacagtcaagtggaggatgagtttgatttggaagcttgtttaactgaacccttgagagacttctcagccatgagctaactgccccctggcggccaggaagagaaacagctcctccccgactaggtggaaggctggccaggcaccaagcatgtgtgtgcacttgtacctggtggtttctctgttagcagtccattagctcatgctgaattatttttgccttactttcttaagaaacattaattttatgtatagtgagtatattttgcatgttttaaattgtaaatggagctaagtccaagaaagtacttgaagctctcttccagcgagcttaattgcgtaatccctgttgtcctccagggtaagctgacacgtctacataactggttttccacaggcatcttcagttattgcttgtcaggtggactgttttggatttaaccatgtaatccatgggaccaattgagagtcagctacttttataggcatcaaagtattctcagacacctttaatatctttatggaaacttaatttttggccttttatcaatatgtcataacagcattctgaagtcagacattgttaaattgagctattaaactaatgagttttatgtaagttatatggtcttaatttggtacttgtaaatagcactagttagactctttagaatactccaagagttagggcagcagagtggagcgatttagaaagaacattttaaaacaatcagttaatttaccatgtaaaattgctgtaaatgataatgtgtacagattttctgttcaaatattcaattgtaaacttcttgttaagactgttacgtttctattgcttttgtatgggatattgcaaaaataaaaaggaaagaaccctcaaaaaaaaaaaaaaaaaa

SEQ ID NO: 118 - DNA, 3522 bp, Homo Sapiens
gccccatcacgtgaccgcagccccagcgcggcggggccggcgtctcctggctgccgtcacttccggttctctgtcagtcgcgagcgaacgaccaagagggtgttcgactgctagagccgagcgaagcgatgcctaaatcaaaggaacttgtttcttcaagctcttctggcagtgattctgacagtgaggttgacaaaaagttaaagaggaaaaagcaagttgctccagaaaaacctgtaaagaaacaaaagacaggtgagacttcgagagccctgtcatcttctaaacagagcagcagcagcagagatgataacatgtttcagattgggaaaatgaggtacgttagtgttcgcgattttaaaggcaaagtgctaattgatattagagaatattggatggatcctgaaggtgaaatgaaaccaggaagaaaaggtatttctttaaatccagaacaatggagccagctgaaggaacagatttctgacattgatgatgcagtaagaaaactgtaaaattcgagccatataaataaaacctgtactgttctagttgttttaatctgtctttttacattggcttttgttttctaaatgttctccaagctattgtatgtttggattgcagaagaatttgtaagatgaatacttttttttaatgtgcattattaaaaatattgagtgaagctaattgtcaactttattaaggattactttgtctgcccaccacctagtgtaaaataaaatcaagtaatacaatcttaactgttgtggccttttttgatcataagagttggtactgtttaaggccaaaagtaacagtttttatagatcttttagtttcaactcagcttttacaataaaaaggatttgtattgcattgagtttataaacttttggtttgtgaacttcatatttgatcttttctcttccaatcaaatgtctaggcttgtttgacttccacccccaatggtttttcactctttttatttacttcattttcctttaataacttaatctcttcatgttcagtttttacttcactctttattcttttctttgattatggtatgcttatttggaaagtcagtgaaactgtcaaaatgttatctcaataagatacttatatgagaactacaatcaccgaatctactgtattcaatattagcagatctaatttgataaacaacatggcttgtgtgaaaactgagcaggtgtttgtttacccatagtgttctgtgtagttattgcttagtctgcagaaaataatgacttagatgagatgtctgacttgctttcacttattaaacatgttcaccatgggatgatgtctgtaacatcagatattgttcaactagactaggatttaataaaaattgtgaaagcttactggcctaacattttattttataatattgggtatgaattatatgtagccagagatgtcattaagctttactgttatagtaggtaatatggttagtttgtagggaaaagagcatatgagcacatgcttgtgtattttggcctttgccccagtagaacagaccaatggcattctagacttgatgatactaagttttagcagacactagtaagtggtttgtatttaaccatactgatgaagcagacagattgaggcacagattttagtggctttgtggcaataaatagggcatggtgtgccttaggaaaagaatgtttataaagggaattataactgaaattaaaggaggcggcagtgaagaggaaataattctcttctatctaaatgatatacatatgatattttgagatttttataacagcagtggaacacaattctaggtagagtagaaaaaggaaagttttaaagacatataaaagattcttgttgacaaattatttttggtagcaaatctcaaatggttacctgctattaaggtctgccatattagagttttgcactattttgctaccaagtttgattcatacatctaaaacattttgtagttacttgtcaaggacttaatttgaaaatcatttgccaggccacatagttatcaatttttttttctatcagctattctgttgtatttctaaaacattttttagatgactttttaaagtatatttagcagtaaccttatgaggttcaaattggtaaatctcttgtaatttagccttcatcgaataataggtaccagtgtattaaaaatgtgtattttttgcagccccttgaaccagagtaggttcagagaaactcccaaagtttgtactttagacacatcatgcttgattggtaacttccctccttttttggggaacatgtttgtgtcctattaacttaattggatagatttttaaatatttcttatttttggcacacggaaagggtagttcgagtacagaactttgatttttggtgtagatgcagagggaatgatgggtaaatttcctaggtttatgtgaatttagggggtgtatgcattttgaaacaatctactaacagatggtgctgaaatctattacctacatgttttctagttgttcagcattatgttaatgaagcctccatataaggagtgtttctctggcacagttggtaagttgactgctaacttcatttaaatgtgttactggatatgcagtatactgaaattattaatcagtttgtgtataggaaaagagaactgggttaaaagcaaattaacttgttctgaaaagaaagtatagattaattttgttttctgtttaaattttatctccttggtaaagatttttttttcctgggcagaaaacttggcatttttaggcgtagataccttaccttacaatgccaaaatgaatttaattccagtactcaggtttttccctttaacagactctatgtgtatcagggctttctaatgggtttttcctcttcgtttttaaaatgtgagtagcatttgaccaatttccagtgctcttagcattttacttaaagaacaaccactacaaaagaaaatctttgtaatttgattgtcttttgctttgcttcattaatgcctaagaacttaagaatactcctacctcattagctactcaagatgctgtgacgatcaaatctattctacataatgcgtttagaaacaaagacttgggtgaaaaatgaaataagtatattctgacttggctattgaggggaaaattcagtattaagtgttcctcacaggagatatgttagcagaatactataaaagtttgaaatttttaaaaagtaaaagtacttaaatttaggtatctctcctgaaattctttgcagttcattttttatggcagttaatccagtgaaacactcaaaagtttttttttttttaaaagtgtttttccagataaactgtagggtgaacattcacataatcacaaatatgtaattctgtaattgtggaatgcttgtatgctttgttttcgtacatcttccatggagatgtctgaatataatactccatctgtgaatattttaaatgttgaaataaaagtaagaaatgtgaaaaaaaaaaaaaaa

SEQ ID NO: 119 - DNA, 1969 bp, Homo Sapiens
gtgggaggcgcggccgtggggtggggtggggccaggtccgcgatgtgctcaccctggtctctcaggaccgttgcctttgcggctattttttgtgcaatccccgaagcctgcgtttcctgctgcctgggttcggggcgggggcatcgcgcaggccagaacggcccctgcgtccgtaggccagagcccctgccatcagcccctttagggtgctcgccggctgtcgggtgtgggggtatgccaggccccggaggactcggcttccccgctaacccgacccgccgcaccccacccaggccaggtcagagcagcccaccatgggatggggagggggtggaggctgcaccccgcgcccacccatccaccagcagccgccggagcgccgcgtggtcaccgttgtctttctcggcctcctgctggacctcctggccttcacgctgctgctgcccctgctgcccgggctgttggagagccacggccgtgcccacgaccccctctatggctcctggcagggcggggtggactggtttgccaccgccatcgggatgccagtggagaagaggtacaacagtgtcctgttcggaggtctcattggctcggcattctctgtcctgcagtttctgtgtgcgccactcactggggccacctctgactgcttggggaggcgcccggtgatgctgctgtgcctgatgggtgtggccacctcatatgcagtctgggccacctctcggagctttgcggccttcctggcctccaggctgattgggggcatcagcaaagggaacgtcagcctctccacggccatcgttgctgacctgggctcgcctctggcccgcagtcaaggcatggcggtcattggggtggccttctcactgggcttcaccctgggccctatgctcggagcctccctgcccctggaaatggcaccctggtttgccctgctcttcgcagcctccgacctgctgttcatcttctgcttcctgccagagacgctgcccctggagaaacgggcgccctctatcgccctggggttccgtgatgcggctgatctgctcagccccctggccctgctgcgcttctcggctgtcgctcgtggccaggacccaccctctggagacaggctcagcagcctgcgccgcctgggcctagtctacttcctctacctcttcctgttctcgggcctggagtacacgctgagcttcctcacacaccagcgcttccagttcagtagcctacagcaggggaagatgtttttcctcatcggcctcaccatggccaccatccagggtgcctatgcccggcggatccaccctggcggggaagttgctgccgtgaagcgggccctcctgctgctggtgcccgccttcctcctcatcggctggggacgttctctgcccgtgctgggcctggggctgctgctctactcctttgccgccgccgttgtggtgccctgcctgtcctccgtggtcgctggctatggctcaccagggcagaagggcacggtcatgggtacactgcgcagcctaggtgctctggccagggccgcggggcccctggtggccgcttcagtgtactggctggccggggcccaggcctgcttcaccacgtggtccgggctctttttgctccccttcttcctcctgcagaagctgagttacccggcacagacgctcaaggctgagtagctgagccactgtgcccaggctgtgggcaccaggcagagtgggagcctaggtcaggcccctgcccactgcctgacccccaccccccgccagtccagggagaccctgtgggtgggggccggcccctaagcaggaagctcaggcagctcctccagacttacttactccttcagtgactccgagctgcagcactccaaggctgtcagggcttctgtttgttttttaaactatgcaccaggtttctgatgatgaaataaagcacctgtttgttttataccaaaaaaaaaaaa

SEQ ID NO: 120 - DNA, 2428 bp, Homo Sapiens
cgtccagtttgagtctaggttggagttggaaccgtggagatgcggaaggaaaccccaccccccctagtgcccccggcggcccgggagtggaatcttcccccaaatgcgcccgcctgcatggaacggcagttggaggctgcgcggtaccggtccgatggggcgcttctcctcggggcctccagcctgagtgggcgctgctgggccggctccctctggctttttaaggacccctgtgccgcccccaacgaaggcttctgctccgccggagtccaaacggaggctggagtggctgacctcacttgggttggggagagaggtattctagtggcctccgattcaggtgctgttgaattgtgggaactagatgagaatgagacacttattgtcagcaagttctgcaagtatgagcatgatgacattgtgtctacagtcagtgtcttgagctctggcacacaagctgtcagtggtagcaaagacatctgcatcaaggtttgggaccttgctcagcaggtggtactgagttcataccgagctcatgctgctcaggtcacttgtgttgctgcctctcctcacaaggactctgtgtttctttcatgcagcgaggacaatagaattttactctgggatacccgctgtcccaagccagcatcacagattggctgcagtgcgcctggctaccttcctacctcgctggcttggcatcctcagcaaagtgaagtctttgtctttggtgatgagaatgggacagtctcccttgtggacaccaagagtacaagctgtgtcctgagctcagctgtacactcccagtgtgtcactgggctggtgttctccccacacagtgttcccttcctggcctctctcagtgaagactgctcacttgctgtgctggactcaagcctttctgagttgtttagaagccaagcccacagagactttgtgagagatgcgacttggtccccgctcaatcactccctgcttaccacagtgggctgggaccatcaggtcgtccaccacgttgtgcccacagaacctctcccagcccctggacctgcaagtgttactgagtagattggatttaagacaaaaagcaagtcccccatgagtgtccacttctttgccctgccctctcagcttgtgagacaacacaggagccttctatagtatgttgatatgctagatctgtgccgttaataggcatcgtctctcagcctgagggaggctggattctgggttcctgtagtcacagggaggaaaagctttcttaaaaatggacatgtatgtgcgtgtgagtgtgtgtgtagatttatagtttttggtagtggcaggaataaaaaaaatccatcctacatcttccctaagcactgcctctctctcaccccccaaaacaagttgacgaaagggttttatgtagctgtctatgaggaattggccgtgtctgggtgggttatgggatgtgggcatccctgggttcttggaagcagctcttatgctactcatagagatgggattgactttatttttttatagtgcttaattcaccattatgagaaatgcttccagtcacaaaaatgcagcccagctcactctgaggaagaagcaggacttggtacggttttacacaactccttaccattaaactgaatcagaaatccattttctggctgaataaaaagtttggcttgcctgtgtaatgcccactcccttccccctggctccctagtgatgggacatatatgagagagaagtgtttttctatcatagacaccataggggaaagtttggggatgaaggagagcttaaaggtgtttcaattaagttagaaaactgacacaggctgttgagaattctttgccacttttcccaccccaaaacagcatggggcctgacatcttctgccctggtcccctttctcttgatgtggaaagtctgaatgcagtatttatagacttctaaggttttaaaatccagtatcaagaagaaaatcagaaatactggttggtgaaataaagagtttaggcattgttggcctgtcttttttgaagcatgtgtgttatgtgtagttagatatatttcacttatgtgagtcatcatggtgttggtcttgtagcccattatttttcctgtgcttccccagcttcccaaagtagctagttagaacttaaggtaaatatttattcttgggttggtggagtggatattgccagttaggagtcatggatcaattactgattatattgaaagtaaatataatcaattatgtacttttgagctttgcaggttcaatttaggtaaaaatcacattatgaaactgggaaagtctgaaggaatatgggcaaaatatttctcagtaaagcttccatgcttcacccttgacatgattacccttgagtaaaacatgggaatttgtaaaaaaaaaaaaaaaaaaaaa

SEQ ID NO: 121 - DNA, 2509 bp, Homo Sapiens
gagcgaaaggcttgaggaccaggtcggggccgggttccgggtcggggagcggctccgggcggcagctatgaggcgggacgtgcgcatcctgttactgggcgaggcccaggtggggaagacgtcgctgatcctgtccctggtgggcgaggagttccccgaggaggtccctccccgcgcggaggagatcacgatccccgcggacgtcaccccggagaaggtgcccacccacatcgtggactactcagaagccgagcagacggacgaggagctgcgggaggagatccacaaggcaaacgtggtgtgtgtggtgtatgacgtctctgaggaggccaccattgagaagattcgaactaagtggatcccactggtgaatggggggaccacgcaggggcccagggtgcccatcatcctagtgggcaacaagtcagacctgcggtcggggagctccatggaggccgtgctccccatcatgagccagtttcccgagattgagacctgcgtggagtgttcggccaagaacctgaggaacatctcagagctgttctactacgcccagaaggccgtcctgcatcccacagcccccctctatgaccctgaggccaagcagttgaggcccgcgtgcgcccaggcgctgacgcgcatcttcaggctctcagatcaggacctggaccaggcgctcagtgacgaagagctcaacgctttccagaaatcctgctttgggcaccccctggccccgcaggccctggaggacgtgaagacggtggtgtgcaggaacgtggcgggcggcgtgcgggaggaccggctgaccctggatggtttcctcttcctgaacacgctcttcatccagcgcggccggcacgagaccacctggaccatcctgcggcgcttcggctacagcgatgccctggagctgactgcggactatctctcccctctgatccacgtgccccccggctgcagcacggagctcaaccaccttggctaccagtttgtgcagagagtgtttgagaagcacgaccaggaccgcgacggcgccctctcgcccgtggagctgcaaagccttttcagtgtgttcccagcagcgccctggggccccgagctcccacgcacagtccgcacagaggccggccggttgcccctgcacggatacctctgccagtggaccctggtgacctacctggacgtccggagctgccttggacacctaggctacctgggctaccccaccctctgtgagcaggaccaggcccatgccatcacagtcactcgtgagaagaggctggaccaggagaagggacagacgcagcggagcgtcctcctgtgcaaggtggtaggggcccgtggagtgggcaagtctgccttcctgcaggcttttctcggccgcggcctggggcaccaggacacgagggagcagcctcccggctacgccatcgacacggtgcaggtcaatggacaggagaagtacttgatcctctgtgaggtgggcacagatggtctgctggccacatcgctggacgccacctgtgacgttgcctgcttgatgtttgatggcagtgacccaaagtcctttgcacattgtgccagcgtctacaagcaccattacatggacgggcagaccccctgcctctttgtctcctccaaggccgacctgcccgaaggtgtcgcggtgtctggcccatcaccggccgagttttgccgcaagcaccggctacccgctcccgtgccgttctcctgtgctggcccagccgagcccagcaccaccatcttcacccagctcgccaccatggccgccttcccacatttggtccacgcagagctgcatccctcttccttctggctccgggggctgctgggggttgtcggggccgccgtggccgcagtcctcagcttctcactctacagggtcctggtgaagagccagtgaggcccctggtacccaagccccctcccctgacctgggtgtgcctcgctgctggggctctgcaggggcagcacagctggggtgcaggccaggctgccactccgggaacgcctttgcgccgggactttttgtttctgaaggcagtcgatctgcagcggggccttatgctgccatgcactgccctggctcctgccggacccccagggtgggccgtggcaggtggctgagcaggagctcccaagtgccggccaccgctgtcagggattgcccacccctgggcatcatgtgtgtggggccggggagcacaggtgtgggagctggtgaccccagacccagaattctcagggctctacccccctttcctggtcctaggtggccagtgggtatgaggagggctggaaggcagagctttgggccaaaagcaggcgttggggggtcccccctcaagtttggagccgtttccgtggttgtagcagaggaccggaggttgggttcctgattaaacttcactgtgtgttttctatctcggatcccagtctctgaagacaacttgctttgattcaacctaaaaaaaaaaaaaaaaaaaaa

SEQ ID NO: 122 - DNA, 1319 bp, Homo Sapiens
cgccgggggccggctggcgcgggggctccggtaacccgggctgggcgggggagaggaaggggcggggcagggagcccgccagagtgcggggtcgcggtgcggacttcgagcacgagccctaaagacgctcagcactcgtcgcttctcctagcagaccctgcccggcttggcgatggagtttccggacctcggcgctcactgttcggagccgagctgtcagcgcttggattttctgccgcttaagtgtgatgcctgctcaggcatcttctgcgcagaccatgtggcctacgcccagcatcactgtggatctgcttaccaaaaggatatccaggtacctgtgtgccctctctgtaatgtgcctgtgcctgtggccagaggggagccccctgaccgtgctgtgggagagcacattgacagagactgtcgctctgatccagcacagcaaaaacgtaagatcttcaccaataagtgtgaacgcgctggctgccggcagcgagaaatgatgaaactgacctgtgaacgctgtagccgaaacttctgcatcaagcaccggcatccactggaccatgattgctctggggaggggcacccaaccagccgggcaggacttgctgccatctccagagcacaagctgtggcttctacaagcactgtccccagcccaagtcaaaccatgccttcctgtacctctcccagcagagccacaacccgatctccgtcctggacagcccctccagtgattgctttgcagaatggcctgagtgaggatgaagctctgcagcgggccctggaaatgtccctggcagaaaccaaaccccaggttccaagttgtcaggaggaagaagacctagctttagcacaagcactgtcagccagtgaggcagaataccagcggcagcaggcccagagccgcagctcgaagccgtccaactgcagcctgtgctagggccctgggcttggggagggaggttcacctgaggaggactgtggccctcacacctctagggtacacagggagaggaggcccggagcaccctggagggcagagacaagcgggagtgatgtggaggtcgccctgggagcctctggaaggccttgctagtgctccagctgcatggaagagagcggctagcaactgttccctggttgggccctcagtggatgctggccaggccctactcttagccccttcatcatgtcatctcccttatgctggagctgccccgatgtggagtgggcaggaaggggcctggaaaaaataaaggatcttggcagttgataaaacgtaaaaaaaaaaaaggaaaaaaaaaaaaaaaaaa

SEQ ID NO: 123 - DNA, 11202 bp, Homo Sapiens
aattctcctgcctgagcctcggcccaacaaaatggcggcggcagcggtgtcgctttgtttccgcggctcctgcggcggtggcagtggtagcggcctttgagctgtggggaggttccagcagcagctacagtgacgactaagactccagtgcatttctatcgtaaccgggcgcgggggagcgcagatcggcgcccagcaatcacagaagccgacaaggcgttcaagcgaaaacatgaccgctgagcccatgagtgaaagcaagttgaatacattggtgcagaagcttcatgacttccttgcacactcatcagaagaatctgaagaaacaagttctcctccacgacttgcaatgaatcaaaacacagataaaatcagtggttctggaagtaactctgatatgatggaaaacagcaaggaagagggaactagctcttcagaaaaatccaagtcttcaggatcgtcacgatcaaagaggaaaccttcaattgtaacaaagtatgtagaatcagatgatgaaaaacctttggatgatgaaactgtaaatgaagatgcgtctaatgaaaattcagaaaatgatattactatgcagagcttgccaaaaggtacagtgattgtacagccagagccagtgctgaatgaagacaaagatgattttaaagggcctgaatttagaagcagaagtaaaatgaaaactgaaaatctcaaaaaacgcggagaagatgggcttcatgggattgtgagctgcactgcttgtggacaacaggtcaatcattttcaaaaagattccatttatagacacccttcattgcaagttcttatttgtaagaattgctttaagtattacatgagtgatgatattagccgtgactcagatggaatggatgaacaatgtaggtggtgtgcggaaggtggaaacttgatttgttgtgacttttgccataatgctttctgcaagaaatgcattctacgcaaccttggtcgaaaggagttgtccacaataatggatgaaaacaaccaatggtattgctacatttgtcacccagagcctttgttggacttggtcactgcatgtaacagcgtatttgagaatttagaacagttgttgcagcaaaataagaagaagataaaagttgacagtgaaaagagtaataaagtatatgaacatacatccagattttctccaaagaagactagttcaaattgtaatggagaagaaaagaaattagatgattcctgttctggctctgtaacctactcttattccgcactaattgtgcccaaagagatgattaagaaggcaaaaaaactgattgagaccacagccaacatgaactccagttatgttaaatttttaaagcaggcaacagataattcagaaatcagttctgctacaaaattacgtcagcttaaggcttttaagtctgtgttggctgatattaagaaggctcatcttgcattggaagaagacttaaattccgagtttcgagcgatggatgctgtaaacaaagagaaaaataccaaagagcataaagtcatagatgctaagtttgaaacaaaagcacgaaaaggagaaaaaccttgtgctttggaaaagaaggatatttcaaagtcagaagctaaactttcaagaaaacaggtagatagtgagcacatgcatcagaatgttccaacagaggaacaaagaacaaataaaagtaccggtggtgaacataagaaatctgatagaaaagaagaacctcaatatgaacctgccaacacttctgaagatttagacatggatattgtgtctgttccttcctcagttccagaagacatttttgagaatcttgagactgctatggaagttcagagttcagttgatcatcaaggggatggcagcagtggaactgaacaagaagtggagagttcatctgtaaaattaaatatttcttcaaaagacaacagaggaggtattaaatcaaaaactacagctaaagtaacaaaagaattatatgttaaactcactcctgtttccctttctaattccccaattaaaggtgctgattgtcaggaagttccacaagataaagatggctataaaagttgtggtctgaaccccaagttagagaaatgtggacttggacaggaaaacagtgataatgagcatttggttgaaaatgaagtttcattacttttagaggaatctgatcttcgaagatccccacgtgtaaagactacacccttgaggcgaccgacagaaactaaccctgtaacatctaattcagatgaagaatgtaatgaaacagttaaggagaaacaaaaactatcagttccagtgagaaaaaaggataagcgtaattcttctgacagtgctatagataatcctaagcctaataaattgccaaaatctaagcaatcagagactgtggatcaaaattcagattctgatgaaatgctagcaatcctcaaagaggtgagcaggatgagtcacagttcttcttcagatactgatattaatgaaattcatacaaaccataagactttgtatgatttaaagactcaggcggggaaagatgataaaggaaaaaggaaacgaaaaagttctacatctggctcagattttgatactaaaaagggcaaatcagctaagagctctataatttctaaaaagaaacgacaaacccagtctgagtcttctaattatgactcagaattagaaaaagagataaagagcatgagtaaaattggtgctgccagaaccaccaaaaaaagaattccaaatacaaaagattttgactcttctgaagatgagaaacacagcaaaaaaggaatggataatcaagggcacaaaaatttgaagacctcacaagaaggatcatctgatgatgctgaaagaaaacaagagagagagactttctcttcagcagaaggcacagttgataaagacacgaccatcatggaattaagagatcgacttcctaagaagcagcaagcaagtgcttccactgatggtgtcgataagctttctgggaaagagcagagttttacttctttggaagttagaaaagttgctgaaactaaagaaaagagcaagcatctcaaaaccaaaacatgtaaaaaagtacaggatggcttatctgatattgcagagaaattcctaaagaaagaccagagcgatgaaacttctgaagatgataaaaagcagagcaaaaagggaactgaagaaaaaaagaaaccttcagactttaagaaaaaagtaattaaaatggaacaacagtatgaatcttcatctgatggcactgaaaagttacctgagcgagaagaaatttgtcattttcctaagggcataaaacaaattaagaatggaacaactgatggagaaaagaaaagtaaaaaaataagagataaaacttctaaaaagaaggatgaattatctgattatgctgagaagtcaacagggaaaggagatagttgtgactcttcagaggataaaaagagtaagaatggagcatatggtagagagaagaaaaggtgcaagttgcttggaaagagttcaaggaagagacaagattgttcatcatctgatactgagaaatattccatgaaagaagatggttgtaactcttctgataagagactgaaaagaatagaattgagggaaagaagaaatttaagttcaaagagaaatactaaggaaatacaaagtggctcatcatcatctgatgctgaggaaagttctgaagataataaaaagaagaagcaaagaacttcatctaaaaagaaggcagtcattgtcaaggagaaaaagagaaactccctaagaacaagcactaaaaggaagcaagctgacattacatcctcatcttcttctgatatagaagatgatgatcagaattctataggtgagggaagcagcgatgaacagaaaattaagcctgtgactgaaaatttagtgctgtcttcacatactggattttgccaatcttcaggagatgaagccttatctaaatcagtgcctgtcacagtggatgatgatgatgacgacaatgatcctgagaatagaattgccaagaagatgcttttagaagaaattaaagccaatctttcctctgatgaggatggatcttcagatgatgagccagaagaagggaaaaaaagaactggaaaacaaaatgaagaaaacccaggagatgaggaagcaaaaaatcaagtcaattctgaatcagattcagattctgaagaatctaagaagccaagatacagacataggcttttgcggcacaaattgactgtgagtgacggagaatctggagaagaaaaaaagacaaagcctaaagagcataaagaagtcaaaggcagaaacagaagaaaggtgagcagtgaagattcagaagattctgattttcaggaatcaggagttagtgaagaagttagtgaatccgaagatgaacagcggcccagaacaaggtctgcaaagaaagcagagttggaagaaaatcagcggagctataaacagaaaaagaaaaggcgacgtattaaggttcaagaagattcatccagtgaaaacaagagtaattctgaggaagaagaggaggaaaaagaagaggaggaggaagaggaggaggaggaggaagaggaggaggaagatgaaaatgatgattccaagtctcctggaaaaggcagaaagaaaattcggaagattcttaaagatgataaactgagaacagaaacacaaaatgctcttaaggaagaggaagagagacgaaaacgtattgctgagagggagcgtgagcgagaaaaattgagagaggtgatagaaattgaagatgcttcacccaccaagtgtccaataacaaccaagttggttttagatgaagatgaagaaaccaaagaacctttagtgcaggttcatagaaatatggttatcaaattgaaaccccatcaagtagatggtgttcagtttatgtgggattgctgctgtgagtctgtgaaaaaaacaaagaaatctccaggttcaggatgcattcttgcccactgtatgggccttggtaagactttacaggtggtaagttttcttcatacagttcttttgtgtgacaaactggatttcagcacggcgttagtggtttgtcctcttaatactgctttgaattggatgaatgaatttgagaagtggcaagagggattaaaagatgatgagaagcttgaggtttctgaattagcaactgtgaaacgtcctcaggagagaagctacatgctgcagaggtggcaagaagatggtggtgttatgatcataggctatgagatgtatagaaatcttgctcaaggaaggaatgtgaagagtcggaaacttaaagaaatatttaacaaagctttggttgatccaggccctgattttgttgtttgtgatgaaggccatattctaaaaaatgaagcatctgctgtttctaaagctatgaattctatacgatcaaggaggaggattattttaacaggaacaccacttcaaaataacctaattgagtatcattgtatggttaattttatcaaggaaaatttacttggatccattaaggagttcaggaatagatttataaatccaattcaaaatggtcagtgtgcagattctaccatggtagatgtcagagtgatgaaaaaacgtgctcacattctctatgagatgttagctggatgtgttcagaggaaagattatacagcattaacaaaattcttgcctccaaaacacgaatatgtgttagctgtgagaatgacttctattcagtgcaagctctatcagtactacttagatcacttaacaggtgtgggcaataatagtgaaggtggaagaggaaaggcaggtgcaaagcttttccaagattttcagatgttaagtagaatatggactcatccttggtgtttgcagctagactacattagcaaagaaaataagggttattttgatgaagacagtatggatgaatttatagcctcagattctgatgaaacctccatgagtttaagctccgatgattatacaaaaaagaagaaaaaagggaaaaaggggaaaaaagatagtagctcaagtggaagtggcagtgacaatgatgttgaagtgattaaggtctggaattcaagatctcggggaggtggtgaaggaaatgtggatgaaacaggaaacaatccttctgtttctttaaaactggaagaaagtaaagctacttcttcttctaatccaagcagcccagctccagactggtacaaagattttgttacagatgctgatgctgaggttttagagcattctgggaaaatggtacttctctttgaaattcttcgaatggcagaggaaattggggataaagtccttgttttcagccagtccctcatatctctggacttgattgaagattttcttgaattagctagtagggagaagacagaagataaagataaaccccttatttataaaggtgaggggaagtggcttcgaaacattgactattaccgtttagatggttccactactgcacagtcaaggaagaagtgggctgaagaatttaatgatgaaactaatgtgagaggacgattatttatcatttctactaaagcaggatctctaggaattaatctggtagctgctaatcgagtaattatattcgacgcttcttggaatccatcttatgacatccagagtatattcagagtttatcgctttggacaaactaagcctgtttatgtatataggttcttagctcagggaaccatggaagataagatttatgatcggcaagtaactaagcagtcactgtcttttcgagttgttgatcagcagcaggtggagcgtcattttactatgaatgagcttactgaactttatacttttgagccagacttattagatgaccctaattcagaaaagaagaagaagagggatactcccatgctgccaaaggataccatacttgcagagctccttcagatacataaagaacacattgtaggataccatgaacatgattctcttttggaccacaaagaagaagaagagttgactgaagaagaaagaaaagcagcttgggctgagtatgaagcagagaagaagggactgaccatgcgtttcaacataccaactgggaccaatttaccccctgtcagtttcaactctcaaactccttatattcctttcaatttgggagccctgtcagcaatgagtaatcaacagctggaggacctcattaatcaaggaagagaaaaagttgtagaagcaacaaacagtgtgacagcagtgaggattcaacctcttgaggatataatttcagctgtatggaaggagaacatgaatctctcagaggcccaagtacaggcgttagcattaagtagacaagccagccaggagcttgatgttaaacgaagagaagcaatctacaatgatgtattgacaaaacaacagatgttaatcagctgtgttcagcgaatacttatgaacagaaggctccagcagcagtacaatcagcagcaacagcaacaaatgacttatcaacaagcaacactgggtcacctcatgatgccaaagcccccaaatttgatcatgaatccttctaactaccagcagattgatatgagaggaatgtatcagccagtggctggtggtatgcagccaccaccattacagcgtgcaccacccccaatgagaagcaaaaatccaggaccttcccaagggaaatcaatgtgattttgcactaaaagcttaatggattgttaaaatcatagaaagatcttttatttttttaggaatcaatgacttaacagaactcaactgtataaatagtttggtccccttaaatgccaatcttccatattagttttactttttttttttttaaatagggcataccatttcttcctgacatttgtcagtgatgttgcctagaatcttcttacacacgctgagtacagaagatatttcaaattgttttcagtgaaaacaagtccttccataatagtaacaactccacagatttcctctctaaatttttatgcctgcttttagcaaccataaaattgtcataaaattaataaatttaggaaagaataaagatttatatattcattctttacatataaaaacacacagctgagttcttagagttgattcctcaagttatgaaatacttttgtacttaatccatttcttgattaaagtgattgaaatggttttaatgttcttttgactgaagtctgaaactgggctcctgctttattgtctctgtgactgaaagttagaaactgagggttatctttgacacagaattgtgtgcaatattcttaaatactactgctctaaaagttggagaagtcttgcagttatcttagcattgtataaacagccttaagtatagcctaagaagagaattcctttttcttctttagtccttctgccattttttattttcagttatatgtgctgaaataattactggtaaaatttcagggttgtggattatcttccacacatgaattttctctctcctggcacgaatataaagcacatctcttaactgcatggtgccagtgctaatgcttcatcctgttgctggcagtgggatgtggacttagaaaatcaagttctagcattttagtaggttaacactgaagttgtggttgttaggttcacaccctgttttataaacaacatcaaaatggcagaaccattgctgactttaggttcacatgaggaatgtacttttaacaattcccagtactatcagtattgtgaaataattcctctgaaagataagaatcactggcttctatgcgcttcttttctctcatcatcatgttcttttaccccagtttccttacatttttttaaattgtttcagagtttgttttttttttagtttagattgtgaggcaattattaaatcaaaattaattcatccaatacccctttactagaagttttactagaaaatgtattacattttattttttcttaatccagttctgcaaaaatgacctataaatttattcatgtacaattttggttacttgaattgttaaagaaaacattgtttttgactatgggagtcaactcaacatggcagaaccatttttgagatgatgatacaacaggtagtgaaacagcttaagaattccaaaaaaaaaaaaaaaaaaaaaaaaaagaaaactgggtttgggctttgctttaggtatcactggattagaatgagtttaacattagctaaaactgctttgagttgtttggatgattaagagattgccatttttatcttggaagaactagtggtaaaacatccaagagcactaggattgtgatacagaatttgtgaggtttggtggatccacgcccctctcccccactttcccatgatgaaatatcactaataaatcctgtatatttagatattatgctagccatgtaatcagatttatttaattgggtggggcaggtgtgtatttactttagaaaaaatgaaaaagacaagatttatgagaaatatttgaaggcagtacactctggccaactgttaccagttggtatttctacaagttcagaatattttaaacctgatttactagacctgggaattttcaacatggtctaattatttactcaaagacatagatgtgaaaattttaggcaaccttctaaatctttttcaccatggatgaaactataacttaaagaataatacttagaagggttaattggaaatcagagtttgaaataaaacttggaccactttgtatacactcttctcacttgacattttagctatataatatgtactttgagtataacatcaagctttaacaaatatttaaagacaaaaaaatcacgtcagtaaaatactaaaaggctcatttttatatttgttttagatgttttaaatagttgcaatggattaaaaatgatgatttaaaatgttgcttgtaatacagttttgcctgctaaattctccacattttgtaacctgttttatttctttgggtgtaaagcgtttttgcttagtattgtgatattgtatatgttttgtcccagttgtatagtaatgtttcagtccatcatccagctttggctgctgaaatcatacagctgtgaagacttgcctttgtttctgttagactgcttttcagttctgtattgagtatcttaagtactgtagaaaagatgtcacttcttcctttaaggctgttttgtaatatatataaggactggaattgtgtttttaaagaaaagcattcaagtatgacaatatactatctgtgttttcaccattcaaagtgctgtttagtagttgaaacttaaactatttaatgtcatttaataaagtgaccaaaatgtgttgtgctctttattgtattttcacagctttgaaaatctgtgcacatactgtttcatagaaaatgtatagcttttgttgtcctatataatggtggttcttttgcacatttagttatttaatattgagaggtcacgaagtttggttattgaatctgttatatactaaattctgtaaagggagatctctcatctcaaaaagaatttacataccaggaagtccatgtgtgtttgtgttagttttggatgtctttgtgtaatccagccccatttcctgtttcccaacagctgtaacactcattttaagtcaagcagggctaccaacccacacttgatagaaaagctgcttaccattcagaagcttccttattacctggcctccaaatgagctgaatattttgtagccttcccttagctatgttcattttccctccattatcataaaatcagatcgatatttatgtgccccaaacaaaactttaagagcagttacattctgtcccagtagcccttgtttcctttgagagtagcatgttgtgaggctatagagacttattctaccagtaaaacaggtcaatccttttacatgtttattatactaaaaattatgttcagggtatttactactttatttcaccagactcagtctcaagtgacttggctatctccaaatcagatctacccttagagaataaacatttttctaccgttattttttttcaagtctataatctgagccagtcccaaaggagtgatcaagtttcagaaatgctttcatcttcacaacattttatatatactattatatggggtgaataaagttttaaatccgaaatataaaaaaaaaaaaaaaaaaa

SEQ ID NO: 124 - DNA, 3319 bp, Homo Sapiens
gatgcggccccgcccccgccctcggaaccggaagtagagcctggtgcctgggagcggctggcgcggcggaatccagggccgacccgggccggaccgaccccaggcggcgacggaatcagtccccaatgcctggaaattcctcattggattactgtgttttaaacagaatttcgtgaacagccttttatctccaagcggaaagaaagatgtggaaagcttcagcaggccacgctgtgtccatcgcccaggatgacgcgggggccgatgactgggagaccgaccctgattttgtgaatgatgtgagtgagaaggagcaaagatggggtgccaagacggtgcagggctccgggcaccaggagcatatcaacatacacaagctgagggagaatgtctttcaagagcatcagacccttaaggagaaggaacttgaaacaggaccaaaagcttcccatggctatggagggaaatttggtgtggaacaagaccgaatggataagtcagctgtcggccacgaatatcagtcgaaactttccaagcactgctcgcaggtggactcggtccgtggcttcggaggcaagtttggtgtccagatggacagagttgatcagtctgctgtaggctttgaataccaggggaagactgagaagcatgcctcccagaaagactactccagtggttttggcggcaagtatggcgtgcaggccgaccgagtagacaagagcgcggtgggcttcgactaccagggcaagacggagaagcacgagtcacagagagattactccaaaggtttcggcggcaaatacggtatcgacaaggacaaagtggataagagcgccgttggctttgagtatcaaggcaaaacggagaagcacgagtcccagaaagactatgtgaaagggtttggaggaaaatttggtgtgcagacagacagacaagacaaatgtgcccttggctgggatcaccaggagaaattgcagctgcatgaatcccaaaaagattataagactggttttggaggcaaattcggtgttcagtcggagaggcaggactccgctgctgtggggtttgattacaaggagaagctggccaagcacgagtcccagcaagactactccaaaggattcggcgggaagtatggggtgcagaaggatcggatggataagaatgcgtcaacctttgaggatgtcacccaggtgtcctctgcctaccagaagacagtacctgtcgaagctgtgaccagcaaaacaagtaacatcagagctaactttgaaaacctcgctaaggagaaagagcaggaggacaggcggaaggcggaggcggagagagcccagcggatggccaaggagcggcaggagcaggaagaggccaggaggaagctggaggagcaagccagagccaaaacgcaaacgccccctgtgtcgcccgcacctcagccaaccgaggagaggctgccctcgagccccgtctatgaggatgcggcttccttcaaggcagagctgagctacagaggccctgtgagtgggacggagccggagcccgtgtacagcatggaggccgctgactaccgagaggccagcagccagcagggcctggcctatgccacagaggctgtctatgaaagcgcagaggccccgggccactatcccgcagaggacagcacctacgatgagtacgagaacgatctggggatcacagccgtcgccctgtacgactaccaggctgcgggcgatgatgagatctcatttgaccctgatgacatcatcaccaacatcgagatgattgacgacggctggtggcgcggggtgtgcaagggccggtacgggctcttcccagccaactatgtggagctgcggcagtagggcccccagcccccccccggagctgcgccctggatcctcacactacagatcaggccttctttggttcttgggtggttttgggttttttctgtttttttttttttttttttttttttgaaggtggggaggggaatatacacattgcttttatatttaatacttttgctgatgcttttgaaaatgtttatgccacagaatttgctaatatattgtaatcacattccttaggaggactttggtaattggttttatgcattgatggttttttttttcttttttgccaaattgactgtcacgcggcagcttcagggagctcgcattctcttgtgttcgtgttgccctcgtgcccatcaagtgcagtcgggacctcccaggacaagcacgaggcctcaggtcggccctgtggcgggtaggcaggaaggactgtcccagacgaggggcttcctctagagtctcactgctggggaggagaggactgggcctgatggaagttaacccggagctaagtcacccagagcacaggagctgccatgtcagatgggaaatctgcctatgtcataccgtgacagcccgcaggatcaggtgacttctagcagagaccctggtttttttcctgtgcccactccggcttgtcctcatctctacccatcccctgatgcccaggtcaccgggagggctgctgggagcctctcctgtccccgccgggcagtgtcactgagtccttgaaatcctcccctgccccgcgggtctctggattgggacgcacagtgcagttgaggtctgcgtcgggcttggcttttcacaaaggctgatgtcttaactgtcacccatatggtccctgggccaccgggcagcctggggcggtgtgtgtgccatgtcacagcatggcctctcggccttgggaaggaaggcagtgcctgctctgctgtgagccgccaggaaccctcctcctgtcaatgggggtgtagtatttttgccaaaatatcatgttcaatttcagtagtttgatcagttgaaggctagaagtgtgaagtgcagatgagtgtgtgttcttccccaaggtccccccacagctccaggacaccgctgtcctggcatttgtggccactcactttgtaggaaactcatctccttcctgaggagccgggaggctggaccagtcccgtcgtgcagtcaggtgggcggtgtgtctttccagaaggtcacgtggaaatgtctcgggacttgggtcccggagtgcccgtgaagcgtgtttttgctcctgaggtgcattttctcatcatccttgctttaccacaatgagcaatgaggtcgggttttatatgcaacttattgtatctgaattcctgtagcacacctcataggtatgatttttttaaattaaagaattcagaataaacattttttgatccacttgcgtgaaaaaaaaaaaaaaaaaaaaaaaaaaaaaaaaaaaaaaa

SEQ ID NO: 125 - DNA, 1 bp, Homo Sapiens
  misc_feature (1)..(1): n is a, c, g, or t
n

SEQ ID NO: 126 - DNA, 3183 bp, Homo Sapiens
acagctcggttccagcgagggctccgcccacccgcgggctccgcagaggagcagaggttgggcggccgcctcggttaactccgctgcagcccaaagcacgggaatcgcgggacagacaaacgagcggagggaagatacctagaagccaggaaaccgcgagctgcagtccaacttggccggaagctgcggagaggctcagccaccggaagtcagtggagggttcggccggacgctctagaatcccggaggaccgggatctctgtggttggccgtgacgggcaccctctaccggggatgacacattcccagagctcctgggaccaagcaaatggcggacacaattccctgggcggaaggggacttcgggagccagtagccaagacaccatggccgagcctctgaaggaggaagacggcgaggacggctctgcggagccccccgggcccgtgaaggccgaacccgcccacaccgctgcctctgtagcggccaagaacctggccctgcttaaagcccgctccttcgatgtgacctttgacgtgggcgacgagtacgagatcatcgagaccataggcaacggggcctatggagtggtgtcctccgcccgccgccgcctcaccggccagcaggtggccatcaagaagatccctaatgctttcgatgtggtgaccaatgccaagcggaccctcagggagctgaagatcctcaagcactttaaacacgacaacatcatcgccatcaaggacatcctgaggcccaccgtgccctatggcgaattcaaatctgtctacgtggtcctggacctgatggaaagcgacctgcaccagatcatccactcctcacagcccctcacactggaacacgtgcgctacttcctgtaccaactgctgcggggcctgaagtacatgcactcggctcaggtcatccaccgtgacctgaagccctccaacctattggtgaatgagaactgtgagctcaagattggtgactttggtatggctcgtggcctgtgcacctcgcccgctgaacatcagtacttcatgactgagtatgtggccacgcgctggtaccgtgcgcccgagctcatgctctctttgcatgagtatacacaggctattgacctctggtctgtgggctgcatctttggtgagatgctggcccggcgccagctcttcccaggcaaaaactatgtacaccagctacagctcatcatgatggtgctgggtaccccatcaccagccgtgattcaggctgtgggggctgagagggtgcgggcctatatccagagcttgccaccacgccagcctgtgccctgggagacagtgtacccaggtgccgaccgccaggccctatcactgctgggtcgcatgctgcgttttgagcccagcgctcgcatctcagcagctgctgcccttcgccaccctttcctggccaagtaccatgatcctgatgatgagcctgactgtgccccgccctttgactttgcctttgaccgcgaagccctcactcgggagcgcattaaggaggccattgtggctgaaattgaggacttccatgcaaggcgtgagggcatccgccaacagatccgcttccagccttctctacagcctgtggctagtgagcctggctgtccagatgttgaaatgcccagtccctgggctcccagtggggactgtgccatggagtctccaccaccagccccgccaccatgccccggccctgcacctgacaccattgatctgaccctgcagccacctccaccagtcagtgagcctgccccaccaaagaaagatggtgccatctcagacaatactaaggctgcccttaaagctgccctgctcaagtctttgaggagccggctcagagatggccccagcgcacccctggaggctcctgagcctcggaagccggtgacagcccaggagcgccagcgggagcgggaggagaagcggcggaggcggcaagaacgagccaaggagcgggagaaacggcggcaggagcgggagcgaaaggaacggggggctggggcctctgggggcccctccactgaccccttggctggactagtgctcagtgacaatgacagaagcctgttggaacgctggactcgaatggcccggcccgcagccccagccctcacctctgtgccggcccctgccccagcgccaacgccaaccccaaccccagtccaacctaccagtcctcctcctggccctgtagcccagcccactggcccgcaaccacaatctgcgggctctacctctggccctgtaccccagcctgcctgcccaccccctggccctgcaccccaccccactggccctcctgggcccatccctgtccccgcgccaccccagattgccacctccaccagcctcctggctgcccagtcacttgtgccaccccctgggctgcctggctccagcaccccaggagttttgccttacttcccacctggcctgccgcccccagacgccgggggagcccctcagtcttccatgtcagagtcacctgatgtcaaccttgtgacccagcagctatctaagtcacaggtggaggaccccctgccccctgtgttctcaggcacaccaaagggcagtggggctggctacggtgttggctttgacctggaggaattcttaaaccagtctttcgacatgggcgtggctgatgggccacaggatggccaggcagattcagcctctctctcagcctccctgcttgctgactggctcgaaggccatggcatgaaccctgccgatattgagtccctgcagcgtgagatccagatggactccccaatgctgctggctgacctgcctgacctccaggacccctgaggcccccagcctgtgccttgctgccacagtagacctagttccaggatccatgggagcattctcaaaggctttagccctggacccagcaggtgaggctcggcttggattattctgcaggttcatctcagacccacctttcagccttaagcagccacctgagccaccaccgagccatggcaggatcgggagaccccaactccccctgaacaatccttttcagtattatatttttattattattatgttattattacactgtctttttgccatcaaaatgaggcctgtgaaatacaaggttcccttctgcacctgaaaaaaaaaaaaaaaaaaaaaaaaaaaaaaaaaa

SEQ ID NO: 127 - DNA, 3079 bp, Homo Sapiens
agtcccgcgggccgtgcgcggtgctgtgccgcgccctgccagacacaggtgcgcccgcctagcccgaactccgcggcggcggctgccctctcgccgcgcctccgcctccttcgcagccgccgcctcctccgcgccgcgctccgcccggatggccagggctgtgcccgagaatggcggagcgagaaagcggcggcctgggagggggggccgcgtccccgcccgccgcctccccgttcctggggctgcacatcgcttcgcctcccaatttcaggctcacccatgacatcagcctggaggagtttgaggatgaagacctctcggagatcactgatgagtgtggcatcagcttacagtgcaaagacaccctgtccttacggcccccgcgcgccgggctgctctctgcgggcggcggcggcgcggggagccggttgcaggccgagatgctgcagatggacctgatcgacgcgacgggggacactcccggggccgaggacgacgaggaggacgacgacgaggagcgcgcggcccggcggccgggagcggggccgcccaaggccgagtccggccaggagccggcgtcccgcggccagggccagagccaaggccagagccagggcccgggcagcggggacacgtaccggcccaagcggcccaccacgctcaacctctttccgcaggtgccgcggtctcaggacacactgaataataattctctgggcaaaaagcacagttggcaggatcgggtgtctcgatcatcctcacccctgaagacaggggagcagacaccaccgcatgaacacatctgcctgagcgatgagctgcccccccagagcggccccgcccccaccacagatcgaggcacctccaccgacagcccttgccgccgcagcacagccacccagatggcacctccgggtggtccccctgctgccccgcctgggggtcggggccactcgcatcgagaccgaatccactaccaggccgatgtgcgactagaggccactgaggagatctacctgaccccagtgcagaggcccccagacgctgcagagcccacctccgccttcctgccgcccactgagagccggatgtcagtcagctccgatccagaccctgccgcctacccctccacggcagggcggccgcacccctccatcagtgaagaggaagagggcttcgactgcctgtcgtccccagagcgggctgagcccccaggcggagggtggcgggggagcctgggggagccgccgccacctccacgggcctctctgagctcggacaccagcgccctgtcctatgactctgtcaagtacacgctggtggtagatgagcatgcacagctggagctggtgagcctgcggccgtgcttcggagactacagtgacgagagtgactctgccaccgtctatgacaactgtgcctccgtctcctcgccctatgagtcggccatcggagaggaatatgaggaggccccgcggccccagccccctgcctgcctctccgaggactccacgcctgatgaacccgacgtccatttctccaagaaattcctgaacgtcttcatgagtggccgctcccgctcctccagtgctgagtccttcgggctgttctcctgcatcatcaacggggaggagcaggagcagacccaccgggccatattcaggtttgtgcctcgacacgaagacgaacttgagctggaagtggatgaccctctgctagtggagctccaggctgaagactactggtacgaggcctacaacatgcgcactggtgcccggggtgtctttcctgcctattacgccatcgaggtcaccaaggagcccgagcacatggcagccctggccaaaaacagtgactgggtggaccagttccgggtgaagttcctgggctcagtccaggttccctatcacaagggcaatgacgtcctctgtgctgctatgcaaaagattgccaccacccgccggctcaccgtgcactttaacccgccctccagctgtgtcctggagatcagcgtgcggggtgtgaagataggcgtcaaggccgatgactcccaggaggccaaggggaataaatgtagccactttttccagttaaaaaacatctctttctgcggatatcatccaaagaacaacaagtactttgggttcatcaccaagcaccccgccgaccaccggtttgcctgccacgtctttgtgtctgaagactccaccaaagccctggcagagtccgtggggagagcattccagcagttctacaagcagtttgtggagtacacctgccccacagaagatatctacctggagtagctgtgcagccccgccctctgcgtcccccagccctcaggccagtgccaggacagctggctgctgacaggatgtggcactgcttgaggaggggcacctgccaccgccagaggacaaggaagtgggggccgctggcccagggtaggggagggtggggcaatggggagaggcaaatgcagtttattgtaatatatgggattagattcatctatggagggcagagtgggctgcctggggattgggagggacagggcttggggagcaggtctctggcagagaaggatgtccgttccaggagcacacggccctgccccatcctgggccttacctcccctgccagggctcgggcgctgtggctcctgccttgatgaagcccgtgtcctgccttgatgaagcctgtgccacctgcaagtgcccgccctgcccctgccccaacccccaccgaagagccctgagctcaggctgagcccagccacctcccaaggactttccagtgaggaaatggcaacacgtggaggtgaagtccctgttctcagctccgtcatctgcggggcttctgggtggctcctgccactgacctcaccggcatgctggcctgtggcaggcctaggacctcaggcggggaggaggagctgccgcaaggccctgtcccagcagaagagggaggcttcctgactgacacaggccagccccatcttggtcctgtcaccctggccccaactattaaagtgccatttcctgtctggaaaaaaaaaaaaaaaaaaaaaaaaaaaaaa

SEQ ID NO: 128 - DNA, 2910 bp, Homo Sapiens
agtgcgcttgcgccgatctcggcctcagcgtgagcatgcgcaggtccccgccctcgctgcgtttgcgcttgagcgccgataatttggtggcggcgtccggagggtgctggtttgttctcggtgaacggcgcgcggggtctctcctgagtgcgagctacgggaccttcgccatgccggggatggtactcttcggccggcgctgggccatcgccagcgacgacttggtcttcccagggttcttcgagctggtcgtgcgagtgctgtggtggattggcattctgacgttgtatctcatgcacagaggaaagctggactgtgctggtggagccttgctcagcagttacttgatcgtcctcatgattctcctggcagttgtcatatgtactgtgtcagccatcatgtgtgtcagcatgagaggaacgatttgtaaccctggaccgcggaagtctatgtctaagctgctttacatccgcctggcgctgttttttccagagatggtctgggcctctctgggggctgcctgggtggcagatggtgttcagtgcgacaggacagttgtaaacggcatcatcgcaaccgtcgtggtcagttggatcatcatcgctgccacagtggtttccattatcattgtctttgaccctcttggggggaaaatggctccatattcctctgccggccccagccacctggatagtcatgattcaagccagttacttaatggcctcaagacagcagctacaagcgtgtgggaaaccagaatcaagctcttgtgctgttgcattgggaaagacgaccatactcgggttgctttttcgagtacggcagagcttttctcaacctacttttcagacacagatctggtgcccagcgacattgcggcgggcctcgccctgcttcatcagcaacaggacaatatcaggaacaaccaagagcctgcccaggtggtctgccatgccccagggagctcccaggaagctgatctggatgcagaattagaaaactgccatcattacatgcagtttgcagcagcggcctatgggtggcccctctacatctacagaaaccccctcacggggctgtgcaggattggtggtgactgctgcagaagcagaaccacagactatgacttggtcggaggcgatcagctcaactgtcacttcggctccatcctgcacaccacagggctgcagtacagggacttcatccacgtcagcttccatgacaaggtttacgagctgccgtttttagtggctctggatcacaggaaagagtctgttgtggtcgctgtgagggggaccatgtctctgcaggatgtccttacggacctgtcagcggagagtgaggtgctggacgtggagtgtgaggtgcaggaccgcctggcacacaagggtatttctcaagctgccagatacgtttaccaacgactcatcaacgacgggattttgagccaagccttcagcattgctcctgagtaccggctggtcatagtgggccacagcctcgggggcggggcggccgccctgctggccaccatgctcagagccgcctacccgcaggtcaggtgctacgccttctccccaccccgggggctgtggagcaaagctctgcaggaatattctcagagcttcatcgtgtcactcgtcctggggaaggatgtgattcccaggctcagtgtgaccaacttggaagatctgaagagaagaatcttgcgagtggtcgcgcactgcaataaacccaagtacaagatcttgctgcacggtttgtggtacgaactgtttggaggaaaccccaacaacttgcccacggagctggacgggggcgaccaggaagtcctgacacagcctcttctgggggagcagagcctactgacgcgctggtccccggcctacagcttctccagcgactccccactggactcttctcccaagtacccccctctctaccctcccggcaggatcatccacctgcaggaggagggcgcctcggggcggtttggctgctgctctgctgctcactatagcgccaagtggtcacacgaagcggaattcagcaaaatactcataggtccgaagatgctcaccgaccacatgccagacatcctgatgcgggccttggacagcgtggtctccgacagagcggcctgcgtctcctgtccagcacaaggggtctccagtgtggacgtggcctgaccagggccactggaaactgtcccaggaacgatggactcacgcttttgtccttaaactgacttaccatccgaggagttcccatgacgccaaaacagcgaatgtccatcaacaggaatcggatgggaacagaattccatggtctcaatgacttaagtttatgggaagtcattgtggccataatggtagcagaagtagtgagcacgctcaggtgataggacgactcctgagacccagcgaccgtggagacagcctcgggaagccctggcccgtggatggatcccttggctgtctgaggactgctccagaagtgcgggaatccagggcccacccagaagaccgtgaacagttccttagcctcccacccccaaggcagctcttttcatccaactcagtttacaggcgtggtttgtttttcaaactgggcttcctggatgtacaaatggaactgtggtgagggtgcgggctggggttttctcctgggcgtcaccaagggcagccctgggctctggctggggatgaagacgaaacccgatcgggaaagtaagtggagcccccggccccgccgagccacagccccccaactgcctattcccactgcccagttgtttgtccacatcaggagttgctgattgaattcttgctactcttctggctctggggtcggccagtggattcaggagttgaaacaataaagcgcgcgtcaccatagtgcttgtgtgta

SEQ ID NO: 129 - DNA, 2838 bp, Homo Sapiens
ggaagtgccgaatggggaccaagatggcggaccttgattcgcctccgaagctgtcaggggtgcagcagccgtctgagggggtgggaggtggccgctgctccgaaatctccgctgagctcattcgctccctgacagagctgcaggagctggaggctgtatacgaacggctctgcggcgaggagaaagtggtggagagagagctggatgctcttttggaacagcaaaacaccattgaaagtaagatggtcactctccaccgaatgggtcctaatctgcagctgattgagggagatgcaaagcagctggctggaatgatcacctttacctgcaacctggctgagaatgtgtccagcaaagttcgtcagcttgacctggccaagaaccgcctctatcaggccattcagagagctgatgacatcttggacctgaagttctgcatggatggagttcagactgctttgaggagtgaagattatgagcaggctgcagcacatactcatcgctacttgtgcctggacaagtcggtcattgagctcagccgacagggcaaagaggggagcatgattgatgccaacctgaaattgctgcaggaagctgagcaacgtctcaaagccattgtggcagagaagtttgccattgccaccaaggaaggtgatctgccccaggtggagcgcttcttcaagatcttcccactgctgggtttgcatgaggagggattaagaaagttctcggagtacctttgcaagcaggtggccagtaaagctgaggagaatctgctcatggtgctggggacagacatgagtgatcggagagctgcagtcatctttgcagatacacttactcttctgtttgaagggattgcccgcattgtggagacccaccagccaatagtggagacctattatgggccagggagactctataccctgatcaaatatctgcaggtggaatgtgacagacaggtggagaaggtggtagacaagttcatcaagcaaagggactaccaccagcagttccggcatgttcagaacaacctgatgagaaattctacaacagaaaaaatcgaaccaagagaactggaccccatcctgactgaggtcaccctgatgaatgcccgcagtgagctatacttacgcttcctcaagaagaggattagctctgattttgaggtgggagactccatggcctcagaggaagtaaagcaagagcaccagaagtgtctggacaaactcctcaataactgccttttgagctgtaccatgcaggagctaattggcttatatgttaccatggaggagtacttcatgagggagactgtcaataaggctgtggctctggacacctatgagaagggccagctgacatccagcatggtggatgatgtcttctacattgttaagaagtgcattgggcgggctctgtccagctccagcattgactgtctctgtgccatgatcaacctcgccaccacagagctggagtctgacttcagggatgttctgtgtaataagctgcggatgggctttcctgccaccaccttccaggacatccagcgcggggtgacaagtgccgtgaacatcatgcacagcagcctccagcaaggcaaatttgacacaaaaggcatcgagagtactgacgaggcgaagatgtccttcctggtgactctgaacaacgtggaagtctgcagtgaaaacatctccactctgaagaagacactggagagtgactgcaccaagctcttcagccagggcattggaggggagcaggcccaggccaagtttgacagctgcctttctgacttggccgccgtgtccaacaaattccgagacctcttgcaggaagggctgacggagctcaacagcacagccatcaagccacaggtgcagccttggatcaacagctttttctccgtctcccacaacatcgaggaggaagaattcaatgactatgaggccaacgacccttgggtacaacagttcatccttaacctggagcagcaaatggcagagttcaaggccagcctgtccccggtcatctacgacagcctaaccggcctcatgactagccttgttgccgtcgagttggagaaagtggtgctgaaatccacctttaaccggctgggtggtctgcagtttgacaaggagctgaggtcgctcattgcctaccttaccacggtgaccacctggaccatccgagacaagtttgcccggctctcccagatggccaccatcctcaatctggagcgggtgaccgagatcctcgattactggggacccaattccggcccattgacgtggcgcctcacccctgctgaagtgcgccaggtgctggccctgcggatagacttccgcagtgaagatatcaagaggctgcgcctgtagctgcctggatgagcacacctggctcatcacacttgcaggcctgttccctaaggggccccagccaaggagctgagcgaggctgtctggcttgggggagatctgacagcccagacctttctacggctggcagcagagaaacaaagtctggacccactccatgctctgccctcagacctggccaggtgatgctctgggggcagcatctccccaccgagagaagcgggctcctaatgaggtgggaaagccacggcaggcagcgagcagcccaggccagctttctgcatggatggtcagtctcttgccctcaaacactacagcaaacaagctacccctgccagtcctagacaacttgggtacatctggggacctagcagttaggcttgactttgaggagaggctgtgatgtttatgatccctgaataaagctactccttggagagaaaaaaaaaaaaaaaaa

SEQ ID NO: 130 - DNA, 4062 bp, Homo Sapiens
ctggacctgggcaccgccagccgcctgggcacgggactgggcgggggcgctgacctcggcctaggaggcccaggatcccggagacgcccgcgccctcaggaccctgcgggtcgcacgccctccccagcttctgctgctcgccgctcttcggcagggcgaggtcaggtgcccccttctcgcctctcttctcttctcttctcttcctcctccacttctgtgcccgcggagactccggccgcccccttccgcaggggtgtagtaatctgcggagctgacagcagccccgcagccaccctgcccgaagtctccggaagcggcacgagctcaggccgccgcagccccggcggacccactgttggacctgaggagccagccctcctcccgcacccaaacttggagcacttgacctttggctgttggagggggcaggctcgcgggtggctggacagctgcggagccgcgagggcatcttgcctggagaccgtcggctgcactcccgggctcctggctttgcctctgggatcccgaggtgtccacatcagacgcatgttgactgagacctagagtcatggatgtatgcgtccgtcttgccctgtggctcctctggggactcctcctgcaccagggccagagcctcagccatagtcacagtgagaaggcgacaggaaccagctcgggggccaactctgaggagtccactgcagcagagttttgccgaattgacaagcccctgtgtcacagtgaggatgagaaactcagcttcgaggcagtccgtaacatccacaaactgatggacgatgatgccaatggtgatgtggatgtggaagaaagtgatgagttcctgagggaagacctcaattaccatgacccaacagtgaaacacagcaccttccatggtgaggataagctcatcagcgtggaggacctgtggaaggcatggaagtcatcagaagtatacaattggaccgtggatgaggtggtacagtggctgatcacatatgtggagctgcctcagtatgaggagaccttccggaagctgcagctcagtggccatgccatgccaaggctggctgtcaccaacaccaccatgacagggactgtgctgaagatgacagaccggagtcatcggcagaagctgcagctgaaggctctggatacagtgctctttgggcctcctctcttgactcgccataatcacctcaaggacttcatgctggtggtgtctatcgttattggtgtgggcggctgctggtttgcctatatccagaaccgttactccaaggagcacatgaagaagatgatgaaggacttggaggggttacaccgagctgagcagagtctgcatgaccttcaggaaaggctgcacaaggcccaggaggagcaccgcacagtggaggtggagaaggtccatctggaaaagaagctgcgcgatgagatcaaccttgctaagcaggaagcccagcggctgaaggagctgcgggagggtactgagaatgagcggagccgccaaaaatatgctgaggaggagttggagcaggttcgggaggccttgaggaaagcagagaaggagctagaatctcacagctcatggtatgctccagaggcccttcagaagtggctgcagctgacacatgaggtggaggtgcaatattacaacatcaagaagcaaaatgctgagaagcagctgctggtggccaaggagggggctgagaagataaaaaagaagagaaacacactctttggcaccttccacgtggcccacagctcttccctggatgatgtagatcataaaattctaacagctaagcaagcactgagcgaggtgacagcagcattgcgggagcgcctgcaccgctggcaacagatcgagatcctctgtggcttccagattgtcaacaaccctggcatccactcactggtggctgccctcaacatagaccccagctggatgggcagtacacgccccaaccctgctcacttcatcatgactgacgacgtggatgacatggatgaggagattgtgtctcccttgtccatgcagtcccctagcctgcagagcagtgttcggcagcgcctgacggagccacagcatggcctgggatctcagagggatttgacccattccgattcggagtcctccctccacatgagtgaccgccagcgtgtggcccccaaacctcctcagatgagccgtgctgcagacgaggctctcaatgccatgacttccaatggcagccaccggctgatcgagggggtccacccagggtctctggtggagaaactgcctgacagccctgccctggccaagaaggcattactggcgctgaaccatgggctggacaaggcccacagcctgatggagctgagcccctcagccccacctggtggctctccacatttggattcttcccgttctcacagccccagctccccagacccagacacaccatctccagttggggacagccgagccctgcaagccagccgaaacacacgcattccccacctggctggcaagaaggctgtggctgaggaggataatggctctattggcgaggaaacagactccagcccaggccggaagaagtttcccctcaaaatctttaagaagcctcttaagaagtaggcaggatggggtggcagtaaagggacagcttgtccttccctgggtgttctgtctctccttccctcccttccttcaagataactggccccaagagtggggcatgggaagggctggtccaggggtctgggcactgtacatacctgccccctcatccttgggtccttcattattatttattaactgaccaccatggcctgcctgccctgcctccgtcccaaccatgggctgctgctgtcactccctctccacttcagtgcatgtcttagttgctgttccctcagctcccagctccacctctggggttcagcttctgtctctgctgtcccagttttgaggtttggtttcttgtttctgtctcttgctttcgggctcctccctcccaccactccccaacttcccctagcagttgcagggaagataggacgagtagcttctgacatgtgtgcctcagatctgttccaccccactcacagtggttctgtttgctccagactggggctagggcctaatctttgaagtttgttctttggtattgatgtgggtcagaaggagcctcatcctaatctcactcaggcctccagggatccatgggggagtgaaaccaattctcagagaacaacccaccagagacttttaaagagaggccaggcttgggaatgggttgggagaggcatctgttcattggagcatgagtggatgccagaactgtaggttataaggcagtcactttttctctctactcccacccacacctgcctccctcttacccctgctcccccacactgcaggaggatttgtctctaagaggtgctgccccaaagctccccaagcatcaatactcctagggctcaggacaagtggctcccctggccaggagagccacagccatgatacagggctcttatggagccctggagttgttgggcaaggatgctgtcattttttgaaccaaaagacaaacaggttaaaaggaaaaaaagtaatctgaatttcccaagtgcctacgctgcatattccccttgttagatcccattttcatgttactttgtagccttggccagaggctcaaaaaggacacaaccagtttggggaaggggtggctaaggaagatggtataggtgaaggcggctgtgtgaccactttcccccacccttcccaccctctagacaactctctcccttacctgtttttgctatggctgtaaaggtatttttcctctgccccactccctgccatacctttatcctgggatcctattttgggcctggggtgggtatacctggggctggtcttaggagggtgctaggctgcagactgccttgtactccctggacaccctcaaatggggttttctgtgttatttcataaaattctttgaagtccaataaagcatgtaggagattttaaccactaaaaaaaaaaaaaaaaaaaaaaaa

SEQ ID NO: 131 - DNA, 1159 bp, Homo Sapiens
agtgccccaggagctatgacaagcaaaggaacatacttgcctggagatagcctttgcgatatttaaatgtccgtggatacagaaatctctgcaggcaagttgctccagagcatattgcaggacaagcctgtaacgaatagttaaattcacggcatctggattcctaatccttttccgaaatggcaggtgtgagtgcctgtataaaatattctatgtttaccttcaacttcttgttctggctatgtggtatcttgatcctagcattagcaatatgggtacgagtaagcaatgactctcaagcaatttttggttctgaagatgtaggctctagctcctacgttgctgtggacatattgattgctgtaggtgccatcatcatgattctgggcttcctgggatgctgcggtgctataaaagaaagtcgctgcatgcttctgttgtttttcataggcttgcttctgatcctgctcctgcaggtggcgacaggtatcctaggagctgttttcaaatctaagtctgatcgcattgtgaatgaaactctctatgaaaacacaaagcttttgagcgccacaggggaaagtgaaaaacaattccaggaagccataattgtgtttcaagaagagtttaaatgctgcggtttggtcaatggagctgctgattggggaaataattttcaacactatcctgaattatgtgcctgtctagataagcagagaccatgccaaagctataatggaaaacaagtttacaaagagacctgtatttctttcataaaagacttcttggcaaaaaatttgattatagttattggaatatcatttggactggcagttattgagatactgggtttggtgttttctatggtcctgtattgccagatcgggaacaaatgaatctgtggatgcatcaacctatcgtcagtcaaacccctttaaaatgttgctttggctttgtaaatttaaatatgtaagtgctatataagtcaggagcagctgtctttttaaaatgtctcggctagctagaccacagatatcttctagacatattgaacacatttaagatttgagggatataagggaaaatgatatgaatgtgtatttttactcaaaataaaagtaactgtttacgttaaaaaaaaaaaaaaaaaaaaaaaaaaaaa

SEQ ID NO: 132 - DNA, 4159 bp, Homo Sapiens
acggtgcgccggggggcgcgcacgcagggggctggcctgcccgcggcgcgggggaaagttgagttgggagaagttgggagcggcgggggcgcgccccggggtgggcacggggcagtcgtcgggagcgcgcgagtgcgccggaggacggggagagaccccgagacccccggggcacgaagtccagagcgagcgggttatgcctccgcctcgttgccctgaaagccgcagcgacagcgaaaagggctaagattcggccatgagcagcgcccctcggcgccccgccaagggcgcagattctttctgtacgccagagccagagagcttgggccctgggacgcctgggttccccgagcaggaggaagacgaacttcaccgcaccctgggcgtggagcggtttgaggagatcctacaggaggccgggtctcgtggaggggaggagccaggccgcagctatggggaggaagactttgagtaccaccgccagtcctcccaccacatccatcacccactgtccacccacctgcctccggatgcacgccgccgcaagacaccccagggcccaggacggaagcctcgaaggcgcccgggagcctccccgactggagaaaccccgaccattgaggagggggaggaagatgaggatgaggccagcgaggctgagggggcccgggctctcactcagccgtcccctgtctccacaccctcctcggtgcagttctttctccaagaggatgacagtgctgaccggaaggcagagaggaccagtccatcttcccctgcaccactgccccaccaggaggcgactcctcgggcctccaaaggggcccaggctggaacccaggtggaggaggcggaggcggaggcggtggcggtggccagtggcactgcagggggtgacgacgggggtgcctcggggcgccccctgcccaaagcccagcctgggcaccgcagctacaaccttcaggagaggaggcgcatcgggagcatgactggggctgagcaggcactgctgccccgggtccccacggatgagattgaggcccagacgctggccacggccgacctagacctcatgaagagtcaccggtttgaggacgttcctggggtgcggcggcacttggtgcggaagaatgccaaaggttccacacagagtggccgagaagggcgggagcctggccccacacctcgggcccgaccccgggccccccacaagccccatgaggtgtttgtggagctgaatgagttgctcctggacaaaaaccaggagccccagtggcgggagacagctcgctggatcaaatttgaagaggacgtggaggaggagactgagcgctgggggaagccccacgtggcctccctctccttccgcagtctcctggagctccgcaggaccctggcccatggggctgtgctcttggatctggaccagcagaccctgcccggagtggcccaccaggtggtggagcagatggtcatctctgaccagatcaaggccgaggacagggccaacgtgctgcgggctctgctgttgaaacacagccacccaagtgatgagaaggacttctccttcccccgcaacatctcagctggctccctgggctccctgctggggcatcaccatggtcagggggctgagagtgacccccacgtcaccgagcctctcatgggaggtgttcctgagacccggctggaggtggagcgagagcgtgagctgccgcctccagcaccaccagctggcatcacccgctccaagtccaagcacgagctgaaactgctggagaagattcctgagaatgccgaggccacggtggtccttgtgggctgcgtggagttcctctcccgccccaccatggcctttgtgcggctccgggaggctgtggagttggacgcagtgttggaggtgccggtgcctgtgcgtttcctcttcctgctgctgggcccgagtagtgccaacatggactaccacgagatcggccgctccatctccaccctcatgtcagacaagcaattccacgaggcagcctacctggctgacgagcgggaggacctgctgacggccatcaacgccttcctggactgcagcgtggtgctgccgccttcagaagtgcagggcgaggagctgctgcgctctgtggcccacttccagcgccagatgctcaagaagcgagaggagcagggccggctgctacctacaggggctgggctggagcccaaatctgcccaagataaggcgctcctgcagatggtagaggcggcaggggcagctgaagatgatccccttcggcggacggggcggccctttggggggctgatccgagatgtgcggcgccgctatccccactacctgagtgacttccgagatgcacttgaccctcagtgcctggccgcagtcatcttcatctactttgccgccctgtctcctgccatcacctttggggggctgctgggagagaagacgcaggacctgataggggtgtcggagctgattatgtccacagcgctccagggcgtggtcttctgcctgctgggtgcccagcccctgttggtgatcggcttctcagggcccctgctggtctttgaggaggccttcttctcgttctgtagcagcaaccacctggagtacctggtgggccgtgtgtggatcggcttctggctggtgttcctggccctgctcatggtggccctggaggggagcttcctggtccgcttcgtctcccgcttcacccaggagatcttcgccttcttgatctcactcatcttcatctatgagaccttctacaagctggtgaagatcttccaggagcaccccctgcatggctgctcagcctccaacagctcagaggtggacggcggtgagaacatgacatgggccggggcaagacccacgctggggccgggcaacaggagcttggctgggcagtctgggcaggggaagccccggggccagcccaacacggccctgctgtcgctggtgctcatggccggcaccttcttcatcgccttcttcctgcgcaaattcaagaacagccggttctttcctggccggatccggcgggtgattggggactttggggtgcccatcgccatcctcatcatggtgcttgtggattacagtattgaggacacctatacccagaagctgagcgttcccagtggattctcggtgactgccccagaaaagaggggctgggtcatcaaccccctgggagagaagagccccttccctgtgtggatgatggttgccagcctgctgcccgccatcctggtcttcattctcatcttcatggagacacagatcaccacgctcatcatctccaagaaggagcgcatgctgcagaagggctccggcttccacctggacctgctgctcatcgtggccatgggcggcatctgtgccctctttggcctgccctggttggctgctgccactgtccgctctgtcactcacgccaacgcgctcactgtcatgagcaaggctgtggcacctggggacaagcccaagattcaggaagtcaaggagcagcgggtgacggggctgctggttgccctgcttgtgggcctctccatagttatcggggatctgctccggcagatccccctggccgtgctctttggaattttcctgtacatgggagtcacctcccttaacgggatccagttctatgagcggctgcatctgctgctcatgccgcccaaacaccacccagatgtcacttacgtcaagaaggtccggaccctccgtatgcacctgttcacggccctgcagctgctctgcctggccctgctctgggccgtcatgtccacagctgcctccctggccttccccttcatcctcatcctcacagtgccgctccgcatggtggtgctcacccgtatcttcaccgaccgagagatgaaatgtctggatgctaacgaggcagagccggtgtttgatgagcgggagggtgtggacgagtacaatgagatgcccatgcctgtgtagccgccaccgagggacagccgagggaccgatggacgaggggacaggctggtgggatggggttccccctcccatgcccctccctcctttttatttaagtgaataatttaaagtcttctcctcccccactgcccctgcagtaaagtgctttggcccccacctaaaaaaaaaaaaaaaaaa

SEQ ID NO: 133 - DNA, 1627 bp, Homo Sapiens
ggggacccgggccgcgtgggcgccgggatggagggcgccaaggggcggggagcgggcgtgcgtgtgtgtgcgagtgcgaatgcgagggaggccggccttgagtgaaaccggagctacaaagaaggggagagtccgggagcgggagggcgcgagggaggagcggcggctccggggcagctccgacgccctcccgcggggaaggagcccccgcggtgccgccgaggccccgacgcggggccgcccctcggctcgccgccccgcgcccgcgcccgctgggaatgatgaagaagaacaattccgccaagcggggacctcaggatggaaaccagcagcctgcaccgcccgagaaggtcggctgggtccggaaattctgcgggaaagggattttcagggagatttggaaaaaccgctatgtggtgctgaaaggggaccagctctacatctctgagaaggaggtaaaagatgagaaaaatattcaagaggtatttgacctgagtgactatgagaagtgtgaagagctccggaagtccaagagcaggagcaagaaaaatcatagcaagtttactcttgcccactccaaacagcccggtaacacggcacccaacctgatcttcctggcagtgagtccagaagagaaggaatcgtggatcaatgccctcaactctgccatcacccgagccaagaaccgtatcttggatgaggtcaccgttgaggaggacagctatcttgcccatcccactcgagacagggcaaaaatccagcactcccgccgccccccaacaaggggacacctaatggctgtggcttccacctctacctcggatgggatgctgaccttggacttgatccaagaggaagacccttcccctgaggaaccaacctcttgtgctgagagctttcgggttgacctggacaagtctgtggcccagctggcagggagccggcggagagcggactcagaccgcatccagccctccgcagaccgggcaagcagtctctcccgaccttgggaaaaaacagacaaaggggccacctacaccccccaggcacccaagaagttgacgcccacagagaaaggccgctgcgcctccctggaggagatcctatctcagcgggatgctgcctctgcccgcaccctccagctgcgggctgaggaacccccaacccctgccctccccaacccggggcagctgtcccggatccaggacctggtagcaaggaaactggaggagactcaggagcttctggcagaggttcagggactgggagatgggaagcgaaaggccaaggacccccctcggtctccgccggattctgagtcagagcagctgctgctggagacggaacggctgctgggagaggcatcatcgaattggagccaggcaaagagggtgctgcaggaggtcagggagctgagagacctgtacagacagatggacctgcagaccccggactcccacctcagacagaccaccccgcacagtcagtaccggaagagcctgatgtgagggcagggtggggtctggaacttgtcgggttggacagactcttatctccgtgttgctggataaagcttttttatttacctcaatcaaaaaaagaaaacaaaaatgaaaaaaaaaaaaaa

SEQ ID NO: 134 - DNA, 1731 bp, Homo Sapiens
acttccggggcggtggtgagaacgaggctcacttccgtccgtggggggagctgcggcggtggcggtgcaggaggccgggcaggggtgcggagggaccgacggacgcacgggcgggcggccgggagccatggagcgcggccctggggcccgggggcgcgggccggggtgggcttcccacggcacgacatggagacctgtggttgcgaggctccctggggctcggcttggaccgcgatggggctgggccctggcctcctaacggggctgctgtctggggcggtagctgggggggcgctctcccccctgcccgcgactcggagcacccccacccctcccctgccgggccaggccgggcggcgttgttggcgggggccccggtggaggcccggcctgggcggcgcccgccatgaatgggctgtcgctgagtgagctctgctgcctcttctgctgcccgccctgccccggccgcatcgctgccaagctcgccttcctgccgccggaggccacctactccctggtgcctgagcccgagccggggcctggtggggccggggccgcccccttggggaccctgagagcctcctcgggcgcacccgggcgctggaagctgcacctgacggagcgtgccgacttccagtacagccagcgcgagctggacaccatcgaggtcttccccaccaagagcgcccgcggcaaccgcgtctcctgcatgtatgttcgctgcgtgcctggtgccagacaaggacaccaggctcagggaggccatccccagctggcatgggtgggcaggctgggcgactccaacaacccagcgcctggtggttgcctgctgggcaagagctggggcacaggggctgccctggcctgcgggtacatccaccttctcgccaggtacacggtcctcttctcgcacggcaatgccgtggacctgggccagatgagcagcttctacattggcctgggctcccgcctccactgcaacatcttctcctacgactactccggctacggtgccagctcgggcaggccttccgagaggaacctctatgccgacatcgacgccgcctggcaggccctgcgcaccaggtacggcatcagcccggacagcatcatcctgtacgggcagagcatcggcacggtgcccaccgtggacctggcctcgcgctacgagtgtgccgcggtggtgctgcactcgccgctcacctcgggcatgcgcgtcgccttccccgacaccaagaagacctactgcttcgacgccttccctaacatcgagaaggtgtccaagatcacgtctcccgtgctcatcatccacggcacggaggacgaggtgatcgacttctcgcacgggctggcgctctacgagcgctgccccaaggcggtggagccgctgtgggtggagggcgccgggcacaacgacatcgagctctacagccagtacctggagcgcctgcgtcgcttcatctcccaggagctgcccagccagcgcgcctagcggcggccccaaccggccggacctcagcaataaggcggcccccggacctcaccccgcgccggcccccacccaggggctgcatgtggaccccccgggcggcccaggggaccccgccccgacccaggggctgtggacgatgtacaggcaacagagctacgcactcctttccttttggaagcaagaagaaaatacgtgaaaacggaaattaaagatttaaaattttaaaaaaaaaaaaaaaa

SEQ ID NO: 135 - DNA, 1644 bp, Homo Sapiens
acttgggggctaattggagaaaccagttgattggttgcttccgtgctgcttctctaagggcgcttgcccttaaagaagctgacccagaggccttggtgctgccggcgtggggatccccagatgggaacgccccttgatggaggatctcgtgtgcctattggctgtcctgccaaactgcggagggtgacaaggaagaaggtggctccagatctggaggtgtgtccatggcggcgcttgacctgcgagcggagctggattcgctggtcctgcagctgcttggggacctggaggagctggaggggaaacgaacggtgttgaacgcccgggtggaggagggctggctctcgctcgccaaggctcgctacgcgatgggcgccaagtcggtagggcccctgcagtatgcttcccacatggagccccaggtctgcctccacgccagcgaggcccaggagggactccagaagttcaaggtggtgagagctggtgtccacgccccagaggaggtggggcctcgcgaagcaggtctgcggaggcgcaagggccccactaagaccccagaaccggagtcctctgaggcccctcaggaccccctgaactggtttggaatcctagttcctcacagtctacgtcaggctcaagcaagcttccgggatggcctgcagctggccgcagacatagccagcctccagaaccgcattgactggggtcgaagccagctccggggactccaagagaaactcaagcagctggagcctggggctgcctgacatgcgcgcaaagaggcagggcagcgagcacagctgttctccgacatggctacgtgatctcaggccttcttccttcacaattagctcttgcccctaccccacgccagctaatgccccttctgtgtccctgctctgcatgtttccattttccttaggtgtgaagtttgaagaggcaaacagtaattttgaaagccactactttgaaaccattctaaggcctgagttcccataggacacactcacataggcaggtgcacgttagtcaacaattggaactgcctcttggatcactcagctgtgctttcatggctggatgatggaacactgtgcgaagagagatgggggccaggaagtagcgcttcatgcttagtacatcctccaaattgtctttgctggaggagaaaaccgtactcagccaaaagatcaggacaatatgacttgagtccacaaggacacaaacacctgagtagctgggcagcccttggcagggtctaagccaggaagtaaaaatgatctggcctagatatttaagggaactctaggaagaggcctaggtttttaaaatcctgtctctttgtcttaccataagaggctgggcctctcttcatttttttgaagggccacttgtgttttctgttctgggaacttcattcatttttctactgggttgttgatctttgcagtaatttctaggagctgtttatgtttggaggtaattggtcctttgtccatatatatgagatgtaagtcttattttccagtttatctttttgcttattttttttgactttttattgtaaaataaaacatcaaactgcacagaacagttgaatagcttaatgaataactacagtaaaagctatggtaaccactaccc

SEQ ID NO: 136 - DNA, 1730 bp, Homo Sapiens
cactggttgcggagtgagctgggcgcgcggcgcgcaggcgccctggggacccggtagcggcggtggcggtggcggcggtggcggtggctgcggcgacggcagaggcgaagggagccggatcgccgacctgagcgggaggcggcggtggcggccatggcggcagatggagagcgttccccgctgctgtctgagcccatcgacggtggcgcgggcggcaacggtttagtggggcccggcgggagtggggctgggcccgggggaggcctgaccccctccgcaccaccgtacggagccggtaaacatgccccgccccaggcatttcccccgtttcccgaggggcatccagccgtgttgcctggggaggacccacccccctattcacccttaactagcccggacagtgggagtgcccctatgatcacctgccgagtctgccaatctctcatcaacgtggaaggcaagatgcatcagcatgtagtcaaatgtggtgtctgcaatgaagccaccccaatcaagaatgcacccccagggaaaaaatatgttcgatgcccctgtaactgtctccttatctgcaaagtgacatcccaacggattgcatgccctcggccctactgcaaaagaatcatcaacctggggcctgtgcatcccggacctctgagtccagaaccccaacccatgggtgtcagggttatctgtggacattgcaagaatacttttctgtggacagagttcacagaccgcactttggcacgttgtcctcactgcaggaaagtgtcatctattgggcgcagatacccacgtaagagatgtatctgctgcttcttgcttggcttgcttttggcagtcactgccactggccttgcctttggcacatggaagcatgcacggcgatatggaggcatctatgcagcctgggcatttgtcatcctgttggctgtgctgtgtttgggccgggctctttattgggcctgtatgaaggtcagccaccctgtccagaacttctcctgagcctgatgacccacagactgtgcctggcccctccctggtggggacagtgacactacgaagggagctggggtagttaaaggctcccggggcttctagaaggaagccaagcagctgccttccttttccctggggagaggtaggaaggaaccaggccctcacttaggtttggaggggcagataagagcactgctgaccatctgctttcctccaagggttgctgtgtctagggtgaagtaggcaaaacgttgcccttaaaactgggccctgaagacggttccagccttgtccttcctgtgtgctccctgagagccattcctgtcccttacacattccagggcagggtgggggtgggtagccctgggggttcccctccctcttgtgcaccattaggactttgctgctgctattgcacttcaccagaggttggctctggcctcagtaccctcagtctcctctccccacattgtgtcctgtgggggtggggtcagccgctgctctgtacagaaccacaggaactgatgtgtatataactatttaatgtgggatatgttcccctattcctgtatttcccttaattcctcctcccgaccttttttacccccccagttgcagtatttaactgggctgggtagggttgctcagtctttgggggaggttagggacttatcctgtgcttgtaaataaataaggtcatgactctacgcttaaaaaaaaaaaaaaaa

SEQ ID NO: 137 - DNA, 3111 bp, Homo Sapiens
gcgagttgtgtgagccgccagtatggccgggctatggcggcgagcactggctacgtgcgactgtggggagcggcgcggtgctgggtgctgcggcggccgatgctggccgccgccggggggcgggttcccactgcagcaggagcgtggttgctccgaggccagcggacctgcgacgcctctcctccttgggcactgtggggccgaggcccggcaattgggggccaatggcgggggttttgggaagcgagcagccgcggcggaggcgcattctcggggggcgaggacgcctccgagggcggcgcggaggaaggagccggcggcgcggggggcagcgcgggcgccggggaaggcccggtcataacggcgctcacgcccatgacgatccccgatgtgtttccgcacctgccgctcatcgccatcacccgcaacccggtgttcccgcgctttatcaagattatcgaggttaaaaataagaagttggttgagctgctgagaaggaaagttcgtctcgcccagccttatgtcggcgtctttctaaagagagatgacagcaatgagtcggatgtggtcgagagcctggatgaaatctaccacacggggacgtttgcccagatccatgagatgcaggaccttggggacaagctgcgcatgatcgtcatgggacacagaagagtccatatcagcagacagctggaggtggagcccgaggagccggaggcggagaacaagcacaagccccgcaggaagtcaaagcggggcaagaaggaggcggaggacgagctgagcgccaggcacccggcggagctggcgatggagcccacccctgagctcccggctgaggtgctcatggtggaggtagagaacgttgtccacgaggacttccaggtcacggaggaggtgaaagccctgactgcagagatcgtgaagaccatccgggacatcattgccttgaaccctctctacagggagtcagtgctgcagatgatgcaggctggccagcgggtggtggacaaccccatctacctgagcgacatgggcgccgcgctcaccggggccgagtcccatgagctgcaggacgtcctggaagagaccaatattcctaagcggctgtacaaggccctctccctgctgaagaaggaatttgaactgagcaagctgcagcagcgcctggggcgggaggtggaggagaagatcaagcagacccaccgtaagtacctgctgcaggagcagctaaagatcatcaagaaggagctgggcctggagaaggacgacaaggatgccatcgaggagaagttccgggagcgcctgaaggagctcgtggtccccaagcacgtcatggatgttgtggacgaggagctgagcaagctgggcctgctggacaaccactcctcggagttcaatgtcacccgcaactacctagactggctcacgtccatcccttggggcaagtacagcaacgagaacctggacctggcgcgggcacaggcagtgctggaggaagaccactacggcatggaggacgtcaagaaacgcatcctggagttcattgccgttagccagctccgcggctccacccagggcaagatcctctgcttctatggcccccctggcgtgggtaagaccagcattgctcgctccatcgcccgcgccctgaaccgagagtacttccgcttcagcgtcgggggcatgactgacgtggctgagatcaagggccacaggcggacctacgtgggcgccatgcccgggaagatcatccagtgtttgaagaagaccaagacggagaaccccctgatcctcatcgacgaggtggacaagatcggccgaggctaccagggggacccgtcgtcggcactgctggagctgctggacccagagcagaatgccaacttcctggaccactacctggacgtgcccgtggacttgtccaaggtgctgttcatctgcacggccaacgtcacggacaccatccccgagccgctgcgagaccgtatggagatgatcaacgtgtcgggctacgtggcccaggagaagctggccattgcggagcgctacctggtgccccaggctcgcgccctgtgtggcttggatgagagcaaggccaagctgtcatcggacgtgctgacgctgctcatcaagcagtactgccgcgagagcggtgtccgcaacctgcagaagcaagtggagaaggtgttacggaaatcggcctacaagattgtcagcggcgaggccgagtccgtggaggtgacgcccgagaacctgcaggacttcgtggggaagcccgtgttcaccgtggagcgcatgtatgacgtgacaccgcccggcgtggtcatggggctggcctggaccgcaatgggaggctccacgctgtttgtggagacatccctgagacggccacaggacaaggatgccaagggtgacaaggatggcagcctggaggtgacaggccagctgggggaggtgatgaaggagagcgcccgcatagcctacaccttcgccagagccttcctcatgcagcacgcccccgccaatgactacctggtgacctcacacatccacctgcatgtgcccgagggcgccacccccaaggacggcccaagcgcaggctgcaccatcgtcacggccctgctgtccctggccatgggcaggcctgtccggcagaatctggccatgactggcgaagtctccctcacgggcaagatcctgcctgttggtggcatcaaggagaagaccattgcggccaagcgcgcaggggtgacgtgcatcgtcctgccagccgagaacaagaaggacttctacgacctggcagccttcatcaccgagggcctggaggtgcacttcgtggaacactaccgggagatcttcgacatcgccttcccggacgagcaggcagaggcgctggccgtggaacggtgacggccaccccgggactgcaggcggcggatgtcaggccctgtctgggccagaactgagcgctgtggggagcgcgcccggacctggcagtggagccaccgagcgagcagctcggtccagtgacccagatcccagggacctcagtcggcttaatcagagtgtggcatagaagctatttaatgattaaagtcatttgcagta

SEQ ID NO: 138 - DNA, 2842 bp, Homo Sapiens
ccagcggcggcccaggctctgggcactcgcgcggctcccgttcgcggagcacacatcccggcgcgacgaggttccttcggagagcgagcgggagtcggtgctcggcctcctgcggggagcagcccgaggaatctgcagggagaggtcgggaggtgacaacgccagcatgccagtgctatcggaggactctggtttgcatgaaaccctggccctgctgacctcccagctcagacctgactccaaccacaaggaggagatgggcttcctgagggatgttttcagtgaaaaaagcctcagttacttaatgaagattcatgagaagcttcgctattatgaaaggcaaagtccaaccccagttctgcacagcgctgtggccctcgctgaggacgtgatggaggagttgcaggccgcctccgtgcacagtgatgagagggagctgctccagctgctgtccaccccgcacctgagggctgtgctcatggtacatgacacggttgcccagaagaattttgaccccgttctcccgcctctgcctgacaatatcgatgaggattttgatgaggaatcggtgaagatcgtccgcttggtgaagaacaaggaacccctgggtgccaccatccggcgggacgagcactcaggggctgttgtggtggccaggatcatgcgaggaggcgcagcagacaggagcggcctggtccacgttggagatgagctccgagaagtgaacgggatcgcagtcctgcacaagcggcccgacgagatcagccagattctggcccagtcccagggatccatcaccctaaaaatcatcccagccacccaggaggaagatcgcttaaaggagagcaaggtgttcatgcgcgccctcttccactacaaccctcgggaggaccgggccatcccttgccaggaggcgggcctgcccttccagcgcaggcaggtcctggaggtggtgagccaggacgaccccacgtggtggcaggccaagcgagtcggggacaccaaccttcgagccggcctcatcccctccaaggggttccaggagagacgactaagctaccggagagccgcgggcaccctgccgagcccccagagcctcaggaagcccccctatgatcagccttgtgacaaagagacctgtgactgtgagggctacctcaaagggcactatgtggctggtcttcggaggagcttccggctgggctgtagggagagactgggtggctcgcaggaaggaaagatgtcctccggagctgagtctccggagctgctgacttacgaagaggtggccaggtaccaacaccagcccggagagcggccccgcctggtggttctgatcgggtctctgggagcccgactgcacgagctgaagcaaaaggtggtggctgagaacccacagcactttggcgtcgctgttccacataccaccaggccccgaaagagccatgagaaggaaggagtggaatatcactttgtgtctaagcaagcatttgaggccgacttacatcacaacaagttcctggaacatggtgaatataaggaaaatctgtatggaaccagcctggaggccattcaggctgttatggccaaaaacaaagtttgtttggtggatgtggagccagaagcactgaaacaactgaggacctcagaatttaaaccctatattatatttgtaaagcctgcaattcaggaaaaaagaaaaacgccacctatgtccccagcttgtgaggacacagcagccccatttgatgagcagcagcaagagatggccgcttctgccgccttcatagaccggcattacgggcacctggtagacgccgtgctggtgaaggaggatctccagggtgcctacagccagctcaaagtggtcttagagaagctgagcaaggacactcactgggtacctgttagttgggtcaggtaactttatcccagaacatccaagctggacgggaccttgaagatcatctagtccagactccctcattttaccatcaaggaatctcaagcgcagagagggagagaattctccacaaattccatcatcgagaagagtataagtgggaagtcttgtttgttgttggtttttgtctgttgtttttcactgcacctctttggatcatgatttgaaaggggcatatcagaaaacaacacatttcatttattaaagtatcacaggcaagctgaccctgattctttgtaccaaagttaagtagccactgtcttttgtgggtggtagtggttaatttatacagtactgattcgcagaatgtttaagctttttaaacatagtgacgcttagtagtttttttggaagctaacttgttttatccaaggggattttacatgtaactgaagttcccctgtcttcaagcactaaaacgttgatcttaaccttttttttgaagtgcttgcctggtaatagaaaacgggttctctgcctattttaaaatagtgaatatacgtaaattttctctggaaggctgaggcacacttcaccatcaacatgaattactgtactatcctgtactgcagtggtgccttcagggactcgaggaatgtaaggttgcctttcccctttctaaataccctcagattcctaacatcgagcccatgctttgtttgatttgttctattccatccattgtcccttttgttactgacagttgccttggtcctagccagtccctgccatgagatcataggggttcccattgtgctagatcttgggaaaccagatgactctccctgtcaaaactatggctacgtcactgtaaaccatttctgtcaagaataaaagtatgtagacccagagtgtgggcctaaaaaaaaaaaaaaaaaa

SEQ ID NO: 139 - DNA, 2606 bp, Homo Sapiens
gtaacgcgtggctcccttgggctggcgggaggggccggaggctcgcgaggggcgggggcggcgacggcggcggagcgtaggggaggggaccggagaggaggggatgagcacacgggagaggagaagagggagacccgccgcctccctccctccctagctgacttgctccctcccgggctgcggctgctgcaaaagccagcagcggcagcgggagctgtccggaggccggcgtcgagggtttgccgctgtctctgctattccatcctccccataggggctctctcccctctcccatctcaagatggcagccagcagctctgagatctctgagatgaagggggttgaggagagtcccaaggttccaggcgaagggcctggccattctgaagctgaaactggccctccccaggtcctagcaggggtaccagaccagccagaggccccgcagccaggtccaaacaccactgcggcccctgtggactcagggcccaaggctgggctggctccagaaaccacagagaccccggctggggcctcagaaacagcccaggccacagacctcagcttaagcccaggaggggaatcaaaggccaactgcagccccgaagacccatgccaagaaacagtgtccaaaccagaagtgagcaaagaggccactgcagaccaggggtccaggctggagtctgcagccccacctgaaccagccccagagcctgctccccaaccagacccccggccagattcccagcctacccccaagccagcccttcaaccagagctccctacccaggaggaccccacccctgagattctgtctgagagtgtaggggaaaagcaagagaatggggcagtggtgcccctgcaggctggtgatggggaagagggcccagcccctgagcctcactcaccaccctcaaaaaaatcccccccagccaatggggcccccccccgagtgctgcagcagctggttgaggaggatcgaatgagaagggcacacagtgggcatccaggatctccccgaggtagcctgagccgccaccccagctcccagctggcaggtcctggggtggaggggggtgaaggcacccagaaacctcgggactacatcatccttgccatcctgtcctgcttctgccccatgtggcctgtcaacatcgtggccttcgcttatgctgtcatgtcccggaacagcctgcagcagggggacgtggacggggcccagcgtctgggccgggtagccaagctcttaagcatcgtggcgctggtggggggagtcctcatcatcatcgcctcctgcgtcatcaacttaggcgtgtataagtgaggggctctgccccgcatcccaagacttttcttcctgttgggagctgccttgggcccatccctcccctggggggagcccaactgatggccctggcccccacccctaaggaccaagggagcctgagcggccttgtttacagcttctgtcctgctcctgcatcttgccaggctcctctgccaactgtaggcctgcctcatccctgcactggttccaacctccctgcactaatgcctgcatcccctccggcctcttggccccctatccctgcacttctggaaacctccctgcactctggaaacctccctgaacacctccccaactctgcgctctcagcctccctgcatctctcctggcctccctgcacttcttccagccccccaaattctctggacctccaccctggccgcctcctcccaactttcattgtcttggcatctctcaaccctcagtcctctcttccttcccttctttatcatctcccctttcctctccacgtcccgcccccttcctcttcctgcctcctcatctcccttaagcatcctcttctccaacctcccgtcaccgtttactctgcaaaattgacagcacttagacgaggcttgggggcagggagcagtgttgggagagggctccccaaccccaggctcggactgttctctgctgggaccacccagggtcggacacccaagggtgcctggcaggtcgcagagttggcaagccgggcctcgtatggggactcgggtgagggtggcgagtactggttccgaacgcacgcaggggagaagggagggacgcggcgctgacccttccaggtcagctggagttgacccgcccacctgggcttttcaaccccagtccgcgagtttctttcttgaaggtgtgggggctagattcattcacgtgcttcgtaatgaaataatccaaaaaataggaccaaagcgcccactggcaggagcgagggcggggcgccgcgctctataattattttctaagatgatgggggaggtttgttgcacgcgacagcccgctgaggaggcggggaccgagctacaacgcggttcggatttggcgggggtttttttccttaaaaaaaaaaaaaaaaaaaaaaaaaaagtctgggggaagaaaaaaactaaaattcttaaaaaaaaaaaaaaaaggctattatcaaactgatttctccctttttgtatgccggatgctgcatgagtctgaaacaccaataaacggagactgcatgagaaaaaaaaaaaaaaaaaaaaaaaaaaaaaaaaaaaaaaaa

SEQ ID NO: 140 - DNA, 3453 bp, Homo Sapiens
cgcgcggccaggccctcttagccctctgccgtttggggggcacgggtgaacctgccgccccactcccaccccgccccgccccgcccgtacagccaaatcggaagggacgagcctgccctttgaaagggttttttttcttgctcctgcggagggcgccccagccatggccctcaggagctccctagaccccgcagggactgccctccatcccggccgccggggcccgccctctgcatcccgcgggcagcctgtgtgaagcggcctcccgcagcccccggcccctcccccatggaggaggaggagggggcggtggccaaggagtggggcacgacccccgcggggcccgtctggaccgcggtgttcgactacgaggcggcgggcgacgaggagctgaccctgcggaggggcgatcgcgtccaggtgctttcccaagactgtgcggtgtccggcgacgagggctggtggaccgggcagctccccagcggccgcgtgggcgtcttccccagcaactacgtggcccccggcgcccccgctgcacccgcgggcctccagctgccccaggagatccccttccacgagctgcagctagaggagatcatcggtgtggggggctttggcaaggtctatcgggccctgtggcgtggcgaggaggtggcagtcaaggccgcccggctggaccctgagaaggacccggcagtgacagcggagcaggtgtgccaggaagcccggctctttggagccctgcagcaccccaacataattgcccttaggggcgcctgcctcaaccccccacacctctgcctagtgatggagtatgcccggggtggtgcactgagcagggtgctggcaggtcgccgggtgccacctcacgtgctggtcaactgggctgtgcaggtggcccggggcatgaactacctacacaatgatgcccctgtgcccatcatccaccgggacctcaagtccatcaacatcctgatcctggaggccatcgagaaccacaacctcgcagacacggtgctcaagatcacggacttcggcctcgcccgcgagtggcacaagaccaccaagatgagcgctgcggggacctacgcctggatggcgccggaggttatccgtctctccctcttctccaaaagcagtgatgtctggagcttcggggtgctgctgtgggagctgctgacgggggaggtcccctaccgtgagatcgacgccttggccgtggcgtatggcgtggctatgaataagctgacgctgcccattccctccacgtgccccgagccctttgcccgcctcctggaggaatgctgggacccagacccccacgggcggccagatttcggtagcatcttgaagcggcttgaagtcatcgaacagtcagccctgttccagatgccactggagtccttccactcgctgcaggaagactggaagctggagattcagcacatgtttgatgaccttcggaccaaggagaaggagcttcggagccgtgaggaggagctgctgcgggcggcacaggagcagcgcttccaggaggagcagctgcggcggcgggagcaggagctggcagaacgtgagatggacatcgtggaacgggagctgcacctgctcatgtgccagctgagccaggagaagccccgggtccgcaagcgcaagggcaacttcaagcgcagccgcctgctcaagctgcgggaaggcggcagccacatcagcctgccctctggctttgagcataagatcacagtccaggcctctccaactctggataagcggaaaggatccgatggggccagcccccctgcaagccccagcatcatcccccggctgagggccattcgcctgactcccgtggactgtggtggcagcagcagtggcagcagcagtggaggaagtgggacatggagccgcggtgggcccccaaagaaggaagaactggtcgggggcaagaagaagggacgaacgtgggggcccagctccaccctgcagaaggagcgggtgggaggagaggagaggctgaaggggctgggggaaggaagcaaacagtggtcatcaagtgcccccaacctgggcaagtcccccaaacacacacccatcgcccctggctttgccagcctcaatgagatggaggagttcgcggaggcagaggatggaggcagcagcgtgcccccttccccctactcgaccccgtcctacctctcagtgccactgcctgccgagccctccccgggggcgcgggcgccgtgggagccgacgccgtccgcgccccccgctcggtggggacacggcgcccggcggcgctgcgacctggcgctgctaggctgcgccacgctgctgggggctgtgggcctgggcgccgacgtggccgaggcgcgcgcggccgacggtgaggagcagcggcgctggctcgacggcctcttctttccccgcgccggccgcttcccgcggggcctcagcccacccgcgcgtccccacggccgccgcgaagacgtgggccccggcctgggcctggcgccctcggccaccctcgtgtcgctgtcgtccgtgtccgactgcaactccacgcgttcactgctgcgctctgacagtgacgaggccgcaccggccgcgccctccccaccaccctccccgcccgcgcccacacccacgccctcgcccagcaccaaccccctggtggacctggagctggagagcttcaagaaggacccccgccagtcgctcacgcccacccacgtcacggctgcatgcgctgtgagccgcgggcaccggcggacgccatcggacggggcgctggggcagcgggggccgcccgagcccgcgggccatggccctggccctcgtgaccttctggacttcccccgcctgcccgacccccaggccctgttcccagcccgccgccggccccctgagttcccaggccgccccaccaccctgacctttgccccgagacctcggccggctgccagtcgcccccgcttggacccctggaaactggtctccttcggccggacactcaccatctcgcctcccagcaggccagacactccggagagccctgggccccccagcgtgcagcccacactgctggacatggacatggaggggcagaaccaagacagcacagtgcccctgtgcggggcccacggctcccactaaggcctgcccaccaccgcccgcctgggcagccatgaatgtagcgccccaggccctgccccagcccgccatgccacaaggtgggggaggccctgggcaggatgttcactctatttattggggaaggagggaggggggggacacttaacttattcctttgtaccccagggggtggagccctgtgcccaccctgcactggggggagggtgggcagggatactcagggacagggcatcatgggggatttggcacaaaatggagcattaaaggtaacccctgccccctaaaaaaaaaaaaaaaaaa

SEQ ID NO: 141 - DNA, 3077 bp, Homo Sapiens
gcagcgtttgacgtcatcgtgcgtgtggtgcccctgctgccggggctggtgattggaggaaaccccgtgtctgcggagcggctgtagcctgtgagcagcgagatccagggacagagtctcagcctcgccgctgctgccgccgccgccgcccagagactgctgagcccgtccgtccgccgccaccacccactccggacacagaacatccagtcatggataaaaatgagctggttcagaaggccaaactggccgagcaggctgagcgatatgatgacatggcagcctgcatgaagtctgtaactgagcaaggagctgaattatccaatgaggagaggaatcttctctcagttgcttataaaaatgttgtaggagcccgtaggtcatcttggagggtcgtctcaagtattgaacaaaagacggaaggtgctgagaaaaaacagcagatggctcgagaatacagagagaaaattgagacggagctaagagatatctgcaatgatgtactgtctcttttggaaaagttcttgatccccaatgcttcacaagcagagagcaaagtcttctatttgaaaatgaaaggagattactaccgttacttggctgaggttgccgctggtgatgacaagaaagggattgtcgatcagtcacaacaagcataccaagaagcttttgaaatcagcaaaaaggaaatgcaaccaacacatcctatcagactgggtctggcccttaacttctctgtgttctattatgagattctgaactccccagagaaagcctgctctcttgcaaagacagcttttgatgaagccattgctgaacttgatacattaagtgaagagtcatacaaagacagcacgctaataatgcaattactgagagacaacttgacattgtggacatcggatacccaaggagacgaagctgaagcaggagaaggaggggaaaattaaccggccttccaacttttgtctgcctcattctaaaatttacacagtagaccatttgtcatccatgctgtcccacaaatagttttttgtttacgatttatgacaggtttatgttacttctatttgaatttctatatttcccatgtggtttttatgtttaatattaggggagtagagccagttaacatttagggagttatctgttttcatcttgaggtggccaatatggggatgtggaatttttatacaagttataagtgtttggcatagtacttttggtacattgtggcttcaaaagggccagtgtaaaactgcttccatgtctaagcaaagaaaactgcctacatactggtttgtcctggcggggaataaaagggatcattggttccagtcacaggtgtagtaattgtgggtactttaaggtttggagcacttacaaggctgtggtagaatcataccccatggataccacatattaaaccatgtatatctgtggaatactcaatgtgtacacctttgactacagctgcagaagtgttcctttagacaaagttgtgacccattttactctggataagggcagaaacggttcacattccattatttgtaaagttacctgctgttagctttcattatttttgctacactcattttatttgtatttaaatgttttaggcaacctaagaacaaatgtaaaagtaaagatgcaggaaaaatgaattgcttggtattcattacttcatgtatatcaagcacagcagtaaaacaaaaacccatgtatttaacttttttttaggatttttgcttttgtgatttttttttttttgatacttgcctaacatgcatgtgctgtaaaaatagttaacagggaaataacttgagatgatggctagctttgtttaatgtcttatgaaattttcatgaacaatccaagcataattgttaagaacacgtgtattaaattcatgtaagtggaataaaagttttatgaatggacttttcaactactttctctacagcttttcatgtaaattagtcttggttctgaaacttctctaaaggaaattgtacattttttgaaatttattccttattccctcttggcagctaatgggctcttaccaagtttaaacacaaaatttatcataacaaaaatactactaatataactactgtttccatgtcccatgatcccctctcttcctccccaccctgaaaaaaatgagttcctattttttctgggagagggggggattgattagaaaaaaatgtagtgtgttccatttaaaattttggcatatggcattttctaacttaggaagccacaatgttcttggcccatcatgacattgggtagcattaactgtaagttttgtgcttccaaatcactttttggtttttaagaatttcttgatactcttatagcctgccttcaattttgatcctttattctttctatttgtcaggtgcacaagattaccttcctgttttagccttctgtcttgtcaccaaccattcttacttggtggccatgtacttggaaaaaggccgcatgatctttctggctccactcagtgtctaaggcaccctgcttcctttgcttgcatcccacagactatttccctcatcctatttactgcagcaaatctctccttagttgatgagactgtgtttatctccctttaaaaccctacctatcctgaatggtctgtcattgtctgcctttaaaatccttcctctttcttcctcctctattctctaaataatgatggggctaagttatacccaaagctcactttacaaaatatttcctcagtactttgcagaaaacaccaaacaaaaatgccattttaaaaaaggtgtattttttcttttagaatgtaagctcctcaagagcagggacaatgttttctgtatgttctattgtgcctagtacactgtaaatgctcaataaatattgatgatgggaggcagtgagtcttgatgataagggtgagaaactgaaatcccaaacactgttttgttgcttgttttattatgacctcagattaaattgggaaatattggcccttttgaataattgtcccaaatattacattcaaataaaagtgcaatggagaaaaaaaaaaa

SEQ ID NO: 142 - DNA, 3077 bp, Homo Sapiens; identical to SEQ ID NO: 141

SEQ ID NO: 143 - DNA, 2653 bp, Homo Sapiens
atgttgtgatggagaagccgcggcggagcccgaaccccgcagcctgagccacctccgtcatctgggcccggggcctcaccgcgcaggagctgccaaggccatgtctgttccatcatcactgagccagtcggccattaatgccaacagccacggaggccccgcactgagcctacccctgcctctgcacgctgcccacaaccagctgctcaacgccaagctgcaggccacagctgtgggacccaaggacctgcgcagcgccatgggggagggtggtgggcctgagccaggccctgccaatgccaagtggctaaaagagggccagaaccagctccggcgggccgccacggcccaccgtgaccagaatcgcaatgtgaccttgaccttggcggaggaggccagccaggagcctgagatggcacccttgggccccaaaggcctgatacacctgtactctgagctggagctctcagctcacaacgcagccaaccgaggcctacgaggacctggcctgatcatcagcactcaagagcaggggccagatgagggagaggagaaggcggccggggaggccgaggaggaggaggaggatgatgatgatgaagaggaggaggaggacttatcttctcccccagggctgcctgagcccctggagagtgtggaggcccctcccaggccccaagcccttacagatggcccccgggaacacagcaagagtgccagcctcctgtttggcatgcggaacagtgcagccagtgatgaggactcaagctgggctaccttatcccagggcagcccctcctatggctccccagaggacacagattccttctggaaccccaacgccttcgagacggattccgacctgccggctggatggatgagggtccaggacacctcagggacctattactggcacatcccaacagggaccacccagtgggaaccccccggccgggcctccccctcacaggggagcagcccccaagaggagtcccagctcacctggacaggttttgctcatggagaaggctttgaggatggagaattttggaaggatgaacccagtgatgaggccccaatggagctgggactgaaggaacctgaggaggggacgttgaccttcccagctcagagcctcagcccagagccgttgccccaagaggaggagaagcttcccccacggaataccaacccagggatcaagtgtttcgccgtgcgctccctaggctgggtagagatgaccgaggaggagctggcccctggacgcagcagtgtggcagtcaacaattgcatccgtcagctctcttaccacaaaaacaacctgcatgaccccatgtctgggggctggggggaaggaaaggatctgctactgcagctggaggatgagacactaaagctagtggagccacagagccaggcactgctgcacgcccaacccatcatcagcatccgcgtgtggggcgtcgggcgggacagtggaagagagagggactttgcctacgtagctcgtgataagctgacccagatgctcaagtgccacgtgtttcgctgtgaggcacctgccaagaacatcgccaccagcctgcatgagatctgctctaagatcatggccgaacggcgtaatgcccgctgcttggtaaatggactctccctggaccactctaaacttgtggatgtccctttccaagtggaattcccagcgcctaagaatgagttggtccagaagttccaagtctattacctggggaatgtacctgttgctaaacctgttggggtagatgtgattaatggggccctcgagtcagtcctgtcctccagcagccgtgaacaatggaccccaagtcatgtcagtgtggcccctgctaccctcaccatcttgcaccagcagacagaggcagtgctgggagagtgtcgggtgcgtttcctctccttcctggccgtgggcagagatgtccacacgtttgcattcatcatggctgccggcccagcctccttctgctgccacatgttctggtgcgagcccaatgctgccagcctctcagaggctgtgcaggctgcgtgcatgcttcgctaccagaagtgtctggatgcccgttcccaggcctccacctcctgcctcccagcaccccctgctgagtctgtggcacggcgtgtagggtggactgtccgcaggggtgttcagtcgctgtggggctccctgaagcccaaacggctgggggcccataccccatgaagaagcccccaccttccctccacctgcttgtgttgggccccagggaactaaagggtgtgggtcagggaggggtctagaggctattcctaggcctcaggcctcccaaatatgcccctccccagtagctacggttccctgcctaggagctggggagggagagatctaatcccttcaaggaagtgataacactggagtggtaacaagaggagcaggaagcaaggccagccctggttctccatccccatgtgtttcaggtggaacaggaggaactggtccaggccaggcctcatcctcctggacccagcaggggcagaaggaggaagggactggtccaggcatgggtcccttccccctgctccatgggcacctctgctgtattgatatcactaataaagtctgtctgcactgcaaaaaaaaaaa

SEQ ID NO: 144 - DNA, 2653 bp, Homo Sapiens; identical to SEQ ID NO: 143

SEQ ID NO: 145 - DNA, 1978 bp, Homo Sapiens
cgggggtgcaaccctttgaagtgtcccctcctacttcttgctgcctcacggttgctgttgcagacccaggagtctctgaaggcttccgcggctttggggccggttgtgagatgccaggcagaggccgctgcccggactgcggctccacggagctggtggaagactcgcactattcgcagagccagctggtgtgctccgactgcggctgcgtggtcaccgagggggtccttaccactaccttcagcgacgagggcaatctccgagaggtaacatattcccgaagcacaggggaaaacgaacaagttagtcgcagccagcaacgaggtctccggcgagtgagagacctttgtcgagttctgcagttgccaccaacatttgaggataccgcggttgcctactaccaacaggcatatcggcactctggcatccgagcggccaggctgcaaaagaaggaggtgttggttgggtgctgcgtcttaatcacctgccgacagcataactggcccctaacaatgggggccatctgcacgctgttgtatgcagatttggatgtgttttctagcacttacatgcagatagtgaagctcctgggactggatgtgccatctctgtgcttggcagaactggtgaagacctattgcagcagcttcaaactgttccaagcttcaccttctgtgccagccaaatacgtggaagacaaagagaagatgctgtctcgaacaatgcagttggtggagctggcaaatgagacgtggctggtgaccgggaggcatcccttgcccgtcatcactgctgcgactttcctggcttggcagtcgctgcagcctgcagatcggctttcatgttcccttgcccgattttgtaaattggcaaatgtggacctgccctacccggcgtcctcccgcctgcaggagctgctggctgtgctgctgcggatggctgagcagctggcctggttacgagttctgagacttgacaaacggtctgtggtgaagcacatcggtgaccttctccagcaccgccagtcactggtccgctctgcctttcgggatgggacagcagaagtggagacccgagagaaggagccaccggggtggggacaggggcaaggagaaggggaggtgggaaataattccttaggtttaccccaggggaagcggccggccagtcctgcccttctcttgccaccctgcatgttgaagtccccgaagcggatctgccctgtaccccctgtctccactgtcactggagatgagaacatttctgatagtgaaatagaacagtatttgcgtacccctcaggaagttagggactttcagagagcccaggctgctagacaggctgccacgagtgtccctaaccctccctgatggatatccactgggagcacttcatcctgttctgacagcttgataacattcctgttataaccaaggatggaagtgtacaccagtccgtaggtattgcttttcttgtttgaaggaaccaagaggggctctgccattagttggaccctgggtcctggagtaaagtcaggagtgcagggatgactataggtaggagagattcccatcccttggtgtgggagagcaagttgcctatgtccatgttctgtgagatggctttcctcatagatggatgggaaaatgtcaggctctttgctgctggtttgaattggacacactgctgcggctcctcctgcaggcctgagggggcttccctctgcttgtggagtggttggcattcccagcagtatcaaccctcagaggagcgggaactggggaattctggccctacgtgcattcacaggcaatgatgggtttgtgtgtatggtgtcatgagatcctctacctcataacaaaaggacagtgggtagactaaggcagtagctcaaagggctttgcaaaattttaatatattaaaacaagaggcatctgctagaaaacattctattgtataaaacccgagttcttaaaaa

SEQ ID NO: 146 - DNA, 3904 bp, Homo Sapiens
ctccctccgccgcgccctcgctccgcctcgcgcggggggaccatctgctggcatttcctgcagccaggcccgcgccgccagtggagcccccgcgcgcccggccggcccggagcaccgagctcgcggcacggtaggagaagcccccgagcgcccacagcatgaaggaggaggccttcctccggcgccgcttctccctgtgtccaccttcctccacccctcagaaagtcgacccccggaagctcacccggaacttgctcctcagcggagacaatgagctctacccactcagcccagggaaggacatggagcccaacggcccgtcgctgcccagggatgaagggcccccgaccccaagctctgccacgaaggtgccaccggcagagtacaggctgtgcaacgggtcagacaaggaatgtgtgtcccccaccgccagggtcaccaagaaggagactctcaaggcgcagaaggagaactaccggcaggagaagaagcgcgccacacggcagctgctcagcgctctgacagaccccagcgtggtcatcatggctgacagcctgaagatccgcggcaccctgaagagctggaccaagctgtggtgcgtgctgaagccgggggtgctgctcatctacaagacgcccaaggtgggccagtgggtgggcacggtgctgctgcactgctgcgagctcatcgagcggccctccaagaaggacggcttctgcttcaagctcttccacccgctggatcagtccgtctgggccgtgaagggccccaaaggtgagagcgtgggctccatcacacagcccctgcccagcagctacctgatcttcagggccgcctccgagtcagatggtcgctgctggctggacgccctggagctggccctgcgctgctctagcctactgagactgggcacctgcaagccgggccgagacggggagccagggacctcgccagacgcatcaccctcatcgctctgtgggctgccagcctcagccaccgtccacccagaccaagacctgttcccactgaacgggtcttccctggagaacgatgcattctcagacaagtcggagagagagaaccctgaggagtcagataccgagacccaggaccatagccggaagacggagagtggcagcgaccagtcagagacccctggggccccggtgcggagagggaccacctatgtggagcaggtccaggaggagctgggggagctgggcgaggcgtcccaggtggagacagtgtcagaggagaacaagagtctgatgtggaccctgctgaagcagctacggccaggcatggacctgtcccgcgtggtgctacccacgttcgtactggagccgcgctccttcctgaacaagctctccgactactactaccacgcagacctgctctccagggctgcggtggaggaggatgcctacagccgcatgaagctggtgctgcggtggtacctgtctggcttctacaagaagcccaagggaatcaagaagccgtacaaccccatcctgggggagaccttccgctgctgctggttccacccgcagactgacagccgcacattctacatagcagagcaggtgtcccaccacccgcccgtgtctgccttccacgtcagcaaccggaaggacggcttctgcatcagtggcagcatcacagccaagtccaggttttatgggaactcgctgtcggcgctgctggacggcaaagccacgctcaccttcctgaaccgagccgaggattacacccttaccatgccctacgcccactgcaaaggaatcctgtatggcacgatgaccctggagctgggtgggaaggtcaccatcgagtgtgcgaagaacaacttccaggcccagctggaattcaaactcaagcccttcttcgggggtagcaccagcatcaaccagatctcgggaaagatcacgtcgggagaggaagtcctggcgagcctcagtggccactgggacagggacgtgtttatcaaggaggaagggagcggaagcagtgcgcttttctggaccccgagcggggaggtccgcagacagaggctgaggcagcacacggtgccgctggaggagcagacggagctggagtccgagaggctctggcagcacgtcaccagggccatcagcaagggcgaccagcacagggccacacaggagaagtttgcactggaggaggcacagcggcagcgggcccgtgagcggcaggagagcctcatgccctggaagccgcagctgttccacctggaccccatcacccaggagtggcactaccgatacgaggaccacagcccctgggaccccctgaaggacatcgcccagtttgagcaagacgggatcctgcggaccttgcagcaggaggccgtggcccgccagaccaccttcctgggcagcccagggcccaggcacgagaggtctggcccagaccagcggcttcgcaaggccagcgaccagccctccggccacagccaggccacggagagcagcggatccacgcctgagtcctgcccagagctctcagacgaggagcaggatggtgactttgtccctggcggtgagagcccatgccctcggtgcaggaaggaggcgcggcggctgcaggccctgcacgaggccatcctctccatccgagaggcccagcaggagctgcacaggcacctctcggccatgctgagctccacggcacgggcagcacaggcaccgaccccaggcctcctgcagagcccccgatcctggttcctgctctgcgtgttcctggcgtgtcagctgttcattaaccacatcctcaaataggagccctgagggcagagctcctggccggtcctgagccctccctcccaggcacccagcactttaagcctgctccatggaggcagagaggcccggcaagcacagccactgtgacggggagtccaggcgcaggagggacccggggccacaaggcgctgcgggcccaggtgtgctgggcccctctcaggggcactggcctctctgcagggccttccgcccagcgctggccttaatgctaaagccaaatgcagcttctgctgtgcgacgcactcctggccatcttgccgtgtcaccccctgtccggcctccacttgccatgggggatggatggatttagggtgggagggcctgtgggggccctggacagtcacaccccagcagcagtgagtgggcaggtttggaggagccccgagtggcccaggagtccccccacacacagatgcataggcctgccttccggagaccctgtccacattgccgggaccaccctggtggggccactggtgggtgccagggacaggttagggccactctggggaaggcattttggttttttattccacgctgtgctgtttggatgggagccccacagaggcaggtcctggaaccaccccacccccacacctggacgctcgctctggtgggggcacacgcaggtggaggtggttgtgggtgcaggtgtgtgcaggggtgtggggggcgcaggggtgtggcttagctggccccgcacccaggccggggaggctcaagttcgccactttactcagaccgatgcacagtcttcccattttacacttttttaataaacataattgcaatattttaggtgggctgcgagctgcagtcagccttcacgtctggcctcagtccccgtgtcagtgccgctctgcgtgtgcgtgtgcgcgtgtgtgagcctctacacatatatatacgtacagagccttaaaccacatcgtggcggtgccgtctgagctgtagcgggtggctttgtttccagtttttgtacccgtgtccttgtctcccctcctcccccatctggggatgtgtctgtgttccacaccttgaaataaacagacacatacgtgttctcttaaaaaaaaaaaaaaaaa

SEQ ID NO: 147 - DNA, 2439 bp, Homo Sapiens
gagagcagcggccgggaaggggcggtgcgggaggcggggtgtggggcggtagtgtgggccctgttcctgcccgcgcggtgttccgcattctgcaagcctccggagcgcacgtcggcagtcggctccctcgttgaccgaatcaccgacctctctccccagctgtatttccaaaatgtcgctttctaacaagctgacgctggacaagctggacgttaaagggaagcgggtcgttatgagagtcgacttcaatgttcctatgaagaacaaccagataacaaacaaccagaggattaaggctgctgtcccaagcatcaaattctgcttggacaatggagccaagtcggtagtccttatgagccacctaggccggcctgatggtgtgcccatgcctgacaagtactccttagagccagttgctgtagaactcaaatctctgctgggcaaggatgttctgttcttgaaggactgtgtaggcccagaagtggagaaagcctgtgccaacccagctgctgggtctgtcatcctgctggagaacctccgctttcatgtggaggaagaagggaagggaaaagatgcttctgggaacaaggttaaagccgagccagccaaaatagaagctttccgagcttcactttccaagctaggggatgtctatgtcaatgatgcttttggcactgctcacagagcccacagctccatggtaggagtcaatctgccacagaaggctggtgggtttttgatgaagaaggagctgaactactttgcaaaggccttggagagcccagagcgacccttcctggccatcctgggcggagctaaagttgcagacaagatccagctcatcaataatatgctggacaaagtcaatgagatgattattggtggtggaatggcttttaccttccttaaggtgctcaacaacatggagattggcacttctctgtttgatgaagagggagccaagattgtcaaagacctaatgtccaaagctgagaagaatggtgtgaagattaccttgcctgttgactttgtcactgctgacaagtttgatgagaatgccaagactggccaagccactgtggcttctggcatacctgctggctggatgggcttggactgtggtcctgaaagcagcaagaagtatgctgaggctgtcactcgggctaagcagattgtgtggaatggtcctgtgggggtatttgaatgggaagcttttgcccggggaaccaaagctctcatggatgaggtggtgaaagccacttctaggggctgcatcaccatcataggtggtggagacactgccacttgctgtgccaaatggaacacggaggataaagtcagccatgtgagcactgggggtggtgccagtttggagctcctggaaggtaaagtccttcctggggtggatgctctcagcaatatttagtactttcctgccttttagttcctgtgcacagcccctaagtcaacttagcattttctgcatctccacttggcattagctaaaaccttccatgtcaagattcagctagtggccaagagatgcagtgccaggaacccttaaacagttgcacagcatctcagctcatcttcactgcaccctggatttgcatacattcttcaagatcccatttgaattttttagtgactaaaccattgtgcattctagagtgcatatatttatattttgcctgttaaaaagaaagtgagcagtgttagcttagttctcttttgatgtaggttattatgattagctttgtcactgtttcactactcagcatggaaacaagatgaaattccatttgtaggtagtgagacaaaattgatgatccattaagtaaacaataaaagtgtccattgaaaccgtgatttttttttttttcctgtcatactttgttaggaagggtgagaatagaatcttgaggaacggatcagatgtctatattgctgaatgcaagaagtggggcagcagcagtggagagatgggacaattagataaatgtccattctttatcaagggcctactttatggcagacattgtgctagtgcttttattctaacttttatttttatcagttacacatgatcataatttaaaaagtcaaggcttataacaaaaaagccccagcccattcctcccattcaagattcccactccccagaggtgaccactttcaactcttgagtttttcaggtatatacctccatgtttctaagtaatatgcttatattgttcacttcttttttttttattttttaaagaaatctatttcataccatggaggaaggctctgttccacatatatttccacttcttcattctctcggtatagttttgtcacaattatagattagatcaaaagtctacataactaatacagctgagctatgtagtatgctatgattaaatttacttatgtaaaaaaaaaaaaaaaaaa

SEQ ID NO: 148 - DNA, 4324 bp, Homo Sapiens
ggttgggctcgcggcgctgtgattggtctgcccggactccgcctccagcgcatgtcattagcatctcattagctgtccgctcgggctccggaggcagccaacgccgccagtctgaggcaggtgcccgacatggcgagtgtagtgctgccgagcggatcccagtgtgcggcggcagcggcggcggcggcgcctcccgggctccggctccggcttctgctgttgctcttctccgccgcggcactgatccccacaggtgatgggcagaatctgtttacgaaagacgtgacagtgatcgagggagaggttgcgaccatcagttgccaagtcaataagagtgacgactctgtgattcagctactgaatcccaacaggcagaccatttatttcagggacttcaggcctttgaaggacagcaggtttcagttgctgaatttttctagcagtgaactcaaagtatcattgacaaacgtctcaatttctgatgaaggaagatacttttgccagctctataccgatcccccacaggaaagttacaccaccatcacagtcctggtcccaccacgtaatctgatgatcgatatccagaaagacactgcggtggaaggtgaggagattgaagtcaactgcactgctatggccagcaagccagccacgactatcaggtggttcaaagggaacacagagctaaaaggcaaatcggaggtggaagagtggtcagacatgtacactgtgaccagtcagctgatgctgaaggtgcacaaggaggacgatggggtcccagtgatctgccaggtggagcaccctgcggtcactggaaacctgcagacccagcggtatctagaagtacagtataagcctcaagtgcacattcagatgacttatcctctacaaggcttaacccgggaaggggacgcgcttgagttaacatgtgaagccatcgggaagccccagcctgtgatggtaacttgggtgagagtcgatgatgaaatgcctcaacacgccgtactgtctgggcccaacctgttcatcaataacctaaacaaaacagataatggtacataccgctgtgaagcttcaaacatagtggggaaagctcactcggattatatgctgtatgtatacgatccccccacaactatccctcctcccacaacaaccaccaccaccaccaccaccaccaccaccaccatccttaccatcatcacagattcccgagcaggtgaagaaggctcgatcagggcagtggatcatgccgtgatcggtggcgtcgtggcggtggtggtgttcgccatgctgtgcttgctcatcattctggggcgctattttgccagacataaaggtacatacttcactcatgaagccaaaggagccgatgacgcagcagacgcagacacagctataatcaatgcagaaggaggacagaacaactccgaagaaaagaaagagtacttcatctagatcagcctttttgtttcaatgaggtgtccaactggccctatttagatgataaagagacagtgatattggaacttgcgagaaattcgtgtgtttttttatgaatgggtggaaaggtgtgagactgggaaggcttgggatttgctgtgtaaaaaaaaaaaaaatgttctttggaaagtacactctgctgtttgacacctcttttttcgtttgtttgtttgtttaatttttatttcttcctaccaagtcaaacttggatacttggatttagtttcagtagattgcagaaaattctgtgccttgttttttgtttgtttgttgcgttcctttcttttccccctttgtgcacatttatttcctccctctaccccaatttcggattttttccaaaatctcccattttggaatttgcctgctgggattccttagactcttttccttcccttttctgttctagttttttacttttgtttatttttatggtaactgctttctgttccaaattcagtttcataaaaggagaaccagcacagcttagatttcatagttcagaatttagtgtatccataatgcattcttctctgttgtcgtaaagatttgggtgaacaaacaatgaaaactctttgctgctgcccatgtttcaaatacttagagcagtgaagactagaaaattagactgtgattcagaaaatgttctgtttgctgtggaactacattactgtacagggttatctgcaagtgaggtgtgtcacaatgagattgaatttcactgtctttaattctgtatctgtagacggctcagtatagataccctacgctgtccagaaaggtttggggcagaaaggactcctcctttttccatgccctaaacagacctgacaggtgaggtctgttccttttatataagtggacaaattttgagttgccacaggaggggaagtagggaggggggaaatacagttctgctctggttgtttctgttccaaatgattccatccacctttcccaatcggccttacttctcactaatttgtaggaaaaagcaagttcgtctgttgtgcgaatgactgaatgggacagagttgatttttttttttttttcctttgtgcttagttaggaaggcagtaggatgtggcctgcatgtactgtatattacagatatttgtcatgctgggatttccaactcgaatctgtgtgaaactttcattccttcagatttggcttgacaaaggcaggaggtacaaaagaagggctggtattgttctcacactggtctgctgtcgctctcagttctcgataggtcagagcagaggtggaaaaacagcatgtacggattttcagttacttaatcaaaactcaaatgtgagtgtttttatctttttacctttcatacactagccttggcctctttcctcagccttaagaaccatctgccaaaaattactgatcctcgcatgatggcagccatagtgcatagctactaaaatcagtgaccttgaacatatcttagatggggagcctcgggaaaaggtagaggagtcacgttaccatttacatgttttaaagaaagaagtgtggggattttcactgaaacgtctaggaaatctagaagtagtcctgaaggacagaaactaaactcttaccatatgtttggtaagactccagactccagctaacagtccctatggaaagatggcatcaaaaaagatagatctatatatatatataaatatatattctattacattttcagtgagtaattttggattttgcaaggtgcatttttactattgttacattatgtggaaaacttatgctgatttatttaagggggaaaaagtgtcaactctttgttatttgaaaacatgtttatttttcttgtctttattttaacctttgatagaaccattgcaatatgggggccttttgggaacggactggtatgtaaaagaaaatccattatcgagcagcattttatttacccctcccctatccctaggcacttaaccaagacaaaaagccacaatgaacatccctttttcaatgaattttataatctgcagctctattccgagcccttagcacccattccgaccatagtataatcatatcaaagggtgagaatcatttagcatgttgttgaaaggttttttttcagttgttctttttagaaaaaaagaaaaacaaaaacaaaaacaaaaaaaaaaaatcacaccattgctcacagaattggcatctcatttttgggacctcccatctttctgttttgaaaagtgtacagtagtgcagtgttcctgatgtaactttatggcttacaatgttgacatgtctcaggttcatgtgttgcgattggtgttttccgtctcaggtagattgcaaagtgtaggccccacacattggaaaaaataataataaaacaaagcaaaaacaggaaattatggattttagttgtatattggtttatgtattttttcttaagtatacagtgcactgtttgaaatgtattgttgagtattactttgtacaggttgatcactttttttagagtgaagaaagaacaaacttgttttttgtgttttttaaaggaatataaaataatgaaggatgtataattgatgccaaataagcttgttctttagtcacaccgacgtcttatttttccctttaggccagttctgtttttaaggtgtacatggacaatgttacagtgtaagaaactccatatccatatgttcccattcgcattttgtattggttcatgtataccatttttacaaaaaaaaaaagaaaaaaaagaagtactataaaatatctgtcttcttaataaaaaaaaattaatgttacaaagtgaaaaaaaaaaaaaaaaaa

SEQ ID NO: 149 - DNA, 4802 bp, Homo Sapiens
aagtgggggggcccggctagccattctggaagcggccgggcgcagtcttcgtagcgtacccgccggctgcgaggcgcagggcggaggcggagactgcgtggcgcaggcgcgttgctgggcttctcctgggtccccagacagctggaggagataaacagaggaggaggagggaggggagtgcgtgtgtgagagcgcgcgagggagtgtgagtgtgtgtgagcgcgggtgtgaggcggtgcgcaggggcgggcggaggcgctgtccggccccggccaggcgccgggcggggagcatgggaaggggctagaactgctcgagccccccagccccctccccgggatccgcgccccccttcccgggagaggggccgccccccccggacggacatgggctcctgaagttgcgccgctgccggtcgggggaagagacctgacaggtaattaaatgtgtattttgtggacctgggcttggctggaatgctcaggggtcctgaagatcctattatagcttccttctgttgaaccattaagaaaagatggcgaaagtcaacataactagagacctcatccgtaggcagatcaaggagcggggtgccctgagctttgagcggcgctaccatgtcactgacccctttatccggcggctgggcctggaagcagagctgcagggtcactcaggatgtgtcaactgtctggagtggaatgagaaaggagacttgctggcctctggttccgatgaccagcacacgattgtgtgggacccgctgcaccacaagaagctgctctccatgcacacgggacacaccgcaaatatcttctctgtcaagttcctgcctcacgctggggaccgcatcttgatcacgggggcagccgactctaaggtgcatgtgcacgacctgacagtaaaggagaccatccacatgtttggagaccacacaaaccgggtgaagcgcatcgccacagcgcccatgtggcccaacacattctggagtgctgctgaggatgggcttatccgccagtatgaccttcgagagaacagcaaacactcggaggtgctgattgacctgacagagtactgtggccagctggtggaggccaagtgcctcactgtcaacccccaggacaacaactgcctggcagttggggccagcgggcccttcgtgaggctctatgacatccgcatgatccataaccacagaaagagcatgaagcagagcccttcagcgggtgtgcacaccttctgtgaccggcagaaaccccttccggacggtgcagcccagtattacgtagcaggtcacctgccagtgaagcttcctgactacaacaaccgtttgagagtgctggttgccacctatgtgaccttcagccccaatggcacagagctactagtcaacatggggggggaacaggtctatttgtttgacttgacttacaagcagcggccgtacaccttcctcttgcctagaaaatgccactcctcgggggtccagaatggcaagatgtccaccaacggtgtgtccaacggtgtgtccaatggcctgcaccttcatagcaatggcttccggctgccggagagtaggggacatgtcagcccccaagtagagctaccaccatacctggagcgtgtgaaacagcaagccaatgaggcttttgcctgccagcagtggacccaagccattcagctttacagcaaggctgtgcagagggcccctcacaatgccatgctttatggaaaccgagcagcagcctacatgaagcgcaagtgggatggtgaccactatgatgccctgagggactgcctcaaggccatctccctaaacccatgccacctgaaggcacactttcgcctggcccgctgcctctttgagctcaagtatgtggctgaagccctggagtgcctggacgacttcaaagggaaatttccggagcaggcccacagcagcgcttgtgatgcattgggccgcgacatcacagctgccctcttctctaaaaatgatggtgaggagaagaagggacctggtggcggcgccccagtccgcctccgcagcacgagccgcaaggactccatctcagaggatgaaatggtgctgcgggagcgaagctacgactatcagttccgctactgcggccactgcaacaccaccacggatatcaaagaggccaatttctttggcagcaacgctcagtatatcgtcagtggctctgacgatggctccttcttcatctgggaaaaggagaccaccaacctggtccgtgtgctccaaggggatgagtccattgtcaactgcctgcagccacaccccagctactgcttcctggccaccagtggcatcgatcctgttgtgcggctctggaacccccgaccagagagtgaagacctcacaggccgagtcgtggaagatatggagggtgcttcacaggccaaccagcggcgcatgaatgcagacccgttggaggtgatgctgctcaacatgggctaccggatcacgggcctgagcagtgggggtgccggggcctctgatgatgaggacagctctgagggccaggtgcagtgccggcccagctagaccctccagccctggtccccagcccctgctactggctggaccctctgccctgggcaggaggtcaggggattctgttttggtttgtcttccccaccacccttttttttcatttcccctgttttgtttgttagtttggcgttaggggtggaggttgctacaacttgctggctttcggactctgggctgattgtcccctgactatccccagccctgaaaaaaagagcaggaggggacacccctccatatgcccccccccatctcctgctttcatgtccctggagggctctggcctgcctcaaaaccccttctgcctcaggtggggaggaacaagctgaactgtcttcagggactgtcctgccctttagctggcagcagcaggaggagtgggattcccaattggtaagggctcgccttggcctgttgccactcttgctccctagcctgcaaggctagctcccctgtggtcttcaggaaaggttttgaaaaaggatgggtcccaccctccctccagagccaccagtgttagagcggagcccaaaggaaggatgggagccctggagtgggcaagaccaggccacctgctgaggtcgctgtggagcaccctcgctcctctcctggctactagctctggccctgcacctactctcactggccacctctggaggctctgcctttcccaagggccctggcagagggtggggcactgcaccttaccccacccatccatgccagcacttctgcactacggccattctcctcttgggcgctcctcagcctcactgtgacctttctgccagagctcccagccaggcctactctgctgaggtggcgcttcctgctaagggcccttctctgccctttctgccctccttcccatcccacatgctgagccgccacaaagaccaaagaagtgatggcttttctctgtcccctgctgctctgaggggagaggggtgggtctcctgagccactcagatgggaaagtcccttactcggcccctccctccccagcagccccaagctttacactggatgcagcgatcaacccaccactcaccaggcctctcctcccctctgcccccggctcttagctccagctgctccaggtagttggttcatccttccccctctctccctccctgcttccccttcagtgcttacttggctccagccctccagctgcagcccctggggaaaagcagcctcccttctcctctccctccactccctcgctccctccctcagcccctgtctctgccaggtgcctcctctcagtcaggcttcagagcagccctggagacaggagggccatgttaaaagctttttcacagttttaagaagacaagtggagggtgaggatagtggtggggggtctggcaccatctcattgctttaatcccagcaacacaggtggcagcttctcccccttccttcccaccccagtccctcttcccacccctctcttctagcttggtaatgaagtatatttattggtgaaggaaacagctgctgctgcttctcctgctgctgggacctgctcccctgtctcttctccgtgacctttctctagccagggagaagggagagcaggagtattggggctgggccctggggcccaaggaccagctgggtcccctttgctttcttgtgttccagccacctgccatttcctccctgcctcccaccctccctccctgccccctgtcctgcttcccaccccctgcctgcccagcctgggccctgcagtgtggagagacacataagccttactgtcctctgggggcaggagccgagcctttttgttgctccgctcccaggagagtgagggtgacgcaattgattaaaaccattttgttctaggtgtggctggtggcatttgtggggtgcagatgggtcttggaaccaaagtgagggcacctggtccctcacctctgtagctctatgacttagtaaccacacctctactggacagaatgaggcctgccttgaagggtcaccgtgagcagcggccacccagcccagcagggctgagtgcagagcccagctctcatggctgtgatttgtaatcatcagctttcactctctggctgttttctcatcagtaaaataagggacttggaatcttagtggtttttcaaaccattttacattgtgacccaatatacacatgattacttgtagatatgtgtgtgtgtatatatatataaaaaaaatgaacaaaagttttacacaataa

SEQ ID NO: 150 - DNA, 4907 bp, Homo Sapiens
aggcgcagcggcgacggcgtcggcggcggcggcggcagcggctccggccgaggtgcgcgctgggggggagggggggccggagaggagcatgaatggagcaaaatggcggatcatgtgcagagcctggcccaactagagaatctgtgcaaacagctgtatgaaaccacagacacaaccactcgactccaggcagagaaagccttggttgaatttaccaacagccctgattgcctgagcaagtgccagctactcctcgaaagaggaagttcctcttactcccagttactggcagctacatgccttaccaagcttgtatcacgcacaaacaaccccctaccattggaacagcgaatagatattcggaactatgtgctcaactaccttgccactcggccgaagttggctactttcgtgacacaagcacttattcagttatatgccagaatcacaaaactgggctggtttgactgtcagaaggatgactatgtcttcagaaatgcaatcacagacgtcacaaggtttttacaggatagtgttgaatactgcatcattggtgtcacaattttatctcagctaaccaatgaaattaatcaagtaagtgctacagccttcctcattgaagcagacaccacccatcctttaaccaagcacagaaaaatagcctcttcttttcgcgattcatcattatttgatatcttcacactttcctgcaatttactaaaacaggcttcaggaaagaatctaaacttgaatgatgaaagtcagcatggcttgctcatgcaactgctcaagctcactcataactgcctcaactttgacttcatcggcacttccactgatgagtcctcagacgacctgtgtacagtgcagattcccaccagctggagatcagccttcttagattcttcaaccttgcagctgttttttgacctgtatcattccatccctccttcattttcacctctggtattatcctgcttggtacagatcgcttcagtcagaagatccctgtttaacaatgcagagagggccaagtttctctctcatcttgttgatggtgttaaacgaatactggaaaacccacagagtttatcagacccaaacaattaccatgagttttgcagactactggcccgattgaagagtaactatcaactgggagaattggtaaaggtggaaaactaccctgaggtcatccgattgatagccaacttcacagtgaccagcctacagcactgggaatttgctccaaatagtgtgcactatcttctgagcctgtggcagcggctggcagcctctgtgccgtatgtcaaagccacagagccccacatgctggaaacttacactcctgaggtcaccaaagcctacatcacatcccggttggaatctgtgcacatcatactgagagatggcctggaagatcccctggaggatacggggctggtccagcagcagttggaccagctgtccaccattgggcgttgtgaatatgagaagacgtgtgcactcctcgtgcagttgtttgaccagtcggcccagtcgtaccaggagctgctacagagcgccagcgcaagcccaatggacattgcagtgcaggagggaaggctgacatggctggtttacattattggagcagtgatcggtggccgggtttcttttgccagcactgatgagcaagacgccatggatggtgagcttgtctgtcgggtgctccagctgatgaacctaacagattctcgtttggcccaggcgggtaatgagaagctagagttggccatgctgagcttttttgaacagtttcgtaagatctacattggggaccaagtgcagaaatcctctaagctgtaccgccgactctcagaagttctgggcttgaatgatgagaccatggtcctaagcgtcttcataggaaaaatcatcaccaacttgaagtactggggccgttgtgaaccaatcacctccaagacactacagcttctcaatgacctgtccattgggtacagtagcgtaaggaagctagtgaagcttagtgcggtacagttcatgctgaacaatcacacgagcgagcacttttcatttttgggtattaacaatcagtccaacctgacagacatgcggtgtcggactaccttctacacagcacttgggcgtctcctcatggtggatttaggagaggatgaagatcagtatgagcagttcatgctgccactcacagcagcatttgaggctgtggcccagatgtttagcaccaatagtttcaacgagcaggaggcaaagcgaactctagttggcctagtaagagacctgagagggatcgctttcgctttcaatgccaagaccagcttcatgatgctctttgaatggatatatccatcctatatgccaattctccaacgggcaattgagctctggtaccatgatccagcctgtactacacctgtactcaagttgatggctgaattggttcataataggtcccagcgactccagtttgatgtctcttcccccaatggcatcttactcttccgagaaaccagcaagatgataacaatgtatggcaatcgcatcctgacactaggagaggtcccaaaggatcaggtctatgctctgaagctcaagggcatctccatctgcttctccatgctgaaggctgctctcagtgggagttacgtcaatttcggagtctttcgtctctatggagacgatgccctggacaatgctctgcagaccttcatcaagctgctcctctctattcctcacagtgatctcttggattaccccaagctcagccagtcttattattcactactggaagtcctgacccaggaccatatgaactttattgcaagcctggaacctcacgtcatcatgtatattctctcttccatttctgaaggacttactgcacttgacaccatggtatgcacaggctgctgctcctgcctggaccacattgtgacatacctcttcaagcagctgtcacgtagcaccaagaagaggaccacacccctgaaccaggagagcgaccgctttctgcacatcatgcagcagcatccagagatgatccagcagatgctgtccacggtgctgaacatcatcatctttgaagactgtaggaaccagtggtctatgtcccgaccactacttggcttgatattgcttaatgaaaagtatttttctgacctaagaaacagtattgtgaacagccagccaccggagaagcagcaggccatgcacctgtgttttgagaacctgatggaaggcatcgagcgaaatcttcttacgaaaaacagagacaggttcacccagaacctgtcagcattccgtcgagaagtcaacgactcaatgaagaattccacttatggcgtgaatagcaatgacatgatgagctgacacctccttggactctacctgtacagagcagcgtccctttggtttggcccagaggggcgaacaattgcaagggagagggcctggctgatcctggctcttttctccaggggtgtggggaaaatggcaaaggtcaactagctgcttccccagggaataggggtgtgagtacactcactagggggcagggcgctgctggttcctgggggactgggtgggaagggtggtgggaggagataagagatacaaactgagactccagcctctcctcctggggccacccaagtggggagaacccctagtgtcctgccacaacctgccttgtataaacatgtacattttttcataacattttgaacaaggtttatattgactcaagtttaaaaacaaaaagtgtgactgaaaaatttttacagagtctagtgcaccaatgctgatgtgaggggttgtgtatgcgagtgaagaaaatgtgtattctggtggcctgaagctttactggacaaggatgtgtgagagtgcagagatatatttagtgacacagtagagaggcaaaaaaaaagctaaaattccaaatgtatattttttcgtattgccctgtcctcacccagaaatgatcaattcctgttactgtattaacccttgttattaggaactctaagccatgccagaacaccgtccctccccttggaccgtgtagattctgccctgggtccctagccccttgcagtgataaataactccagctaaaagtgtttggtgttcttatctccaccctctttcctactttgcttaccctcatcctcagacagatgcctcttgcttttaaaagttggatttaacgacgtgttgtagggttcttggtctgtgtgaaggcagagaccagagagaaggaagtgagcccactgctctcctgggagcaatgtgggtgagtccaccagaggccctgctgtgtgtggccaataaattttagtcttccccagccctcgaggcagtgtgtgtggatgtatgcgtgtggatatttatatatgtaccctgcactcatgaatgtatgaactggaggaagttactacagtggaagggttcttaataacaaggtctacctagcatgaagtatttaacattctcccatcccttaaaaaatatacatttttataaaatgaaaaccataataaatgttttgaatattaaaaaaaataataacctacagaggaaaattaatggagacagctatttgccttgtactttttccacaattgttgctgctagttgtacacatctctagttcagctcttgcccacgggacactcatcaattaggttttatttttatttctttcctctacccccagaaacaagcctgttaattttttttccttctcctctggcgactgtgtgatgaatcctttcttgcgtgatcaggttgcggatagacttgtaagggtgtttgctgcatacagtgtaagcattgtgaccgccaataaacttcaatggtttctactgaaaaaaaaaaaaaaaaaa

SEQ ID NO: 151 - DNA, 850 bp, Homo Sapiens
ctgcaggcgtcgcgccaatcttcgctctgaggtgctgtctcaccggtgagacctggaagcgggcgagtctcgtgctgtgtcggacctgcagcccctggccttccgccaccatggagtacctcatcggtatccaaggccccgactatgttcttgtcgcctccgaccgggtggccgccagcaatattgtccagatgaaggacgatcatgacaagatgtttaagatgagtgaaaagatattactcctgtgtgttggagaggctggagacactgtacagtttgcagaatatattcagaaaaacgtgcaactttataagatgcgaaatggatatgaattgtctcccacggcagcagctaacttcacacgccgaaacctggctgactgtcttcggagtcggaccccatatcatgtgaacctcctcctggctggctatgatgagcatgaagggccagcgctgtattacatggactacctggcagccttggccaaggccccttttgcagcccacggctatggtgccttcctgactctcagtatcctcgaccgatactacacaccgactatctcacgtgagagggcagtggaactccttaggaaatgtctggaggagctccagaaacgcttcatcctgaatctgccaaccttcagtgttcgaatcattgacaaaaatggcatccatgacctggataacatttccttccccaaacagggctcctaacatcatgtcctccctcccacttgccagggaacttttttttgatgggctcctttatttttttctactcttttcaggcgcactcttgataaatggttaattcagaataaaggtgactatggatataattgaaaaaa

SEQ ID NO: 152 - DNA, 1618 bp, Homo Sapiens
gcttcccgtccgctgtcctctgctgccagtcccctgccccgggcaaagcccatctggtccgccgagcaggccggagctattgggagtggcggatcctcccaccccagccggatctgggccatggccgagcctggagagggactgccagaggaggtgctggcactcatcttccgccacctgtccctgagagaccgtgctgccgccgccagggtctgcagggcctgggccgccgctgctacctgcagcgccgtgtggcacgacacaaaaatcagttgcgaatgtgagctggaaggcatgctgccaccttatctgtccgcctgcctcgaccacattcacaacctacggctggaatttgagccatcgaggaagccgagccgccgggcggccatcgagctgctgatggttctggcgggccgtgccccggggctgcgaggcctgcgcctggagtgccgcggagaaaaaccgctcttcgacgcgggccgcgacgtcctggaggctgtgcacgctgtatgcggggcggccagccagctacgccacctcgacctgcggcgcttgtccttcacactggacgacgcgctggtgctgcaggcggcgcgcagctgtcccgagctccacagcctttttctggacaacagtaccctagtgggcagcgtgggtcccggctcagtgctcgagctactggaggcctgcccgcgcctgcgcgctctcggcctgcacctagccagtttgtcgcacgccatcctcgaagcactggcggcgccagaccgagcgcctttcgcgctcttggctctgcggtgcgcgtgccccgaagatgcacgcgcgtccccgctgcccaacgaagcctgggtcgcgttgcgccgccgccaccctgggctggcagtggagctggagctggagcccgcgctgcccgctgagagcgtgacgcgcgtcctgcagccagccgtccccgtggctgcgctgcgcctcaacctctcaggcgacaccgtaggcccagtgcgcttcgcagcacaccactacgccgcaaccctgtgcgcgctcgaggtgcgcgcagccgcttcggccgagctgaacgccgcgctggaggagctggcggcgcgctgcgcggccctgcgcgaggtgcattgtttctgcgtggtgagccactcggtgctggacgccttccgcgcgcactgcccgcgcctgcgcacctataccctcaagctcacgcgcgagccgcatccctggaggcctacgctcgtggcgtgattgggcgacttctctcccccgtccccgtggacgtaagcgctctgagagggaacggggggggtgtccaggcgcgccccgagtgctagtgccttcttttgggattgttgccccccgggtctttaccgagttgggaactgtgatggcatcgggaccagtcctgggcgccctgagaccactcgctgctctcaccctctgcagacgccccacccgctcggtcctggacacactgcccccctctcttgcctccacccctctgcggactctgcagctccgcggccccggcgcagggagagggagggcacgggcgcgggccgggcctcaagggtgagtgtgaaataaacaaatcctgcagtgaaaaaaaaaaaaaaaaaaa

SEQ ID NO: 153 - DNA, 2540 bp, Homo Sapiens
gcctggcgcgcagagtgcaccttcctgagctcgagcggtccagcgccaagttcggggtttggggttggagcggctggtcacgtggctggcccgcggcggtgcgcggggcgttgggtcagcgggtctgggactggtggcaccggcggcggcgtaggacggaggcgtcgctaggcagcttcgaaccagtgcaatgacgatgccagtcaacggggcccacaaggatgctgacctgtggtcctcacatgacaagatgctggcacaacccctcaaagacagtgatgttgaggtttacaacatcattaagaaggagagtaaccggcagagggttggattggagctgattgcctcggagaatttcgccagccgagcagttttggaggccctaggctcttgcttaaataacaaatactctgaggggtacccgggccagagatactatggcgggactgagtttattgatgaactggagaccctctgtcagaagcgagccctgcaggcctataagctggacccacagtgctggggggtcaacgtccagccctactcaggctcccctgcaaactttgctgtgtacactgccctggtggaaccccatgggcgcatcatgggcctggaccttccggatgggggccacctgacccatgggttcatgacagacaagaagaaaatctctgccacgtccatcttctttgaatctatgccctacaaggtgaacccagatactggctacatcaactatgaccagctggaggagaacgcacgcctcttccacccgaagctgatcatcgcaggaaccagctgctactcccgaaacctggaatatgcccggctacggaagattgcagatgagaacggggcgtatctcatggcggacatggctcacatcagcgggctggtggcggctggcgtggtgccctccccatttgaacactgccatgtggtgaccaccaccactcacaagaccctgcgaggctgccgagctggcatgatcttctacaggaaaggagtgaaaagtgtggatcccaagactggcaaagagattctgtacaacctggagtctcttatcaattctgctgtgttccctggcctgcagggaggtccccacaaccacgccattgctggggttgctgtggcactgaagcaagctatgactctggaatttaaagtttatcaacaccaggtggtggccaactgcagggctctgtctgaggccctgacggagctgggctacaaaatagtcacaggtggttctgacaaccatttgatccttgtggatctccgttccaaaggcacagatggtggaagggctgagaaggtgctagaagcctgttctattgcctgcaacaagaacacctgtccaggtgacagaagcgctctgcggcccagtggactgcggctggggaccccagcactgacgtcccgtggacttttggaaaaagacttccaaaaagtagcccactttattcacagagggatagagctgaccctgcagatccagagcgacactggtgtcagagccaccctgaaagagttcaaggagagactggcaggggataagtaccaggcggccgtgcaggctctccgggaggaggttgagagcttcgcctctctcttccctctgcctggcctgcctgacttctaaaggagcgggcccactctggacccacctggcgccacagaggaagctgcctgccggaggacccccacctgagagatggatgagctgctccaaaggggaactgttgacactcgggccctttgagggggtttcttttggacttttttcatgttttcttcacaaatcaaaatttgtttaagtctcattgttagtaattctgggacaggttattaaaggatttaaatttgaacctggctttctcacagctggacataattctaggaaaataaaatactatgtcgccacttggtcataatcatttagatggtggtgtagggcaaagctgttagaaagattgtagcgttttactctccctgggctttcctccgccttgctgcaacagagaggaaatgcccatgtccacagcttgtacacactgccccctcactatcttgttatccagtggcatgccaaaggagaactgaattagcttctgaggcttctgctgtaaatcagaagtgtatgttagtcaagagtaaacaagatgcacccagtatggtgggagggttttgctgtcagtagctcaaagtatggtgtagaaatggcctcctccctccatcctgggaagtcccagtcccatcctggtgtgagaatcaaccaggctttcctgctccacctgagataaccaactccctcccgtaatcaggaagccaaatgtcaccttcccaaagaaattttattttcacgtagctgaagtgcaaaacatagatgaccatttttaataagcacaatcaaatttttaaccacagaatgtctacaagaattatagctttaaaaaatacaaccaatttttatatttcaaaaatatttgaactcaaataaattaatttcttaaaaagtaaaaaaaaaaaaaaaaaaaaaa

SEQ ID NO: 154 - DNA, 1391 bp, Homo Sapiens
ggattgggatattccgactccttaagggcctggcgcacataaggtgtgaccttttcattcccgttgttatggaggtaggctctctaggaatctgggagtagtagctggggggcaagagcaaataaagagctcgagcttctgtggtctctggggagatgttcccgggaagcctgtctagagggcggagggcagctgttgagatggcgtggctccccggctcctgcgcccgcgtggctttcgcggcgggcgctgcggcccggtattggacagcctggcagggcagcgcggggccgaatccggctgccgtggctgaggctcatggatcactcttttgtggtagggccacatctgccagagcctggagtctgcgaaggccgggacccggttccccggcccacagtgggggtgtgcaaacccgagagaactgggaagtgccgtcagaagcgataactgacgacgtctaatgtctatctgaccgcagtcgctgaaacctctacaacttagttgaccgtaactgccagagccctgccctgaattcctgtccttactccctctttaagattgcgtacccactgcagagtgctgaagacggggtagccacgaggttgcaaattcgtgaagaatcagcatcatgtttggcagctgagtattggagccaggagcctgccatgaggttttgagaacagagtgctgttttagagctggcagcagcatctcagcccaagagaaggttatattcccagaggatgtcagtcccaaggaccagtagctgccatcagtttggattctgaaaactaactggcatcaacactgggtgtagaaacatgcttgccttatgtatcagaggacatgctcagcagatccaagagatatatttggcaactttttctagaaaaggcacattgggtatcattcattacattcttgagtttttttgggtttttttttttttttttgagacagtcttgctgtattgcccaggctggagtgtggtggcacaatcacagctcattgcatcctcaatcacccaggcctaagcaatcctcccaccttgtagctgggactacagctcacagcacacctggctaaaattttttttttgttgagacggattctctatgttgcccaggctggtctcaggctcctgggctcagatggtcctcctgcctcagcttccaaaggcacaggccaagttgtagctttgtcccttgccatcatgcccaacaagaggttctataccttttaatgaattgactttcataaattggttatgttggtgggcaaagttctttaagctggaaattgtaaattcctcctgaaatgttttttcatgcagttaccatgaactaatactacaataaaggatggtcttgggtgtcaattcttgaaaa

SEQ ID NO: 155 - DNA, 2209 bp, Homo Sapiens
ccccggccccggctccggcgctgctcccaccgccgcggcaacggccccggcccacggaggcggctggacggacccccgacggttggacgtacggactctgcttcgagagtaggccatggacaccttcagcaccaagagcctggctctgcaggcgcagaagaagctcctgagtaagatggcgtccaaggcagtggtggccgtgctggtggatgacaccagcagtgaggtgctggatgagctgtaccgcgccaccagggagttcacgcgcagccgcaaggaggcccagaagatgctcaagaacctggtcaaggtggccctgaagctgggactgctgctgcgtggggaccagctgggcggtgaggagctggcgctgctgcggcgcttccgccaccgggcgcgctgcctggccatgacggccgtcagcttccaccaggtggacttcaccttcgaccggcgcgtgctggccgtcgggctgctcgagtgccgcgacctgctgcaccaggccgtgggtccccacctgaccgccaagtcccacggccgcatcaaccacgtgttcggccacctagccgactgcgacttcctggctgcgctctacggccccgccgagccctaccgctcccacctgcgcaggatctgcgagggcctgggccggatgctggacgagggcagcctctgaaccccggcgccgcccaaccgcgcccctcgcgccttttggggctctcctgctgggcgcgggtggggtttgtgggtttttttccacctcttttctcccaatcggactccggccaaactcccctagacagatgggtgacctgtctcctttgagaggatgctgaggcatctgtagcagctgtttcaaacaccaatgtcacctctcctcctggcccccgcccaatggggagaggaatttggggccctactctggggaccacctttcacccgtttgtactttctgggccacgccgacccctgggtcgcttgatgtaaaagccaaaagctgctgcctcccacttggatcatgtcgcctgggattttcatccctcgcacaaggactacgggttcacacggtgaactgggggaagggaagtgttagggggcaagtcgcggcacccccccttccataaactcacgtcctaacccccaggacctcagaagatgatctgatttggaaataggatcattacagatggaattagttcagatgatctcatcttggagtagggtgggccccaattcaaggactggggtccttaaaaaaagggggcctggggcagggcgcggtggctcacgcctgtaatcccagcactttgagaggctgaggcgggcggatcacgaggtcaggaggtcgagaccatcctggctaacacggtgaaaccccatctctactgaaaatacaaaaaattagctgggcatggtggcacatgcctgtagtcccagctactcgggaggctgaggcaggataatcacttgagccaggaggaggaggttgcagtgagccgagattgtgccactgcactccagcctgggtgacagggcaagactctgtctcaaaaaaagaagcgggggagtgggggattgaggccacgtgcagtggctcactactgtaattccagcactttgggaggccgaggcaggaagattgcttgaactcagaagttcaagaccagtctgggcaacatggtgagaccctcgtctctacaaaaaaaaaattatcgtggtgggccgggcgtggtggctcacacctgtaatcccagcactttgggaggctgaggcgggcagatcacaaggtcaggagatcgagaccatcctggccaacatggtgaaaccccgtctctactaaaaatacaaaaattagccgggcatggtgttgcgtgcctgtagtcccagctacttgggaggctgaggcaggagaatcgcttgaacctgggaggcgcaggttgcagggaggcggaggttgcagtgagccgagattgcaccactgcacttcagcctggtgacagagcgagactcgtctcaaaaaaaaaaaaaaaaaaaaaaaaaaaagtgactgtggtggtgcacacgtataatcccagctacttgagagatgacgagggaagatcacttgagcccaggagttaagaggctgcagtgaccgatgatcatgccactgcactccagcttgggtgagagtgggactctgtcttaaaaaaaaaaaaaaaaaaaaaaa

SEQ ID NO: 156 - DNA, 1619 bp, Homo Sapiens
tcagccgctccctctgggcttccgtcctccgcccgcgcccgacggagcctgttcgcgtcgactgcccagagtccgcgaatcctccgctccgagcccgtccggactcccccgatcccagctttctctcctttgaaaacactaagaataatgtcactgcatcagtttttactagagccaatcacctgtcatgcctggaacagggatcgtactcagattgccctcagtcccaataatcacgaagtgcacatctataagaagaacgggagccagtgggtgaaagctcatgaactcaaggagcacaacggacacatcacaggtattgactgggctcccaagagcgaccgcattgtcacttgtggggcagaccgcaatgcctatgtctggagtcagaaagatggtgtttggaagccaaccctggtgatcctgagaattaatcgcgcagctacttttgtgaagtggtcccccctagagaacaaatttgctgtgggaagtggagcacgactcatttctgtttgttactttgagtctgaaaatgactggtgggtgagcaagcacattaaaaagccgattcgctccacagtcctcagcttggattggcatcccaacaacgttttgctggcagcaggatcatgtgacttcaaatgcagagtgttttctgcctacattaaagaagtggatgaaaagccagccagcacgccctggggcagcaagatgccttttgggcagctgatgtcagagtttggtggcagtggcactggtggctgggtccacggggtaagcttctctgccagtgggagccgcctggcctgggtcagccacgacagcaccgtgtctgttgctgatgcctcaaaaagtgtgcaggtctcgactctgaagacagagttcctgccgctcctaagtgtgtcatttgtctcagagaacagcgtcgtggctgctggccatgactgctgcccaatgctctttaactacgatgaccgcggctgcctgaccttcgtctccaagttagatattccaaaacagagcatccaacgcaacatgtctgccatggaacgcttccgcaacatggacaagagagccacaactgaggaccgcaacacggccttggagacgctgcaccagaatagcatcactcaagtctctatttatgaggtggacaagcaagattgtcgcaaattttgcactactggcatcgatggagccatgacaatttgggatttcaagaccctcgagtcttccatccagggcctccggataatgtgaagctgagtgagcctccgccatccagcatgacaaactgtggccgaccgcagctgtgccgtggcacgatggcgaggaagccagccccaaggaaacactgaaaacacatatcacgccaatgccgtgtggttttgtttgaatataaaattggtgaaagtgttggtttttttaaggcagtaatttttttgtttgtttttttgcgatttcattccattcttgaccaaagcttctctttaagtagtttattatggaaaattgtcacactaacttaaaagacagggtgagggagatatgtaaattgtccactagaaaattaaataaaagaactgaatgtggaaaaaaaaaaaaaaaaaaaaaaaaaa

SEQ ID NO: 157 - DNA, 2567 bp, Homo Sapiens
ggcggcgcaggcgcactgggttcgccgcgccgaactgcagccatggagcaggcacctccggaccccgagcggcagctccagccggcgcccttggagccgctgggctccccagacgctgggctgggggctgcggtcggcaaggaagcggagggggccggagaagagagctctggggtcgacacgatgacacacaataatttttggttgaagaagatagaaatcagtgtttcagaagcagaaaaacgaactggaagaaatgccatgaacatgcaagaaacatatactgcttacctcattgaaacaaggtcagttgaacataccgatggtcagagtgtcctaacagactcactatggcggcgatatagtgaatttgagttgttgagaagctaccttttagtttactatccacatattgttgtgccacctctgccagaaaaacgggcagaatttgtttggcataaactctctgctgacaacatggatccagattttgtggagaggcgacggattggtttagaaaactttctcttgaggattgcttcacatcccatcctttgtagagacaaaatcttctatctgtttttaacacaggaaggtaactggaaggagactgtgaatgaaactgggtttcagctgaaggcagactccaggttaaaagcgcttaatgcaacattcagagtgaaaaacccagacaagagatttactgaccttaagcactatagtgatgaactgcagtctgtcatctcacatcttcttcgagtcagagctagagtagcagatcgactctatggtgtatataaagtacatgggaattatggtcgagttttcagtgaatggagtgccatagaaaaagaaatgggtgatggactgcagagtgctggtcatcatatggatgtgtatgcatcttctattgatgatattttggaagatgaagaacattatgcagatcagttaaaagagtatcttttttatgcagaagcattgcgggctgtgtgcaggaaacatgaacttatgcagtatgacttggagatggctgctcaggacttagcatccaagaagcagcagtgtgaggaactggtaactgggactgtgagaacattctctttgaagggaatgactaccaagctctttggtcaagaaactccagagcagagagaagccagaataaaggtgctagaagaacaaataaatgaaggagaacaacagctaaagtctaaaaatctggaaggcagagaatttgtgaaaaacgcatgggctgatattgaacgcttcaaagaacaaaagaaccgagacttaaaggaggccctcataagctatgcagtcatgcagatcagtatgtgcaaaaagggaattcaagtttggaccaatgctaaggaatgctttagcaagatgtaatcctgtgaattgaatttctcttcaatcaaagtgccccaaaacagaagcacaagtaaataaaagaaatttaagtcactacctagtatacataaacatatacaataagttaaataaattcagctttctttaacttaattgtggtcgtgttaatgtagcacaaaaaatatattttaatgaagattaaatattataatttgaggttttggggactggtgctgattccaaaaagttaatttaataatatataccaacagattgtttgtcacgcttctgaaccaatgactgaatgtcaagatgttcgttaatttctagatgtttgtttcaagaccagctgtttcagatctattaatgtagggaatttttccctaagattgaattcctatatttacttggtaagatccactaatctgttatagggagttgttttctcttgccttatagttgagctatttggtttgacaaagctcagcagaaacttgatgtgaaaaatctacgattttcttctacattcattgatgccccttgtaatgtttgcatacactagaaaatgccttcaatttgtgttttaccagaattttgatactggtcagaaattttatactgccaacaaagaagactcaacttctcagatctataatgggatacattgtcatcctctagcaactcctatatagaaagttttaactgaatatgttacatataagaattaaattcttctcaaataattcttaacctcagtaatgagcctaaatttactctgcttggctctctacacatggcatttcagggtataagatgtagcatttcaatgtgtaagatatatgtactaaacatatgtgttgctatcttcatcattaacatccttcttttctattgcttggctgtaatttttgtaaagataaattatattgtttttttgtatgtgtgtttgtagtatatgttcagaaggcaagcatcttcattttgctagctttgcagaatcttaaaatgtgtactcgttatttctaatgatgtaaaaaaaaatccctagtcctgtttagcatttgacttttttatatgttttaaatgttgctggatttttgtgctgtttgccaaacttatacaataaataaatgaaatattgtgctgaaaaaaaaaaaaaaaaaaaaaaaaaaaaaaaaaaaaaaaaaaaa

SEQ ID NO: 158 - DNA, 1717 bp, Homo Sapiens
gcgttttgccacagagccgtaaaggcgcgcgggaacatggggctgtatgctgcagctgcaggcgtgttggccggcgtggagagccgccagggctctatcaaggggttggtgtactccagcaacttccagaacgtgaagcagctgtacgcgctggtgtgcgaaacgcagcgctactccgccgtgctggatgctgtgatcgccagcgccggcctcctccgtgcggagaagaagctgcggccgcacctggccaaggtgctagtgtatgagttgttgttgggaaagggctttcgagggggtgggggccgatggaaggctctgttgggccggcaccaggcgaggctcaaggctgagttggctcggctcaaggttcatcggggtgtgagccggaatgaggacctgttggaagtgggatccaggcctggtccagcctcccagctgcctcgatttgtgcgtgtgaacactctcaagacctgctccgatgatgtagttgattatttcaagagacaaggtttctcctatcagggtcgggcttccagcctcgatgacttacgagccctcaaggggaagcattttctcctggaccccttgatgccggagctgctggtgtttcccgcccagacagatctgcatgaacacccactgtaccgggccggacacctcattctgcaggacagggccagctgtctcccagccatgctgctggaccccccgccaggctcccatgtcatcgatgcctgtgccgccccaggcaataagaccagtcacttggctgctcttctgaagaaccaagggaagatctttgcctttgacctggatgccaagcggctggcatccatggccacgctgctggcccgggctggcgtctcttgctgtgaactggctgaggaggacttcctggcggtctccccctcggatccacgctaccatgaggtccactacatcctgctggatccttcctgcagtggctcgggtatgccgagcagacagctggaggagcccggggcaggcacacctagcccggtgcgtctgcatgccctggcagggttccagcagcgagccctgtgccacgcgctcactttcccttccctgcagcggctcgtctactccacgtgctccctctgccaggaggagaatgaagacgtggtgcgagatgcgctgcagcagaacccgggcgccttcaggctagctcccgccctgcctgcctggccccaccgaggcctgagcacgttcccgggtgccgagcactgcctccgggcctcccctgagaccacactcagcagtggcttcttcgttgctgtaattgaacgggtcgaggtgccaaggtgagtgagtgggggcgtgcttgggaggcgcaggatggcaccggcacatctaacatctacacttctctagctcagcctcacaggccaaagcatcagcaccagaacgcacacccagcccagccccaaagagaaagaagagacagcaaagagccgcagccggtgcttgcacaccgccttgcacatagcagaggctccgggctgactccttcctggtgggaaaggaagatgcctgtcctctccgtggaggaccctgggccctcaccgcaggaagcagtttgggttttgaaaggttattgggtcccttccttgggctgtgttcttgctggtgagcaaagtgttgcctgcaaaaataaaatgcagaacgtactctaaaaaaaaaaaaaaaaaaaaaaaaa

SEQ ID NO: 159 - DNA, 2615 bp, Homo Sapiens
taaggactcgactacctccgaagaaagccgaaacatgtggctccgcccacactggcctcagctctccgttctcgactattgccgaagtgagccgaagtttgtggccccgcttccggagaactcaagctcccgattgtgcccgaaggaacccgaagggagaccccgcctcattcctcacggcgagctccagaccccgcctcctttccggagcccgtctgttccccttcgggtccaaagcttttggctcctccttgttccgagcccgaaggcccgccccttcacgtactcggagctcggatcccagtgtggacctggactcgaatcccgttgccgactcgcgctctcggcttctgctccggggcttcttccctgcccgcccggggccctgaccgtggcttcttccccggcctgatctgcgcagcccggcgggcgcccagaaggagcaggcggcgcgggggcgcgctgggcgggggaggcgtggccggagctgcggcggcaagcgggctgggactgctcggccgcctcctgcccggcgagcagctcagaccatgtcgcctgaagaatggacgtatctagtggttcttcttatctccatccccatcggcttcctctttaagaaagccggtcctgggctgaagagatggggagcagccgctgtgggcctggggctcaccctgttcacctgtggcccccacactttgcattctctggtcaccatcctcgggacctgggccctcattcaggcccagccctgctcctgccacgccctggctctggcctggactttctcctatctcctgttcttccgagccctcagcctcctgggcctgcccactcccacgcccttcaccaatgccgtccagctgctgctgacgctgaagctggtgagcctggccagtgaagtccaggacctgcatctggcccagaggaaggaaatggcctcaggcttcagcaaggggcccaccctggggctgctgcccgacgtgccctccctgatggagacactcagctacagctactgctacgtgggaatcatgacaggcccgttcttccgctaccgcacctacctggactggctggagcagcccttccccggggcagtgcccagcctgcggcccctgctgcgccgcgcctggccggccccgctcttcggcctgctgttcctgctctcctctcacctcttcccgctggaggccgtgcgcgaggacgccttctacgcccgcccgctgcccgcccgcctcttctacatgatccccgtcttcttcgccttccgcatgcgcttctacgtggcctggattgccgccgagtgcggctgcattgccgccggctttggggcctaccccgtggccgccaaagcccgggccggaggcggccccaccctccaatgcccaccccccagcagtccggagaaggcggcttccttggagtatgactatgagaccatccgcaacatcgactgctacagcacagatttctgcgtgcgggtgcgcgatggcatgcggtactggaacatgacggtgcagtggtggctggcgcagtatatctacaagagcgcacctgcccgttcctatgtcctgcggagcgcctggaccatgctgctgagcgcctactggcacggcctccacccgggctactacctgagcttcctgaccatcccgctgtgcctggctgccgagggccggctggagtcagccctgcgggggcggctgagcccagggggccagaaggcctgggactgggtgcactggttcctgaagatgcgcgcctatgactacatgtgcatgggcttcgtgctgctctccttggccgacacccttcggtactgggcctccatctacttctgtatccacttcctggccctggcagccctggggctggggctggctttaggtgggggcagccccagccggcggaaggcagcatcccagcccaccagccttgccccagagaagctccgggaggagtaagctgtcacgacgctccctctgccagctggtcccgggaattctgtgaaccaggctgctgtctcctccccagaaagagtccttaccttggagagggtcctggagagaatttcctcttccccagctaaataccctgcctgcaactgaagcagacccgggggtgtcctccctgccctctgcccagaggccacctccactcctacaaaatcaaagtattgtccagacaagagtcactggcccctgctccagcttctgggtatccagagagcactgcacttccccaaaacggaaggggcccctgggcagtgggttttgggcaaattccctttctttgcatccacaatgtggggtcggagcttgggggcaggtcctgggagtgggaagcctcttccttgtgtctttcgctccacttttagctcatcgcaccaatattgcagacttggaaggaagcataagcttcccatttcacaaaggggaaactgaggtgcgggtgcgcgggcctggggacggccgtcccatggcttccatctgagccacctcgggaccccagcgctcctggcgccctcttctcatcgcttggcctatgacaggtcaccgtgtgtaaatctttcccaataaagtgttgcacaaaggcaaaaaaaaaaaaaaaaa

SEQ ID NO: 160 - DNA, 8559 bp, Homo Sapiens
gaatgttcccgccgcgggctccgccccccggccaatcggaccggcgctcggtgaagcccagattctctttgttccgcagccatttcaggccccggacaggaggcagtgccgcttcggccgaaggcccgagcgcccgaggcgtctgggatggtgtgggaccggcaaaccaagatggagtatgagtggaaacctgacgagcaagggcttcagcaaatcctgcagctgttgaaggagtcccagtccccagacaccaccatccagagaaccgtgcaacaaaaactggaacaacttaatcagtatccagactttaacaactacttgatttttgttcttacaaaattaaaatctgaagatgaacccacaagatcattgagtggtcttatcttgaagaataatgtgaaagcacactttcagaacttcccaaatggtgtaacagactttattaaaagtgaatgtttaaataatattggtgactcctctcctctgattagagccactgttggtattttgatcacaactatagcctccaagggagaattgcagaattggcctgacctcttaccaaaactctgtagcctgttggattctgaagattataatacctgtgagggagcatttggtgcccttcagaagatttgtgaagattctgctgagattttagacagtgatgttttagatcgtcctctcaacatcatgattcccaaatttttacagttcttcaagcatagtagtccaaaaataaggtctcacgctgttgcatgtgtcaatcagtttatcatcagtaggactcaagctctaatgttgcacattgattcttttattgagaatctctttgcattagctggtgatgaagaaccagaggtacggaaaaatgtgtgccgagcacttgtgatgttgctcgaagttcgaatggatcgcctgcttcctcacatgcataatatagttgagtacatgctacagaggactcaagatcaagatgaaaatgtggctttagaagcctgtgaattttggctaactttagctgaacagccaatatgcaaagatgtactcgtaaggcatcttcctaagttgattcctgtgttagtgaatggcatgaagtactcagacatagatattatcctacttaagggtgatgttgaagaagacgaaacgattcctgatagtgaacaggatatacggccacgttttcaccgatcgaggacggtggctcagcagcatgatgaagatggaattgaagaggaagatgatgatgatgatgaaattgatgatgatgatacaatttctgactggaatctaagaaaatgttctgctgctgccctggatgttcttgcaaatgtgtatcgtgatgaactgctgccacatattttgccccttttgaaagaattactttttcatcatgaatgggttgttaaagaatcaggcattttggttttaggagcaattgctgaaggttgcatgcagggcatgattccatacttgcctgagcttattcctcaccttattcagtgcctctctgataaaaaggctcttgtgcgttccataacatgctggactcttagccgctatgcacactgggtggtcagccagccgccagacacgtacctgaagccattaatgacagaattgctaaagcgcatcctggacagcaacaagagagtacaagaagctgcctgcagtgcctttgctaccctagaagaggaggcttgtacagaacttgttccttaccttgcttatatacttgataccctggtctttgcatttagtaaataccagcataagaacctgctcattctttacgatgccataggaacattagcagattcagtaggacatcatttaaacaaaccagaatatattcagatgctaatgcctccactgatccagaaatggaacatgttaaaggatgaagataaagatctcttccctttacttgagtgcctatcttcagttgccacagcactgcagtctggattccttccgtactgtgaacctgtgtatcagcgttgtgtaaacctagtacagaagactcttgcacaagccatgctaaacaatgctcaaccagatcaatatgaagctccagataaagattttatgatagtggctcttgatttactgagtggcctggctgaaggacttggaggcaacattgaacagctggtagcccgaagtaacatcctgacactaatgtatcagtgcatgcaggataaaatgccagaagttcgacagagttcttttgccctgttaggtgacctcacaaaagcttgctttcagcatgttaagccttgtatagctgatttcatgccaatattgggaaccaacctaaatccagaattcatttcagtctgcaacaatgccacatgggcaattggagaaatctccattcaaatgggtatagagatgcagccttatattcctatggtgttgcaccagcttgtagaaatcattaacagacccaacacaccaaagacgttgttagagaatacagcaataacaattggtcgtcttggttacgtttgtcctcaagaggtggcccccatgctacagcagtttataagaccctggtgcacctctctgagaaacataagagacaatgaggaaaaggattcagcattccgtggaatttgtaccatgatcagtgtgaatcccagtggcgtaatccaagattttatatttttttgtgatgccgttgcatcatggattaacccaaaagatgatctcagagacatgttctgtaagatccttcatggatttaaaaatcaagttggcgatgaaaattggaggcgtttctctgaccagtttcctcttcccttaaaagagcgtcttgcagctttttatggtgtttaatctaatacacttaagctgcagtcccaaaattaggggtccttcagtcttggagactataagggagcctctgcacccagggaaaatgttaccctttacaggggggaagggtaaaccagtagggaatacagtacaatcccaaccctactgggaggggcgggagggaggtgttgccgtcactgtattaagtcgatgttgggaaacgttttaacatctggagcctttgtgggtggaaatatgtctccagttacaactccgcagtggatgtgaagaagcaaaaaaaaaaaaatctattcagtctactcacaaaacagtacattgtggaatattatggggaattgtaccaaaacaagaaccatataaatgatgcctagggacaagaaagaggaacaattctatagcgcacaataaaggaaacctaagaatgggagttacaaatagtaaagaagctttttttttttttttaatttaaagtttttttatgtaagttttcccacatgatggggccttgttttgcatgttgatgaagaactacacaaagaaaactaatatagttaaaagtcagcttgccttcccgtagtagaagcaggttcttggaagttacaatttaaggtaccccaaaaaagttggaaataaaacaaaacaaacataaacaatgaagcaccctgtgaaatgccaaatgagtcactccttttaccttttttggggtgggcagggagggaggaataaatggggttgggcatatcaaactaaagatgacatcttaattttgcattgaacattaatgtagcggatataatttgatgattatacttcattagatttaatttctaggccaagatgttactttttaaagtgcagtttaaggttcaggcatgcattctggctcatagtggttgaaagtaatttaaattagtgggaaagtagcatgcttgcatcacatagagtgagattggtattcatttacctatgttgcgccagtttgtgttgcagtttaccaattcaatatagccctgcatttaaagttcctttttaagatttgtggattttatttttattaagaacatagatatataaagtactgtagtttacaggtaggccttgaaatatcttttttaggatctgttaggaataagattgatattgtattgtgtgtaacctgcacaatgtggaaagctgatatacctgtgcaaaatctttgcctctgtgctgtcagtgtgatgtgctttctgcatggttatatactactagtgattttatcaaaacttctaaaatttaaattacgtggtaaaagatctgtaaaaggctgcataaatgttagttggcacataaagacaattgtagaagttgaaaaatgattgctatatttcaatgtttattcccactcaacatactgccttctaagcttccctttttttgttcaaagcatgatcttaaagatatgtttaagttaatggatgtaatgcagggttcctacactgtattttggcgcatgttggtggccctctgtgccctagatatatgcacacagggtgcaagttaaaagctacagagtgaaagttggtttggatcctcttcatttcatttgtttagcttttctgttatttttctctacttacatgtattcctgtgaataaatccttgttaagttaaccctttacttttccttccatgtgtattttcttatatactgtgaatgtgaaaacctaactggtacacttgatcttgtgttcatatgaaagtgcaagtctttattaatttggattgcctgaacagtgtatcccatgatgatgaaggaaaatggagagatttttctttttaactctgctggtcagagatgaagccacgcctttccatttttcaatgctgcatatttaatctgcaacaaaaatgttaagccataacagcctttttatattttagtttgtcacctttgcattgcagaataaatactgaataaccatttttataagcagttgctcctctttgcatggttctattctctaaaagtgttgaatgatacagccattgcactgaagtttgagctgtgtgcgtgtgaatttatactgtttcaaaaatttcaaatgcatggtagcatgtagaaaggtttttgttactatgtgtgtgtgtgtgttttgttttgttttgttctgttttttaacgttctttcacctttcctctactttggctttgcaaatttcagtctgtagagcctgaaattaaattattttatagtgcctgatatttttaatattataagttggattcaaagggtatacagcattttgttttctagtaccattgcttcactgggagctcaaaatttgcctccctgttagtctttaataactgagtagagtagcttttttattcttagattatagtgatattctgtagtgcttcaaatacttagaattctaatatgagagatagtttaatattctggaatagagagtattttaaattgaaatgaccaaattcgatttaaaacaaacacataacaatcttcagtaaagttatttgaacctgtggttgacaattctgtattgactaaaggcaatattgtcacctgtctcattaaaaattagtttccagttaggcagatgaataacactattaaaaatgcacccagttttgtagtcacttgactttttttttttatttaaatgaaatttaatttgaaaatagaaaataaaattaggtaaatatgactggcaacctgaatttgagttgggattctttgtgtatttttcccccttgaggttattgtttcttcctaatttatatttcagatacatagtgtagaacaggaatttgcagaagccatttaagttatcttttgaggtaagctctgatttagcatttattctgataaaatctaatacatcatgggatatatataaagcaacttaattcttgtggtgtagtcttaatagttttgaatgttgactgaatgtctataaaattgtgagtttgtctttgttacattccagtgtttctgcctcttggcatgcttaaagcacggcttacttcatctgctccttacacactaaaatgctgttagtgtgctcaactacagaaatagccgctgctaagtgatgtagattttctacttgaatatttttatgttgtaggaacctcaggaggtcagtgtttactgttttatatatgccttctttttcctgtttgagcttctctctttgaaggattctaacagaacaaagctgctgatcaacctaagttggaaacagaaagtgtaattaatataacttaaatgcatgtttggcagttccatgttacagtccattagcgagtgaacttagtgccacaggtattcatttattcaggaaagaattttgctttttgtattgtctaatctcttcaatgacttcatactgtgtaaaaaaaaatcactttttaatattttttggttggttatttcccaaataatcaacatgtaaataatcttttaagagccagttctgatgctttacattattgctacttgattttgttatgcaagttagatttcagaagaatagattttaaaacacttaaccaagccattacatcttaaaaacaaaacaagtagcatacattttgtaattaacattgataaacactgtgatttttttggttaagactttttcattgatctgaattgcttaaattgcatatattgtaaaataggatcagatgtatattttaaactaatttcaatggattttcctcttgaaatgctttgtctactcagttataaaatattcagatacaagttttatctcaggtgaatactcttgtattgtttttgctttggtgacatgcttataaagggtcatcctagttacattctttgttttttaagtgtatttcattgagaatctttccatttagtctgatttttttcctaatattctagcaggctggggtggtataaagccctcctgacaagccttttgcctacaggtttacctgaaaatgagctacatatggtcgtcattttcttcaaactctcaaaataggaaagtggaaatttttctcccctatataaaattattctgcctagcagaaatgccagaaataaattaattgcatcttagtctaaatttaagtcctttgccatgaggaaaaagtggttttttgcttcatatggtaaatctatattattcatattgaatgtattaacagataatggtgcaaaagcattcttcccaggggaagagtgtatcatgcataactgcaatttaagtccttcctttgataatacttcaaaacatacacagctttgcttactgaattatttttgcaaataatacaaggaggggaaactaacttgctactagtgttgttaatgaagtataggccttggaacatttaagaaaactggtcttcagatagttaagggcttgggataatttaagtgaaaagtgagatcagtaatgagctgtgttgttaacaatattatctggtaataataccatgcaatatagcgttgtataccaacttagtgcattttatactgtattaaatatggagatacttctaatgcctctctaaaattaaattttacataaaagttagttttattcacctttaggctttccaagtgaattgtgactaattttttcaatcttacatagatctttcacccattagcattacttacgtagataattctttatgcctagttattatacatattaatttttaaggtatacatttaaattacacaattgttcattgtggtttgtatcccagaatgtgttgtgttttttaaaagatgcataatagctgaatgtatgcatgactttgaaagaagttaaaatggtgattttttttcacctcttgtacattttaaaaccaggccaaatctatttgccaagcagtgtatcactaataagaaaagcagtttttccttttattgcagtttttgtttatctgccatagaatttccttatactgtggcttggtattattcaagattagctatttcgctggtattacatctttttaaaagcctattataacatggttagcctataaggcagtgttggtccccttctaatattggcctcataaaggggttccactgtactttccgcatattactgtgttgttgttttcctttgtggatatataagcaaattgagcttgggtgatttttatggagacaataattagacaatactgtataattagttttacttaatagattatcatcttgtgagaagagatgtttaaacgtggtaaatcacttcatattacaaaacagttttacacttaatatgttaacattgggtgcaataatttagtagcattagctttagttacaaatataactggatctttctgctgacaacttaggttgtatgagttatgcttaaaagctttaaatctgatgtttcctgtacctgccacactatgttagaatgtgtccttcaaacatatcctcctgcaacttctcaaactgtactaaattgatatttcttgaagtctaactctgtgctaacagatctccattttaaatagaatacggttttaatttttgataagctgctgaattttaaagagagttttttggggccaccaaatattttggatcatgcagagaatatatattgtactgtagtaattttgtatttacatttgtatgatgtgacataatagatgtgaatgttaatcactgcttgactatgttaataaagttgtttaactata

SEQ ID NO: 161 - DNA, 2568 bp, Homo Sapiens
accgcctcttgtttttcccgcgaaactcggcggctgagcgtggaggttcttgtctcccctggtttgtgaagtgcggaaaaccagaggcgcagtcatgtcgggattcgacgatcctggcattttctacagcgacagcttcgggggcgacgcccaggccgacgaggggcaggcccgcaaatcgcagctgcagaggcgcttcaaggagttcctgcggcagtaccgagtgggcaccgaccgcacgggcttcaccttcaaatacagggatgaactcaagcggcattacaacctgggggagtactggattgaggtggagatggaggatctggccagctttgatgaggacctggccgactacttgtacaagcagccagccgagcacctgcagctgctggaggaagctgccaaggaggtagctgatgaggtgacccggccccggccttctggggaggaggtgctccaggacatccaggtcatgctcaagtcggacgccagcccttccagcattcgtagcctgaagtcggacatgatgtcacacctggtgaagatccctggcatcatcatcgcggcctctgcggtccgtgccaaggccacccgcatctctatccagtgccgcagctgccgcaacaccctcaccaacattgccatgcgccctggcctcgagggctatgccctgcccaggaagtgcaacacagatcaggctgggcgccccaaatgcccattggacccgtacttcatcatgcccgacaaatgcaaatgcgtggacttccagaccctgaagctgcaggagctgcctgatgcagtcccccacggggagatgcccagacacatgcagctctactgcgacaggtacctgtgtgacaaggtcgtccctgggaacagggttaccatcatgggcatctactccatcaagaagtttggcctgactaccagcaggggccgtgacagggtgggcgtgggcatccgaagctcctacatccgtgtcctgggcatccaggtggacacagatggctctggccgcagctttgctggggccgtgagcccccaggaggaggaggagttccgtcgcctggctgccctcccaaatgtctatgaggtcatctccaagagcatcgccccctccatctttgggggcacagacatgaagaaggccattgcctgcctgctctttgggggctcccgaaagaggctccctgatggacttactcgccgaggagacatcaacctgctgatgctaggggaccctgggacagccaagtcccagcttctgaagtttgtggagaagtgttctcccattggggtatacacgtctgggaaaggcagcagcgcagctggactgacagcctcggtgatgagggacccttcgtcccggaatttcatcatggagggcggagccatggtcctggccgatggtggggtcgtctgtattgacgagtttgacaagatgcgagaagatgaccgtgtggcaatccacgaagccatggagcagcagaccatctctatcgccaaggctgggatcaccaccaccctgaactcccgctgctccgtcctggctgctgccaactcagtgttcggccgctgggatgagacgaagggggaggacaacattgacttcatgcccaccatcttgtcgcgcttcgacatgatcttcatcgtcaaggatgagcacaatgaggagagggatgtgatgctggccaagcatgtcatcactctgcacgtgagcgcactgacacagacacaggctgtggagggcgagattgacctggccaagctgaagaagtttattgcctactgccgagtgaagtgtggcccccggctgtcagcagaggctgcagagaaactgaagaaccgctacatcatcatgcggagcggggcccgtcagcacgagagggacagtgaccgccgctccagcatccccatcactgtgcggcagctggaggccattgtgcgcatcgcggaagccctcagcaagatgaagctgcagcccttcgccacagaggcagatgtggaggaggccctgcggctcttccaagtgtccacgttggatgctgccttgtccggtaccctgtcaggggtggagggcttcaccagccaggaggaccaggagatgctgagccgcatcgagaagcagctcaagcgccgctttgccattggctcccaggtgtctgagcacagcatcatcaaggacttcaccaagcagaaatacccggagcacgccatccacaaggtgctgcagctcatgctgcggcgcggcgagatccagcatcgcatgcagcgcaaggttctctaccgcctcaagtgagtcgcgccgcctcactggactcatggactcgcccacgcctcgcccctcctgccgctgcctgccattgacaatgttgctgggacctctgcctccccactgcagccctcgaacttcccaggcaccctcctttctgccccagaggaaggagctgtagtgtcctgctgcctctgggcgcccgcctctagcgcggttctgggaagtgtgcttttggcatccgttaataataaagccacggtgtgttcaggtaaaaaaaaaaaaaaaaaaaaaaa

SEQ ID NO: 162 - DNA, 2775 bp, Homo Sapiens
ctcaaccccttctctcgtaggcccttctaccctccccgaagccgggctcccgggttccgcttccacagggccgccccctctcctccgagatccaacgcctcgcccctcggtaagaggcccaggactcagcccacggccccgccccccacttggctagtccgcccctggcgagacccctgctctcacccacccaggacttctcgctcccaggccgggtcctctcaccgtcaaggcccgccccctgccaacggtcctcacccattagccgaaggccccgcccctcacagattgccgcagggcaggggcggagacagcccgggccgtcccaggctccgcccccggaagcctcacttccgggcgcgagcacgccccgcctcgccccggcggcagagaggagactatggaacgtcaggtgctgctgagcgagcccgaggaggcggcggctctgtatcggggccttagccgccagcccgcgctgagcgccgcctgcctgggcccggaggtcaccacgcagtacggcggccaataccggacggtgcacactgagtggacccagagggacctggaacgcatggagaacattcgattctgccgccaatacctggtgttccatgacggggactcagtggtgtttgcaggacctgcaggcaacagtgtggagacccggggggaactgctgagcagagagtctccttcaggcaccatgaaagctgtgctgcgcaaggctggaggcacgggccctggggaagagaagcagttcctggaggtctgggagaagaaccggaagctcaagagcttcaacctgtcagcgctggagaaacatgggcctgtttatgaggatgactgctttggctgcctgtcctggtcgcactcggagacacacttgttgtatgtggcagagaagaagcgccccaaggccgagtccttctttcagaccaaagccttggacgtcagtgccagcgatgatgagatagccaggctgaagaagccagaccaagccatcaagggggatcagtttgtgttttatgaagactggggagaaaacatggtttccaaaagcatccctgtgctctgcgtgctggatgtcgagagtggcaacatctctgtgcttgagggggtccctgagaatgtgtcccctggacaggcattttgggcccctggagatgctggtgtggtgtttgtgggctggtggcatgagcccttccggttgggcatccgcttttgcaccaatcgcaggtcagccctgtattatgtggacctcatcggggggaagtgtgagctcctctcggatgactccctggctgtctcttctccccggctgagcccagaccaatgtcgcattgtctacctgcagtacccatctctgatcccccatcaccaatgcagccagctgtgcctgtatgactggtataccaaggttacctcagtggtggtagatgttgtgcctcggcagctgggagagaacttctctgggatctactgcagccttctgcctttgggatgctggtcagctgacagccagagagtggtctttgactcggctcagcgcagccggcaggacctgtttgctgtggacacccaagtgggcactgtgacctccctcacagctggagggtcaggtgggagctggaagttgctcacaattgaccaggacctcatggtggcacagttttccacacccagcctacctccaaccctgaaagttgggttcctgccttctgcagggaaggagcagtcagtgttgtgggtgtccctggaggaggccgagcccattcccgacatccactggggcatccgggtgctacagccacccccagagcaagagaatgtgcagtatgctggccttgactttgaagcaatcctgctgcagcctggcagccctccagataagacccaagtgcccatggtggtcatgccccacggggggccccattcatcctttgtcactgcctggatgctgttcccagccatgctttgcaagatgggctttgcggtactactagtgaactatcgtggctccacgggctttggccaggacagcatcctctccctcccaggcaatgtgggccaccaggatgtgaaggatgtccagtttgcagtggaacaggtgctccaggaggaacactttgatgcaagccatgtggcccttatgggtggttcccatggtggcttcatttcctgccacttgattggtcagtacccagagacctacagggcctgcgtggcccggaaccccgtgatcaacatcgcctccatgttgggctccactgacatccctgactggtgcgtggtggaggctggctttcctttcagcagtgactgcctgccagacctcagcgtgtgggctgagatgctggacaaatcgcccatcagatacatccctcaggtgaagacaccactgttactgatgttgggccaggaggaccggcgtgtgcccttcaagcagggcatggagtattaccgtgccctcaagacccggaatgtgcctgttcggctcctgctctatcccaaaagcacccacgcattatcagaggtggaggtggagtcagacagcttcatgaatgctgtgctctggctacgcacacacttgggcagctgaagccctgccattctgcatgagctgatcagcctgtgccacacttcgctcttgaggagctcaacggtctggcagggcagcaggaggctttctgggctctggactccacggatgcgtgggcagaggaatgtgggctatgtagtcataataaattaggacacaaaaaaaaaaaaaaaaaa

SEQ ID NO: 163 - DNA, 1555 bp, Homo Sapiens
aaagcatcgggtctcgggacttctgagtggcctgggttaccgcgcgatctacactgagacaaggaagttggaaaagccgagtagttataccagaagatcagggtctcacagactcgcaacttctcttccattttccccaatggcgcatgtcttacaaaaacccaagcactctgggactcactccatagtccaggagttccaggttccggattatgttccatggcagcagtccaagcaggaaaccaagccatctactctgcctccagtccaacaagccaacagccttcatacaagcaaaatgaagactttgactagggtccaaccagtgtttcacttcaagcccactacggtggtgacaagctgccagccgaagaatccaagagaactacatagaaggcggaagttggaccctgggaagatgcatgccaaaatctggttaatgaagacgtcgctcaggagcgggagggccgctctgcgagagctccgaagccgtgagaacttcctcagcaagctcaaccgggagctgatcgagaccatccaggagatggagaacagcacgaccctgcacgtgcgggccctgctgcagcagcaggacaccttggcgaccatcatcgacatcttggagtactcaaacaagaagaggctgcagcaattgaaatctgagcttcaggagtgggaagaaaagaagaaatgcaagatgagctatcttgagcagcaggcagagcagctgaatgccaagattgagaagacccaggaggaagtgaacttcctgagcacttacatggaccatgagtattccatcaagtctgtccagatctccactcttatgcgccagctgcagcaggttaaggacagccagcaggatgagctggatgacctcggtgagatgcgcagaaaggtcctggaatccttgtccgacaagattcagaagaagaagaaaaaaattctgagttctgtggtggcggaaacccagcgtccctatgaagaggctctcctacagaagatgtgggaaagccaggacttcctgaaatgcatgcaaaggttcagagaatttattgaccagtttgaggagaacatgcctgtattaagggccgaggtggaagagctccaagcccagacccgggaaccccgagaggtcatatttgaggatgttctgcttcggagacccaagtgcaccccagacatggatgtcatcctcaacattcctgtggaagagccactacccttctagatggcagtgccatgggccgccctcccctcctgctctcttcccagcacctggagccttggatcatttacttccaggaccggatctccattcagaccctgatctacagtctccctgctccctctgcccttcctccctctttctttccctccctccctccctcccttcttccccccttcccttccctcctccttccttcctcctctccctccctccctcctttctttcttcctgtggttttttcctctcttcttcccttctttctggttggtgctgctgggccaggtgggaatttctgattaaatctgctattccttttttaccaat

SEQ ID NO: 164 - DNA, 3399 bp, Homo Sapiens
ctccccgcgccccgcggcgcgcggccagtgcgcaggcgcggcggccgatgcgagtgtgtatgtgcgggcgagaagatggcggcggcgggggaagcagcgtgagcagccggaggatcgcggagtcccaatgaaacgggcagccatggccctccacagcccgcagtatatttttggagattttagccctgatgaattcaatcaattctttgtgactcctcgatcttcagttgagcttcctccatacagtggaacagttctgtgtggcacacaggctgtggataaactacctgatggacaagaatatcagagaattgagtttggtgtcgatgaagtcattgaacccagtgacactttgccgagaacccccagctacagtatttcaagcacactgaaccctcaggcccctgaatttattctcggttgtacagcttccaaaataacccctgatggtatcactaaagaagcaagctatggctccatcgactgccagtacccaggctctgccctcgctttggatggaagttctaatgtggaggcggaagttttggaaaatgatggtgtctcaggtggtcttggacaaagggagcgtaaaaagaagaaaaagcggccacctggatattacagctatttgaaagatggtggcgatgatagtatctccacagaagccctggtcaatggccatgccaattcagcagtcccgaacagtgtcagtgcagaggatgcagaatttatgggtgacatgcccccgtcagttacgcccaggacttgtaacagcccccagaactccacagactctgtcagtgacattgtgcctgacagtcctttccccggagcactcggcagtgacaccaggactgcagggcagccagaggggggccccggggctgattttggtcagtcctgcttccctgcagaggctggcagagacaccctgtcaaggacagctggggctcagccctgcgttggtaccgatactactgaaaaccttggagttgctaatggacaaatacttgaatcctcgggtgagggcacagctaccaacggggtggagttgcacaccacggaaagcatagacttggacccaaccaaacccgagagtgcatcacctcctgctgacggcacgggctctgcatcaggcacccttcctgtcagccagcccaagtcctgggccagcctctttcatgattctaagccctcttcctcctcgccggtggcctatgtggaaactaagtattcccctcccgccatatctcccctggtttctgaaaagcaggttgaagtcaaagaagggcttgttccggtttcagaggatcctgtagccataaagattgcagagttgctggagaatgtaaccctaatccataaaccagtgtcgttgcaaccccgtgggctgatcaataaagggaactggtgctacattaatgctacactgcaggcattggttgcttgcccgccgatgtaccacctgatgaagttcattcctctgtattccaaagtgcaaaggccttgtacgtcaacacccatgatagacagctttgttcggctaatgaatgagttcactaatatgccagtacctccaaaaccccgacaagctcttggagataaaatcgtgagggatattcgccctggagctgcctttgagcccacatatatttacagactcctgacagttaacaagtcaagcctgtctgaaaagggtcgacaagaagatgctgaggaatacttaggcttcattctaaatggacttcatgaggaaatgttgaacctaaagaagcttctctcaccaagtaatgaaaaacttacgatttccaacggccccaaaaaccactcggtcaatgaagaagagcaggaagaacaaggtgaaggaagcgaggatgaatgggaacaagtgggcccccggaacaagacttccgtcacccgccaggcggattttgttcagactccaatcaccggcatttttggtggacacatcaggtctgtggtttaccagcagagttcaaaagaatctgccactttgcagccatttttcacgttgcagttggatatccagtcagacaagatacgcacagtccaggatgcactggagagcttggtggcaagagaatctgtccaaggttataccacaaaaaccaaacaagaggttgagataagtcgaagagtgactctggaaaaactccctcctgtcctcgtgctgcacctgaaacgattcgtttatgagaagactggtgggtgccagaagcttatcaaaaatattgaatatcctgtggacttggaaattagtaaagaactgctttctccaggggttaaaaataagaattttaaatgccaccgaacctatcggctctttgcagtggtctaccatcacggcaacagtgcgacgggcggccattacactacagacgtcttccagatcggtctgaatggctggctgcgcatcgatgaccagacagtcaaggtgatcaaccagtaccaggtggtgaaaccaactgctgaacgcacagcctacctcctgtattaccgccgagtggacctgctgtaaaccctgtgtgcgctgtgtgtgcgcccagtgcccgcttcgtaggacaccacctcacactcacttcccgcctctctttagtggctctttagagagaaactctttctccctttgcaaaaatgggctagaatgaaaaggagatgccttggggttcgtgcacaacacagcttctgttgactctaacttccaaatcaaaatcatttggttgaaacagactgttgcttgattttagaaaatacacaaaaacccatatttctgaaataatgctgattcctgagataagaaagtggatttgatccccagtctcattgcttagtagaataaatcctgcaccagcaacaacacttgtaaatttgtgaaaatgaattttatctttccttaaaaaagaaattttttaatccatcacacttttcttccctaccctttagtttttgataaatgataaaaatgagccagttatcaaagaagaactagttcttacttcaaaagaaaaataaacataaaaaataagttgctggttcctaacaggaaaaattttaataattgtactgagagaaactgcttacgtacacattgcagatcaaatatttggagttaaaatgttagtctacatagatgggtgattgtaactttattgccattaaaagatttcaaattgcattcatgcttctgtgtacacataatgaaaaatgggcaaataatgaagatctctccttcagtctgctctgtttaattctgctgtctgctcttctctaatgctgcgtccctaattgtacacagtttagtgatatctaggagtataaagttgtcgcccatcaataaaaatcacaaagttggtttaaaaaaaaaaaaaaaaaaaaaaa

SEQ ID NO: 165 - DNA, 3216 bp, Homo Sapiens
agttgtctcccgagcgctggctgcgccgcccgagccgctgggccggggaagcactggccgttcgctcccgggccggccccgccaggcgctcgcaggcatgcagcccgggagcaggaggcgctccccgggccgctgctgagccggccggggcggcggggaccagcgccagcggagcccctcccaccttgccccggggcagacgagcggcgccccgacaccccctcttctcccgcagccccgccagcgccaccccccgcgggccgcaggggctcatgcagccgccaagggagaggctagtggtaacaggccgagctggatggatgggtatggggagaggggcaggacgttcagccctgggattctggccgaccctcgccttccttctctgcagcttccccgcagccacctccccgtgcaagatcctcaagtgcaactctgagttctggagcgccacgtcgggcagccacgccccagcctcagacgacacccccgagttctgtgcagccttgcgcagctacgccctgtgcacgcggcggacggcccgcacctgccggggtgacctggcctaccactcggccgtccatggcatagaggacctcatgagccagcacaactgctccaaggatggccccacctcgcagccacgcctgcgcacgctcccaccggccggagacagccaggagcgctcggacagccccgagatctgccattacgagaagagctttcacaagcactcggccacccccaactacacgcactgtggcctcttcggggacccacacctcaggactttcaccgaccgcttccagacctgcaaggtgcagggcgcctggccgctcatcgacaataattacctgaacgtgcaggccaccaacacgcctgtgctgcccggctcagcggccactgccaccagcaagctcaccatcatcttcaagaacttccaggagtgtgtggaccagaaggtgtaccaggctgagatggacgagctcccggccgccttcgtggatggctctaagaacggtggggacaagcacggggccaacagcctgaagatcactgagaaggtgtcaggccagcacgtggagatccaggccaagtacatcggcaccaccatcgtggtgcgccaggtgggccgctacctgacctttgccgtccgcatgccagaggaagtggtcaatgctgtggaggactgggacagccagggtctctacctctgcctgcggggctgccccctcaaccagcagatcgacttccaggccttccacaccaatgctgagggcaccggtgcccgcaggctggcagccgccagccctgcacccacagcccccgagaccttcccatacgagacagccgtggccaagtgcaaggagaagctgccggtggaggacctgtactaccaggcctgcgtcttcgacctcctcaccacgggcgacgtgaacttcacactggccgcctactacgcgttggaggatgtcaagatgctccactccaacaaagacaaactgcacctgtatgagaggactcgggacctgccaggcagggcggctgcggggctgcccctggccccccggcccctcctgggcgccctcgtcccgctcctggccctgctccctgtgttctgctagacgcgtagatgtggagggaggcgcgggctccgtcctctcggcttccccatgtgtgggctgggaccgcccacggggtgcagatctcctggcgtgtccaccatggccccgcagaacgccagggaccgcctgctgccaagggctcaggcatggacccctccccttctagtgcacgtgacaaggttgtggtgactggtgccgtgatgtttgacagtagagctgtgtgagagggagagcagctcccctcgccccgcccctgcagtgtgaatgtgtgaaacatcccctcaggctgaagccccccacccccaccagagacacactgggaaccgtcagagtcagctccttccccctcgcaatgcactgaaaggcccggccgactgctgctcgctgatccgtggggccccctgtgcccgccacacgcacgcacacactcttacacgagagcacactcgatccccctaggccagcggggacaccccagccacacagggaggcatccttggggcttggccccaggcagggcaaccccggggcgctgcttggcaccttagcagactgctggaaccttttggccagtaggtcgtgcccgcctggtgccttctggcctgtggcctccctgcccatgttcacctggctgctgtgggtaccagtgcaggtcccggttttcaggcacctgctcagctgcccgtctctggcctgggcccctgccccttccaccctgtgcttagaaagtcgaagtgcttggttctaaatgtctaaacagagaagagatccttgacttctgttcctctccctcctgcagatgcaagagctcctgggcaggggtgcctgggccccagggtgtggcaggagacccagtggatggggccagctggcctgccctgatcctctgcttcctcctcacaaccccaagagcccccagcccggtccatccacgtctggagtctggggagaggagcagggtcttaggactctcagctctgagcatccctggcagggtcttcaacctctaatctcttcccttaagccctgtggccacacagccaggagagacttgccgctggctcccgcctcatttcagcccagggtgctcatccaggggcccagaacagtcccacctgtgctgctatgcccacagcacaaagccaggcttcactcccaaaagtgcagccaggccctggagggtgatcctgccagcagccctacagctccacaccctacccacccatcggcagcctctctgctgttccccagggacctctcatacactggccaggaggctgcagaacgtgtgtctccccctccctccaagaggtcctgctccctctgccagaaccgtgtgtgggcgggtgggagggcgctcggggcccggcccctccctctccctgctggttttagttggtccctatgttggaagtaaaaagtgaagcactttattttggttgtgtttgctcacgttctgcttggaagtggggacccctcactgcgtccacgtgtctgcgacctgtgtggagtgtcaccgcgtgtacatactgtaaattatttattaatggctaaatgcaagtaaagtttggtttttttgttattttctttt

SEQ ID NO: 166 - DNA, 3109 bp, Homo Sapiens
gggggccggccagaaacgggctggggagggggggccccgcagcccccctgggccatgctgactcccggggcctgacccccccgggccagccccccctcccccagctccgcggcccgccgactggggggggccagcccagccccctggggacccccggagaggtggggggcagccgggggggccgggacggagcggtcgccggcccccaccggagagacggggcgacggccgcagggggggcggccgggggaccggtcgggccgggaccaagggcaccatgtcgtccggggccaaggagggaggtgggggctctcccgcctaccacctcccccacccccacccccacccaccccagcacgcccaatatgtgggcccctatcggctggagaagacgctgggcaaaggacagacagggctggttaaactcggggtccactgcatcacgggtcagaaggtcgccatcaagatcgtgaaccgggagaagctgtcggagtcggtgctgatgaaggtggagcgggagatcgccatcctgaagctcatcgaacacccacatgtcctcaagctccacgacgtctacgagaacaagaaatatttgtacctggttctggagcacgtctcggggggtgagctattcgactacctggtaaagaaggggagactgacgcccaaggaggcccgaaagttcttccgccagattgtgtctgcgctggacttctgccacagctactccatctgccacagagacctaaagcccgagaacctgcttttggatgagaaaaacaacatccgcattgcagacttcggcatggcgtccctgcaggtgggggacagcctcctggagaccagctgcgggtccccccattatgcgtgtccagaggtgattaagggggaaaaatatgatggccgccgggcagacatgtggagctgtggagtcatcctcttcgccctgctcgtgggggctctgccctttgatgacgacaacctccgccagctgctggagaaggtgaaacggggcgtcttccacatgccccacttcattcctccagattgccagagcctcctgaggggaatgatcgaagtggagcccgaaaaaaggctcagtctggagcaaattcagaaacatccttggtacctaggcgggaaacacgagccagacccgtgcctggagccagcccctggccgccgggtagccatgcggagcctgccatccaacggagagctggaccccgacgtcctagagagcatggcatcactgggctgcttcagggaccgcgagaggctgcatcgcgagctgcgcagtgaggaggagaaccaagaaaagatgatatattatctgcttttggatcggaaggagcggtatcccagctgtgaggaccaggacctgcctccccggaatgatgttgaccccccccggaagcgtgtggattctcccatgctgagccgtcacgggaagcggcgaccagagcggaagtccatggaagtcctgagcatcaccgatgccgggggtggtggctcccctgtacccacccgacgggccttggagatggcccagcacagccagagatcccgtagcgtcagtggagcctccacgggtctgtcctccagccctctaagcagcccaaggagtccggtcttttccttttcaccggagccgggggctggagatgaggctcgaggcgggggctccccgacttccaaaacgcagacgctgccttctcggggccccaggggtgggggcgccggggagcagcccccgccccccagtgcccgctccacacccctgcccggccccccaggctccccgcgctcctctggcgggacccccttgcactcgcctctgcacacgccccgggccagtcccaccgggaccccggggacaacaccaccccccagccccggcggtggcgtcgggggagccgcctggaggagtcgtctcaactccatccgcaacagcttcctgggctcccctcgctttcaccggcgcaagatgcaggtccctaccgctgaggagatgtccagcttgacgccagagtcctccccggagctggcaaaacgctcctggttcgggaacttcatctccttggacaaagaagaacaaatattcctcgtgctaaaggacaaacctctcagcagcatcaaagcagacatcgtccatgcctttctgtcgatccccagcctgagtcacagtgtgctgtcacagaccagcttcagggccgagtacaaggccagtggcggcccctccgtcttccaaaagcccgtccgcttccaggtggacatcagctcctctgagggtccagagccctccccgcgacgggacggcagcggaggtggtggcatctactccgtcaccttcactctcatctcgggtcccagccgtcggttcaagcgagtggtggagaccatccaggcacagctcctgagcactcatgaccagccctccgtgcaggccctggcagacgagaagaacggggcccagacccggcctgctggtgccccaccccgaagcctgcagcccccacccggccgcccagacccagagctgagcagctctccccgccgaggcccccccaaggacaagaagctcctggccaccaacgggacccctctgccctgaccccacggggccggggagggaggggacccccctccaccccccttccgtgccccccaactgtgaatctgtaaataaggcccaaggaacatgtcgggaggggggtggacacaaaaaccggccttgccctgcagggatggggctccacaggccgtgcccaactgggggtggttctaggggaacagggggcgggggagctgtttctattttatttattgattaatttattattttatttattgatcaatctctctgcggggtggggtgggggagggacgggagctggttggggtggcttagcagatccggacagggccctctgtccctgtgtcgtccccaaccccctcttcccgggcccctcctcccctggtcctccccccacgaccttctgtacggatttgctctccggaaggaattctggtttcgcgtgatcctgcctgcgtccgtgtctctgattccgccggcggcaaaaaaaaaaaaaaaaaaaaaaaaaaaaaa

SEQ ID NO: 167 - DNA, 1881 bp, Homo Sapiens
ggtgagagagggcgtgcgtctctgtggttataaagttgggggtggagtggccgggagatgatggctgatgaagaggaagaagtcaagccgatcttgcagaaattgcaggaactcgtggatcagctctactcatttcgagactgctatttcgagacacatagtgttgaggatgctgggaggaagcaacaggatgtgcagaaggagatggagaaaaccctacagcagatggaagaagtagtgggttctgtccagggcaaggcacaagttctaatgctaactgggaaagcactaaatgtgactcctgactatagccctaaggctgaggagcttctgtcaaaggctgtgaagctggagcccgagctggtggaagcctggaaccagctgggtgaggtgtactggaaaaaaggggatgttgcagctgcccacacctgcttctcaggagccctcacccattgcaggaacaaagtctccttgcaaaacctgtcaatggtgcttcgtcagctgcggactgacactgaagatgaacattctcaccatgtcatggacagtgtccgacaggctaagttggctgttcagatggatgtccatgatggccgctcctggtatattcttgggaattcatatctttccctttacttctctactggccagaaccctaagatctcccagcaagccctcagtgcctatgcccaagcagagaaagttgacagaaaagcttctagcaatcctgaccttcatctgaacagggcgacgttgcataaatatgaagagagttatggggaggccctggagggcttctctcgggctgcagccctggaccctgcctggccagagccccggcaacgagagcaacaacttctggaattcctggatagattaaccagcctccttgagagtaagggaaaggtgaagaccaaaaagctgcagagcatgctgggaagcttgcgcccagcccatctaggcccttgcagtgatgggcactatcagtcagcctctgggcagaaagtgaccctggagctcaagccactgagtacgcttcagcctggggtgaacagcggtgccgtcatcctgggaaaggtggtatttagcctcaccacagaggagaaagtcccctttacatttggcctggtagattcagatggaccttgctatgcagtgatggtgtacaatatagtgcagagctggggagtgctcattggagactctgtagccattcctgagcccaacctgcggcttcaccgaattcagcacaaaggaaaggactattccttttccagtgttcgagtggagacgcccctcctgctagtggtgaatgggaagcctcagggatccagcagccaggctgttgccacagtggcatcgcgaccacagtgtgaatgacctttgacttgcatgctcaacagggagtggaggagaggagacaaggctctggacagccggtccagccacatccagtgattcagcagggatgggaggaatgttttaaatgaagactttctctttccctgcctgtattacacttcgtatctcttctctctcctctgtcctcatcatgttccagctctctacagggccacatactcttctggcatatctctcctgtctcttccactgctctctatgttttaagcaaagagcatggaattggtagaagtcttgggatcttgccatgggacagagtccccaaggttcctgttgttgcctccttcctaagcctcatatgtatatatcagttcagtatttattgctaaaggagggggcttaattttgtaatggcttttatttttagcaatttttatttttatttttgaactttaggtccttcctcttctttggggctggaacagaattaaatttgtttggaaaaaaaaaaaaaaaaaa

SEQ ID NO: 168 - DNA, 1586 bp, Homo Sapiens
agtggtggaggaacttccggcagcggcagctcaagtggccaaggcaagatgggtcaaagtcagagtggtggtcatggtcctggaggtggcaagaaggatgacaaggacaagaaaaagaaatatgaacctcctgtaccaactagagtggggaaaaagaagaagaaaacaaagggaccagatgctgccagcaaactgccactggtgacacctcacactcagtgccggttaaaattactgaagttagagagaattaaagactatcttctcatggaggaagaattcattagaaatcaggaacaaatgaaaccattagaagaaaagcaagaggaggaaagatcaaaagtggatgatctgagggggaccccgatgtcagtaggaaccttggaagagatcattgatgacaatcatgccatcgtgtctacatctgtgggctcagaacactacgtcagcattctttcatttgtagacaaggatctgctggaacctggctgctcggtcctgctcaaccacaaggtgcatgccgtgataggggtgctgatggatgacacggatcccctggtcacagtgatgaaggtagaaaaggccccccaggagacctatgcagatattggggggttggacaaccaaattcaggaaattaaggaatctgtggagcttcctctcacccatcctgaatattatgaagagatgggtataaagcctcctaagggggtcattctctatggtccacctggcacaggtaaaaccttgttagccaaagcagtagcaaaccaaacctcagccactttcttgagagtggttggctctgaacttattcagaagtacctaggtgatgggcccaaactcgtacgggaattgttccgagttgctgaagaacatgcaccgtccatcgtgtttattgatgaaattgacgccattgggacaaaaagatatgactccaattctggtggtgagagagaaattcagcgaacaatgttggaactgctgaaccagttggatggatttgattctaggggagatgtgaaagttatcatggccacaaaccgaatagaaactttggatccagcacttatcagaccaggccgcattgacaggaagattgagttccccctgcctgatgaaaagacgaagaagcgcatctttcagattcacacaagcaggatgacgctggctgatgatgtaaccctggacgacctgatcatggctaaagatgacctctctggtgctgacatcaaggcaatctgtacagaagctggtctgatggccttaagagaacgtagaatgaaagtaacaaatgaagacttcaaaaaatctaaagaaaatgttctttataagaaacaggaaggcacccctgaggggctgtatctctaatgaaccatggctgtcatcaggaaaatggttgggagatttctcaatccctgaaagggatgaggttgggggagttgcccagaggaatccctgttcccactgatttttattagcaaaacatcctgtgtcttttggagtacgatgtgtaagtgcccattgggtggcctgttggtcactgtgcagcagtctgcttcccaataaagcgtgctctttcacaa

SEQ ID NO: 169 - DNA, 3644 bp, Homo Sapiens
acagtcagcaccgccccagccaggcgcctgcgcgcccacgcactacctgccgggagttgtagtttcggctcggcagacccggcgagcccagtggccgcgctccggtgcggcggcgcccgaggcccgaggcggaagtgggacggccaagcagggaagcgagggctcgggatcgacggccgcggggcgccgacgaggagtgcaggactcaggaagggcgagtgcgcggcgacagagcccggggaaggaggcagggcaaggccgggcttgggggcaggtggtccgggcatccagccttgaagatgcacaagaggaaaggacccccgggacccccgggcagaggcgccgcggccgcccgccagctgggcctgctggttgacctctccccagatggcctgatgatccctgaggacggggctaacgatgaagaactggaggctgagttcttggctttggtcgggggccagcccccagccctggagaagctcaaaggcaaaggtcccttgccgatggaggccattgagaagatggccagcctgtgcatgagagacccggatgaggatgaggaggaggggacggatgaggacgacttggaggctgatgatgacctgctggcggagctaaatgaggtccttggagaggagcagaaggcttcagagaccccacctcctgtggcccagccgaagcctgaggcccctcatccggggctggagaccaccttgcaggagaggctggcgctctatcagacagcaattgaaagcgccagacaagctggagacagcgccaagatgcggcgctacgatcgggggcttaaaacactggaaaacctgctcgcctccatccgtaagggcaatgccattgacgaagcggacatcccgccgccagtggccataggaaaaggcccggcgtccacgcctacctacagccctgcacccacccagccggcccctagaatcgcgtcagccccagagcccagggtcaccctggagggaccttctgccaccgccccagcctcatctccaggcttggctaagccccagatgcccccaggtccctgcagccctggccctctggcccagttgcagagccgccagcgcgactacaagctggctgccctccacgccaagcagcagggagataccactgctgccgctagacacttccgcgtggctaagagctttgatgctgtcttggaggccctgagccggggtgagcccgtggacctctcctgcctgccccctccacccgaccagctgcccccagacccaccgtcaccaccgtcgcagcctccgacccccgctacggcgccctccacaacagaggtgcccccacccccgaggaccctgctggaggcgctggagcagcggatggagcggtaccaggtggccgcagcccaggccaagagcaagggggaccagcggaaagctcgaatgcacgagcgcatcgtcaagcaataccaagatgccatccgagcccacaaggctggccgagccgtggatgtcgctgaattgcccgtgcccccaggcttccccccaatccagggcctggaggccaccaagcccacccagcagagtctggtgggtgtcctggagactgccatgaagctggccaaccaggatgaaggcccagaggatgaagaggatgaggtgcctaagaagcagaacagccctgtggcccccacagcccagcccaaagccccaccctcaagaactccccagtcgggatcagccccaacagccaaagcgccccccaaagccacatccaccagagcccagcagcagctggccttcctagagggccgcaagaagcagctcctgcaggccgcactgcgagccaagcagaaaaacgacgtggagggtgccaagatgcacctgcgccaagccaagggactggagcctatgctggaggcctcgcgcaatgggctgcctgtggacatcaccaaggtgccgcctgcccctgtcaacaaggacgactttgccctggtccagcggcctggcccgggtctgtctcaggaggccgcccggcgctatggtgaactcaccaagctcatacggcagcagcacgagatgtgcctgaaccactcaaaccaattcacccagctgggcaacatcactgaaaccaccaagtttgaaaagttggcggaggactgtaagcggagcatggacattctgaagcaagccttcgtccggggtctccccacgcccaccgcccgctttgagcaaaggaccttcagcgtcatcaagatcttccctgacctcagcagcaacgacatgctcctcttcatcgtgaagggcatcaacttgcccacacccccaggactgtcccctggcgatctggatgtctttgttcggtttgacttcccctatcccaacgtggaagaagctcagaaagacaagaccagtgtgatcaagaacacagactcccctgagttcaaggagcagttcaaactctgcatcaaccgcagccaccgtggcttccgaagggccatccagaccaagggcatcaagttcgaagtggttcacaagggggggctgttcaagactgaccgggtgctggggacagcccagctgaagctggatgcactggagatagcatgtgaggtccgggagatccttgaggtcctggatggtcgccggcccacaggggggcgactggaggtaatggtccggattcgggagccactgacagcccagcagttggagacgacgacagagaggtggctggtcattgaccctgtgccggcagctgtgcccacacaggttgctgggcccaaagggaaggcccctcctgtgcctgcccctgcaagggagtcagggaacagatcagcccggcccctgcatagcctcagtgtgctggcgtttgaccaagagcgtctggagcggaagatcctggccctcaggcaggcgcggcggccggtgcccccagaagtggcccagcagtaccaggacatcatgcaacgcagccagtggcagagggcacagctggagcaggggggtgtgggcatccgacgggaatacgcagcccagctggagcggcagctgcagttctacacggaggctgcccggcgcctgggcaacgatggcagcagggatgctgcaaaggaggcgctctataggcggaatctggtagagagtgagctgcagcggctccgcaggtgaggagcccatggggcgggcagcccccagaaagcgggcagcaggccccgataccgggaagagccgacacagccacgaaccagacaagcagacaatcagcggacaatcggttctggactcacccctcatccgggcccccagccccgccagagcctccgtggctgcgggtgttgggaaccatgcctgccagccagtatgtgcccctcacccaggcctggctgggccctggagagtcctgtttgcacagcccaggggtgtccggcctctggcccgccccggagcagggagggtggctggggccaagccccgagggcccctgcaagcactttacttcctgttcctccccagccttaaccccaaagccctcctgcaccccaaagaagccactgaggctggccgagccacactgtctccccaggggcgtcgacctggcccagctgggtccccagggccagcacatggaataaaatagccagggccacactcagaaaa

SEQ ID NO: 170 - DNA, 2039 bp, Homo Sapiens
cgggcgggcaggcgggcaggccggcaggcgggtgcgcggagggctggtaccccgcagcaggtgggcggggtgcggttggcggcggcggctgggccgggggctgccggctgcgctcgggccgtgcgcggcggccgtgcgggcacgccatggacttcaacatgaagaagctggcgtcggacgcgggcatcttcttcacccgggcggtgcagttcacggaggagaaatttggccaggctgagaagactgagcttgatgcccactttgaaaaccttctggcccgggcagacagcaccaagaactggacagagaagatcttgaggcagacagaggtgctgctgcagcccaaccccagtgcccgagtggaggagttcctgtatgagaagctggacaggaaggtcccctcaagggtcaccaacggggagctgctggctcagtacatggcagacgcggccagtgagctggggccgaccaccccctatgggaagacactgatcaaggtggcagaagctgaaaagcaactgggagccgcggagagggattttatccacacggcctccatcagcttcctcacacccttgcgcaacttcctggagggggactggaagaccatctcgaaggagaggcggctcctccaaaaccggcgtctggacttggatgcctgcaaagcgaggctgaagaaggccaaggctgcagaagccaaagccacgacggtgcctgactttcaggagactagacctcgtaattacattctctcggccagcgcctccgcgctctggaatgatgaagtggacaaggccgagcaggagctccgcgtggcccagacagagtttgaccggcaagcagaagtgacccgtctcttgctggagggaatcagtagcactcacgtgaaccacctgcgctgcctccacgagttcgtcaagtctcagacaacctactacgcacagtgctaccgccacatgctggacttgcagaagcagctgggcagatttcccggcaccttcgtgggcaccacagagcccgcctccccacccctgagcagcacctcacccaccactgctgcggccactatgcctgtggtgccctctgtggccagcctggcccctccaggggaggcctcgctctgcctggaagaggtggccccccctgccagtgggacccgcaaagctcgggtgctctatgactacgaggcagccgacagcagtgagctggccctgctggctgatgagctcatcactgtctacagcctgcctggcatggaccctgactggctcattggcgagagaggcaacaagaagggcaaggtccctgtcacctacttggaactgctcagctaggcaggtgcccccatcccccccgcattctggcctaggcaggagaggatgggcgcagccctgccacttaacttgtttgttggtgacacagttgttcagagtggggagaattcaccccattctgtccctgcccctagtcacctagctgtgagggtgcctgaggctgaatggctccacccctcccccagccctgcttctgacctgtggctctggagcccctgcccctgcctgcatccccgagcaccccaccctccaggctccactaaggagggaggggctgtctgcagcagctgcactcagcacctaggccagggtggggccgccgcagatgggctcaggaagccccaggtgcactcagcgagagccctgcctttcagttgccaaaagctgcatcaggggaatgcggcaaggcacacagggctctggcagcccctggggactgggcgctgcccctgggaggggagagcctggccagggctggtgttgggcccggagcagcatcttccggtgctatcctcccctcccacccctcacagctcaagccaagtccagcggccgcagtcttcacctctccacactcactttttatctggtgtttttacttctgcctgcgtttgctctctagccaataaaccgtccttgtgtgcgagtcaaaaaaaaaaaaaaaaaaaaaaaaaaaaaaaaaaaaaaaaaaaaaaaaaaaaaaaa

SEQ ID NO: 171 - DNA, 2602 bp, Homo Sapiens
ccgcctcgcgcctcccgcctcccgcctcccgcctccctccagctgcgagtgcggcctcggctggcggcggcaccaggccacagttgtaagggatcttgtggctgtcaggatggcagaggagcaggagttcacccagctctgcaagttgcctgcacagccctcacacccacactgcgtgaacaacacctaccgcagcgcacagcactcccaggctctgctccgagggctgctggctctccgggacagcggaatcctcttcgatgttgtgctggtggtggagggcagacacatcgaggcccatcgcatcctgctggctgcgtcctgcgattacttcagaggaatgtttgctgggggattgaaggagatggaacaggaagaggtcctgatccacggtgtgtcctacaatgctatgtgccaaatcctacatttcatatacacctccgagctggagctcagcctgagcaatgtacaagagacactggtggctgcctgccagcttcagatcccagaaattatccatttctgctgtgatttcctcatgtcctgggtggacgaagagaacattctcgatgtctaccggctggcagagctgtttgacttgagccgcctgactgagcaactggacacctatatcctcaaaaactttgtggccttctctcggactgacaagtaccgccagcttccattggagaaggtctactccctcctcagcagcaatcgcctggaggtctcctgcgagaccgaggtatatgagggggcccttctctaccattatagcctggagcaggtgcaggctgaccagatctcgctgcacgagcccccaaagctccttgagacagtgcggtttccgctgatggaagctgaggtcctgcagcggctgcatgacaagctggaccccagccctttgagggacacagtggccagcgccctcatgtaccaccggaacgagagcctacagcccagcctgcagagcccgcaaacggagctgcggtcggacttccagtgcgttgtgggcttcgggggcattcactccacgccgtccactgtcctcagcgaccaggccaagtatctaaaccccttactgggagagtggaagcacttcactgcctccctggccccccgcatgtccaaccagggcatcgcggtgctcaacaacttcgtatacttgattggaggggacaacaatgtccaaggatttcgagcagagtcccgatgctggaggtatgacccacggcacaaccgctggttccagatccagtccctgcagcaggagcacgccgacctgtccgtgtgtgttgtaggcaggtacatctacgctgtggcgggccgtgactaccacaatgacctgaatgctgtggagcgctacgaccctgccaccaactcctgggcatacgtggccccactcaagagggaggtgtatgcccacgcaggcgcgacgctggaggggaagatgtatatcacctgcggccgcagaggggaggattacctgaaagagacacactgctacgatccaggcagcaacacttggcacacactggctgatgggcctgtgcggcgcgcctggcacggcatggcaaccctcctcaacaagctgtatgtgatcgggggcagcaacaacgatgccggatacaggagggacgtgcaccaggtggcctgctacagctgcacgtctggacagtggtcatctgtctgcccactccctgctgggcacggtgagcctggcattgctgtgctggacaacaggatctatgtgttaggtggccgctcacacaaccgcggcagccgcacaggctacgtgcacatttacgatgtggagaaggactgctgggaggaagggccccagctggacaactccatctcaggcctggcggcctgtgtgctcaccctgccccgctccctgctccttgagccgccccgcgggacccctgaccgcagccaggccgacccggactttgcctctgaggtgatgagtgtgtctgactgggaggagtttgacaactccagtgaggactaggctccctgtgcctggcatcagagggaagggaggctggggctgcagggcagtgaaacccacgcagcctaggccagagcactttactccaggcagggcccctgcccctgttggccacagcttatgggccctgccctctttcttcacaccagccccttggccagcctgccgcaggcatctcagggccatgcagatcccaggctgtggattacgtcactgcaggaactgcttctgaaaggctttggccttcctcagtgagccctggaggggttggccttctctcctccctgcctagatcagtccttctccaaaaggacctgggagctggcagcctgggcaggggggctgaggcacgtggtagccctctttctgtgaatggggtggggctgtgggggcagctggggttggaggatgagagctcctgaggggcagaggagcagagatgcatcagctcgcctgggactggctctgtgataaaaagacccctcccgctgggttttcagaccccatgttgttggtcaatgaaataaagcatcttacagaaggtgttaactgttaaaaaaaaaaaaaaaaaaaaaaaaaaaaaaaaaa

SEQ ID NO: 172 - DNA, 2733 bp, Homo Sapiens
gtaggtgcgtgcccgggactctgccgatgcgggccgcgccccctggggccaagagactccacgtcccgctcagggcaaagggtgtggggagaagcggtcacgcccctcggctggaatccgtgaggaccaggtctttttcagtgtgctcaatatggtcaccaagcctggaaacatagagtctcaccctgttgcttaggcagatggcgcgatctcggctcctgggttcaagcaattctcctgcctcagcctcctgaatagccgggattacagtcgtccagcatgctctgcccaccccacgccgaggtgcactgaccatgagcctcaactcctccctcagctgcaggaaggagctgagtaatctcactgaggaggagggtggcgaagggggcgtcatcatcacccagttcatcgccatcattgtcatcaccatttttgtctgcctgggaaacctggtcatcgtggtcaccttgtacaagaagtcctacctcctcaccctcagcaacaagttcgtcttcagcctgactctgtccaacttcctgctgtccgtgttggtgctgccttttgtggtgacgagctccatccgcagggaatggatctttggtgtagtgtggtgcaacttctctgccctcctctacctgctgatcagctctgccagcatgctaaccctcggggtcattgccatcgaccgctactatgctgtcctgtaccccatggtgtaccccatgaagatcacagggaaccgggctgtgatggcacttgtctacatctggcttcactcgctcatcggctgcctgccacccctgtttggttggtcatccgtggagtttgacgagttcaaatggatgtgtgtggctgcttggcaccgggagcctggctacacggccttctggcagatctggtgtgccctcttcccctttctggtcatgctggtgtgctatggcttcatcttccgcgtggccagggtcaaggcacgcaaggtgcactgtggcacagtcgtcatcgtggaggaggatgctcagaggaccgggaggaagaactccagcacctccacctcctcttcaggcagcaggaggaatgcctttcagggtgtggtctactcggccaaccagtgcaaagccctcatcaccatcctggtggtcctcggtgccttcatggtcacctggggcccctacatggttgtcatcgcctctgaggccctctgggggaaaagctccgtctccccgagcctggagacttgggccacatggctgtcctttgccagcgctgtctgccaccccctgatctatggactctggaacaagacagttcgcaaagaactactgggcatgtgctttggggaccggtattatcgggaaccatttgtgcaacgacagaggacttccaggctcttcagcatttccaacaggatcacagacctgggcctgtccccacacctcactgcgctcatggcaggtggacagcccctggggcacagcagcagcacgggggacactggcttcagctgctcccaggactcagggacagatatgatgctgcttgaggactacacgtctgatgacaaccctccctctcactgcacttgcccacccaagagaaggagctcggtgacatttgaggatgaagtggaacaaatcaaagaagctgccaagaactcgattcttcatgtgaaagctgaagtacacaagtccttggacagttacgcagcaagcttggccaaagccattgaggccgaagccaaaatcaacttatttggggaggaggctttgccaggggtcttggttacagcacggactgtcccggggggcggcttcgggggccgccgaggcagcagaactcttgtgagccagaggctgcagttgcagagcatcgaagaaggagatgttttagctgccgagcagagatgagggcctcagggtgccgtggggctgcagcctgagaggctggcccggggaggagttcccatcaccgcctgtgccgcggccttgggagcatgtcactgtgtacagctggccacacacagggaaggagcagcatctggtatgcagccaccaggacaaggactgaaaataatgtctacagtccacagcttcagcatttccagagaccacatgtgagcttcttttaggtcccagtgatgggaccagaagcatctaaagcaaaaaaaaaaccaaaaaaaaatctagagatgtggctgtggctttttgggaggtggggcatgggaggaccagagacgaagggcttggaaggagacccccacatgcatcatttcctcctcttcacagtgtgctgggagtccagccgtgcactgtgccagatgcctcaggaggagaaccctccccagtgtactgtgaaggatgacacagcacttcttcctaatgacacgcgaccgtcctggtgcctctacatggttgatgcgggcagtgtgggaccctcagttctaggactggtccgcagagaaagcacccaggagcagagcgcttcggagcggtcctcagtggcgccacctgctggtgctaatagggacagccacaggcctcttgcagactggcccaccctgcctacttccctactgacaagttctttggtatttcaaaagggagaaaccactataaaagacaagaggaagggcaggtactaggtgtttcatttccagaattaaaaaaaaaatccatttaaaaaaaaaaaaaaaaaaaaaaaaaaaaaaaaaaaaaaaaaaaaaaaaaaaaaaaaaaa

SEQ ID NO: 173 - DNA, 3468 bp, Homo Sapiens
ctcttacaacattggctgccggcgtgactttgaccgcttcccggtgcgttaccggcagctgaacccacccggcgccacgggactttgacgcgtgctctgcgcttgccatgagactcctgggagctgcagccgtcgcggctctggggcgcggaagggcccccgcctccctaggctggcagaggaagcaggttaattggaaggcctgccgatggtcttcatcaggggtgattcctaatgaaaaaatacgaaatattggaatctcagctcacattgattctgggaaaactacattaacagaacgagtcctttactacactggcagaattgcaaagatgcatgaggtgaaaggtaaagatggagttggtgctgtcatggattccatggaactagagagacaaagaggaatcactattcagtcagcagccacttacaccatgtggaaagatgtcaatattaacattatagatactcctgggcatgtggacttcacaatagaagtggaaagggccctgagagtgttggatggtgcagtccttgttctctgtgctgttggaggggtacagtgccagaccatgactgtcaatcgtcagatgaagcgctacaacgttccgtttctaacttttattaacaaattggaccgaatgggctccaacccagccagggccctgcagcaaatgaggtctaaactaaatcataatgcagcgtttatgcagatacccatgggtttggagggtaattttaaaggtattgtagatcttattgaggaacgagccatctattttgatggagactttggtcagattgttcgatatggtgagattccagctgaattaagggcggcggccactgaccaccggcaggagctaattgaatgtgttgccaattcagatgaacagcttggtgagatgtttctggaagaaaaaatcccctcgatttctgatttaaagctagcaattcgaagagctactctgaaaagatcatttactcctgtatttttgggaagcgccttgaagaacaaaggagttcagcctcttttagatgctgttttagaatacctcccaaatccatctgaagtccagaactatgctattctcaataaagaggatgactcaaaagagaaaaccaaaatcctaatgaactccagtagagacaattcccacccatttgtaggcctggcttttaaactggaggtaggtcgatttggacaattaacttatgttcgcagttatcagggagagctaaagaagggtgacaccatctataacacaaggacaagaaagaaagtacggttgcaacggctggctcgcatgcatgccgacatgatggaggatgttgaggaagtatatgccggagacatctgtgcattgtttggcattgactgtgctagtggagacacattcacagacaaagccaacagcggcctttctatggagtcaattcatgttcctgatcctgtcatttcaatagcaatgaagccttctaacaagaacgatctggaaaaattttcaaaaggtattggcaggtttacaagagaagatcccacatttaaagtatactttgacactgagaacaaagagacagttatatctggaatgggagaattacacctggaaatctatgctcagaggctggaaagagagtatggctgtccttgtatcacaggaaagccaaaagttgcctttcgagagaccattactgcccctgtcccgtttgactttacacataaaaaacaatcaggtggtgcaggccagtatggaaaagtaataggtgtcctggagcctctggacccagaggactacactaaattggaattttcagatgaaacattcggatcaaatattccaaagcagtttgtgcctgctgtagaaaaggggtttttagatgcctgcgagaagggccctctttctggtcacaagctctctgggctccggtttgtcctgcaagatggagcacaccacatggttgattctaatgaaatctctttcatccgagcaggagaaggtgctcttaaacaagccttggcaaatgcaacattatgtattcttgaacctattatggctgtggaagttgtagctccaaatgaatttcagggacaagtaattgcaggaattaaccgacgccatggggtaatcactgggcaagatggagttgaggactattttacactgtatgcagatgtccctctaaatgatatgtttggttattccactgaacttaggtcatgcacagagggaaagggagaatacacaatggagtatagcaggtatcagccatgtttaccatccacacaagaagacgtcattaataagtatttggaagctacaggtcaacttcctgttaaaaaaggaaaagccaagaactaactttgcttactgtgagttgactgactctaattgaatctgcgtggttttgatactttgatggattccagtggaataaattcaggctgctgaaacaagaaattctgagcccaggaagcgggctcttctttcttcaaaagaagcccttcttgttcatattcaggagcttctgttatattcaaaggtaattctatgtctatctcaactctattgattggttttatagttcattgaaaatcctcaaataaaatataattattactgaaatatgtttaatatttaaggggaaaagagactaatttcagttatacttttaagcttagaatgtatgttcatttccaaattttgtatcataagagttttcaacatagagaaaagctgaaaaaatgcaaagaataaccacatactttccatctaccttcctttgttaacgggttgtttatcatataataatttgttttgtcatatttgctttcactgtctattatctgtttaagtctcataactctatttttagtttgctgaagacttgaaagtgaatcgcatatatcatgacacttcttggagtgtcattaatgggcaggcttttctgttgaagagtggattccgtatgttcttcatagagagtgtttttcagattcttcattgggatattaaaatattagccaaatttctctctgttttatatatgtctgtttatttcagtttgtggtttctgcaaatttgtaactgcctctgttttaggagtataagtattacttccttgtggtctattgtgaagtaaaaagtagacccttgcatatactattcttgtttgtgttcatcttaatgtttttgtacagctaaatcaaatgtaatttatagagttagtttcatcaacctaatgaatgctagttaaatttgaattccttggaatttatcgtatattgtattcactgagattatgaagggacaaatgttaatcttttgtttccagaaaaagttgggctttcccaagcagttctattacccggttcagaattgcttcatccaaaaatcatctgatggtatagatggatcctagtccttttcattacctgatggtagaaataaaataattgattttaaa

SEQ ID NO: 174 - DNA, 2515 bp, Homo Sapiens
cggcggcagcagcccatgcctccggtgcaacagctgcgcctcctccggtgccccggcggcgggggcgggagataacctgtccctgctgctccgcacctcctcgcccggcggcgccttccggacccgcacctcctcgccgctgtcgggctcgtcctgctgctgctgctgctgctcgtcgcgccggggcagccagctcaatgtgagcgagctgacgccgtccagccatgccagtgcgctccggcagcagtacgcgcagcagtccgcgcagcagtcggcgtccgcctcccagtaccaccagtgccacagcctgcagcccgccgccagccccacgggcagcctcggcagtctgggctccgggcccccgctctcgcaccaccaccaccacccgcacccggcgcaccaccagcaccaccagccccaggcgcgccgcgagagcaaccccttcaccgaaatagccatgagcagctgcaggtacaacgggggcgtcatgcggccgctcagcaacttgagcgcgtcccgccggaacctgcacgagatggactcagaggcgcagcccctgcagccccccgcgtctgtcggaggaggtggcggcgcgtcctccccgtctgcagccgctgccgccgccgccgctgtttcgtcctcagcccccgagatcgtggtgtctaagcccgagcacaacaactccaacaacctggcgctctatggaaccggcggcggaggcagcactggaggaggcggcggcggtggcgggagcgggcacggcagcagcagtggcaccaagtccagcaaaaagaaaaaccagaacatcggctacaagctgggccaccggcgcgccctgttcgaaaagcgcaagcggctcagcgactacgcgctcatcttcggcatgttcggcatcgtggtcatggtcatcgagaccgagctgtcgtggggcgcctacgacaaggcgtcgctgtattccttagctctgaaatgccttatcagtctctccacgatcatcctgctcggtctgatcatcgtgtaccacgccagggaaatacagttgttcatggtggacaatggagcagatgactggagaatagccatgacttatgagcgtattttcttcatctgcttggaaatactggtgtgtgctattcatcccatacctgggaattatacattcacatggacggcccggcttgccttctcctatgccccatccacaaccaccgctgatgtggatattattttatctataccaatgttcttaagactctatctgattgccagagtcatgcttttacatagcaaacttttcactgatgcctcctctagaagcattggagcacttaataagataaacttcaatacacgttttgttatgaagactttaatgactatatgcccaggaactgtactcttggtttttagtatctcattatggataattgccgcatggactgtccgagcttgtgaaaggtaccatgatcaacaggatgttactagcaacttccttggagcgatgtggttgatatcaataacttttctctccattggttatggtgacatggtacctaacacatactgtggaaaaggagtctgcttacttactggaattatgggtgctggttgcacagccctggtggtagctgtagtggcaaggaagctagaacttaccaaagcagaaaaacacgtgcacaatttcatgatggatactcagctgactaaaagagtaaaaaatgcagctgccaatgtactcagggaaacatggctaatttacaaaaatacaaagctagtgaaaaagatagatcatgcaaaagtaagaaaacatcaacgaaaattcctgcaagctattcatcaattaagaagtgtaaaaatggagcagaggaaactgaatgaccaagcaaacactttggtggacttggcaaagacccagaacatcatgtatgatatgatttctgacttaaacgaaaggagtgaagacttcgagaagaggattgttaccctggaaacaaaactagagactttgattggtagcatccacgccctccctgggctcataagccagaccatcaggcagcagcagagagatttcattgaggctcagatggagagctacgacaagcacgtcacttacaatgctgagcggtcccggtcctcgtccaggaggcggcggtcctcttccacagcaccaccaacttcatcagagagtagctagaagagaataagttaaccacaaaataagactttttgccatcatatggtcaatattttagcttttattgtaaagcccctatggttctaatcagcgttatccgggttctgatgtcagaatcctgggaacctgaacactaagttttaggccaaaatgagtgaaaactctttttttttctttcagatgcacagggaatgcacctattattgctatatagattgttcctcctgtaatttcactaactttttattcatgcacttcaaacaaactttactactacattatatgatatataataaaaaaagttaatttctgcacata

SEQ ID NO: 175 - DNA, 5426 bp, Homo Sapiens
ggggaggaagaaaggcgaaggcaaggcgaaggggtggagagtgatatgaagagcgagagaaaagagaggacagcggacgagcagatccggtatctggaatcccggcgcctagaacgtgtttttcgggagagcaaaggctgtgtctacggcagcctggggatatagcctctccttccgatgaaaagagaaaggaagaatggactacagccaccaaacgtccctagtcccatgtggacaagataaatacatttccaaaaatgaacttctcttgcatctgaagacctacaacttgtactatgaaggccagaatttacagctccggcaccgggaggaagaagacgagttcattgtggaggggctcctgaacatctcctggggcctgcgccggcccattcgcctgcagatgcaggatgacaacgaacgcattcgaccccctccatcctcctcctcctggcactctggctgtaacctgggggctcagggaaccactctgaagcccctgactgtgcccaaagttcagatctcagaggtggatgccccgccggagggtgaccagatgccaagctccacagactccaggggcctgaagcccctgcaggaggacaccccacagctgatgcgcacacgcagtgatgttggggtgcgtcgccgtggcaatgtgaggacgcctagtgaccagcggcgaatcagacgccaccgcttctccatcaacggccatttctacaaccataagacatccgtgttcacaccagcctatggctctgtcaccaacgtccgcatcaacagcaccatgaccaccccacaggtcctgaagctgctgctcaacaaatttaagattgagaattcagcagaggagtttgccttgtacgtggtccatacgagtggtgagaaacagaagctgaaggccaccgattacccgctgattgcccgaatcctccagggcccatgtgagcagatctccaaagtgttcctaatggagaaggaccaggtggaggaagtcacctacgacgtggcccagtatataaagttcgagatgccggtacttaaaagcttcattcagaagctccaggaggaagaagatcgggaagtaaagaagctgatgcgcaagtacaccgtgctccggctaatgattcgacagaggctggaggagatagccgagaccccagcaacaatctgagccatgagaacgaggggatctgggcaccccaggaaccgccattgcccataagacccccaggaagctaggcactttctttccatggaaacatttagacacaaacctccccagctccggccaagccatcatttgctacctggagctggatgtagaagtcagcagacagctccctatccctggacccctgccctccttttttctgctcacaaggacttttgattttagttataaggaggacccaaaatgtgtgtgtgtacatgtgtgtgcacacatggtacgtgtccatgtgcctacctgatactttcacatgtaattaaattccaggcaaccagcacaagagccgtgagcttggcacatgtgctgctcgtgagcaggaaaatcagaggagccactgatctgagtggtatttaggttgaaggaaagatttctcctctcaagtgccagggagcagccacacgtctgtctgtgtttagagagggaagagggttctccaggttcaccatttgggttgtttatatgttggtagaaattctccctgtatgcctagaaggatcagtgaatgtaagagccttggaaattaacaaaataacagccacataaccttgcggcaagtctgatggaaagaaaaagataaaccatccgtggggtagatgcaataagcccacgtatttttacactggaaacgttgattgttttaaatgacaaagacatatgtgatgttctatgtggaaacctgtgaagagtggattctgcctccatctctgcctccatggctacctttaggagacagagaagatcctgtgtgtttctctgtacccagctgacagcctgtctctatggcgcttccttgagtggaaggaaatgtctcaagaaacaaagatctcgctggtgcgtacacagtgctgaccagctagtgtggccagggcctggtggcctggtggccaggaagtttcaggttgaagggaaatgtcgaggctacctgcagatatgacaggtgccttgaacgcagcccatcttcatgtcatcaaaggtcttcctgcacttgaagctggggcgatgtttgcagtcaagaccattctttccaacctctgggttcttgcaagttgccctcaccttgtgtgtggagatgcattccaagaatgaagcctcatcttgctactgagtgtggggttcagggaagctctttaggccacctggtgaaggtgcatggggaggatggagcttctcctcagctcctctgagcagccacctatgtgatctttaaatccaaccccaatgggagaaaagggcaagaacagtctgtgccctgggactcctatcaggaagcttgacaggcagctgggcatcagtgcagctgatatcgtttgaggagggagacagatgcttggacctgggtgcctggctatggagattgaccaagcaagatcaggagctcctgatagcaggcgtctttgagcctagctggggtagaggcactgcccatctcttctccaccttctctccacagaatgtttgcagagctgggcagttgaggaaaggacagcccctggttggtgcctccaaaggaaggtggacttttttggtggagacgtttctgccctgggcaccctcctgcccccgattcatacctatggcttcttgagaaggctcacagctgtggtcttaacgtagactgcagaaagatggcatgcggcccctggcatttcgccaagggttttatagcaagtctccttcctccatagggacagcagcaccagccctgtggggcatggagtggaagcccagaagggcttctgcaagctgcacagaactggggtaagaagacaaagagtagccaccgggagaggcttcctttgttacagctgggaaagaacagttctgtgaatgcaaacacctcctgagttttgcaattgagaaaatgatttggagaacttctcttctggtaatttttattttgaatgttcagggccttagttggccccagtaattctccttggaggacttgggagaagaatttccacaaagcaaactactaaccactagctcttactggacagcgatttctggcttataagagttctctttgatttgcactagcactacgatagtgttagatggggaaatactgcaacatgtccagttggccagatcactttccaagggagcgatactaaggcagactcagctttttaaagatgggaggtcaggaggtggaagtgagaggagatcccatctcacacaacacacttccacgtaatgcagaccacacttttccattttgtcctgccctcttgagaggtcatttctcacgtcctaagaacctgatcagaaattttggaagggttctttgaaatagcagcagttgaaacagagacactttgccacagtgtggagcagattttctcactggtatcacatggtcttgcagttttgaactcttcgaccgatttgtgggagtttatgtaattgcgtgcaatgaacctgaaattgtgtaaaggacaaaagaccagtttatagggttgggttttttttccaacttgtgaaaagcagtttagctgcatctgtctccccaccacccccaccccgggaggggcttatgttacaaggtgatcaagtgaaggaaaaacctgagcctatctggctgggatggtggaattaagcacaaggtcacattctctgtgatcacatgagagggaaggtgatgacttaaatggcagggggtggggattatcttggggagaggctgaaaagcacaaaagatagtcttccctgtacgtattggtgaagaacgtgcacaaggctggatggacttcaacttggagttgagttgaggcaagaggatttctggatattagtcacccatctgcaagaaaaatgctgaggcctcgggtcaagattttgatctgagacatgctgatgcttcaaggagaaatattttcacaatcctctcttccctcaccagaagagaacagtactctctcctagaaacctctaggtaaacacattttatcctaatatcggtagcatataatgccccccccaaaatatctgttttccatgcaaaaaagtctcaacaagaagtctgtggagttgagtggttacttcaaagtgtcaggagagtgaagaaattggccacagaagagcaagaagctctcttaagaaaagggaattctctttaaagaaaccaccaccaacaacaaaacaaccaaaaaccatgttttatgtcaaagctctgtagcacagagaatgtggtgtcacagatacatcgccgagagaggtttctttctttcttttttttttttttgagacagagtctggttctgtttcccaggctggagtgcagtggtgggatctcagctcactgcaacatccgcctctggggttcaagtgattctcctgtctcagcctcccaagtagctggaattacagggacccgccaccacgcccggctaatttttttgtgtggttttagtagaggtggggtttcaccatcttggccaggctggtcttgaactcctgacctcgtgatccacccgcctaggcctcccaaagtgttgggattacaggcgtgagccactgtgcccagccaaaagagaaatttctacatgaacaaggcaatttcagtgtcttacagcggccaaaccatgacgtgaagaatgagataggagacaggagatcaccataagcgtccctgatatagcagcacacattttcacgtttccacttaaatcgttttgcacaaagtcttgcttcgctcagatgagatgagatatgatttcctagagatgtaaaaataagaatgaatgtggcgcccccttcttccagatgtaatagaaagctctgccctatcacaaggggggtgttgaagcgccccttgtgttttaactgtatttaactgagcacaagatgcacaagctgtggtgggaaaccctcagtttacctttggagtcttccctgcagatcgcagacctgtttccaggctgatgtttctggtgtgtaattgctagcgtttctgaagggttttcccaattgttttagccttgtgaagtattcttaattataacttgcctttcagcgatggtacatgacttgattcaacgtttggttctgaacttacacactgatgcgtttactcatctaacataatctgacagggcctcagcaagggagccatacatttttgtaacattttgatatgttttaatgcatctgacttagatcttactgaaataaagcacttttcaaagag

SEQ ID NO: 176 - DNA, 1614 bp, Homo Sapiens
aacgggcacttccggagccgggcgtctacagaccgcggccaccttccacctgcgcccgaggcagacggtgcaggggcctccgggacaggcgtctgaggcctgctccgcagcgcgggcccgggggcgggcctaggggcggggcctgctgtggtgcgctcaggcaccgcgctggccacctgtgcccgggtcctagtggcggccgcagtgtcgcaggccggagggaagatggcggcgccctggtggcgagccgcgctgtgcgagtgtcggagatggcggggcttcagcacctcggccgtcctgggccgccggacacccccgctggggccgatgcccaacagtgacatcgacttgagcaacctggagcggctggagaagtaccggagcttcgaccgctaccggcgccgagcagagcaggaggcgcaggccccgcactggtggcggacctaccgagagtatttcggggagaagacagatcccaaagagaagattgatattgggctgcctccacccaaagtctcccggacccaacagctactggaacggaaacaggccatccaggagcttcgggccaatgtggaagaggagcgggctgcccgcctccgcacagccagtgtcccgctggatgccgtgcgggccgagtgggagaggacctgtggcccctaccacaagcagcgtctggctgagtattacggcctctaccgagacctgttccacggtgccacctttgtgccccgagtccccctgcacgtggcctacgctgtgggtgaggatgacctgatgcctgtgtactgtggcaatgaggtgactccaaccgaggctgcccaagcgccagaggtgacctatgaggcagaagagggctccttgtggacgttgctactcactagcttggatgggcacctgctggagccagatgctgagtacctccactggctgctaaccaacatcccgggtaaccgggtggctgaaggacaggtgacgtgtccctacctcccccccttccctgcccgaggctccggcatccaccgtcttgccttcctgctcttcaagcaggaccagccgattgacttctctgaggacgcacgcccctcaccctgctatcagctggcccagcggaccttccgcacttttgatttctacaagaaacaccaagaaaccatgactccagccggcttgtccttcttccagtgccgctgggatgactccgtcacctacatcttccaccagcttctggacatgcgggagccggtgtttgagttcgtgcggccgcccccttaccaccccaagcagaagcgcttcccccaccggcagcccctgcgctacctggaccggtacagggacagtcatgagcccacctatggcatctactaaggagccagagtgtgcgcatttcagagcatgggattgatcggcagcaagagtaaagacacagctccagaggcccacactgtggggtctgggccctgccttaggcagcccccctctttggccccctcccgtcaggcccagggcttggagtgaaagtgactctcaggtggtggggtggggaatgtgaataaacatgatttcttgccgggcaaaaaaaaaaaaaaaaaaaaaaaaaaaaaaaaaaaaaaa

SEQ ID NO: 177 - DNA, 3396 bp, Homo Sapiens
aatctgccattttctgtccctgagtgagtctctggcgtcccaaattgcctgtttttctcgcaggctctattccgttcgctggttcgccacctcaggggaacgatggccatggagtccacagccactgccgccgtcgccgcggagctggtttctgccgacaaaattgaagatgttcctgctccttctacatctgcagataaagtggagagcaaccattaatctgctttctgtcactgaagatgggttgcattttgtagaatattatctaaatagaatcatacatctggatgtggatagtgaagctaagaaactattgggtttaggacagaaacatctggtgatgggggatattccagcagctgtcaatgcattccaggaagcagctagtcttttaggtaagaagtatggagagacagctaatgagtgtggagaagccttctttttctatgggaaatcacttctggagttggcaagaatggagaatggtgtgttgggaaacgccttggaaggtgtgcatgtggaagaggaagaaggagaaaaaacagaagatgaatctctggtagaaaataatgataacatagatgaggaagcaagggaagagttgagagaacaggtttatgacgccatgggagaaaaagaagaagccaaaaaaacagaagacaagtctttggcaaagcctgaaactgataaagaacaggacagtgaaatggagaagggtggaagagaagatatggatataagtaaatctgcagaggagccacaggaaaaagttgacttgactctagattggttaactgaaacctctgaagaggcaaaaggaggagcagcaccagaaggaccgaatgaagctgaggtcacttctgggaagccagaacaggaagtaccagatgctgaggaagaaaaatcagtttctggaactgatgtccaagaagagtgcagagaaaaaggaggtcaggagaagcagggagaggtaattgtgagcatagaggagaagccaaaagaagtttcagaagagcagcctgtggtgactctagaaaagcagggcactgcagtggaggtagaagcagagtctttagacccgacagtcaagccagtggatgtgggtggggacgagccagaggagaaggtagttacctctgaaaacgaggcaggaaaggcggttcttgaacaactggtaggtcaagaagtaccacctgctgaagagtcaccagaggtgacaacagaggctgcagaggcctcagctgtagaggctggatcagaagtctctgaaaagcctgggcaggaggctccagttctccctaaggatggtgcagtcaatggaccgtcagttgtaggagatcagactcctattgaaccacagacttctatagaaagactgacagaaacaaaagatggctcaggactagaggagaaggtcagggcaaagctggttcctagtcaggaggagactaagctgtctgtagaagagtctgaggcagctggagatggggttgataccaaggtagcccagggagctactgagaaatcacctgaagacaaagttcagatagctgctaatgaagagacacaagagagagaagaacagatgaaagagggtgaagaaactgaaggctcagaagaggatgataaagaaaatgataagaccgaagaaatgccaaatgattcagtccttgaaaacaagtctcttcaagaaaatgaggaggaggagattgggaacctagagcttgcctgggatatgctggatttagcaaagatcatttttaaaaggcaagaaacaaaagaagcacagctttatgctgcccaggcacatcttaaactcggagaagttagtgttgaatctgaaaactatgtgcaagctgtggaggagttccagtcctgccttaacctgcaggaacagtacctggaagcccacgaccgtctccttgcagagacccactaccagctgggcttggcttatgggtacaactctcagtatgatgaggcagtggcacagttcagcaaatctattgaagtcattgagaacagaatggctgtactaaacgagcaggtgaaggaggctgaaggatcgtctgctgaatacaagaaagaaattgaggaactaaaggaactgctacccgaaattagagagaagatagaagatgcaaaggagtctcagcgtagtgggaatgtagctgaactggctctgaaagctactctggtggagagttctacttcaggtttcactcctggtggaggaggctcttcagtctccatgattgccagtagaaagccaacagacggtgcttcctcatcaaattgtgtgactgatatttcccaccttgtcagaaagaagaggaaaccagaggaagagagtccccggaaagatgatgcaaagaaagccaaacaagagccggaggtgaacggaggcagtggggatgctgtccccagtggaaatgaagtttcggaaaacatggaggaggaggctgagaatcaggctgaaagccgggcagcagtggaggggacagtggaggctggagctacagttgaaagcactgcatgttaagagggggcacagccctcctcccaagggaaagtgtttttgtatataatgtattttttcacttttggaggattctttttgtataacttcaataaagattgtaagcaaaggttgaggctttgatggtttttttcttaattattggctgaatctgccttggagcactgctggttttatatattagccaaaggttttgttctggccttctgtactgatctgtgttcctgatcctaattcctatctgtctaacgtggaggtgatcaagtgtggctgtaggcctttgttttccaatggtgctatattctgttttcaaacacttcactgaacccagctgtcttgcaaactttcagtggtgctgtccctggatgggggctacaaaaacaagaattggtgaagatcttgctcttcagtgctgaaaatggatgatggactttggctgtgagccaggcctaggatggttcttgtcctatatccacctagtcttcacctggggctataattctgtcctggaaaaagaactctgaaaacctgggtcaggggaatgattcctaaggaaaacggtctgcatttgagctctggtttgaaagtagccaaggggactgatggtggacactccagatgtggttggaagcatatgtggggaggctggctggttgagttttgttattttctgtatagaaaggttgagatatatcaacacttggaattgttacccatctgcagaattgacttctcaaataaagatgctaaaaatctcaaaaaaaaaaaaaaaaaaaaaaaaaaaaaaaaaaaaaaaaaaaaaaaaaaaaaaaaaaaaaaaaaaaaaaaaaaaaaaaaaaaaaaaaaaaaaaaaaaaa

SEQ ID NO: 178 - DNA, 1031 bp, Homo Sapiens
cgacagccggaagtcccgcctgccgtgtagtcgccgccgtcgctgccgctgccgctgccgccgtcgttgttgttgtgctcggtgcgctgagctccgcggctccgcgagccggttccgtccccttcccgccgccgccatgaagtggatgttcaaggaggaccactcgctggaacacagatgcgtggagtccgcgaagattcgagcgaaatatcccgacagggttccggtgattgtggaaaaggtctcaggctctcagattgttgacattgacaaacggaagtacttggttccatctgatatcactgtggctcagttcatgtggatcatcaggaaaaggatccagcttccttctgaaaaggcgatcttcctgtttgtggataagacagtcccacagtccagcctaactatgggacagctttacgagaaggaaaaagatgaagatggattcttatatgtggcctacagcggagagaacacttttggcttctgagggccattgctgggctaggtgcaccgtaactgcttgtgtatcttgtaaatagccagccattttcagttattataccagaacctcttcacatagacctattagtgcatttgtaactggatttatttcttaatatattggaaggttttgtttccttagactagtaaattatcatacagagttttattttgagtttttctttttgtgcattgtcctcatgcctgtattctccaggaaacttgtccttctggaaatcatattgaatgatatttctatatcgaagtgaggtaggtgcggtattaaagtgaaagggaaggtgatgcatttattctgggttatgcttgaagtgttagatggctaagtattaaaattatccaaattaaatccttagcagtcagaacacttgcttcactagaatatgccaactgccaatcatgttggactgagctaatttgttcctctttctgaaactattaaggtaaataattaacaataaaaattctcttataaaggcaaaaaaaaaaaaaaaaaaaaaaaaaaaaaa

SEQ ID NO: 179 - DNA, 3115 bp, Homo Sapiens
agacgcagtcttcagcaaggaagtgctgggaacgccctggagtgaacccaggaagatgcctgcagtgggtgccagggcccctctccaccgtccctgctgggcttcggggccacgcccgactgctgtgaacggcctgcggagcaccacgtgcgacggctggaggcgagaggtctgcctttgatgtggctgttggtgcagggcctgtggtgccttccgcagcggaaatggcgcgccgcccggggagggcgggagcagcgtcccgggtgcccctgtgaggatgagcgacgagatgactggagggtccctgaagacctcactagggtgcccccagccggtccgctcccaggaagcgacacccccacagccccagggctgcagctgagggggtcgccactctggctgggcgaggctgggcccttgggggcaggcgccagagtggcctcaggctctacaagatgcctgaaaacaccaacctctccagggctcactagcattggacgctttcacgctctgccctggccggaagccccctcaccccgcgcgatgtgcaaactcctgcagggctcactcagtttccagaactttaattattggaaagttctccctggtccagcccccaaatctgccgtgaacgttgacagctgagttgctgctccatgcgtgctttggctgagagcagaggggacccctgtcctccctgagctgctgacgaggggaggggtgaagggtggggcctctggagagggcaggtcccggggaagctccggactcctagaggggcggccaggtgggggccctggtgaccaggacagactgtggtgttttttaacgtaaaggagatccgcggtgtgagggaccccctgggtcctgcacgccgcctggtggcaggccgggccatggtgggtgctcacgcccccggcatgtggccgccctcagtgggaggggctctgagaacgactttttaaaacgcagagaaaagctccattcttcccaggacctcagcgcagccctggcccaggaaggcaggagacagaggccaggacggtccagaggtgtcgaaatgtcctggggacctgagcagcagccaccagggaagaggcagggagggagctgaggaccaggcttggttgtgagaatccctgagcccaggcggtagatgccaggaggtgtctggactggctgggccatgcctgggctgacctgtccagccagggagagggtgtgagggcagatctgggggtgcccagatggaaggaggcaggcatgggggacacccaaggccccctggcagcaccatgaactaagcaggacacctggaggggaagaactgtggggacctggaggcctccaacgactccttcctgcttcctggacaggactatggctgtgcagggatcccagagaagacttctgggctccctcaactccacccccacagccatcccccagctggggctggctgccaaccagacaggagcccggtgcctggaggtgtccatctctgacgggctcttcctcagcctggggctggtgagcttggtggagaacgcgctggtggtggccaccatcgccaagaaccggaacctgcactcacccatgtactgcttcatctgctgcctggccttgtcggacctgctggtgagcgggagcaacgtgctggagacggccgtcatcctcctgctggaggccggtgcactggtggcccgggctgcggtgctgcagcagctggacaatgtcattgacgtgatcacctgcagctccatgctgtccagcctctgcttcctgggcgccatcgccgtggaccgctacatctccatcttctacgcactgcgctaccacagcatcgtgaccctgccgcgggcgcggcgagccgttgcggccatctgggtggccagtgtcgtcttcagcacgctcttcatcgcctactacgaccacgtggccgtcctgctgtgcctcgtggtcttcttcctggctatgctggtgctcatggccgtgctgtacgtccacatgctggcccgggcctgccagcacgcccagggcatcgcccggctccacaagaggcagcgcccggtccaccagggctttggccttaaaggcgctgtcaccctcaccatcctgctgggcattttcttcctctgctggggccccttcttcctgcatctcacactcatcgtcctctgccccgagcaccccacgtgcggctgcatcttcaagaacttcaacctctttctcgccctcatcatctgcaatgccatcatcgaccccctcatctacgccttccacagccaggagctccgcaggacgctcaaggaggtgctgacatgctcctggtgagcgcggtgcacgcggctttaagtgtgctgggcagagggaggtggtgatattgtgtggtctggttcctgtgtgaccctgggcagttccttacctccctggtccccgtttgtcaaagaggatggactaaatgatctctgaaagtgttgaagcgcggacccttctgggtccagggaggggtccctgcaaaactccaggcaggacttctcaccagcagtcgtggggaacggaggaggacatggggaggttgtggggcctcaggctccgggcaccaggggccaacctcaggctcctaaagagacattttccgcccactcctgggacactccgtctgctccaatgactgagcagcatccaccccaccccatctttgctgccagctctcaggaccgtgccctcgtcagctgggatgtgaagtctctgggtggaagtgtgtgccaagagctactcccacagcagccccaggagaaggggctttgtgaccagaaagcttcatccacagccttgcagcggctcctgcaaaaggaggtgaaatccctgcctcaggccaagggaccaggtttgcaggagcccccctagtggtatggggctgagccctcctgagggccggttctaaggctcagactgggcactggggcctcagcctgctttcctgcagcagtcgcccaagcagacagccctggcaaatgcctgactcagtgaccagtgcctgtgagcatggggccaggaaagtctggtaataaatgtgactcagcatcacccaccttaaaaaaaaaaaaaaaaa

SEQ ID NO: 180 - DNA, 1723 bp, Homo Sapiens
ggtcgcggtccccccctcaacatggcggcagcggtgctctaggcgccggaagggggcgtgaatcggtgcgaccgcgcgcgtgcgcagtaccgggtccgcgcctgtccccgaaacttcgcaccccgtcgaactctcgcgagagcggtatctgcgtgtcgggacgtgcggaggctctcactttccgtcatggcgctgaaggtagcgaccgtcgccggcagcgccgcgaaggcggtgctcgggccagcccttctctgccgtccctgggaggttctaggcgcccacgaggtcccctcgaggaacatcttttcagaacaaacaattcctccgtccgctaagtatggcgggcggcacacggtgaccatgatcccaggggatggcatcgggccagagctcatgctgcatgtcaagtccgtcttcaggcacgcatgtgtaccagtggactttgaagaggtgcacgtgagttccaatgctgatgaagaggacattcgcaatgccatcatggccatccgccggaaccgcgtggccctgaagggcaacatcgaaaccaaccataacctgccaccgtcgcacaaatctcgaaacaacatccttcgcaccagcctggacctctatgccaacgtcatccactgtaagagccttccaggcgtggtgacccggcacaaggacatagacatcctcattgtccgggagaacacagagggcgagtacagcagcctggagcatgagagtgtggcgggagtggtggagagcctgaagatcatcaccaaggccaagtccctgcgcattgccgagtatgccttcaagctggcgcaggagagcgggcgcaagaaagtgacggccgtgcacaaggccaacatcatgaaactgggcgatgggcttttcctccagtgctgcagggaggtggcagcccgctaccctcagatcaccttcgagaacatgattgtggataacaccaccatgcagctggtgtcccggccccagcagtttgatgtcatggtgatgcccaatctctatggcaacatcgtcaacaatgtctgcgcgggactggtcgggggcccaggccttgtggctggggccaactatggccatgtgtacgcggtgtttgaaacagctacgaggaacaccggcaagagtatcgccaataagaacatcgccaaccccacggccaccctgctggccagctgcatgatgctggaccacctcaagctgcactcctatgccacctccatccgtaaggctgtcctggcatccatggacaatgagaatgtgaggttcccctcgcaccctaccctgctgccccgcccagtctccccctgcagcctcctgtagcccgcctcatgcactgaccacagcccccaggggaggatggtactggatctggccccatcttctggcccttagctggtgccacttccctcctgtggcaatcccagtcctgcacgtcacaggagacagcggggggtggcagggcctggtgtgtgccgagcctgcctgtgtcctacagatgcacactccggacatcgggggccagggcacaacatctgaagccatccaggacgtcatccgccacatccgcgtcatcaacggccgggccgtggaggcctaggctggccctaggaccttcttggtttgctccttggattccccttcccactccagcaccccagccagcctggtacgcagatcccagaataaagcaccttctccctagaaaaaaaaaaaa

SEQ ID NO: 181 - DNA, 1614 bp, Homo Sapiens
agtgctccgcgcgctcttgacgtccggagcccctggagtaggcgcttccggccattcatactgcagtcggtcagtgttcggttgaaggattctgtgtgctgtcggacccagagggtgacggcgccgctaggatgaagctcgtgagatttttgatgaaattgagtcatgaaactgtaaccattgaattgaagaacggaacacaggtccatggaacaatcacaggtgtggatgtcagcatgaatacacatcttaaagctgtgaaaatgaccctgaagaacagagaacctgtacagctggaaacgctgagtattcgaggaaataacattcggtattttattctaccagacagtttacctctggatacactacttgtggatgttgaacctaaggtgaaatctaagaaaagggaagctgttgcaggaagaggcagaggaagaggaagaggaagaggacgtggccgtggcagaggaagagggggtcctaggcgataatgtctctcaagatttcaaagtcatatgagatttgggatattttttgtacaggttgtgtttgtttatgtcagtttttaataaacataaatgtgggacagagctgtctatttagtatatcaaagttttagtagtttcctccacattcacgaaattaccacagtgagagctaagcatttctactgggcagtttcatttttagttgatcaggttttaagtttttgaactaaaatttttctttttctttttatgatgaataaggttaaaataaaagccttagacaaattaaatttggcagagtttaattgagcaaaggacaattcacaaatcaggtagcccctgaaccataataggctcagaggcttcagcccagctgcatagttgaagatttatggacagaaggaaagtgatgtatggaaaatggaagtgagatacagcaacagccggattagttacagttcagcgtttgccttatttgaatatggtttgaacagttcgctgtctttggttggctgaaacttagtgattgccacaagagtagggtaccgtctgtttacacgtccagttaggctacagttctatgtactgagaaacctttaagctgaacttgagatatgtaaagagactttaggctaaacttaacaatatatataggatatatacccttctacttcacatgcactgaatatgcattttattgctttactcttcattctgtggcacctacccacaggggaagtaagaagtttgttttggtatttcggaaactaaagtccttatgggatggggtctagaattgattctcctttcctgagttttactccacggagtcttaggtacctggtaaaaagttgtcttctaaattaagggtcattgctttgttgtctagctgctaatgtcttacttttgtttcttttgctttttaatcagttcttaataggatatagttttatgttttccaagttataacttggagttaatggtcactagattatcagttatgagcagtgttaaaatctcctattaatgtgtaatgtacctgtcagtgcctcctttattaaggggttctttgagaataaaagagaaaagacctactttatttgacagcaaaaaaaaaaaggaattc

SEQ ID NO: 182 - DNA, 2143 bp, Homo Sapiens
actgaaggctagagaacaattccgagaaagagacggagagagagggaagaaaaagacagatagatagatattggggggaaggagaaaaaaggagaagagagggaagagaggacagcggagagagagcaccagagagagagggagagagagagagagcgctagagagagggagcgagcatgtgcgatgagcaatagctgtggaccttacagttgctgctaactgccctggtgtgtgtgagggagagagagggagggagggagagagagcgcgctagcgcgagagagcgagtgagcaagcgagcagaaaagaggtggagagggggggaataagaaagagagagaaggaaaggagagaaggcaggaagaaggcaagggacgagacaaccatgctgtgctgtatgagaagaaccaaacagaattaaaagggaacctggtctctgggttgttttcaacatctcaagtgtgaattttccctgtcaaaatcttcacaaggaaaatgagtcacagcatcacctgggtgacgaggtcataacacctcagcccttgcttaaaaaattttatttctacttttctattgtaaagagatctcaaaacaggaagataaaattggactgacagctctacagcctagtcttttagacagtgaactaggccagcattggcagacactggcgatgacaaagtcctgctctgaattatgccaccccgcactccactttttaccttgcctgggaggcttgaggaaaaatcttcagagagcagttcgacctagtccttattcacttggcttcttgactttctggatttcaagggttgaaaaaaatgatgacgaccaaaagattgaacaagatggtatcaaaccagaagataaagctcataaggccgcaaccaaaattcaggctagcttccgtggacacataacaaggaaaaagctcaaaggagagaagaaggatgatgtccaagctgctgaggctgaagctaataagaaggatgaagcccctgttgccgatggggtggagaagaagggagaaggcaccactactgccgaagcagccccagccactggctccaagcctgatgagcccggcaaagcaggagaaactccttccgaggagaagaagggggagggtgatgctgccacagagcaggcagccccccaggctcctgcatcctcagaggagaaggccggctcagctgagacagaaagtgccactaaagcttccactgataactcgccgtcctccaaggctgaagatgccccagccaaggaggagcctaaacaagccgatgtgcctgctgctgtcactgctgctgctgccaccacccctgccgcagaggatgctgctgccaaggcaacagcccagcctccaacggagactggggagagcagccaagctgaagagaacatagaagctgtagatgaaaccaaacctaaggaaagtgcccggcaggacgagggtaaagaagaggaacctgaggctgaccaagaacatgcctgaactctaagaaatggctttccacatccccaccctcccctctcctgagcctgtctctccctaccctcttctcagctccactctgaagtcccttcctgtcctgctcacgtctgtgagtctgtcctttcccacccactagccctctttctctctgtgtggcaaacatttaaaaaaaaaaaaaaaaagcaggaaagatcccaagtcaaacagtgtggcttaaacattttttgtttcttggtgttgttatggcaagtttttggtaatgatgattcaatcattttgggaaattcttgcactgtatccaagttatttgatctggtgcgtgtggccctgtgggagtccactttcctctctctctctctctctgttccaagtgtgtgtgcaatgttccgttcatctgaggagtccaaaatatcgagtgaattcaaaatcatttttgttttcctccttttcaatgtgatggaatgaacaaaaaggaaaaaattcaaaaaacccagtttgttttaaaaataaataaataaagcaaatgtgccaattagcgtaaacttgcggctctaaggctcctttttcaacccgaatattaataaatcatgagagtaatcaaggtcaaaaaaaaaaaaaaaaaaaaaaaaaaaaaaaaaaaaaaa

SEQ ID NO: 183 - DNA, 6977 bp, Homo Sapiens
cccgggcccgccccccgcctcccgccgcctccgggctcccggctcccggccgcgcctcgccccatgcactcgccgcgccgcgcagcccgcgcacgcccggatggctcctcgcgccgcgggcggcgcaccccttagcgcccgggccgccgccgccagccccccgccgttccagacgccgccgcggtgcccggtgccgctgctgttgctgctgctcctgggggcggcgcgggccggcgccctggagatccagcgtcggttcccctcgcccacgcccaccaacaacttcgccctggacggcgcggcggggaccgtgtacctggcggccgtcaaccgcctctatcagctgtcgggcgccaacctgagcctggaggccgaggcggccgtgggcccggtgcccgacagcccgctgtgtcacgctccgcagctgccgcaggcctcgtgcgagcacccgcggcgcctcacggacaactacaacaagatcctgcagctggaccccggccagggcctggtagtcgtgtgcgggtccatctaccagggcttctgccagctgcggcgccggggcaacatctcggccgtggccgtgcgcttcccgcccgccgcgccgcccgccgagcccgtcacggtgttccccagcatgctgaacgtggcggccaaccacccgaacgcgtccaccgtggggctagttctgcctcccgccgcgggcgcggggggcagccgcctgctcgtgggcgccacgtacaccggttacggcagctccttcttcccgcgcaaccgcagcctggaggaccaccgcttcgagaacacgcccgagatcgccatccgctccctggacacgcgcggcgacctggccaagctcttcaccttcgacctcaacccctccgacgacaacatcctcaagatcaagcagggcgccaaggagcagcacaagctgggcttcgtgagcgccttcctgcacccgtccgacccgccgccgggtgcacagtcctacgcgtacctggcgctcaacagcgaggcgcgcgcgggcgacaaggagagccaggcgcggagcctgctggcgcgcatctgcctgccccacggcgccggcggcgacgccaagaagctcaccgagtcctacatccagttgggcttgcagtgcgcgggcggcgcgggccgcggcgacctctacagccgcctggtgtcggtcttcccagcccgggagcggctctttgctgtcttcgagcggccccaggggtcccccgcggcccgcgctgctccggccgcactctgcgccttccgcttcgccgacgtgcgagccgccatccgagctgcgcgcaccgcctgcttcgtggaaccggcgcccgacgtggtggcggtgctcgacagcgtggtgcagggcacgggaccggcctgcgagcgcaagctcaacatccagctccagccagagcagctggactgtggagctgctcacctgcagcacccgctgtccatcctgcagcccctgaaggccacgcccgtgttccgcgccccgggcctcacctccgtggccgtggccagcgtcaacaactacacagcggtcttcctgggcacggtcaacgggaggcttctcaagatcaacctgaacgagagcatgcaggtggtgagcaggcgggtggtgactgtggcctatggggagcccgtgcaccatgtcatgcagtttgacccagcagactccggttacctttacctgatgacgtcccaccagatggccagggtgaaggtcgccgcctgcaacgtgcactccacctgtggggactgcgtgggtgcggcggacgcctactgcggctggtgtgccctggagacgcggtgcaccttgcagcaggactgcaccaattccagccagcagcatttctggaccagtgccagcgagggccccagccgctgtcctgccatgaccgtcctgccttccgagatcgatgtgcgccaggagtacccaggcatgatcctgcagatctcgggcagcctgcccagcctcagtggcatggagatggcctgtgactatgggaacaacatccgcactgtggctcgggtcccaggccctgcctttggtcaccagattgcctactgcaacctcctgccgagggaccagtttccgcccttcccccccaaccaggaccacgtgactgttgagatgtctgtgagggtcaatgggcggaacatcgtcaaggccaatttcaccatctacgactgcagccgcactgcacaagtgtacccccacacagcctgtaccagctgcctgtcggcacagtggccctgtttctggtgcagccagcagcactcctgtgtttccaaccagtctcggtgcgaggcctcaccaaaccccacgagccctcaggactgcccccggaccctgctctcacccctggcacccgtgcctacgggtggctcccagaacatcctggtgcctctggccaacactgcctttttccagggtgcagccctggagtgtagttttgggctggaggagatcttcgaggctgtgtgggtgaatgagtctgttgtacgctgtgaccaggtggtgctgcacacgacccggaagagccaggtgttcccgctcagcctccaactaaaggggcggccagcccgattcctggacagccctgagcccatgacagtcatggtctataactgtgccatgggcagccccgactgttcccagtgcctgggccgcgaagacctgggtcacctgtgcatgtggagtgatggctgccgcctgcgggggcctctgcagcccatggctggcacctgccccgcccccgagatccgcgcgattgagcccctgagtggcccgttggacggtgggaccctgctgaccatccgaggaaggaacctgggccggcggctcagtgacgtggcccacggcgtgtggattggtggtgtggcctgtgagccactgcctgacagatacacggtgtcggaggagatcgtgtgtgtcacagggccagccccaggaccactctcaggtgtggtgaccgtgaacgcctctaaggagggcaagtcccgggaccgcttctcctacgtgctgcccctggtccactccctggagcctaccatgggccccaaggccgggggcaccaggatcaccatccatgggaatgacctccatgtaggctccgagctccaggtcctggtgaacgacacagacccctgcacggagctgatgcgcacagataccagcatcgcctgcaccatgcctgagggggccctgccggctccggtgcctgtgtgtgtgcgcttcgagcgtcggggctgcgtgcacggcaacctcaccttctggtacatgcagaacccggtcatcacggccatcagtccccgccgcagccctgtcagtggcggcaggaccatcacagtggctggtgagcgtttccacatggtgcagaatgtgtccatggccgtccaccacattggccgggagcccacgctctgcaaggttctcaactccaccctcatcacctgcccgtcccccggggccctgagcaacgcatcagcgccagtggacttcttcatcaatgggcgggcctacgcagacgaggtggctgtggctgaggagctactggaccccgaggaggcacagcggggcagcaggttccgcctggactacctccccaacccacagttctctacggccaagagggagaagtggatcaagcaccaccccggggagcctctcaccctcgttatccacaaggagcaggacagcctggggctccagagtcacgagtaccgggtcaagataggccaagtaagctgcgacatccagattgtctctgacagaatcatccactgctcggtcaacgagtccctgggcgcggccgtggggcagctgcccatcacaatccaggtagggaacttcaaccagaccatcgccacactgcagctggggggcagcgagacggccatcatcgtgtccatcgtcatctgcagcgtcctgctgctgctctccgtggtggccctgttcgtcttctgtaccaagagccgacgtgctgagcgttactggcagaagacgctgctgcagatggaggagatggaatctcagatccgagaggaaatccgcaaaggcttcgctgagctgcagacagacatgacagatctcaccaaggagctgaaccgcagccagggcatccccttcctggagtataagcacttcgtgacccgcaccttcttccccaagtgttcctccctttatgaagagcgttacgtgctgccctcccagaccctcaactcccagggcagctcccaggcacaggaaacccacccactgctgggagagtggaagattcctgagagctgccggcccaacatggaagagggaattagcttgttctcctcactactcaacaacaagcacttcctcatcgtctttgtccacgcgctggagcagcagaaggactttgcggtgcgcgacaggtgcagcctggcctcgctgctgaccatcgcgctgcacggcaagctggagtactacaccagcatcatgaaggagctgctggtggacctcattgacgcctcggccgccaagaaccccaagctcatgctgcggcgcacagagtctgtggtggagaagatgctcaccaactggatgtccatctgcatgtacagctgtctgcgggagacggtgggggagccattcttcctgctgctgtgtgccatcaagcagcaaatcaacaagggctccatcgacgccatcacaggcaaggcccgctacacactcaatgaggagtggctgctgcgggagaacatcgaggccaagccccggaacctgaacgtgtccttccagggctgtggcatggactcgctgagcgtgcgggccatggacaccgacacgctgacacaggtcaaggagaagatcctggaggccttctgcaagaatgtgccctactcccagtggccgcgtgcagaggacgtcgaccttgagtggttcgcctccagcacacagagctacatccttcgggacctggacgacacctcagtggtggaagacggccgcaagaagcttaacacgctggcccattacaagatccctgaaggtgcctccctggccatgagtctcatagacaagaaggacaacacactgggccgagtgaaagacttggacacagagaagtatttccatttggtgctgcctacggacgagctggcggagcccaagaagtctcaccggcagagccatcgcaagaaggtgctcccggaaatctacctgacccgcctgctctccaccaagggcacgttgcagaagtttctggatgacctgttcaaggccattctgagtatccgtgaagacaagcccccactggctgtcaagtactttttcgacttcctggaggagcaggctgagaagaggggaatctccgaccccgacaccctacacatctggaagaccaacagccttcctctccggttctgggtgaacatcctgaagaacccccagtttgtctttgacatcgacaagacagaccacatcgacgcctgcctttcagtcatcgcgcaggccttcatcgacgcctgctccatctctgacctgcagctgggcaaggattcgccaaccaacaagctcctctacgccaaggagattcctgagtaccggaagatcgtgcagcgctactacaagcagatccaggacatgacgccgctcagcgagcaagagatgaatgcccatctggccgaggagtcgaggaaataccagaatgagttcaacaccaatgtggccatggcagagatttataagtacgccaagaggtatcggccgcagatcatggccgcgctggaggccaaccccacggcccggaggacacaactgcagcacaagtttgagcaggtggtggctttgatggaggacaacatctacgagtgctacagtgaggcctgagacacatggagagttggtcaggctgctgctgggagaaatggacgcccactgggcctcaacttgatcttctaccccgtgcctgtgactcagactgggaaatactgagcagagacggctggggcgggggcaggaggaggggctgctctctgagacaggggcgcccccgccttgacccctgggcacctccatcccctcccacctgtccccagatcagtctctgggatggaggccagagagctggtcaggctcccccatctgcccagcacggcctgcactgtgcccacccacttgctccacaacgtccagttggtcctgctgccaagagccccgtgcatccaggcggccaagcacaaactgggggagaggaggccgccagcccggaggctgcagcccagaaactctacctcatccacactggtgcagggagccctccttgaactgacctttgattggtttctgcttcaactaccaaaatgttatctccacttccccctcacccgtagaggatcctggccacagacagtttcaagtagtgtcagatttttgttgcttgggcggctgttggtagagtgggcagtgcccgcgccatggggtgctctgtgggcttctccaggagcagggagggtggaggggagggatggggggcacaggagctgggagccccgtctccaggaaaaggagaggggttaagatgcaccgaggctgtagctgggctacttgatcttgctgaaagtgtttctaaagatagcaccacttttttttttaaagcttttatatattaaaaaacgtatcatgcaccaactgtgaatagctgccgcttgcgcagaggacccggggaggggtcccgagaggctccccatgcaacactggaaatgactgttccagagagcgggcagacctggcagagcgcccctggcgcctgagactaccacccactccgttcctgccagaaacgaccctctgtggccgatgggccatgcgggcccctcgcagccaactcagccagtgttgggactggctcagagcccatgggggctggaggggggcagctgggactctggaatcttctttataataaaagccttacggacaaacctac

SEQ ID NO: 184 - DNA, 2174 bp, Homo Sapiens
gggaaaaggggcggggtcctcagagctgccgcgctggcacatcttcctggagaaggggagggtgcggctgcagagaattgagacttagaagctttgaattcctgtatctgagaacggagtcgttgggggtggtggagggggttggaattggggacctacggaaggctcagctcttgccaggccaaattgagacatgtctgacacaagcgagagtggtgcaggtctaactcgcttccaggctgaagcttcagaaaaggacagtagctcgatgatgcagactctgttgacagtgacccagaatgtggaggtcccagagacaccgaaggcctcaaaggcactggaggtctcagaggatgtgaaggtctcaaaagcctctggggtctcaaaggccacagaggtctcaaagaccccagaggctcgggaggcacctgccacccaggcctcatctactactcagctgactgatacccaggttctggcagctgaaaacaagagtctagcagctgacaccaagaaacagaatgctgacccgcaggctgtgacaatgcctgccactgagaccaaaaaggtcagccatgtggctgatacaaaggtcaatacaaaggctcaggagactgaggctgcaccctctcaggccccagcagatgaacctgagcctgagagtgcagctgcccagtctcaggagaatcaggatactcggcccaaggtcaaagccaagaaagcccgaaaggtgaagcatctggatggggaagaggatggcagcagtgatcagagtcaggcttctggaaccacaggtggccgaagggtctcaaaggccctaatggcctcaatggcccgcagggcttcaaggggtcccatagccttttgggcccgcagggcatcaaggactcggttggctgcttgggcccggagagccttgctctccctgagatcacctaaagcccgtaggggcaaggctcgccgtagagctgccaagctccagtcatcccaagagcctgaagcaccaccacctcgggatgtggcccttttgcaagggagggcaaatgatttggtgaagtaccttttggctaaagaccagacgaagattcccatcaagcgctcggacatgctgaaggacatcatcaaagaatacactgatgtgtaccccgaaatcattgaacgagcaggctattccttggagaaggtatttgggattcaattgaaggaaattgataagaatgaccacttgtacattcttctcagcaccttagagcccactgatgcaggcatactgggaacgactaaggactcacccaagctgggtctgctcatggtgcttcttagcatcatcttcatgaatggaaatcggtccagtgaggctgtcatctgggaggtgctgcgcaagttggggctgcgccctgggatacatcattcactctttggggacgtgaagaagctcatcactgatgagtttgtgaagcagaagtacctggactatgccagagtccccaatagcaatccccctgaatatgagttcttctggggcctgcgctcttactatgagaccagcaagatgaaagtcctcaagtttgcctgcaaggtacaaaagaaggatcccaaggaatgggcagctcagtaccgagaggcgatggaagcggatttgaaggctgcagctgaggctgcagctgaagccaaggctagggccgagattagagctcgaatgggcattgggctcggctcggagaatgctgccgggccctgcaactgggacgaagctgatatcggaccctgggccaaagcccggatccaggcgggagcagaagctaaagccaaagcccaagagagtggcagtgccagcactggtgccagtaccagtaccaataacagtgccagtgccagtgccagcaccagtggtggcttcagtgctggtgccagcctgaccgccactctcacatttgggctcttcgctggccttggtggagctggtgccagcaccagtggcagctctggtgcctgtggtttctcctacaagtgagattttagatattgttaatcctgccagtctttctcttcaagccagggtgcatcctcagaaacctactcaacacagcactctaggcagccactatcaatcaattgaagttgacactctgcattaaatctatttgccatttcaaaaaaaaaaaaaaaaaaaa

SEQ ID NO: 185 - DNA, 1 bp, Homo Sapiens
  misc_feature (1)..(1): n is a, c, g, or t
n

SEQ ID NO: 186 - DNA, 1 bp, Homo Sapiens
  misc_feature (1)..(1): n is a, c, g, or t
n

SEQ ID NO: 187 - DNA, 1 bp, Homo Sapiens
  misc_feature (1)..(1): n is a, c, g, or t
n

SEQ ID NO: 188 - DNA, 4912 bp, Homo Sapiens
attggggtctgctctaagctgcagcaagagaaactgtgtgtgaggggaagaggcctgtttcgctgtcgggtctctagttcttgcacgctctttaagagtctgcactggaggaactcctgccattaccagctcccttcttgcagaagggagggggaaacatacatttattcatgccagtctgttgcatgcaggctttttggcttcctaccttgcaacaaaataattgcaccaactccttagtgccgattccgcccacagagagtcctggagccacagtcttttttgctttgcattgtaggagagggactaagtgctagagactatgtcgctttcctgagctaccgagagcgctcgtgaactggaatcaactgcttcagggaaaaagaaaaaaaaaaaaaaaagacttgcctgggaggccgcgagaaacttgcattggaagcttcagcaaccagcattcgagaaactcctctctactttagcacggtctccagactcagccgagagacagcaaactgcagcgcggtgagagagcgagagagagggagagagagactctccagcctgggaactataactcctctgcgagaggcggagaactccttccccaaatcttttggggacttttctctctttacccacctccgcccctgcgaggagttgaggggccagttcggccgccgcgcgcgtcttcccgttcggcgtgtgcttggcccggggaaccgggagggcccggcgatcgcgcggcggccgccgcgagggtgtgagcgcgcgtgggcgcccgccgagccgaggccatggtgcagcaaaccaacaatgccgagaacacggaagcgctgctggccggcgagagctcggactcgggcgccggcctcgagctgggaatcgcctcctcccccacgcccggctccaccgcctccacgggcggcaaggccgacgacccgagctggtgcaagaccccgagtgggcacatcaagcgacccatgaacgccttcatggtgtggtcgcagatcgagcggcgcaagatcatggagcagtcgcccgacatgcacaacgccgagatctccaagcggctgggcaaacgctggaagctgctcaaagacagcgacaagatccctttcattcgagaggcggagcggctgcgcctcaagcacatggctgactaccccgactacaagtaccggcccaggaagaaggtgaagtccggcaacgccaactccagctcctcggccgccgcctcctccaagccgggggagaagggagacaaggtcggtggcagtggcgggggcggccatgggggcggcggcggcggcgggagcagcaacgcggggggaggaggcggcggtgcgagtggcggcggcgccaactccaaaccggcgcagaaaaagagctgcggctccaaagtggcgggcggcgcgggcggtggggttagcaaaccgcacgccaagctcatcctggcaggcggcggcggcggcgggaaagcagcggctgccgccgccgcctccttcgccgccgaacaggcgggggccgccgccctgctgcccctgggcgccgccgccgaccaccactcgctgtacaaggcgcggactcccagcgcctcggcctccgcctcctcggcagcctcggcctccgcagcgctcgcggccccgggcaagcacctggcggagaagaaggtgaagcgcgtctacctgttcggcggcctgggcacgtcgtcgtcgcccgtgggcggcgtgggcgcgggagccgaccccagcgaccccctgggcctgtacgaggaggagggcgcgggctgctcgcccgacgcgcccagcctgagcggccgcagcagcgccgcctcgtcccccgccgccggccgctcgcccgccgaccaccgcggctacgccagcctgcgcgccgcctcgcccgccccgtccagcgcgccctcgcacgcgtcctcctcggcctcgtcccactcctcctcttcctcctcctcgggctcctcgtcctccgacgacgagttcgaagacgacctgctcgacctgaaccccagctcaaactttgagagcatgtccctgggcagcttcagttcgtcgtcggcgctcgaccgggacctggattttaacttcgagcccggctccggctcgcacttcgagttcccggactactgcacgcccgaggtgagcgagatgatctcgggagactggctcgagtccagcatctccaacctggttttcacctactgaagggcgcgcaggcagggagaagggccggggggggtaggagaggagaaaaaaaaagtgaaaaaaagaaacgaaaaggacagacgaagagtttaaagagaaaagggaaaaaagaaagaaaaagtaagcagggctggcttcgcccgcgttctcgtcgtcggatcaaggagcgcggcggcgttttggacccgcgctcccatcccccaccttcccgggccggggacccactctgcccagccggagggacgcggaggaggaagagggtagacaggggcgacctgtgattgttgttattgatgttgttgttgatggcaaaaaaaaaaaagcgacttcgagtttgctcccctttgcttgaagagaccccctcccccttccaacgagcttccggacttgtctgcacccccagcaagaaggcgagttagttttctagagacttgaaggagtctcccccttcctgcatcaccaccttggttttgttttattttgcttcttggtcaagaaaggaggggagaacccagcgcacccctccccccctttttttaaacgcgtgatgaagacagaaggctccggggtgacgaatttggccgatggcagatgttttgggggaacgccgggactgagagactccacgcaggcgaattcccgtttggggcttttttttcctccctcttttccccttgccccctctgcagccggaggaggagatgttgaggggaggaggccagccagtgtgaccggcgctaggaaatgacccgagaaccccgttggaagcgcagcagcgggagctaggggcgggggcggaggaggacacgaactggaagggggttcacggtcaaactgaaatggatttgcacgttggggagctggcggcggcggctgctgggcctccgccttcttttctacgtgaaatcagtgaggtgagacttcccagaccccggaggcgtggaggagaggagactgtttgatgtggtacaggggcagtcagtggagggcgagtggtttcggaaaaaaaaaaagaaaaaaagaaaaaaaaagaaaaaaaaaagatttttttcttctcttaatcggaatcgtgatggtgttggattatttcaatggtggggttaatatagcatgttatcctgtctatcttttaaagatttctgtataagactgttgagcagtttttaaaatagtgtaggataatataaaaagcagatagatggcgctatgtttgattcctacaacgaaattatcaccagctttttttcattcttaactctttaaaggattcaaacgcaactcaaatctgtgctggactttaaaaaaacaattcaggaccaaattttttctcagtgtgtgtgtttattccttataggtgtaaatgagaagacgtgtttttttccttcaccgatgctccatcctcgtatttctttttccttgtaaatgtaatcagatgccattttatatgtggacgtatttatactggccaaacatattttttcttttgtccctttttttctttcctttctttttacttcctttatttctttattccttccttttcctttttttcttttttttttctttttttttttttttttttggtagttgttgttacccacgccattttacgtctccttcactgaagggctagagttttaacttttaattttttatatttaaatgtagacttttgacacttttaaaaaacaaaaaaagacaagagagatgaaaacgtttgattattttctcagtgtatttttgtaaaaaatatataaagggggtgttaatcggtgtaaatcgctgtttggatttcctgattttataacagggcggctggttaatatctcacacagtttaaaaaatcagcccctaatttctccatgtttacacttcaatctgcaggcttcttaaagtgacagtatcccttaacctgccaccagtgtccaccctccggcccccgtcttgtaaaaaggggaggagaattagccaaacactgtaagcttttaagaaaaacaaagttttaaacgaaatactgctctgtccagaggctttaaaactggtgcaattacagcaaaaagggattctgtagctttaacttgtaaaccacatcttttttgcactttttttataagcaaaaacgtgccgtttaaaccactggatctatctaaatgccgatttgagttcgcgacactatgtactgcgtttttcattcttgtatttgactatttaatcctttctacttgtcgctaaatataattgttttagtcttatggcatgatgatagcatatgtgttcaggtttatagctgttgtgtttaaaaattgaaaaaagtggaaaacatctttgtacatttaagtctgtattataataagcaaaaagattgtgtgtatgtatgtttaatataacatgacaggcactaggacgtctgcctttttaaggcagttccgttaagggtttttgtttttaaacttttttttgccatccatcctgtgcaatatgccgtgtagaatatttgtcttaaaattcaaggccacaaaaacaatgtttgggggaaaaaaaagaaaaaatcatgccagctaatcatgtcaagttcactgcctgtcagattgttgatatataccttctgtaaataactttttttgagaaggaaataaaatcagctggaactgaaccctaaaaaaaaaaaaaaaaaaaaaaaaaaaaaaaaaaaa

SEQ ID NO: 189 - DNA, 2182 bp, Homo Sapiens
gccgggaggaggaccggaccccgagcggctgggagcgcacgcgagcgggccgtggccgcgcgggcagcgccctgagcctgtcccgcgcccgcgggcccggccgagcaggagcagctcccggggatgcccgggcggctcggagcgcgggcagcggcagccgtgcggtgagggcggtggcgcccgcgggacctgcgactgccaggaactcctgccaccgccaccggctcccatggcccacatacccagtgggggtgccccagcagcgggggcagcccccatgggcccccagtattgcgtgtgcaaggtggagctgtcagtgagtggccagaacctactggaccgggatgttacctccaagtccgaccccttctgtgtcctctttacagagaacaatggcagatggatcgagtacgacaggacagaaaccgcgatcaacaacctcaaccccgccttctccaagaagttcgtgcttgactaccacttcgaggaggtacagaagctcaagttcgcgctctttgaccaggacaagtccagtatgcggctggacgagcatgacttcctgggccagttctcctgcagcctgggcacgatcgtctccagcaagaagatcactaggcctctgctgctgctgaatgacaagcctgcggggaagggcttgattacgatcgctgcccaggagctgtccgacaaccgcgtcatcacactaagcctggcgggcaggaggctggacaagaaggacctctttgggaagtcagacccctttctggagttttataagccaggagacgatggcaagtggatgctggtccacaggactgaggtgatcaagtacacactggaccctgtgtggaagccattcacagtgcccttggtgtccctgtgtgatggggacatggagaagcccatccaggtcatgtgctacgactatgacaatgacgggggccatgacttcatcggcgagttccagacctcagtgtcacagatgtgtgaggctcgagacagcgtcccgctggagttcgagtgcatcaaccccaagaagcagaggaagaagaagaactataaaaactcgggcatcatcatcctgcgatcctgcaagataaaccgagactactccttccttgactacatcctgggaggctgccagctcatgttcaccgttggaatagactttacagcctccaacgggaatcccctcgacccttcctctttgcactatatcaaccctatgggcaccaacgaatatctgtcggccatctgggctgttgggcagatcattcaggactacgacagtgataagatgtttccagctctgggattcggggcccagttacccccagactggaaggtctcccatgagtttgccatcaacttcaaccccaccaaccccttctgctcaggtgtggatggtattgcccaggcgtactcagcttgcctgccccacatccgcttctacggtcctaccaatttctcccccatcgtcaaccacgtggcccggtttgcggcccaggccacacaacagcggacggccacgcagtacttcatcctcctcatcatcacggacggggtcatcagtgacatggaggagacacggcatgccgtggtgcaggcttccaagctgcccatgtccatcatcatcgtgggcgtgggcaatgcggacttcgctgccatggagttcctggatggggacagccgcatgctgcgctcccacacgggggaggaggcagcccgcgatattgtgcagttcgttccctttcgagagttccgcaacgcagcaaaagagaccttggccaaagctgtgctggcggagctgccccaacaagttgtgcagtatttcaagcataaaaacctgccccccaccaactcggagcccgcctgagctccagtgcccagcagcagcatgtcagctgagcctcctgccctcccccaggaacatgcacgctcactctgcttccttgtgggtggcctttttttaccgatccccttttttattttttacaaccggacctccacccccaacttcctccagcccagctgggcttcctttgttggagtcaactgttgatgcttccaggccaaactggcttcctctcctcctctccccacctttgccattcttaagtattgaatgtactttgtataattttagtggaattgttattgagaataaaatttttacaatcat

SEQ ID NO: 190 - DNA, 1323 bp, Homo Sapiens
ccgtggagggcactttcccagtccccgaggcggatccggtgttgcatccttggagagagctgagagctggagtacagaacctgctaaggccatcaaacctattgatcggaagtcagtccatcagatttgctctgggccggtagtactgagtctaagcactgcggtgaagaagatggtagaaaacagtctggatgctggtgccactaatattgatctaaagcttaaggactatggaatggatctcattgaagtttcaggcaatggatgtggggtagaagaagaaaacttcgaaggcttaactctgaaacatcacacatctaagattcaagagtttgccgacctaactcgggttgaaacttttggctttcggggggaagctctgagctcactttgtgcactgagtgatgtcaccatttctacctgccacgtatcggcgaaggttgggactcgactggtgtttgatcacgatgggaaaatcatccagaaaaccccctacccccaccccagagggaccacagtcagcgtgaagcagttattttctacgctacctgtgcgccataaggaatttcaaaggaatattaagaagaaacgtgcctgcttccccttcgccttctgccgtgattgtcagttccttgagggctccccagccatgcttcctgtacagcctgcaaaactgactcctagaagtaccccaccccacccctgctccttggaggacaacgtgatcactgtattcagctctgtcaagaatggtccaggttcttctagatgatctgcacaaatggttcctctcctccttcctgatgtctgccattagcattggaataaagttcctgctgaaaatccacatctcccctgggtccggtgttctggaagtgagagagacaatgtcacacttcaaggaggcagctctctagacaggaaggttattcacgtcccatgtcaagtctagctagagttcagagcaattgagaagtgcaattttatctcctgcctttcattctataccctgcttctgaaccatcgtgttcaactgtgaaactcacactttggtgaccctgactccaaaacttaatacacccaaggtcagccccagtgatctgcttcatagcaaggactttgggtgggtcttcccagggagtagggcaccctcagagaatgtggctttggacttcatcacagctggggccttttgtgtcacttcagatctaaacttgtaaccgtgctagatctgtttctaacgtgacaacatcacgaaccacgagtccagaagcctaatccataatcctccctcctcatgacaaagtctcatgctctgtgctc

SEQ ID NO: 191 - DNA, 2029 bp, Homo Sapiens
ctcagtcatgtgaccggcaatggcggcgctgacgagagctgcatttggaagtgttgtggagacagccccgtagcccaatgcgaccagactcagggaaaacatcaggcccctccagctgagcccttgtgtgagccccgcccctccctaaatgccagacttgggagctgacagacagcactgcctgtgctgggtttaaaagtcctggtcagctgagtggaaatagaaggatttctgctgccatcatcttccatgggctttccaggtcacacgacctacaagtagggagcagggaaagaagagtgagcctgcatgccaattctaagctcttcaggatcaaatgtcgttcgtcctgtccagaatggcagcctgtggaggcacctgcaagaacaaagtgactgtgtccaagcccgtgtgggacttcctgagcaaagagaccccagcccggctggcccggcttcgggaggagcaccgtgtgtctatcctcatagatggcgagacttctgacatctatgttctccagctttccccacagggtcctcccccggcccctccaaatgggctctacctagcccggaaggctctcaaggggctgctaaaagaggcagagaaagagctgaagaaagctcagaggcagggggagctgatgggctgcctggctctggggggtggaggggagcaccctgagatgcaccgcgcaggcccaccccctctccgagcagccccacttctgcccccaggagctcgggggctcccccctcctcctccccccctgcccccacctcttcctcctcgccttcgggaggaggcagaagagcaggagagcacctgccccatctgtctgggggagatccagaatgccaagacattggagaagtgccggcattcattctgcgagggctgcatcacccgggctctgcaggtgaaaaaggcctgccccatgtgcggccgcttctatgggcagctggtgggcaaccagccccagaatgggcggatgctggtctctaaggacgccaccctcctactgcccagctatgagaagtacggcaccattgtcatccagtacgtcttcccgcccggtgtccagggggctgaacacccaaacccaggagttcggtatcctggcaccacacgggtggcctacctcccggactgccctgagggcaacaaggtgctgaccctgttccgcaaggcgtttgaccagcgtctcaccttcactatcggcacgtccatgaccacagggagaccgaatgtcatcacctggaacgacatccaccacaagaccagctgcacagggggaccccagctgtttgggtacccagaccccacctacctgacccgggtgcaagaggagctgagagcgaagggtatcacagatgactgaaggacatcgcctttgccaaggcccctgctgtctgcctctactaggacccagcagaagcctctttctcctctctgccccctgccccccacaccacacctgtaggggacctgtctgactgggaagggagttccgagagggagggggcaatcccttcccccatcccccactggccaagtgtttcaatgcagtgtgagccactcccttctggcagaggccgacctccaaggctctgttctcccctccccgtgtacatatactcccggtttccctgcccctccattgcccttggctttttctggtatgtgctgtgctccacgaccaagccgagaaaggacctagggtggggaagggagggtctcttgattcctaaccgcccccacatactgctccaccgctgaacttcgggtgccggggaggagaaattgggctgatgtgagctccccgtcacccgccatggagccggctgtgtgtgttcatcagatacagttctcccttaaccttgtcctttctctcctgtgtctcagtctccgtcagtctgtctttctccgctcttctctgacccctgtgaggaacctccttaccctgttctggaatcgctgccagactgtagcttttaatttaataaaaataaagtaaaatatgcaactc

SEQ ID NO: 192 - DNA, 2840 bp, Homo Sapiens
atgttcaccagcaccggctccagtgggctctgtgagtaccggcctccgccatcctggctgccccctacacgccaccctaggcacctctttgaggaggctggggcagcggggaccctcgggtttgccggaggtggtggggccgaccctccagacccgcgtccgaaccctgctagttcccggtcttgggggtcagcggaaaccgcccccatttcggcctggaggggcgaatggggacaaagccccgccgcccgccccgaccccacctggtatccccaggtgctctgcccaggagtctcttggggccgctgcaagtgggcaggtgccctggtgttctcgtgggccggccccaggccctttgcggagcgtgtgccgcgctgaaggaaggggccgtcccccttaccatgccccattcttttaggcttgggggaccgaactaactccccccgcccccacttgcaaagttcagcctccgctttagaagctgacctctcagtttcacttggatgtgtttcttcttcagtctccaagaagagtttttagacaaacacacactgatgagagtgctttcaagtggagggaagttaggaagtcgtggcgagggagcgcagctgtgctgctggatgttgctgttttcctggcgtgttagcggtggtcagcagacaaggcgcctctgtcgaagagccttctgctggtccccagtgccctctccctcctgctcgccctcctcctgcctcactgccagaagctctttgtgtatgaccttcacgcagtcaagaacgacttccagatttggaggttgatatgtggaagaataatttgccttgatttgaaagatactttctgcagtagtctgcttatttataattttaggatatttgaaagaagatatggaagcagaaaatttgcatcctttttgctgggttcctgggttttgtcagccttatttgactttctcctcattgaagctatgcagtatttctttggcatcactgcagctagtaatttgccttctggattcctggcacctgtgtttgctctgtttgtaccattttactgctccataccaagagtccaagtggcacaaattctgggtccgttgtccatcacaaacaagacattgatttatatattgggactgcagcttttcacctctggttcctacatctggattgtagccataagtggacttatgtccggtctgtgctacgacagcaaaatgttccaggtgcatcaggtgctctgcatccccagctggatggcaaaattcttttcttggacacttgaacccatcttctcttcttcagaacccaccagcgaagccagaattgggatgggagccacgctggacatccagagacagcagagaatggagctgctggaccggcagctgatgttctctcagtttgcacaagggaggcgacagagacagcagcagggaggaatgatcaattggaatcgtctttttcctcctttacgtcagcgacaaaacgtaaactatcagggcggtcggcagtctgagccagcagcgccccctctagaagtttctgaggaacaggtcgcccggctcatggagatgggattttccagaggtgatgctttggaagccctgagagcttcaaacaatgacctcaatgtcgccaccaacttcctgctgcagcactgatagtcccaggccaacactgggaccggaccggcagccgagtgacagtgcgtggtccccaccatcagatcagcccggggaccgagcatctctggtgctgatgttcttgtgggaagagggaggttccaccgcacccctgccctcaaccgcaagactgttgccgttttagtgtggagataagtttgccattacattagcatgtattttctatctatattttttattgggcattttccctaggttggagagtcagcactcgttttgaatgtgtttaaaatgcattaaaatggaagatttctgcaggcagttgaatggcactccagatggggaattgctgtaaccctcttactgtaacatgtcatctcctgcgtcgtgatggggagagggtaatgttacttcacaaaggacatgtcagatccttcttcatggacttttttagttactgttttttctctcaaacttgttttcgaatctcctgggagtgagggagaaacagggagctgaatcctcccccaagctgttccaggccagaggactctgcagtaccttctcctacatctagtaacaaagaatggtgataaccatgcactggttcaaggttctggagttctccatgaaacttgggttaattttgctcagagtatccagagttagccactaggctgcgggtgaaatgggatggagaagaacaacagcaggcttcctggagccacatgggctgactagggcactctgtggctggcctggcatgggctcagcccaggaagaggagaaacgatcccttgcctgcccctccctgtggcagggctaactgcctggccctcctggctcgcagccagccagccccctggcagcaggttctcctcagggcttgggtcttcaacctgtggcgacaggaggcagggcagactgtggaggacaggatgcaggtcagggagagggaaggcaggggtggaccgccatgagcatgaaaagacccgaagcaagttgactcttgcaatgtgcaactgttatgttctgcaaaatgagcaacgatgtatcaaattgatgcaaatttagatgttgatacttacaataaagtttttaatgtgttttactcttcagtatttttctatcagacttgtacaaataaagccttgttccaggctatacatatttaccagtcaaaaaaaaaaaaaaa

SEQ ID NO: 193 - DNA, 6328 bp, Homo Sapiens
gcacgtcctgacgcagcttgggcccgcggcggcggcaagggcgggagggagcggtcgccgcgggatttggagctgcctagcctcgcggtcgctttggcagcatgtaagcagctgtttgccaagaacccaggtcactgctaagaaagggtgccttcgggagaagagtgtccagaggataccaatgccagatgcatctggagttacactcagcactcgcagtatgagacattgtgtgccagcatctctttccttctggcaaagactgtagctctccaggtaggaggatcctggaagctgtgagcaccaggagccttgccagaggaggatggggccagatatgaactctctaccatgaacatggttctcggcttatgaaggaattttaagtaaaacagttatttaatttccacatattcaagtcaaaagccttctgtgtgaagtgccagtgattacccctccacaggagttatcaggatttttctggcaccaagtttaattcttcttcgtacttctggtagtgacagatctgcaggacagatttatctgttgaatgctcttgggcaggaaaaccatgtaaaacctctggaagcagcatcaggacagcagagcagagcccccgtcctcactgctcacttgcacagaaactccatctggactcggatgcttttactgaagacccatctagcttcaatcatctttagagtccatccattctggagagacctggcgtttgcagttgcctcctgtggccgtgtttttctgtcattctgttcccaggccttctattcaggcggttgaagggtgtggactttggaatggggtttgctgttcttcgggaacttgcttcctttccctggctggtgctgtcaggaaggaccatctgaaggctgcaatttgttcttagggaggcaggtgctggcctggcctggatcttccaccatgttcctgttgctgccttttgatagcctgattgtcaaccttctgggcatctccctgactgtcctcttcaccctccttctcgttttcatcatagtgccagccatttttggagtctcctttggtatccgcaaactctacatgaaaagtctgttaaaaatctttgcgtgggctaccttgagaatggagcgaggagccaaggagaagaaccaccagctttacaagccctacaccaacggaatcattgcaaaggatcccacttcactagaagaagagatcaaagagattcgtcgaagtggtagtagtaaggctctggacaacactccagagttcgagctctctgacattttctacttttgccggaaaggaatggagaccattatggatgatgaggtgacaaagagattctcagcagaagaactggagtcctggaacctgctgagcagaaccaattataacttccagtacatcagccttcggctcacggtcctgtgggggttaggagtgctgattcggtactgctttctgctgccgctcaggatagcactggctttcacagggattagccttctggtggtgggcacaactgtggtgggatacttgccaaatgggaggtttaaggagttcatgagtaaacatgttcacttaatgtgttaccggatctgcgtgcgagcgctgacagccatcatcacctaccatgacagggaaaacagaccaagaaatggtggcatctgtgtggccaatcatacctcaccgatcgatgtgatcatcttggccagcgatggctattatgccatggtgggtcaagtgcacgggggactcatgggtgtgattcagagagccatggtgaaggcctgcccacacgtctggtttgagcgctcggaagtgaaggatcgccacctggtggctaagagactgactgaacatgtgcaagataaaagcaagctgcctatcctcatcttcccagaaggaacctgcatcaataatacatcggtgatgatgttcaaaaagggaagttttgaaattggagccacagtttaccctgttgctatcaagtatgaccctcaatttggcgatgccttctggaacagcagcaaatacgggatggtgacgtacctgctgcgaatgatgaccagctgggccattgtctgcagcgtgtggtacctgcctcccatgactagagaggcagatgaagatgctgtccagtttgcgaatagggtgaaatctgccattgccaggcagggaggacttgtggacctgctgtgggatgggggcctgaagagggagaaggtgaaggacacgttcaaggaggagcagcagaagctgtacagcaagatgatcgtggggaaccacaaggacaggagccgctcctgagcctgcctccagctggctggggccaccgtgcggggtgccaacgggctcagagctggagttgccgccgccgcccccactgctgtgtcctttccagactccagggctccccgggctgctctggatcccaggactccggctttcgccgagccgcagcgggatccctgtgcacccggcgcagcctacccttggtggtctaaacggatgctgctgggtgttgcgacccaggacgagatgccttgtttcttttacaataagtcgttggaggaatgccattaaagtgaactccccacctttgcacgctgtgcgggctgagtggttggggagatgtggccatggtcttgtgctagagatggcggtacaagagtctgttatgcaagcccgtgtgccagggatgtgctgggggcggccacccgctctccaggaaaggcacagctgaggcactgtggctggcttcggcctcaacatcgcccccagccttggagctctgcagacatgataggaaggaaactgtcatctgcaggggctttcagcaaaatgaagggttagatttttatgctgctgctgatggggttactaaagggaggggaagaggccaggtgggccgctgactgggccatggggagaacgtgtgttcgtactccaggctaaccctgaactccccatgtgatgcgcgctttgttgaatgtgtgtctcggtttccccatctgtaatatgagtcggggggaatggtggtgattcctacctcacagggctgttgtggggattaaagtgctgcgggtgagtgaaggacacatcacgttcagtgtttcaagtacaggcccacaaaacggggcacggcaggcctgagctcagagctgctgcactgggctttggatttgttcttgtgagtaaataaaactggctggtgaatgaactgggggacttctccctttactttctcccctggctgtggccctgagtagcaggcttctcgtgaggattcccgttctcttctgggagcatggccctggggctgcggagaagccaactgactgctggagcgaggaaccctgcagctcagaaggtgaacagctcgtctcagatgcttgcagatctttggttaatttagaatttccagcacagacgtggatttctccagagacggggtgtgtgcgggtcgctgatgtgaggcctaggggaagcaatgagtaaactccagggtgggggaggagcaagggcccggggagggctgcagaggggccggggcggggcagggcctgtgctgcatggtggcttctgcaggggagggacaggggagggctgcagaggggcagggtgggcagggcatgtgctgcatggcagcttctgcacagccagagcaggcaccacaggaaaagagtcggccactggtgcctgctgtacagtcacagtggaggcagagccaaggccaagcagcccctgtgggttctggggtttcaccagtttcatgctcctcagctccccattcatgccccaccagccctcacttgggacccatgctccctcgtggcacagtcatgatgcctctcaggattttgtgcctgtggtgctgagtgtcacgtccccaaggtcgccctctggcctgcagttcagggagtgggtgggagtgaagctgtgctcctggggctgcagacagatccactttgcatgtggtacctgctgggttggccctgcaatctccttttctctgcacctacctgtgacctccctgggagagcctcccatttcctcacctgccctgttgccagcccgggggaaatctttttgctctcaaatgaagactgaaaaaataaagtcagtgttatgactaataagtctcttaggaactgttttacaaaatgcttaagaataaaaagtgattttcagcttttataggtgatgtttacagtgtttgtaaaccaactggagggatcagtaattggtcttaaaagatcaggttctcttttaaaaagttcatctgaaactttatggtttgttactttcgtgatttgcataggtatttatatatacacacacacacaggttttgcttttgtctcacattcagcacagctgtctgcggcccctgccggcaggtgtggccgcacctggtgtgaagtcacgtggagtcagtgctgtggagggaagtcctgtgcgggccgggcagtgaggagagcactgattcacgcctgcagaaacgtaacctcccctttccgtgtatgccttttaccatcatccaggcgactgctccatccttttaaattaggggtcctgcaagccccaagtgacccatagtcagagtatctggtttggggtaaccgagttggtcttatggggcaaaaactcaagacacttagaaacatgcaaagtacaaaataatgtgttccctcctgttaccccagcaagggtggggctgagctgggaatgacacccagtggtgtaatgagtggaaagtgctggtcagctgctaacccccctccaagcctgctgcaccttcacttctctgcatccgtctcctgagtcataactagggacttggctagatgacctcagagacctcgtccacctctgaattctctgtttttaagcccatagttcaaactttggctttgatctctgaagtcttctgggtttggaaatacgggaagtcagctttgaatccattgcttctctaaaacatcagggctagtggaactaacccacttgagggtgacctcaagggctttaggcagccatggggctggggccatactgctctcaggctgggcagtatcttcattgtggttctcagacagccttttttactcaaacatgagactttccacccaccagttagggaactttttttttttttttaaacacggagtttcactcttgttgcccatgctggagtgcaatggcacaatctcagctccactgcaacctctacctcccgggttcaagtgattcttctgcctcagcctccaagtagctgagattacaggcatgcaccaccacacccagctaattttttgtatttagtagagactgggtttcaccatgttggtcaggctggtctccaactcctgacctcaggtgatccactctccttggcctcccaaagttctgggattacaggcgtgagccactgcgcccagccaagagggaactttttaataaagctagtgggattcccttgacagcagaaccagccttgggacttgatgcttcaccgtgtcagaatccgtccctggtgctgcctttcagagaagaggcttgatgtgtgaggggtcagggggagtgctccagatccctgaaatgcccttcccagaccagtgacaggcatttttgggtgccatcgtgtgaccttcacggcacagcaaacagtgggcactaaccctgttgtcctgtggaaatctgggtctctgaatcctgccatttccttcctggaattggccaggaacttgattttctgggctattgcttgctagtgtcccctgatgcatgaaggatccccccatgtcataggtcccacctgcctgctgtgcatcccgggtggccagactcggcttctccaggtgcacttgtcccaggtggcccggtccgtaggctggaagggcagctgcaggtgcactgcctcgcggacaggttaggatatggccacgcagccatccatcttctacagcacgcacaccccactctctcccccagtcaatatgtctctctccgatgggaaagttaataaattttgctctagattaaaagtattgatcatttcatttgtaaacgataaataaaaagggggaacttttcattgcgccaggggtggcacctggcgtgtgttgcgggggtgattgcgctggctgccggggggtgggcttctcatatgcattctggccggccagctgcattgatttcctattagtctcccagcaccacccagtaacacatcatttcagtacctgctattaatggtcttttgataaataatcacttgtaagtcaataaatttttattaaacagtgaaaaaaaaaaaaaaaaaa

SEQ ID NO: 194 - DNA, 2577 bp, Homo Sapiens
ggcgtggctgtgggtcccggattagcggcggcatgggacggttgagttggcaggtggcggccgcggcggctgtgggcctggctctgactctggaggcgctgccttgggtgctgcgctggctgcggtccaggcggcggcggccgcggcgcgaggcgccgttcttcccgtctcaggtgacctgtaccgaggccctgctgcgggctccgggcgcggagctggccgagctccccgagggctgcccgtgcggcctgccccacggcgagagcgcgctaagccgcctgctgcgtgccctgctggccgcccgcgccagcctggatctctgcctgttcgccttctccagcccgcagctgggccacgccgtgcagttgctgcaccagcgtggggtgcgagtgcgggtcgtcaccgactgcgactacatggccctcaacggctcgcaaatcggtctgctgcgcaaggcagggatccaggtccggcacgatcaagacccaggctacatgcatcacaagtttgccatcgtggacaagagggtgctcatcactggctcgctcaactggaccacgcaagccatccagaacaacagggagaatgttctcatcacggaggacgacgagtacgtgcggctttttctggaagaatttgagcgcatctgggaacagtttaaccctacaaagtatacctttttcccaccaaagaaaagtcacggaagctgtgccccacctgtctccagagctggagggagattgctttcatggcacagaacttgcggcacctccagcgaaagccaaacctaaccaagaatggggctgagccctccctgcgggctgctgtgcgttctgagggagggagacctcggcactagaaaaaaatcgttaaactaaagtctcgtctattagaatactaaattgaactaaagaaggttaggaaagggaaatttctgttacttcgggtcagttatttcgggccagacctttttcttgctcctttgccaaaataacttcagtcacgacctgccacggggtgctttcatgagtgtggtccgtatcttggtttggaatcgaaacttctgctacagcacagaaaaggcacagtgcctcttccaggtcgatcccattcccttccctgattctagaaaagtccctcctgctttggctgatgtgggccctttcagcatctccctgagattttatccctctctccatgtggcacgactggggttggttggggcctacagtctccttgtccctcacagtctgcccctgtcagggctaggtcctcagagtaaggaaaggaaatggaagtcaggaggaagggaagatgtgagtgtgcggtgcgggtggcaaaagcagccttcggggcaaccccgtgagcgtcattgccaccaaaggctggctgttcccttgattccttgcataattgctctttaaaaccagtatgcacgccagtgccaagctcttcagcagcctgtccttgggtagtaagtgctgtggtctgtcaggactgatggccagcagctgtttctatgttgggcttttaactttttttattttatttatttatttatttatcttttttgagatggagtctcactctgtggcccaggctggagtgcagtggcgcaacctcggctcactgcatcctctgcctcctgggttcaaacgattgtcctgcctcagcctcccgagtagctgggattacaggtgcctgccacaacacctggctgattttttttttggtatttttagtagagacagggtttcaccatgttggttaggctggtctcaaactcctgacctcaagtgatccaccacttccgcctcccaaagtgctgggattacaggtgtgagccgccatgccaggccgggcttttaacttttaatgtcataatgttaaggtaattttgttgtgtgtttagaagtgaccttacctttaacacctgtggagttagtgcgtgcacattgctggctcagcgtaacccatcacgggaccggaggagaggagagcggggaagaggagagcagcttcaggccgtggtgtctcccatgtctgtgttcttatttgcagctcagggtttgcattcccaggtagaacaggtgtcgtacactgtgaaatgttccaggttatttgtttataatgtgtgtgtcatatacagatagctccgatgacatctgaagttgtgacttcatcatcttgtcatatttctgtatgatgagccccagggcccatcctgaggtctgctagccatgtgcttagtctcacctccccagcccacgctggcattaccacccagagacccttcagtgctgtgtgtttttcctttttagggttacttttgactcacagtgttaggcaagccagcttggaagttaacttttaaaaaaattcaattgaagctgtaaagtataatatatagattggaagtcaccagaaattgttttagtttgtgaattcccccagtgtatgttctgaaaagaaaatgggagagcttgtaaagcatctcctaaatgcgaagccgggtgaccctggacttctggcacatctgaataaacatgttcttattctggaaaaaaaaaaaaaaaa

SEQ ID NO: 195 - DNA, 2551 bp, Homo Sapiens
cggccgcccacctgccgggtaagggcccctcgggcccgtggtcgggcatcgattggccccgcctggcgcagcccccgcccctgcagcggactgcggtgctcatcagacctgagcagttgctccggcggcgctcggggagggagccagcagcctagggcctaggcccgggccaccatggcgctgcctccaggcccagccgccctccggcacacactgctgctcctgccagcccttctgagctcaggttggggggagttggagccacaaatagatggtcagacctgggctgagcgggcacttcgggagaatgaacgccacgccttcacctgccgggtggcaggggggcctggcacccccagattggcctggtatctggatggacagctgcaggaggccagcacctcaagactgctgagcgtgggaggggaggccttctctggaggcaccagcaccttcactgtcactgcccatcgggcccagcatgagctcaactgctctctgcaggaccccagaagtggccgatcagccaacgcctctgtcatccttaatgtgcaattcaagccagagattgcccaagtcggcgccaagtaccaggaagctcagggcccaggcctcctggttgtcctgtttgccctggtgcgtgccaacccgccggccaatgtcacctggatcgaccaggatgggccagtgactgtcaacacctctgacttcctggtgctggatgcgcagaactacccctggctcaccaaccacacggtgcagctgcagctccgcagcctggcacacaacctctcggtggtggccaccaatgacgtgggtgtcaccagtgcgtcgcttccagccccagggcttctggctacccgggtggaagtgccactgctgggcattgttgtggctgctgggcttgcactgggcaccctcgtggggttcagcaccttggtggcctgcctggtctgcagaaaagagaagaaaaccaaaggcccctcccggcacccatctctgatatcaagtgactccaacaacctaaaactcaacaacgtgcgcctgccacgggagaacatgtccctcccgtccaaccttcagctcaatgacctcactccagattccagagcagtgaaaccagcagaccggcagatggctcagaacaacagccggccagagcttctggacccggagcccggcggcctcctcaccagccaaggtttcatccgcctcccagtgctgggctatatctatcgagtgtccagcgtgagcagtgatgagatctggctctgagccgagggcgagacaggagtattctcttggcctctggacaccctcccgttcctccaaggcatcctctacctagctaggtcaccaacgtgaagaagttatgccactgccacttttgcttgccctcctggctggggtgccctccatgtcatgcacgtgatgcatttcactgggctgtaacccgcaggggcacaggtatctttggcaaggctaccagttggacgtaagcccctcatgctgactcagggtgggccctgcatgtgatgactgggcccttccagagggagctctttggccaggggtgttcagatgtcatccagcatccaagtgtggcatggcctgctgtataccccaccccagtactccacagcaccttgtacagtaggcatgggggcgtgcctgtgtgggggacagggagggccctgcatggattttcctccttcctatgctatgtagccttgttccctcaggtaaaatttaggaccctgctagctgtgcagaacccaattgccctttgcacagaaaccaacccctgacccagcggtaccggccaagcacaaacgtcctttttgctgcacacgtctctgcccttcacttcttctcttctgtccccacctcctcttgggaattctaggttacacgttggaccttctctactacttcactgggcactagacttttctattggcctgtgccatcgcccagtattagcacaagttagggaggaagaggcaggcgatgagtctagtagcacccaggacggcttgtagctatgcatcattttcctacggcgttagcactttaagcacatcccctaggggagggggtgagtgaggggcccagagccctctttgtggcttccccacgtttggccttctgggattcactgtgagtgtcctgagctctcggggttgatggtttttctctcagcatgtctcctccaccacgggaccccagccctgaccaacccatggttgcctcatcagcaggaaggtgcccttcctggaggatggtcgccacaggcacataattcaacagtgtggaagctttaggggaacatggagaaagaaggagaccacataccccaaagtgacctaagaacactttaaaaagcaacatgtaaatgattggaaattaatatagtacagaatatatttttcccttgttgagatcttcttttgtaatgtttttcatgttactgcctagggcggtgctgagcacacagcaagtttaataaacttgactgaattcatttacaaaaaaaaaaaaaaaaaaaaaa

SEQ ID NO: 196 - DNA, 3531 bp, Homo Sapiens
ccgcggcgccgatcccggctgaggcgcagcggcgagaggtcgcgggcagggccatggccccggggggccgctagcgcggaccggcccaacgggagccgctccgtgccgccgccgccgcccgggcgcccaggccccgccgctgcggaagaggtttctagagagtggagcctgcttcctgggccctaggcccctcccacaatgcttgtcgccggtcttcttctctgggcttccctactgaccggggcctggccatccttccccacccaggaccacctcccggccacgccccgggtccggctctcattcaaagagctgaaggccacaggcaccgcccacttcttcaacttcctgctcaacacaaccgactaccgaatcttgctcaaggacgaggaccacgaccgcatgtacgtgggcagcaaggactacgtgctgtccctggacctgcacgacatcaaccgcgagcccctcattatacactgggcagcctccccacagcgcatcgaggaatgcgtgctctcaggcaaggatgtcaacggcgagtgtgggaacttcgtcaggctcatccagccctggaaccgaacacacctgtatgtgtgcgggacaggtgcctacaaccccatgtgcacctatgtgaaccgcggacgccgcgcccaggccacaccatggacccagactcaggcggtcagaggccgcggcagcagagccacggatggtgccctccgcccgatgcccacagccccacgccaggattacatcttctacctggagcctgagcgactcgagtcagggaagggcaagtgtccgtacgatcccaagctggacacagcatcggccctcatcaatgaggagctctatgctggtgtgtacatcgattttatgggcactgatgcagccatcttccgcacacttggaaagcagacagccatgcgcacggatcagtacaactcccggtggctgaacgacccgtcgttcatccatgctgagctcattcctgacagtgcggagcgcaatgatgataagctttacttcttcttccgtgagcggtcggcagaggcgccgcagagccccgcggtgtacgcccgcatcgggcgcatttgcctgaacgatgacggtggtcactgttgcctggtcaacaagtggagcacattcctgaaggcgcggctcgtctgctctgtcccgggcgaggatggcattgagactcactttgatgagctccaggacgtgtttgtccagcagacccaggacgtgaggaaccctgtcatttacgctgtctttacctcctctggctccgtgttccgaggctctgccgtgtgtgtctactccatggctgatattcgcatggtcttcaacgggccctttgcccacaaagaggggcccaactaccagtggatgcccttctcagggaagatgccctacccacggccgggcacgtgccctggtggaaccttcacgccatctatgaagtccaccaaggattatcctgatgaggtgatcaacttcatgcgcagccacccactcatgtaccaggccgtgtaccctctgcagcggcggcccctggtagtccgcacaggtgctccctaccgccttaccactattgccgtggaccaggtggatgcagccgacgggcgctatgaggtgcttttcctgggcacagaccgcgggacagtgcagaaggtcattgtgctgcccaaggatgaccaggagttggaggagctcatgctggaggaggtggaggtcttcaaggatccagcacccgtcaagaccatgaccatctcttctaagaggcaacaactctacgtggcgtcagccgtgggtgtcacacacctgagcctgcaccgctgccaggcgtatggggctgcctgtgctgactgctgccttgcccgggacccttactgtgcctgggatggccaggcctgctcccgctatacagcatcctccaagaggcggagccgccggcaggacgtccggcacggaaaccccatcaggcagtgccgtgggttcaactccaatgccaacaagaatgccgtggagtctgtgcagtatggcgtggccggcagcgcagccttccttgagtgccagccccgctcgccccaagccactgttaagtggctgttccagcgagatcctggtgaccggcgccgagagattcgtgcagaggaccgcttcctgcgcacagagcagggcttgttgctccgtgcactgcagctcagcgatcgtggcctctactcctgcacagccactgagaacaactttaagcacgtcgtcacacgagtgcagctgcatgtactgggccgggacgccgtccatgctgccctcttcccaccactgtccatgagcgccccgccacccccaggcgcaggccccccaacgcctccttaccaggagttagcccagctgctggcccagccagaagtgggcctcatccaccagtactgccagggttactggcgccatgtgccccccagccccagggaggctccaggggcaccccggtctcctgagccccaggaccagaaaaagccccggaaccgccggcaccaccctccggacacatgaggccagctgcctgtgcctgccatgggccagcctagcccttgtcccttttaatataaaagatatatatatatatatatatatataaaatatctatattctatacacaccctgcccctgcaaagacagtatttattggtgggttgaatatagcctgcctcagtggcagcatcctccaaaacttagacccatgctggtcagagacggcagaaaacagagcctgcctaaccaggcccagccagttggtggggccaggccaggaccacacagtccccagactcagctggaagtctacctgctggacagcctccgccaagatctacaggacaaagggagggagcaagccctactcggatggggcacggactgtccaccttttctgatgtgtgttgtcagcctgtgctgtggcatagacatggatgcgaggaccactttggagactggggtggcctcaagagcacacagagaagggaagaaggggccatcacaggatgccagcccctgcctgggttgggggcactcagccacgaccagccccttcctgggtatttattctctatttattggggataggagaagaggcatcctgcctgggtgggacagcctcttcagccccttctcccctccccgcctggccagggcagggccaccccactctacctccttagctttccctgtgccactttgactcagaggctgggagcatagcagaggggccaggcccaggcagagctgacgggaggccccagctctgaggggagggggtccgtggtagaggcctggggccggtagaggctccccagggctcccttatgtccaccacttcaggggatgggtgtggatgtaattagctctggggggcagttgggtagatgggtgggggctcctggtggccttctgctgcccaggccacagccgcctttgggttccatcttgctaataaacactggctctgggactagaaaaaaaaaaaaaaaa

SEQ ID NO: 197 - DNA, 2323 bp, Homo Sapiens
ggaagggatgggctcgcgctgccgggcgtgggcgtggactcgggcgtgggcactggcggagttccaagcccgggctgaggagggggcggcggcggcggcggcggcggcgggcgggtacccttcgactgggcgttgccgctgttccctgcgcggcatggaggggacggccgtggccgtgttcgagattttgagatttttaataattcactggaagtgtgacatagatgtatcaaagggagcattgctagaagggcagctagtgatttccatagaaggattaaattctaagcaccaggcaaatgctcttcattgtgtaacaactagatggagtctcactctgttacccaggccggagtgcagtggcgcagtctcggctcactgcaacctccacctcccaggttcaagtgattctcatgcctcagtcccccgagtagctgggattacagatgcccaccaccatgcctggctaattatggttgcttctgcaggaagcctttttggtggcatggtcctcaagaagttcctaaaagaaatacagtccatactgcccggaatctctgcaaagctgacttggacttcagaggaaggcagctattctcaggatatgacaggggtaacacccttccagatgatttttgaggttgatgaaaagcccagaaccttgatgacagattgtctggttataaagcattttttacgtaaaatcatcatggtgcaccctaaggtcagatttcatttcagtgtaaaggtaaatggaatcctctccacagagatctttggggtggagaatgaacccactttgaaccttgggaatggaattgctcttttggtcgactcccagcattatgtgagaccaaattttggtacaattgaatcacactgcagcagaattcaccctgtgctaggacatccagtaatgcttttcatccctgaagacgtggctggcatggacttgttgggagaactgatactgactccagcagctgcactgtgccccagcccaaaggtttcttccaaccagcttaacaggatttcttcagtttccatatttctatatggacctttgggtctgcctctgatattgtcaacttgggagcagccgatgactactttcttcaaagatacctcttctttagttgactggaaaaaataccatttgtgtatgatacccaatttggatctcaatttggatagagatttggtgcttccagatgtgagttatcaggtggaatccagtgaggaggatcagtctcagactatggatcctcaaggacaaactctgctgctttttctctttgtggatttccacagtgcatttccagtccagcaaatggaaatctggggagtctatactttgctcacaactcatctcaatgccatccttgtggagagccacagtgtagtgcaaggttccatccaattcactgtggacaaggtcttggagcaacatcaccaggctgccaaggctcagcagaaactacaggcctcactctcagtggctgtgaactccatcatgagtattctgactggaagcactaggagcagcttccgaaagatgtgtctccagacccttcaagcagctgacacacaagagttcaggaccaaactgcacaaagtatttcgtgagatcacccaacaccaatttcttcaccactgctcatgtgaggtgaagcagcagctaaccctagaaaaaaaggactcagcccagggcactgaggacgcacctgataacagcagcctggagctcctagcagataccagcgggcaagcagaaaacaagaggctcaagaggggcagcccccgcatagaggagatgcgagctctgcgctctgccagggccccgagcccgtcagaggccgccccgcgccgcccggaagccaccgcggcccccctcactcctagaggaagggagcaccgcgaggctcacggcagggccctggcgccgggcagggcgagcctcggaagccgcctggaggacgtgctgtggctgcaggaggtctccaacctgtcagagtggctgagtcccagccctgggccctgagccgggtccccttccgcaagcgcccaccgatccggaggctgcgggcagccgttatcccgtggtttaataaagctgccgcgcgctcaccaagtcctcttccgcgtctgcttccgcgtcgggcccgggcggggcggggcggggcgtggagccgcgccgcggcctgacgtcacccacacctccctgggactgcgtcactggtgcgcgccgcgggtcagggcgcaatggcggcgctgggcggggatgggctgcgactgctgtcggtgtcgcggccggagcggccgc

SEQ ID NO: 198 - DNA, 2081 bp, Homo Sapiens
gttgctcatctgctgcggcgctggtcgcgcctgcgctttggttcttggaaggcggtgctctgagaagccggactacgcggcagcggctcttcaaagcggagccgggagtttttgctacagttttcgccaccatgagtcgcagctataatgatgagctgcagttcttggagaagatcaataaaaactgctggaggatcaagaagggcttcgtgcccaacatgcaggttgaaggtgttttctatgtgaatgatgctctggagaaattgatgtttgaggaattaaggaatgcctgtcgaggtggtggtgttggtggcttcctgccagccatgaaacagattggcaatgtggcagccctgcctggaattgttcatcgatctattgggcttcctgatgtccattcaggatatgggtttgctattgggaacatggcagcctttgatatgaatgaccctgaagcagtagtatccccaggtggtgtcgggtttgacatcaactgtggtgtccgcttgctaagaaccaatttagatgaaagtgatgtccagcctgtgaaggagcaacttgcccaagctatgtttgaccacattcctgttggggtggggtcaaaaggtgtcatcccaatgaatgccaaagacttggaggaggccttggagatgggggtggactggtccttaagagaagggtatgcctgggctgaagacaaggagcactgcgaggagtacggaaggatgctgcaggctgaccccaataaagtttctgcaagggcgaagaaaagaggccttcctcagttggggaccctgggagcaggcaaccattatgcagaaatccaggttgtggatgagattttcaatgagtatgctgctaaaaaaatgggcatcgaccataagggacaggtgtgtgtgatgatccacagtggaagcagaggcttgggccaccaagtagccacagatgcgctggtagctatggagaaggccatgaagagagacaagattatagtcaatgatcggcagttggcttgtgctcgaatcgcttccccagagggtcaagactatctgaagggaatggcagctgctgggaactatgcctgggtcaaccgctcttccatgaccttcttaacccgtcaggctttcgccaaggtcttcaacacaacccctgatgacttggacctacatgtgatctatgatgtttctcacaacattgccaaagtggagcagcatgtggtggacggaaaggaacggacactgttagtacacaggaagggatccacccgcgctttccctcctcaccatcccctcattgctgttgattaccaactcactggacagccagtgctcattggtggcaccatgggaacctgtagttatgttcttactggcactgaacagggcatgactgagacctttggaacaacctgtcatggagcgggccgtgcattgtcccgagcaaaatctcgacgtaatttagatttccaggatgtcttagacaaattggcagatatgggaattgcgatccgtgttgcctcacccaaactggttatggaagaggctcctgagtcctataagaatgtgacagatgtggtaaatacctgccatgatgctggaatcagcaagaaagccattaaactgagaccaattgctgtgatcaaaggatagaaccttggacagcagggctgcctgacaccaccaaccctctctgaagtggaagtggactgacatgctcttctgacatcagactcaaggcgggacaagttgcaaagtgtgcagctgtaactgctcacgccaaaatggctgatggggaggctgctgctttcaggggcccgtgcttgtaaaataaccttccaggaagaggcacattgcccacctttggaaagggaggaatatgccttctccttggttgttccacagagttttaggaaaatctgttagggatgggtagatgtcaaactgccttacgcagtcatactgatctttagccatcagattgatcttcttcacaccaagctctgtttacattccgagaggtgtcatgaagaaagttctgttcaataaggttttggaatgtttcctttcaaaaaaaaaaaaaaa

SEQ ID NO: 199 - DNA, 1203 bp, Homo Sapiens
agaaagccgcgcacctcctcccgccaggcgctttctcggacgccttgcccagcgggccgcccgaccccctgcaccatggaccccgctcgccccctggggctgtcgattctgctgcttttcctgacggaggctgcactgggcgatgctgctcaggagccaacaggaaataacgcggagatctgtctcctgcccctagactacggaccctgccgggccctacttctccgttactactacgacaggtacacgcagagctgccgccagttcctgtacgggggctgcgagggcaacgccaacaatttctacacctgggaggcttgcgacgatgcttgctggaggatagaaaaagttcccaaagtttgccggctgcaagtgagtgtggacgaccagtgtgaggggtccacagaaaagtatttctttaatctaagttccatgacatgtgaaaaattcttttccggtgggtgtcaccggaaccggattgagaacaggtttccagatgaagctacttgtatgggcttctgcgcaccaaagaaaattccatcattttgctacagtccaaaagatgagggactgtgctctgccaatgtgactcgctattattttaatccaagatacagaacctgtgatgctttcacctatactggctgtggagggaatgacaataactttgttagcagggaggattgcaaacgtgcatgtgcaaaagctttgaaaaagaaaaagaagatgccaaagcttcgctttgccagtagaatccggaaaattcggaagaagcaattttaaacattcttaatatgtcatcttgtttgtctttatggcttatttgcctttatggttgtatctgaagaataatatgacagcatgaggaaacaaatcattggtgatttattcaccagtttttattaatacaagtcactttttcaaaaatttggatttttttatatataactagctgctattcaaatgtgagtctaccatttttaatttatggttcaactgtttgtgagactgaattcttgcaatgcataagatataaaagcaaatatgactcactcatttcttggggtcgtattcctgatttcagaagaggatcataactgaaacaacataagacaatataatcatgtgcttttaacatatttgagaataaaaaggactagcaaataaaacacaaaaaaaaaaaaaaaaaaaaaaaaaaaaaaa

SEQ ID NO: 200 - DNA, 3887 bp, Homo Sapiens
aaaaatcgaggcggggctgagaggctgcggcggctgactaggttttcggaccgcggcgcggcggggaagagagactgcggcgggagggccaggccgtgggagagacgcgggaaagtgcgggtcgcagaggcacttgaccaccccgccctaggccgacccggcggacgcggcgtctggtgtgcgggcgctggggcgggtcccaggtctccccgctgcgctgcttgaggctcagccatggcccagcagagagccctgccccagagcaaggagacgctgctgcagtcctacaacaagcggctgaaggacgacattaagtccatcatggacaacttcaccgagatcatcaagaccgccaagattgaggacgagacgcaggtgtcacgggccactcagggtgaacaggacaattacgagatgcatgtgcgagccgccaacatcgtccgagccggcgagtccctgatgaagctggtgtccgacctcaagcagttcctgatcctcaatgacttcccctccgtgaacgaggccattgaccagcgcaaccagcagctgcgcacactgcaggaggagtgcgaccggaagctcatcacgctgcgagacgagatctccattgacctctacgagctggaggaggagtattactcgtccaggtataaatagcgctggactccccatgcagagcgggagcctgcctacctgggcctggccagcaggcagggctgccttctgctttttcaaattcttgctggtcttagcagtggagccatgcctgggtttcagagcagagctcctggccagagcgtttgaccgacagacaattcacatccatatgccagggccctgggcctttcccacagtgcaatgtgatgaaaaccacaggactcacgccagtcggataggccgagtctggagaagggaggcgcctggctgtatcccccgcaggccctcttccgagagccttcctcctcgggcagtgcgttctggggctgtgctgctcctgttaccttctgaatccatatgtagagatttcagccaaggctgggccagccttttttgggcagtcaggtccacacctatgtccagggcaccagggatgcaattccatgtggatgtcaccaaaccccagtgtggaggcagggacagtcatgggaatgtgggggatgaagcccaggcagggaatggccttgaaagccattggagctccaattcgtgacccactcagccttatccacggagctggagccaacctacgtgccaggccccgtgctgggtcccagggatgcagaagggtcaaaacccatcatcctgacccttgtggggctccgtaagaagctgaaaccttcgaccgtttgagctggaggggccctgagaaatcagagtctacgtatcatttacttagggggaaacttaggctggagacagggaggccttccactctgccccattagcttagaaaatcaagattcagtccagcagatgcagagtccatgtccatcttgtgccttctcctggacaaacctttccttcctggtggtggatttaaaatactcctttctgcccattggccatgctgggagccacagatatccagagccagcatgacctggggcttggtttccctgccctgggctcagtggcactgctgagctgcagcagtcctagagttttccagggggttctgagggaatctttggtccccagtactcattaactcagcagacatgaggcagcatttcctccacactagggtggctgagaggggtcctggggtgtttcagacccttctgggcatctccttccacagctgttcagtttgtcggtctctttgaggcagccaccgtccctgagggcccctgcacagagcagctgtgggcctgtaattcagcctgcctgccttgccttggggcagggagagagggaacctgctcacggccctgcagcagagcagggcgcaaacccaggacatctgtgccaggcttcccatgccctcccccaacagtccctcagcttcacccagcggggcttccaggccagcctgtgtcccctcccgcaggcctcctgtccacaccagcgccccctggggggcctcacacagcccctgtggcagaagcagttgccctcctctgtacattgcctttaagcgaccaggtcctggccgagtttcctctgccccttcttgctggtcccccaaagggcgctccgctccctgccctgccctgccctgccctgttccgcatgagctgcgcctctgtgctcgcctgccccctctctgcttgttagttgctctttctggctctgcctctcctttgctttcctcgggatgccactctgtgcccaggacggttctgagactgaacactgagggcaggagcaagggaggaagccaggggcgaggcaggccgcgggaaagccagggcccctgcctgcaggttagaaagaggcgagcgtggattgtcacagctgcgggcatgggaagggctagctgagctcttcacctgcatcctggctgccgtgaggattccccgtgttagaggtggggacgcctgctggaggccgcctggctgatgtagggctatcgggaagtgccagggcctgtgttcccaactgtcgcccccttcaggctaagtctcaggcagggacagacccagaaagaacacagtctgccctcagagagctctttgcagtgtagtgacactggggtttctgcagtcagggaggagggagggtggccaggctgacagctttttgcaagaggagggggaccagcaccagctgggaggcataggctaggacaggcccacgtggaggctgggcaggaagggcctgctgaggtcacacagctgttggtggttgggccagggcggcttcctcctttcagaatgctagggtggctctcaccactggccgcctctccttgccaggcctgccaactcaggggacagatggagcaggagtggagaaagggaaaggcaggtctggggtgtggtcgtgttttcttaactctgcttctgtcttgctctcccctcccctggctttcctctctgcctgctcctgtctctccctggggtttctggtggtggaaaagctcaagcctttgcgaagctaatgacctgcctctgtgcgaagcttacgggaggctggacctcgacacagactctgctgatggcctctcggcccctctgctggcgtccccggagcccagtgctggccccctacaggtggcagcccctgcccactcccatgctggtggccctggccccactgagcacgcctgagcctccggggccacgcttcgttctcaggaacaaaacctgaggcagccctttggatgccctcacagccttgcttctctcagcctaggttcccatttggggacttcaggaccccagagccactaggacttccttgggaagcccgttagcccagggtgggtcccgccaggacagtagggaaacagttgtttccctagccatttccgaatagcccatcattccgagtcatcatctctgtttgctgccttcctggccagccaggtggaagaaagtttccaagctaggtctggcccgttggggatctcagcagtggggcaggagggtgcctgatttcggggagtcctgacccgagcctgttgtcagagttgggaggggctctgagcagtgttgggcaggccgggtctcccatcccgaggccagcgttcctgtgcagagccccatccactggttcttgccctgagccacatatgtctgtgccatgggctgagtgccacgacaggcccgtgtgacagctgctgcccacgcatgtggaagctaggtgggactcattcctaattctgccgttgtaatgagacttgattaaaacaccgccacttttttgcaaaaaaaaaaaaaaaa

SEQ ID NO: 201 - DNA, 1609 bp, Homo Sapiens
gggattggagtgctctgctccggacgcactacgtaggtgggcctgcgggagttctgagtgcgacggcgcaggtctgcaccatggcggcccggcttgtcagccgatgcggggctgtgcgtgcagctccccacagcggcccgctggtgtcctggcgcaggtggtccggcgcctcaacagacaccgtgtatgacgtggtggtgtcgggtggaggcctggtgggcgctgccatggcctgtgccttgggatatgatattcactttcatgacaagaaaatcctgttgctcgaagcaggtccaaagaaagtactggagaaattgtcagaaacttacagcaacagggtcagctccatttcccctggctctgcaacgcttctcagtagttttggtgcctgggaccatatctgcaacatgagatacagagcctttcggcgaatgcaggtgtgggacgcctgctcagaggccctgataatgtttgataaggataatttagatgacatgggctatatcgtggagaatgatgtcatcatgcatgctctcactaagcagttggaggctgtgtctgaccgagtgacggttctctacaggagcaaagccattcgctatacctggccttgtccatttcctatggccgactccagcccttgggttcatattaccctaggtgatggcagcaccttccagaccaaattgttgataggtgcagatggtcacaactccggagtacggcaggctgttggaatccagaatgtgagctggaactatgaccagtctgctgttgtggctactctgcatttatcagaggccacagaaaacaacgtagcctggcagagatttcttccctctgggcctattgctctgctcccgctctcagacaccttgagttccttggtttggtccacgtcccatgaacatgcagcagagctagttagcatggatgaggaaaaatttgtggatgccgttaactctgccttttggagtgatgctgaccacacggacttcatcgacacagctggtgccatgctgcagtatgctgtcagccttctgaagcccactaaggtctcggctcgccagctgcccccaagcgtagccagggtggatgccaaaagccgagttctgtttcctcttgggttgggacatgctgctgagtacgtcaggcctcgggtggcgctcattggggatgcagcccacagagtccatccgcttgcaggacagggtgtcaacatgggctttggggatatctccagcttggcccatcacctcagtacggcagccttcaatgggaaggacttaggttccgtgagccacctcacaggttatgaaacagaaagacagcgtcacaacactgctcttctggctgctacagacttactaaaaaggctctattctaccagtgcctccccgcttgtgttgctcaggacgtggggcttgcaggccacaaatgcagtgtctccactcaaagaacagattatggcctttgcaagcaaatgagtactcctctcctaaagaaagattacgttgatgaaaaagaacatcctgcccaggacccatcatacatattttcaagatcttatttaatttaataaacttactttacattaaaaaaaaaaaaa

SEQ ID NO: 202 - DNA, 8949 bp, Homo Sapiens
ggaaagactatgttttaggtgacccgtgtggcctttttgttgaggcctttaggatacaaggcccccacctaaagacgcgaccctcccgtaggaggggggcagggcccgggggcgggagcacagcggggccccagcctcaggcggcgcgtcactgagcacaaaggagacaacagcgaggcggcagcgggcgctgatcttcgctcgccagccactcgcaattgcggttacagacctgcagctccccctcccccagccggcccgcccgcctttctgtctcctctctccctccgtactggacggccccggtccatttccgggctccggatatttggtatcgattggggccggggacgcggagcaggtggccgcggcggggcagctgggccgccagcttggtgcctcggggaccgtctcccgctgctttggtcaccagcccctgcccgcccgacccgctccgttctccggcctgcgagccctgccggccggactttgcgccgcgtccggcgctgctgctgcgctcggggccccgctcggcgccggcggtgaccgggaagcccgcgttaaaggggcaaccgggaccctggcccggtatggctgaagtcagcatcgaccagtccaagctgcctggagtcaaggaagtatgccgagattttgctgtcctggaggaccacaccctggctcacagcctgcaggaacaagagattgagcatcatttggcatcgaacgttcagcggaaccgtttggtccagcatgatctccaggtggctaagcagctccaagaggaagatctgaaagcgcaggcccagctccagaagcgctacaaagaccttgaacaacaagactgtgaaattgctcaggaaattcaggagaagctggctattgaggcagagagacgacgcattcaggagaagaaggatgaggacatagctcgccttttgcaagaaaaggagttacaggaagagaaaaagagaaagaaacactttccagagttccctgcaacccgtgcttatgcagatagttactattatgaagatggagaccaaccagggtcaaggagggccagggaattgggttctggattctcaagaccttgtagactccaaagagatggaaagactgtgaagcacaagaaagagaaaccagaacatccactggagaacttggaagagccagaacaacattgttcatcgaagagatccctgtcatcctctagctcgggcaaagggagggacaatccccatattaacaatgagcagcatgaaaggaaacggtccactcaggagaggcctcggagacctctgcttcccacgatcagtggtgaagtgtttctgagcactgaatgtgatgactgggagactaagattaaccatcagactcgaaattgggaaaaacagtctcgacaccaagatcgactttcacccaagtcctcacaaaaagcagggcttcactgcaaggaagttgtatatgggagggaccatgggcaaggtgagcacagaaaaaggagacacaggcccaggactcctccattctcagagagtgaggagcagctccacctccatgacgcaggaatgaagccaagagtgatgaaagaagctgtatctactccatcacgaatggcccacagggatcaggaatggtatgatgctgaaattgccagaaaactgcaagaagaagaacttttggctacccaggtggacatgagagccgctcaagtagctcaagatgaagaaatcgctcgacttctaatggctgaagaaaagaaagcttacaaaaaagccaaggagcgggagaaatcatctttggacaaaagaaagcaagaccccgagtggaagccaaaaacagctaaagcagcaaattccaagtcaaaagagagtgatgaacctcaccattctaagaatgaaaggccagcacggccaccaccacctatcatgacagatggtgaagatgcggattacactcattttacaaaccagcagagttccacacggcatttctcaaaatcagagtcctctcataaaggttttcattacaaacattaaaaacctaggaatctgccttgaaaatggactcactatagcaaatattactgggtgatacagaatgaattctacacttactttttttctcctgtgtttgcattcctgggatttatcctcaagtgcatttctgaccataagtaattttaattcatttcaaatgttttggttattcatgatcacttgggcagtataagaaaatgtagcttctgaatattggccacctctatgctgcatatacttcttgggatatagtatctaagacctttgtaaactgccattttgttaggtatggagtttggtatctagggagtaggccttatttagcaattcaaattttatggagatgaatgatcaaagtgaaacaatgtttggatgcaacgcagaataaaagaatataagaaatagctttttgttgcattaatgtatgatattttgaaggacagagcctttgctttttgtattctttaagaaaagcacaaccataaagtattttaaaaaaagaaacacttggagcaattgaaatatgttattctgactagatggactgtagaggttttgcatttctcagccctcctggggagattggcctagatagcattctttaacacttcctctgcttttgcctcagtagcaaggctttcctaagctcctgggcaatggaacatttattagtatttattgacaaaaatttagttctctgaaattttaactcatatatatgaaaaactttgtattccatctcttctttttcatttacttgtagagccaaggaaatggaattgaaagatgattgcataagtaatgatgccatccttctctctggctgtagactgaggcttttctcttgcttcaagtcagagcagtatttgttgataacctctcaataatgtttggtttacatgccagtaattaaattaattcaacatgaagttgaatttgatgaagtggtcatctatccaagtatttggtttttgttttgttttgttttgttttttgagttggagtctcgccctgtcacacaggctggagtgcagtggtgcaatcttggctcactgcaacctccgccacctgggctggagcaattcccctgcctcagcctcccaagtagctggaattacaggcatgtgtcaccacacccggctaatttttgtatttttagtaaagagcgggtttcaccatgttggccaggctggtctcgaacccctgacctcaagtgatccacctgccttggcctcccaaggtgctgggattacaggcttaagccaccatgtccagccagccaagtatttggttttaaacatttgtattcctttgtgcaagggattgtattcctctgtacaagacctttaagcacctcttcaagaaatttagtctttgtgtagctgctaaccttactgcaatatttattttcccttattttcccatactacttagttgacaaatggcaatcaagctcacttgttctccctctctctgtctcccccccatgtacacatatatatatcccttcagcttgacttgctattatttttcattgtataaatatgaaattcttggcatttcaatatggcatttgtttagggaaaaaatatgtaggtcactagagaaaaatgttaatttttttcccactgtgaattgccttctgtttgccttatcttttcagatagtctttaaagttgggcaatattcaggcagctatttagaacagtttctcagagtggatttgggtctctcatttgagaaagatttgtagtttcaatgaagtttgtatattataggaatttaagtaaaatcatctgagttaagttttgggcaaatgttaatcagaaagataatctacatccctactttatgtagtcattttggagaaatggaggaaaaggaaaataacaggactttttatagctgtgataaaatgggtaaagaaaaacctccatttaaataaggaaggggagacaaaatggaaggtcctggccttaagtcaaattccagatagtgctttcaatatccaaagcttaggccttgtttacttatagtaatgctatatttttctttatctgccctgtgatttcgcttcgtgtccttcaaagtttttttattgtaattttaaaggaaaaaaacaatgtatttttatttgataactaggcaaaatcatttgccattttttatttcataaatatttatttttctatctcatacaatgatcagttttactttaaaaattctgcatttctcttgcctctcatgtacttcatccagttatttattattgtaaaatgttaactggagatactgcattcaaaaaaaagtcggaccacttaacacttaccaggaatgttagtgtttcagctgttttagtaagtgaccaagtaagctatcaccttgtgatagctaattcaacatctttattgaaaatttgttactttttttaaaggtttttaaaagattacaattttaaaatattttatgtttattttatttttgtgtaaagcaaacacttttaaaataatatcagagtaattattaccctatgaataaggagatagaaatgaaattcagccagttaaatcctcatactctttctcattcaaataatataataatgtttgagactatagaagcaactcaactgtattttaatgaactgccagacacttttcactgtgttctctgctttttactttgtcatttttatataaatgtgaaagcattttgttgttgttgttgttgttcctgctgctagaacacatgcagtttaatttttaggcccacagtgtattatgctttaatgttgtgatgtaaactaatacttctggcctgggaaaacctttctgtttctgtatctttgtcctttggaggccaggcctcattaacaccagtattgttgaataagcacaatatatgacggagccttatcataaggctgcttgacatagacacccactctcctccacattttataaatcattgtttggaagtaaagttagataagagtcaaattaaatgttttgacttgaaaaatatttgacttttgcgttcaaaccactgttagacgtaagtattttattagacataagtattttattttgggactagacagttgctttacatgtatttaagggaacattgtgattttcagaaagtggctttacatactattgaattgctatttcccaagttactttacaaccagcagcagcataccaataaattacaaaagcagaaaatgaaaattaaccctaggtgttctgatgatagagaaatagctaaattagaaaagaaagatatggatagatgcttttaggaggaaaacctttttagaatggcaatgaccacttggatctaggtcaacatattccaaaatgtgtgaccttgggctttgtgtttactgaactcactctagaaaattctggacctgattcattaaccccgcttttcttctctaatgtgtcctgaagctgagctagatgatgagtaaattctttgctgactgttgctcatcactttctctcaaagttagaacttttcagtataaaaataattagcttttaactgattattaattttctttaatagtttctgtcaaaacttgtctaaaatttgtgttgtgccaaattggaaatacccactataatatggtgcattcagtttactccacaagtggttaacattttaagtcctagattttttatgtcttgcctttgtataagcatcgctttggggaataccaagatgattcattattcagtgattattttcttgaaagataactatgatgattggctgtaaaatcttcaccctaataaaggagtgagatctctgtgtaaacagctttctgaaggactgataatagaatagaacttgcagccaaaggctttttcccttttgagaagacggtatttgtgtaaggagtgctaaggtagacttcattgtacatagagtgccatattctgttgaaacgatcataacaaaatcaaaacctcatgcttcagcaaaaaggaaaaaagatttttaaattactttgtctattacttactgctcatagagaagtgactatataaaatggtccaattttctcatttctggtggtgcctgtgagtcttaaagccatatctgcttatcttactgttgatagaatactttttttctttttagcccatgataagtaatatgggcaggtagaagcaaactggagactgtcctgttaatgctgcatggggcacaatgtctttcaaattattggtggaagaatctcttttatccatggcgagaggtaagaatattaaagagtcaggatattgttgctcctggtatttaacaactgtcattagaaatgctgaaatttaattgtagagaagtcaagaaagaaagagtaaactgagaaaatcttactactacagagtcacttttacaatgagacctgcactttatgccagcactgtttgtgaggagcagtactgccttaaattagtttgactctgactgatgtcagtgtacgttacttcctttatgtgactgacagtcagctttccattgagatataacattcacagatgatccccaagtatccttgtcatcagaagctttggaccttttctgccactgacttgtggctgatctgtaacacaataaatacataattttatttcatgttgtctgtccacctctgaataagcagtggcatgaccaaaaagactggtagaaggagagaatttcttggccaaatccttcataccaggtaccacttcttgagtaactgagagttgactgtcttctatggtgactacatagaagatatttccaaaggttctgttatgcagtgaagacattcagattatttgtaagaatttcaccaacacccttgtgtattgaaatgcttaaccattaacagggaaaaaaaaggagaaaaccgaacaaaacagagacatttacttgaaatgggaggtttgctaatgtgaagagtgtttctgttttattacttataagagaaaagcaggaaaacttttgctttgataagaaagacaccagagtggtgattctgtttgatgccacaggctaacacaatcgtgtaatcatgttgagttgtagaaatatatggccctaaaaaccattctctttcccttatatatataaatatgtgaacactgcctagtaacattttaatagatttaagatgcatttgtacattctcagcaaactagaagaaaatgttttttctctttttgagttaacttcatagcatagagaaccagcactgtgcaggtttcagcatttcagataagggcataattaattgtgtaacttaatgccctgttattcattgctgaggttcatataaagaatagaaaaattgaaagatgggtttgggcgacattttcttcccaaaagatcaagtaaggagtaagaacaagtaagggaagacagctaagagaacatactatgacatatcatagaattgggatacatttttgttgcactggatttcaggctatactgctaaaataatttctacctgttaaattttgtgagagggtttttgacatcagaatttttgtatttctggtcaaattggtcttggaaatccctatggtctctaatttcagctcttgctgtaaactgcaagccaaatgctctttctcagaaagagctatatttttctcttcttacaggcaacccaatatttatttcataaagtgttataaatattgagaagatacactggggagatagcatataaaaatgatgctccaaaatgagaattctatatggggctttccctaagaagaatccatcccagcacatattttgaaaaggtgctgaattaaaaagtacaagagtttgctcatataaatcaagttgcccaggaaacctgaggtgatgctatcatttgtctcataatttagaaacgtgatctcttgagagagagactacgcattgcctgggcactttcagattccttaggaagtgcccctttgatatttggaatgtggatatatttataaaacaaatggattgttattccaaatccacatggatttataaccaagccccagaagaataggcagctttgaaatagctagttcgtggaattgaacagaaccttgatggaatgcagttgcctgtgtgaggacagaaaacaaagaggctgcctcagaccacatgcctatctagagattaagtgaatttgtgagggacattttgtggatgccttaaagatgaccagtggtgggttctgatgggaatatatacactcatctggactaggccaatggaagcagtctctttcagttcacctccgtacagcacaagttgttcctgctcatgacctcattgaggaaaatgagaattgtggtgctggtgactttcatgtgtcttgggaggttgaggtgttcaacatcgttaaggcactcccaaaacgcaaacctccttttttaaatgccaattgtacatctacattaattcatctatgcaaacttgtgttttcatggtttgttttttacactatatttctcattaggttctttaaacatcaggtttaatattgatattatgaataatttttaaaccaaagtattctataagtctgtgtgctttgttttcctggatggtttgaccaaggtaaacatcagtcttgtccttctctcttaataaagtcatccatttgttaagtcagtggtctctgtctcatgtttttgttttgtttctttacagcattcaaggacagggaaacttacgagagtcttattataattattattatttacaaaatgaccctaataggtctgtttagtaacagtgaaattttttcttactccatttccatacactttctgtaaatatgtataacatgataatgatgcctggtgtattgaaatcctcaataaatactgccaagtgtggatcagttgga

SEQ ID NO: 203 - DNA, 19271 bp, Homo Sapiens
ggctctgattcagttttctttttcttctcttttccttttttttttttttttttttttttttttaggaatgcagagcagttgctggggtgattgacctaggcacagtggagatatttcccatcttcaaagccatgcaaaagggcctccttgaccaagacacaggcctagtgcttctggaatctcaggttatcatgtctggcctcattgcccctgagacgggtgaaaacctctctttggaggagggcatagccagaaacctcattaatccccagatgtaccagcagctccgggagctacaggatgccctggccttaataagcaggcttactgagagcagaggccctctttctgtggtggaagcaattgaaaagagaataatcagtgagacagttggactgaaaatcttagaagctcacctggcaactggaggtttcagtctttcccctagtgagaactgtattaacctggaagaggcttttcatcaaggcctcatttctgcatggcttcattcagtattagagtcttatcttagaacatccaagaatttgatagaccctaacacagctgagaaaattggtttgctggatctgatgcagcgatgtattgtccaccaggaatcaggattcaaattactgcctgtcaaacaattggcaggggggatggtgagcttgaaatcaggccggaaggttagcattttccgtgcagttcaggaagggctaatagataggcaggtcactgtccggttgctggaagctcagctttttgctggtggcatagtagatccaagaacaggacacagacttacagtggaagaggctgtaagacataatctgattgaccaagatatggcctgtgctatcctcataaggcagcttcagacaggaggcatcatagacactgtcacggggcaaaggctaacaatagatgaagcagtgagcaatgatctagtagctgctaagatcgcccttgtgattctggagtccctctggtcattcatggggttgctgtggcctgaatctggagagatcctcccaattacagatgccctagaacaaggtattgtgtctactgaactagcacataaaatccttagtaaccgacagcatattaaggctctgtttctaccagcaaccacagagattttgtcctggaagaaagcaatagaaagtggtatcctggatagagatcttgccaataacttaaaatcgatttgtatacctgatgtgatgccccacatgcaactagcagactctgcagaacaaaatattaatcctggagcagcagttctaccgtgcagcaagagccaccctaaggccacagcaagccagagtgagaatctgttgttccagctgatgactcacagctatattaatgtgcaaaatggacagaggctgcttctgttagataaagagctgatggagacactaacatccagagatgagtatcaaacaagtcctccaaaagtggttgaaattgggcatcaaaggcaaaaaactcctgagggattgcaagaatcagctaatgtgaaaatctcaggaactttcagcagtgggtggactgtgaggctgcctgagttccagttttcttctcagaacaaagaatatcccgatcgggaagattgcactacagaaaaaggcaaaaagaccactgtagaaacagaagattcttctgtagagaaccctgaacaggatctgtttgtagaacaaaaagagagaaatccaaacattgatgctttgaaggtaataaataaagtcaaattagaggtacaaaggcagttgataggtacccaaagggaagaccaaacagcagtgtctgtcagagaaaatgccagcaggggacacctcctgaccatacctcctgctgaggcggaaggtgtgccgttggtggttgacaaagatgttttttctgttgaaacaccaaagaaagaacatcaacctctaagaaacacttcctttacatgtcagaatgaacaagcacacactcttgagactgaatatattcatgatgaaactggaggatctcacataaaaccccaaagcaaaaagttacaagttcaggtaaagaaaactctaggtataaagttagaactaaagtctgaaactgatgggaatgttcatcctctggacaaaaaggaaatgttaaagaaaacatttctggctaaggatgaccataaagaaagtcaagaagcacagaacatcgcaggtggtagtatgatgatgtcagaaaagaccgatgaggaagatagtggcagggaaatttttctgtcatgcagtcatccattagaattgcttgaagaagctaccttaaatgtattatctgcacagttactagatggtggtatctttcatgaacaaacaggtcaaaagctcttactaaatgaagcaatatcccgaggcattgtgccaagtcacactgccgtgaagcttatggagaagctgaacatgtttcaggggttctttgactctcagacttgtgagtctttgacaactgaagaagtcattaatgaaggtctgatggatgagaaattattacataatgtcctcatggcagacaaagctataagtggtgtcttagacccccgtacccagacactgtgctctgtaaaggatgcagttacagttggacttcttgacaaggaaacagccaccagaattttagagaggcaggtggtgactggtggaattattgatctgaaacgaggcaaaaaagtttcagtaactttggcctcaactcttggcttggtggacgttgctgaccagccagaacttataaatctggagaaagcttccaaaggtagagatgctgaaaaaacagttagggagagattaattagtttacaaatggaaacaacaggacttatagaccctgatagtaaagcacctttaacagttgtgcagtccattgacagaggtcttttggagagagaggaggccgttcgtttgttgactaagcaagtggtagatggaggtatcattcaccatatatctgggatgagactttctgttgataatgccttcagacatggcttaattggtgaagatttagccgagaaactcaaaagagttgagaacttaaacatccatcagatttttaatcctgaaacgaaggaaaatatttccctccctaaagccataaaattagatcttattacctcagacctgaaaagagaaatccaggaggttcaggcctttactggaaactttgtggatctcatttctggtcagagattgaccttggcagaagctaaaaaagaaggactgttaactaatgaagcagtattgtctccaggaatgatgcatggcattgtagatcccgagaactgcagaattgtcccctactcagaattagtcaagaaatgtaagattgatattgaatctggacagagatatctagaagtaattcccttctcagacattaaagatggggtgagcgacaaagtgcttacattgtctcaagcaattcagcttggaaaagtagactttgcatctacgctgaaggttctagaagcccaggcaaatactggtggaatcatagatactgctactggaaaaagactgacattggcatcagctttggaagagaaactggtggatgaaaacatggtcagaattattgcatctcatcaggtgttaaatggaggaattgttgacatatttagtgatcagagagtgactttagtagaagctattgagaaaagactgatcagccctgaactggcaaatatgatccaaatagatagttcagagttcagcgatcacagggctcagattgaaaagcaagaagggattgaagtgtgtgcattacaaaatgaatttctaggaaaggatatgttaattgcttgtaatcagactgctgaaatgagttgtaataaagtagaagagagtgagagattatttcaagttgaaaatcagtctgcacaagaaaaggttaaagtgagagtttctgatggggagcaggcaaaaaagagcagggaaatttccttaaaggaatttgggtgcaaggatcaacgtaagccaagaatgtcttcagatgctaaagaatttatcagtatcataaatcctcataatcttaaaggtaaatccttgggccaagtgtcattgacacacccttactctgaatgtgattttaaacttaaagaagtggctagaaataacatgggaaatgatacaaatgaagagcaggaaaaagcagtgacaaaaatagaaattatttctcatatgaagcagtctacctcatgtctagattctgaagaaataagagaaaatcaaggggaagtgattttggaagtacaagaaacatattgtgaaacgtcaggcaaattgccgagtgagcaggttttgcagcaaccaatgaatgctcgggtgaaaagtaagagagagaagagggaggtgattgtagaagaaagtatcagaacatgcaaaccagcatttctttctgaagaaaagttgtatcaggaaactgccattagagatgagcatgactcccatataaagagccaacctagggaaatgacctcaagtgaaaaagggaaagaagctgatacagaaatgggattttctattacttttaaaattgaagagtcctcttcccaagtggtacctcaaggaatttctgtaaaacatttagatgctttaacactcttcagctctaaacaggccaatgaaggaaaagtaaacaatttaagtctctgcttgactttaaaaccagaagaaaacttatctcgagaaattgcctgtggggcccagagtgaaccattcccttgtatgaccccaagacctgaaggattgcactaccaggaatcagatggaaaagcccaagtgacaggcccatcccaaatttccaaaacagacaagtctttccaaggaaccaccagacaggagaccaactatcaagattcctgggttacttcgaaaactaaggaaaccaaacatcaaatttcctcatctaatgaatgtaaagaaaagtcataccaagaagtatcttttgacccagcaagaggtcttaaattggaagaaatcacagtttctagaccagattcaaaagaagtcaggtatctagaattctcagacagaaaagaccttcatcatcagggcagcaaaagtgatgataaactttgtggaactctcaaatctgaaatagcaacacaggaactaactggagagaaatttctagaaatggcaaaccctaatgttgcaggtctagaagcaggatccattgaggacatagtgactcagagaggttccagagtcttgggatcctttcttccagagaaactgttcaaaggagtgtctcaaaaagagaatacagggcaacagaatgccatcattagtcctactgttctagagaccagtgaagaaaagacagtgtccctaacagtatgctctgcagtgaagacagagaagacaccacaggaaaagctcagagaaagccctggcagtgaacaaactcccttcatgactgcacctgaaggaaagggaaatggaggtgtaaacccagagcccttcagagcaactcagaatgtatttacccggcaactctgtttagaacatgatgaaaagctagtatcctatctgtctctgttacggaacattgaaatgaggaccaaacagattcaacctttggagctaaacctggcagaactacaggatctgctgtgtcaggccaaggtattagaaagggagttaaaggatctgaccaccttggtcagtcaggagctggagtgtgtgaatcagattatcatcagccagcctcaagaagttcctgctcaactgttgaaggctctagagaaagatgccaagaatcttcagaagtctctcagctctgtgagtgacacttggaattccaggctactccacttccagaatgctgtggaaatagaaaagactaaagtgttaaatcagcacacacagctagaaggccgacttcaagatctgagagcctgggttggcaataaaaatcttattctgaacagcaagggatctaacagtgaaatagatgttgacagcctgaacctctgcctccaacagtatgaggatttgaaacagcccatggctgaaaggaaagctcagctggatgctcttgcttttgatattcagttctttatctcagaacatgcccaggacttgtcccctcagcagaatcgacagatgctgaggcttctgaatgaactgcagaggtccttccaggacattttggaacagactgccgctcaggtggatgccttgcagggccatcttcaacaaatggagcaggaagccctggtgaagaccctgcagaaacaacaaaatacctgtcaccagcaactggaggatctttgcagttgggtaggacaggcagaaagagcactggcaggccaccaaggcagaaccacccagcaggatctctctgctttgcagaagaaccaaagtgacttgaaggatttacaggatgacattcagaatcgtgccacctcatttgccactgttgtcaaggacattgaggggttcatggaagagaatcagaccaagctgagcccacgtgagttgacagctcttcgggaaaagcttcatcaggctaaggagcaatatgaggcgctccaggaagagacacgtgtggcccagaaggaactggaggaagcagtgacctccgccttacagcaggagactgaaaagagtaaagcagcaaaggaactggcagagaacaagaagaagatcgatgctctcctggattgggtaacttcagtaggatcatctggtggacagctgctgaccaaccttccaggaatggagcagctctcgggagctagcttggagaaaggagccttggacaccactgatggttacatgggggtgaatcaagccccagagaaactggacaagcaatgtgagatgatgaaggcccgtcaccaagaattgctgtcccagcagcaaaatttcattctggccacccagtcagctcaggccttcttggatcagcatggccacaatctcacacctgaggagcaacagatgctgcaacagaagctgggagagctaaaggaacaatactctacttccctggcccaatcagaggcagaactgaagcaggtgcagacacttcaggatgagttgcagaaatttctgcaggatcataaagagtttgaaagctggttggaacgatccgagaaagagctggagaacatgcataagggaggcagcagccccgagacccttccctccctgctaaagcggcaaggaagcttctcagaggatgtcatttcccacaaaggagacttgagatttgtgactatctcaggacagaaagtcttggacatggaaaacagttttaaggaaggcaaagaaccatcagaaattggaaacttagtaaaggacaagttgaaggatgcaacagaaagatacactgctctccactcaaagtgtacacgattaggatctcacctgaatatgctgttaggccagtatcatcaattccaaaacagtgctgacagcctgcaggcctggatgcaggcttgtgaggccaacgtggagaagctcctctcagatactgttgcctctgaccctggagttctccaggagcagcttgcaacaacaaagcagttgcaggaggaattggctgagcaccaagtacctgtggaaaaactccaaaaagtagctcgtgacataatggaaattgaaggggagccagccccagaccacaggcatgttcaagaaactacagattccatactcagccacttccaaagcctctcctatagcctggctgagcgatcttctctgctgcagaaagcaattgcccaatctcagagtgtccaggaaagcctggagagcctgttgcagtctattggggaagttgaacaaaacctggaagggaagcaggtgtcatcactctcatcaggagtcatccaggaagccttagccacaaatatgaaattgaagcaggacattgctcggcaaaagagcagcttggaggccacccgtgagatggtgacccgattcatggagacagcagacagtactacagcagcagtgctgcagggcaaactggcagaggtgagccagcggttcgaacagctctgtctacagcagcaagaaaaggagagctccctaaagaagcttctaccccaggcagagatgtttgaacacctctctggtaagctgcagcagttcatggaaaacaaaagtcggatgctggcctctggaaatcagccagatcaagatattacacatttcttccaacagatccaggagctcaatttggaaatggaagaccaacaggagaacctagatactcttgagcacctggtcactgaactgagctcttgtggctttgcgctggacttgtgccagcatcaggacagggtacagaatctaagaaaagacttcacagagctacagaagacagttaaagagagagagaaagatgcatcatcttgccaggaacagttggatgaattccggaagctggtcaggaccttccagaaatggttgaaagaaactgaagggagtattccacctacggaaacttctatgagtgctaaagagttagaaaagcagattgaacacctgaagagtctactagatgactgggcaagtaagggaactctggtggaagaaatcaattgcaaaggtacttctttagaaaatctcatcatggaaatcacagcacctgattcccaaggcaagacaggttccatactgccctctgtaggaagctctgtaggcagtgtaaacggataccacacctgcaaagatctgacggagatccagtgtgacatgtcagatgtaaacttgaagtatgagaaactagggggagtacttcatgaacgccaggaaagccttcaggctatcctcaacagaatggaggaggttcacaaggaggcaaactctgtgctgcagtggctggaatcaaaagaggaagtcctgaaatccatggatgccatgtcatctccaaccaagacagaaacagtgaaagcccaagctgaatctaacaaggccttcctggctgagttggaacagaattctccaaaaattcaaaaagtaaaggaagccctggctggattactggtgacatatcccaactcacaggaagcagaaaattggaagaaaattcaggaagaactcaattcccgatgggaaagggccactgaggttactgtggctcggcaaaggcagctagaggaatctgcaagtcatctggcctgcttccaggctgcagaatcccagctccggccgtggctgatggagaaagaactgatgatgggagtgctggggcccctgtctattgaccccaacatgttgaatgcacaaaagcaacaggtccagtttatgctaaaggaatttgaagcacgcaggcaacagcatgagcaactgaatgaggcagctcagggcatcctaacaggccctggagatgtctctctgtccaccagccaagtacagaaagaactccagagcatcaatcagaaatgggttgagctgactgacaaactcaactcccgttccagccaaattgaccaagctattgttaagagcacccagtaccaggaactgctccaggacttatcagagaaggtgagggcagttggacaacggctgagtgtccagtcagctatcagcacccaaccagaggctgtaaagcagcaattggaagagaccagtgaaattcgatctgacttggagcagttagaccacgaggttaaggaggctcagacactgtgcgatgaactctcagtgctcattggtgagcagtacctcaaggatgaactgaagaagcgtttggagacagttgccctgcctctccaaggtttagaagaccttgcagccgatcgcattaacagactccaggcagctcttgccagcacccagcagttccagcaaatgtttgatgagttgaggacctggttggatgataaacaaagccagcaagcaaaaaactgcccaatttctgcaaaattggagcggctacagtctcagctacaggagaatgaagagtttcagaaaagtcttaatcaacacagtggctcctatgaggtgattgtggctgaaggggaatctctacttctttctgtacctcctggagaagagaaaaggactctacaaaaccagttggttgagctcaaaaaccattgggaagagcttagtaaaaaaactgcagacagacaatccaggctcaaggattgtatgcagaaagctcagaaatatcagtggcatgtggaagaccttgtgccatggatagaagattgtaaagctaagatgtctgagttgcgagtcactctggatccagtgcagctagagtccagtctcctaagatcaaaggctatgctgaatgaggtggagaagcgccgctccctgctggaaatattgaatagtgctgctgacattctgatcaattcttcagaagcagatgaggatggaatccgggatgagaaggctgggatcaaccagaacatggatgctgttacagaagagctgcaggccaaaacagggtcactcgaagaaatgactcagaggctcagggagttccaggaaagctttaagaatattgaaaagaaggttgaaggagccaaacaccaacttgagatctttgatgctctgggttctcaagcctgtagcaacaagaacctggagaagctaagagctcaacaggaagtgctgcaggccctagagcctcaggtagactatctgaggaactttactcagggtctggtagaagatgccccagatggatctgatgcttctcaacttctccaccaagctgaggtcgcccagcaagagttcctcgaagttaagcaaagagtgaacagtggttgtgtgatgatggaaaacaagctggaggggattggccagtttcactgccgggtccgagagatgttctctcaattggcagacctggatgatgagctagatggcatgggtgctattggcagagacactgatagcctccagtcccaaatcgaggatgtccggctattccttaacaaaattcacgtcctcaaattagacatagaggcctctgaagcagagtgtcgacatatgctagaagaagaggggactctggatttgttaggtctcaaaagggagctagaagccctgaacaaacagtgtggcaaactgacagagagggggaaagctcgtcaggaacagctggaactgacactaggccgtgtagaggacttctacaggaaattgaaaggactcaatgacgcgaccacagcagcagaggaggcagaggccctccagtgggtagtggggaccgaagtggaaatcatcaaccaacaattagcagattttaaaatgtttcagaaagaacaagtggatcctcttcagatgaaattgcagcaggtgaatggacttggccagggattaattcagagtgcaggaaaagactgtgatgtacagggtttagaacatgacatggaagagatcaatgctcgatggaatacattgaataaaaaggtcgcacaaagaattgcacagctacaggaagctttgttgcattgtgggaagtttcaagatgccttggagccattgctcagctggttggcagataccgaggagctcatagccaatcagaaacctccatctgctgagtataaagtggtgaaagcacagatccaagaacagaagttgctccagcggctcctagatgatcgaaaggccacagtagacatgcttcaagcagaaggaggcagaatagcccagtcagcagagctggctgatagagagaaaatcactggacagctggagagtcttgaaagtagatggactgaactactcagtaaggcagcagccaggcaaaaacagctggaagacatcctggttctggccaaacagttccatgagacagctgagcctatttctgacttcttatctgtcacagagaaaaagcttgctaactcagaacctgttggcactcagactgccaaaatacagcagcagatcattcggcacaaggctctggaagaagacatagaaaaccatgcaacagatgtgcaccaggcagtcaaaattgggcagtccctctcctccctgacatctcctgcagaacagggtgtgctgtcagaaaagatagactcattgcaggcccgatacagtgaaattcaagaccgctgttgtcggaaggcagccctacttgaccaagctctgtctaatgctaggctgtttggggaggatgaggtggaggtgctcaactggctggctgaggttgaggacaagctcagttcagtgttcgtaaaggatttcaaacaggatgtcctgcacaggcagcatgctgaccacctggctttaaatgaagaaattgttaatagaaagaagaatgtagatcaagctattaaaaatggtcaggctcttctaaaacaaaccacaggtgaggaggtgttacttatccaggaaaaactagatggtataaagactcgttacgcagacatcacagttactagctccaaggccctcagaactttagagcaagcccggcagctggccaccaagttccagtctacttatgaggaactgaccgggtggctgagggaggtggaggaggagctggcaaccagtggaggacagtctcccacaggggaacagataccccagtttcagcagagacagaaggaattaaagaaggaggtcatggagcacaggctggtgttggacacagtgaatgaggtgagccgtgctctcttagagctggtgccctggagagccagagaagggctggataaacttgtgtccgatgctaacgagcagtacaaactagtcagtgacactattggacaaagggtggatgaaattgatgctgctattcagagatcacaacagtatgagcaagctgccgatgcagaactagcttgggttgctgaaacaaaacggaaactgatggctctgggtccaattcgcctggaacaggaccagaccacagctcagcttcaggtacagaaggctttctccattgacattattcgacacaaagattcaatggatgaactcttcagtcaccgtagtgaaatctttggcacatgtggggaggagcaaaaaactgtattacaggaaaagacagagtctctaatacagcaatatgaagccattagcctactcaattcagagcgttatgcccgcctagagcgggcccaggtcttagtaaaccagttttgggaaacttatgaagagctcagcccctggattgaggaaactcgggcactaatagcacagttaccctctccagccattgatcatgagcagctcaggcagcaacaagaggaaatgaggcaattaagggaatctattgctgaacacaaacctcatattgacaaactactaaagataggcccacaactaaaggaattaaaccctgaggaaggggaaatggtggaagaaaaataccagaaagcagaaaacatgtatgcccaaataaaggaggaggtgcgccagcgagccctggctctggatgaagccgtgtcccagtccacacagattacagagtttcatgataaaattgagcctatgttggagacactggagaatctttcctctcgcctgcgtatgccaccactgatccctgctgaagtagacaagatcagagagtgcatcagtgacaataagagtgccaccgtggagctagaaaaactgcagccatcctttgaggccttgaagcgccgtggagaggagcttattggacgatctcagggagcagacaaggatctggctgcaaaagaaatccaggataaattggatcaaatggtattcttctgggaggacatcaaagctcgggctgaagaacgagaaatcaaatttcttgatgtccttgaattagcagagaagttctggtatgacatggcagctctcctgaccaccatcaaagacacccaggatattgtccatgacttggaaagcccaggcattgatccttccatcatcaaacaacaggttgaagctgctgagactattaaggaagagacagatggtctgcatgaagagctggagtttattcggatccttggagcagatttgatttttgcctgtggagaaactgagaagcctgaagtgaggaagagcattgatgagatgaataatgcttgggagaacttaaacaaaacatggaaagagaggctagaaaaacttgaggatgctatgcaagctgctgtgcagtatcaggacactcttcaggctatgtttgactggctagataacactgtgattaaactctgcaccatgccccctgttggcactgacctcaatactgttaaagatcagttaaatgaaatgaaggagttcaaagtagaagtttaccaacagcaaattgagatggagaagcttaatcaccagggtgaactgatgttaaagaaagctactgatgagacggacagagacattatacgagaaccactgacagaactcaaacacctctgggagaacctgggtgagaaaattgcccaccgacagcacaaactagaaggggctctgttggcccttggtcagttccagcatgccttagaggaactaatgagttggctgactcataccgaagagttgttagatgctcagagaccaataagtggagacccaaaagtcattgaagttgagctcgcaaagcaccatgtcctaaaaaatgatgttttggctcatcaagccacagtggaaacagtcaacaaagctggcaatgagcttcttgaatccagtgctggagatgatgccagcagcttaaggagccgtttggaagccatgaaccaatgctgggagtcagtgttacagaaaacagaggagagggagcagcagcttcagtcaactctgcagcaggcccagggcttccacagtgaaattgaagatttcctcttggaacttactagaatggagagccagctttctgcatctaagcccacaggaggacttcctgaaactgctagggaacagcttgatacacatatggaactctattcccagctgaaagccaaggaagagacttataatcaactacttgacaagggcagactcatgcttctaagccgtgacgactctgggtctggctccaagacagaacagagtgtagcacttttggagcagaagtggcatgtggtcagcagtaagatggaagaaagaaagtcaaagctggaagaggccctcaacttggcaacagaattccagaattccctacaagaatttatcaactggctcactctagcagagcagagtttaaacatcgcttctccaccaagcctgattctaaatactgtcctttcccagatagaagagcacaaggtttttgctaatgaagtaaatgctcatcgagaccagatcattgagctggatcaaactgggaatcaattaaagttccttagccaaaagcaggatgttgttctgatcaagaatttgttggtgagcgtgcagtctcgatgggagaaggttgtccagcgatctattgaaagagggcgatcactagatgatgccaggaagcgggcaaaacaattccatgaagcttggaaaaaactgattgactggctagaagatgcagagagtcacctggactcagaactagagatatccaatgacccagacaaaattaaacttcagctttctaagcataaggagtttcagaagactcttggtggcaagcagcctgtgtatgataccacaattagaactggcagagcactgaaagaaaagactttgcttcccgaagatagtcagaaacttgacaatttcctaggagaagtcagagacaaatgggatactgtttgtggcaagtctgtggagcggcagcacaagttggaggaagccctgctcttttcgggtcagttcatggatgctttgcaggcattggttgactggttatacaaggtggagccacagctggctgaggaccagcccgtgcacggggaccttgacctcgtcatgaacctcatggatgcacacaaggttttccagaaggaactgggaaagcgaacaggaaccgttcaggtcctgaagcggtcaggccgagagctgattgagaatagtcgagatgacaccacttgggtaaaaggacagctccaggaactgagcactcgctgggacactgtctgtaaactctctgtttccaaacaaagccggcttgagcaggccttaaaacaagcggaagtgtttcgagacacagtccacatgctgttggagtggctttctgaagcagagcaaacgcttcgctttcggggagcacttcctgatgacacagaggccctgcagtctctcattgacacccataaggaattcatgaagaaagtagaagaaaagcgagtggacgttaactcagcagtagccatgggagaagtcatcctggctgtctgccaccccgattgcatcacaaccatcaaacactggatcaccatcatccgagctcgcttcgaggaggtcctgacatgggctaagcagcaccagcagcgtcttgaaacggccttgtcagaactggtggctaatgctgagctcctggaagaacttctggcatggatccagtgggctgagaccaccctcattcagcgggatcaggagccaatcccgcagaacattgaccgagttaaagcccttatcgctgagcatcagacatttatggaggagatgactcgcaaacagcctgacgtggaccgggtcaccaagacatacaaaaggaaaaacatagagcctactcacgcgcctttcatagagaaatcccgcagcggaggcaggaaatccctaagtcagccaacccctcctcccatgccaatcctttcacagtctgaagcaaaaaacccacggatcaaccagctttctgcccgctggcagcaggtgtggctgttagcactggagcggcaaaggaaactgaatgatgccttggatcggctggaggagttgaaagaatttgccaactttgactttgatgtctggaggaaaaagtatatgcgttggatgaatcacaaaaagtctcgagtgatggatttcttccggcgcattgataaggaccaggatgggaagataacacgtcaggagtttatcgatggcattttagcatccaagttccccaccaccaagttagagatgactgctgtggctgacattttcgaccgagatggggatggttacattgattattatgaatttgtggctgctcttcatcccaacaaggatgcgtatcgaccaacaaccgatgcagataaaatcgaagatgaggttacaagacaagtggctcagtgcaaatgtgcaaaaaggtttcaggtggagcagatcggagagaataaataccggttcttcctcggcaatcagtttggggattctcagcagttgcggctggtccgtattctgcgcagcaccgtgatggttcgcgttggtggaggatggatggccttggatgaatttttagtgaaaaatgatccctgccgagcacgaggtagaactaacattgaacttagagagaaattcatcctaccagagggagcatcccagggaatgacccccttccgctcacggggtcgaaggtccaaaccatcttcccgggcagcttcccctactcgttccagctccagtgctagtcagagtaaccacagctgtacatccatgccatcttctccagccaccccagccagtggaaccaaggttatcccatcatcaggtagcaagttgaaacgaccaacaccaacttttcattctagtcggacatcccttgctggtgataccagcaatagttcttccccggcctccacaggtgccaaaactaatcgggcagaccctaaaaagtctgccagtcgccctgggagtcgggctgggagtcgagccgggagtcgagccagcagccggcgaggaagtgacgcttctgactttgacctcttagagacgcagtctgcttgttccgacacttcagaaagcagcgctgcagggggccaaggcaactccaggagagggctaaacaaaccttccaaaatcccaaccatgtctaagaagaccaccactgcctcccccaggactccaggtcccaagcgataacactgtctaagcacccccaagccactatccactttgaatcctgctccatacattgggtgtatatttattctgaacgggagaagttatattgttaaaagtgtaaaagaataattgtgttatgaagctgccttattttttttctttttgtaagttactattttcatgtgaatatttatgtagataaaatttgcctcctggtaaccctgtaatggatggggcccagaaatgaaatatttgagaaaaacaagtgaaaaggtcaagatacaaatgtgtattaaaaaaaaaaaagcctattaatagggtttctgcgcggtgcagggttgtaaacctgctttatcttttaggattattcctaaatgcatcttctttataaacttgacttgctatctcagcaagataaattatattaaaaaaataagaatcctgcagtgtttaaggaactctttttttgtaaatcacggacacctcaattagcaagaactgaggggagggctttttccattgtttaatgttttgtgatttttagctaaagagagggaacctcatctaagtaacatttgcacatgatacagcaaaaggagttcattgcaatactgtctttggatattgtttcagtactgggtgtttaaaggacaaatagctgctagaattcaggggtaaatgtaagtgttcagaaaacgtcagaacatttggggttttaaactgatttgttgctccctatccagcctagacaccagtaactcttgtgttcaccaggacccagacccttggcaagggataggctcgttggtgacattgtgaatttcagatttgttttatccactttttttgctatttatttaaatggtcgatcaacttcccacaaactgaggaatgaattccacgagcctgttctgaaaatgtggacgtaagacaaacacgtgctcgtcctttaatggagttcaccagcacacttgttaaccagtcctgtttgctttcgtctttttttgtgcgtaataaagtcaactgaccaagtgaccatgaaaaggggctgtctggggctcctgttttttagctgctgttcttcagctccgaccatgttgctgtgtgattatctcaattggttttaattgaggcagaaactgaagctctaccaatgaactgtttagaaacaagacacacttttgtattaaaattgcttgcagtaacaaatattttgtatttcctgattttcttttcaactattaccttatctataaatgttaccctggggtataatcatgttgtaggtacttaaatgcattccgcaaatcaaaatatcttgatggataaattatagagctt

SEQ ID NO: 204 - DNA, 3143 bp, Homo Sapiens
ctcgaggtaacctttggtggcgggaagagttcggaagttttcgcgccggggtggagtcatcctgggaacctccacgcgactttggtggaggtagttctttggcagcgggcatggcgggtaccgtggtgctggacgatgtggagctgcgggaggctcagagagattacctggacttcctggacgacgaggaagaccagggaatttatcagagcaaagttcgggagctgatcagtgacaaccaataccggctgattgtcaatgtgaatgacctgcgcaggaaaaacgagaagagggctaaccggcttctgaacaatgcctttgaggagctggttgccttccagcgggccttaaaggattttgtggcctccattgatgctacctatgccaagcagtatgaggagttctacgtaggactggaaggcagctttggctccaagcacgtctccccgcggactcttacctcctgcttcctcagctgtgtggtctgtgtggagggcattgtcactaaatgttctctagttcgtcccaaagtcgtccgcagtgtccactactgtcctgctactaagaagaccatagagcgacgttattctgatctcaccaccctggtggcctttccctccagctctgtctatcctaccaaggatgaggagaacaatccccttgagacagaatatggcctttctgtctacaaggatcaccagaccatcaccatccaggagatgccggagaaggccccagccggccagctcccccgctctgtggacgtcattctggatgatgacttggtggataaagcgaagcctggtgaccgggttcaggtggtgggaacctaccgttgccttcctggaaagaagggaggctacacctctgggaccttcaggactgtcctgattgcctgtaatgttaagcagatgagcaaggatgctcagccctctttctctgctgaggatatagccaagatcaagaagttcagtaaaacccgatccaaggatatctttgaccagctggccaagtcattggccccaagtatccatgggcatgactatgtcaagaaagcaatcctctgcttgctcttgggaggggtggaacgagacctagaaaatggcagccacatccgtggggacatcaatattcttctaataggagacccatccgttgccaagtctcagcttctgcggtatgtgctttgcactgcaccccgagctatccccaccactggccggggctcctctggagtgggtctgacggctgctgtcaccacagaccaggaaacaggagagcgccgtctggaagcaggggccatggtcctggctgaccgaggcgtggtttgcattgatgaatttgacaaaatgtctgacatggatcgcacagccatccatgaagtgatggagcagggtcgagtgaccattgccaaggctggcatccatgctcggctgaatgcccgctgcagtgttttggcagctgccaaccctgtctacggcaggtatgaccagtataagactccaatggagaacattgggctacaggactcactgctgtcacgatttgacttgctcttcatcatgctggatcagatggatcctgagcaggatcgggagatctcagaccatgtccttcggatgcaccgttacagagcacctggggagcaggatggcgatgctatgcccttgggtagtgctgtggatatcctggccacagatgatcccaactttagccaggaagatcagcaggacacccagatttatgagaagcatgacaaccttctacatgggaccaagaagaaaaaggagaagatggtgagtgcagcattcatgaagaagtacatccatgtggccaaaatcatcaagcctgtcctgacacaggagtcggccacctacattgcagaagagtattcacgcctgcgcagccaggatagcatgagctcagacaccgccaggacatctccagttacagcccgaacactggaaactctgattcgactggccacagcccatgcgaaggcccgcatgagcaagactgtggacctgcaggatgcagaggaagctgtggagttggtccagtatgcttactttaagaaggttctggagaaggagaagaaacgtaagaagcgaagtgaggatgaatcagagacagaagatgaagaggagaaaagccaagaggaccaggagcagaagaggaagagaaggaagactcgccagccagatgccaaagatggggattcatacgacccctatgacttcagtgacacagaggaggaaatgcctcaagtacacactccaaagacggcagactcacaggagaccaaggaatcccagaaagtggagttgagtgaatccaggttgaaggcattcaaggtggccctcttggatgtgttccgggaagctcatgcgcagtcaatcggcatgaatcgcctcacagaatccatcaaccgggacagcgaagagcccttctcttcagttgagatccaggctgctctgagcaagatgcaggatgacaatcaggtcatggtgtctgagggcatcatcttcctcatctgaggaggcctcgtctctgaacttgggttgtgccgagagagtttgttctgtgtttcccaccctctccctgacccaagtctttgcctctactcccttaacagtgttgaattcaactgaaggcgaggaatgttggtgatgaagctgagttcaggactcggtggaccctttgggaatgggtcatgaaagctgccatggggtgaggaaagaggagacagtgggagaggacaatgactattgcatcttcattgcaaaagcactggctcatccgccctacttcccatcccacacaaacccaattgtaaataacatatgacttctgagtacttttgggggcacaactgttttctgtttgctgtttttttgttttgttttttttctccagagcactttggtctagactaggctttgggtggttccaattggtggagagaagctctgaggcacgtcatgcaggtcaagaaagctttctttgcagtagcaccagttaaggtgaatatgtattgtatcacaaaacaaacccaatatccagatgaatatccgagatgttgaataaacttagccatttcgtacacatggtaaaaaaaaaaaaaaaaaaaaaaaaaaaaaaaa

SEQ ID NO: 205 - DNA, 14138 bp, Homo Sapiens
gcactgcagcgccagcgtccgagcgggcggccgagctcccggagcggcctggccccgagccccgagcgggcgtcgctcagcagcaggtcgcggccgcagccccatccagccccgcgcccgccatgccgtccgcgggccccgcctgagctgcggcctccgcgcgcgggcgggcctggggacggcggggccatgcgcgcgctgccctaacgatgccgcccgccgcgcccgcccgcctggcgctggccctgggcctgggcctgtggctcggggcgctggcggggggccccgggcgcggctgcgggccctgcgagcccccctgcctctgcggcccagcgcccggcgccgcctgccgcgtcaactgctcgggccgcgggctgcggacgctcggtcccgcgctgcgcatccccgcggacgccacagcgctagacgtctcccacaacctgctccgggcgctggacgttgggctcctggcgaacctctcggcgctggcagagctggatataagcaacaacaagatttctacgttagaagaaggaatatttgctaatttatttaatttaagtgaaataaacctgagtgggaacccgtttgagtgtgactgtggcctggcgtggctgccgcgatgggcggaggagcagcaggtgcgggtggtgcagcccgaggcagccacgtgtgctgggcctggctccctggctggccagcctctgcttggcatccccttgctggacagtggctgtggtgaggagtatgtcgcctgcctccctgacaacagctcaggcaccgtggcagcagtgtccttttcagctgcccacgaaggcctgcttcagccagaggcctgcagcgccttctgcttctccaccggccagggcctcgcagccctctcggagcagggctggtgcctgtgtggggcggcccagccctccagtgcctcctttgcctgcctgtccctctgctccggccccccgccacctcctgcccccacctgtaggggccccaccctcctccagcacgtcttccctgcctccccaggggccaccctggtggggccccacggacctctggcctctggccagctagcagccttccacatcgctgccccgctccctgtcactgccacacgctgggacttcggagacggctccgccgaggtggatgccgctgggccggctgcctcgcatcgctatgtgctgcctgggcgctatcacgtgacggccgtgctggccctgggggccggctcagccctgctggggacagacgtgcaggtggaagcggcacctgccgccctggagctcgtgtgcccgtcctcggtgcagagtgacgagagccttgacctcagcatccagaaccgcggtggttcaggcctggaggccgcctacagcatcgtggccctgggcgaggagccggcccgagcggtgcacccgctctgcccctcggacacggagatcttccctggcaacgggcactgctaccgcctggtggtggagaaggcggcctggctgcaggcgcaggagcagtgtcaggcctgggccggggccgccctggcaatggtggacagtcccgccgtgcagcgcttcctggtctcccgggtcaccaggagcctagacgtgtggatcggcttctcgactgtgcagggggtggaggtgggcccagcgccgcagggcgaggccttcagcctggagagctgccagaactggctgcccggggagccacacccagccacagccgagcactgcgtccggctcgggcccaccgggtggtgtaacaccgacctgtgctcagcgccgcacagctacgtctgcgagctgcagcccggaggcccagtgcaggatgccgagaacctcctcgtgggagcgcccagtggggacctgcagggacccctgacgcctctggcacagcaggacggcctctcagccccgcacgagcccgtggaggtcatggtattcccgggcctgcgtctgagccgtgaagccttcctcaccacggccgaatttgggacccaggagctccggcggcccgcccagctgcggctgcaggtgtaccggctcctcagcacagcagggaccccggagaacggcagcgagcctgagagcaggtccccggacaacaggacccagctggcccccgcgtgcatgccagggggacgctggtgccctggagccaacatctgcttgccgctggacgcctcctgccacccccaggcctgcgccaatggctgcacgtcagggccagggctacccggggccccctatgcgctatggagagagttcctcttctccgttcccgcggggccccccgcgcagtactcggtcaccctccacggccaggatgtcctcatgctccctggtgacctcgttggcttgcagcacgacgctggccctggcgccctcctgcactgctcgccggctcccggccaccctggtccccaggccccgtacctctccgccaacgcctcgtcatggctgccccacttgccagcccagctggagggcacttgggcctgccctgcctgtgccctgcggctgcttgcagccacggaacagctcaccgtgctgctgggcttgaggcccaaccctggactgcggctgcctgggcgctatgaggtccgggcagaggtgggcaatggcgtgtccaggcacaacctctcctgcagctttgacgtggtctccccagtggctgggctgcgggtcatctaccctgccccccgcgacggccgcctctacgtgcccaccaacggctcagccttggtgctccaggtggactctggtgccaacgccacggccacggctcgctggcctgggggcagtgtcagcgcccgctttgagaatgtctgccctgccctggtggccaccttcgtgcccggctgcccctgggagaccaacgataccctgttctcagtggtagcactgccgtggctcagtgagggggagcacgtggtggacgtggtggtggaaaacagcgccagccgggccaacctcagcctgcgggtgacggcggaggagcccatctgtggcctccgcgccacgcccagccccgaggcccgtgtactgcagggagtcctagtgaggtacagccccgtggtggaggccggctcggacatggtcttccggtggaccatcaacgacaagcagtccctgaccttccagaacgtggtcttcaatgtcatttatcagagcgcggcggtcttcaagctctcactgacggcctccaaccacgtgagcaacgtcaccgtgaactacaacgtaaccgtggagcggatgaacaggatgcagggtctgcaggtctccacagtgccggccgtgctgtcccccaatgccacgctagcactgacggcgggcgtgctggtggactcggccgtggaggtggccttcctgtggacctttggggatggggagcaggccctccaccagttccagcctccgtacaacgagtccttcccggttccagacccctcggtggcccaggtgctggtggagcacaatgtcatgcacacctacgctgccccaggtgagtacctcctgaccgtgctggcatctaatgccttcgagaacctgacgcagcaggtgcctgtgagcgtgcgcgcctccctgccctccgtggctgtgggtgtgagtgacggcgtcctggtggccggccggcccgtcaccttctacccgcacccgctgccctcgcctgggggtgttctttacacgtgggacttcggggacggctcccctgtcctgacccagagccagccggctgccaaccacacctatgcctcgaggggcacctaccacgtgcgcctggaggtcaacaacacggtgagcggtgcggcggcccaggcggatgtgcgcgtctttgaggagctccgcggactcagcgtggacatgagcctggccgtggagcagggcgcccccgtggtggtcagcgccgcggtgcagacgggcgacaacatcacgtggaccttcgacatgggggacggcaccgtgctgtcgggcccggaggcaacagtggagcatgtgtacctgcgggcacagaactgcacagtgaccgtgggtgcggccagccccgccggccacctggcccggagcctgcacgtgctggtcttcgtcctggaggtgctgcgcgttgaacccgccgcctgcatccccacgcagcctgacgcgcggctcacggcctacgtcaccgggaacccggcccactacctcttcgactggaccttcggggatggctcctccaacacgaccgtgcgggggtgcccgacggtgacacacaacttcacgcggagcggcacgttccccctggcgctggtgctgtccagccgcgtgaacagggcgcattacttcaccagcatctgcgtggagccagaggtgggcaacgtcaccctgcagccagagaggcagtttgtgcagctcggggacgaggcctggctggtggcatgtgcctggcccccgttcccctaccgctacacctgggactttggcaccgaggaagccgcccccacccgtgccaggggccctgaggtgacgttcatctaccgagacccaggctcctatcttgtgacagtcaccgcgtccaacaacatctctgctgccaatgactcagccctggtggaggtgcaggagcccgtgctggtcaccagcatcaaggtcaatggctcccttgggctggagctgcagcagccgtacctgttctctgctgtgggccgtgggcgccccgccagctacctgtgggatctgggggacggtgggtggctcgagggtccggaggtcacccacgcttacaacagcacaggtgacttcaccgttagggtggccggctggaatgaggtgagccgcagcgaggcctggctcaatgtgacggtgaagcggcgcgtgcgggggctcgtcgtcaatgcaagccgcacggtggtgcccctgaatgggagcgtgagcttcagcacgtcgctggaggccggcagtgatgtgcgctattcctgggtgctctgtgaccgctgcacgcccatccctgggggtcctaccatctcttacaccttccgctccgtgggcaccttcaatatcatcgtcacggctgagaacgaggtgggctccgcccaggacagcatcttcgtctatgtcctgcagctcatagaggggctgcaggtggtgggcggtggccgctacttccccaccaaccacacggtacagctgcaggccgtggttagggatggcaccaacgtctcctacagctggactgcctggagggacaggggcccggccctggccggcagcggcaaaggcttctcgctcaccgtgctcgaggccggcacctaccatgtgcagctgcgggccaccaacatgctgggcagcgcctgggccgactgcaccatggacttcgtggagcctgtggggtggctgatggtggccgcctccccgaacccagctgccgtcaacacaagcgtcaccctcagtgccgagctggctggtggcagtggtgtcgtatacacttggtccttggaggaggggctgagctgggagacctccgagccatttaccacccatagcttccccacacccggcctgcacttggtcaccatgacggcagggaacccgctgggctcagccaacgccaccgtggaagtggatgtgcaggtgcctgtgagtggcctcagcatcagggccagcgagcccggaggcagcttcgtggcggccgggtcctctgtgcccttttgggggcagctggccacgggcaccaatgtgagctggtgctgggctgtgcccggcggcagcagcaagcgtggccctcatgtcaccatggtcttcccggatgctggcaccttctccatccggctcaatgcctccaacgcagtcagctgggtctcagccacgtacaacctcacggcggaggagcccatcgtgggcctggtgctgtgggccagcagcaaggtggtggcgcccgggcagctggtccattttcagatcctgctggctgccggctcagctgtcaccttccgcctgcaggtcggcggggccaaccccgaggtgctccccgggccccgtttctcccacagcttcccccgcgtcggagaccacgtggtgagcgtgcggggcaaaaaccacgtgagctgggcccaggcgcaggtgcgcatcgtggtgctggaggccgtgagtgggctgcaggtgcccaactgctgcgagcctggcatcgccacgggcactgagaggaacttcacagcccgcgtgcagcgcggctctcgggtcgcctacgcctggtacttctcgctgcagaaggtccagggcgactcgctggtcatcctgtcgggccgcgacgtcacctacacgcccgtggccgcggggctgttggagatccaggtgcgcgccttcaacgccctgggcagtgagaaccgcacgctggtgctggaggttcaggacgccgtccagtatgtggccctgcagagcggcccctgcttcaccaaccgctcggcgcagtttgaggccgccaccagccccagcccccggcgtgtggcctaccactgggactttggggatgggtcgccagggcaggacacagatgagcccagggccgagcactcctacctgaggcctggggactaccgcgtgcaggtgaacgcctccaacctggtgagcttcttcgtggcgcaggccacggtgaccgtccaggtgctggcctgccgggagccggaggtggacgtggtcctgcccctgcaggtgctgatgcggcgatcacagcgcaactacttggaggcccacgttgacctgcgcgactgcgtcacctaccagactgagtaccgctgggaggtgtatcgcaccgccagctgccagcggccggggcgcccagcgcgtgtggccctgcccggcgtggacgtgagccggcctcggctggtgctgccgcggctggcgctgcctgtggggcactactgctttgtgtttgtcgtgtcatttggggacacgccactgacacagagcatccaggccaatgtgacggtggcccccgagcgcctggtgcccatcattgagggtggctcataccgcgtgtggtcagacacacgggacctggtgctggatgggagcgagtcctacgaccccaacctggaggacggcgaccagacgccgctcagtttccactgggcctgtgtggcttcgacacagagggaggctggcgggtgtgcgctgaactttgggccccgcgggagcagcacggtcaccattccacgggagcggctggcggctggcgtggagtacaccttcagcctgaccgtgtggaaggccggccgcaaggaggaggccaccaaccagacggtgctgatccggagtggccgggtgcccattgtgtccttggagtgtgtgtcctgcaaggcacaggccgtgtacgaagtgagccgcagctcctacgtgtacttggagggccgctgcctcaattgcagcagcggctccaagcgagggcggtgggctgcacgtacgttcagcaacaagacgctggtgctggatgagaccaccacatccacgggcagtgcaggcatgcgactggtgctgcggcggggcgtgctgcgggacggcgagggatacaccttcacgctcacggtgctgggccgctctggcgaggaggagggctgcgcctccatccgcctgtcccccaaccgcccgccgctggggggctcttgccgcctcttcccactgggcgctgtgcacgccctcaccaccaaggtgcacttcgaatgcacgggctggcatgacgcggaggatgctggcgccccgctggtgtacgccctgctgctgcggcgctgtcgccagggccactgcgaggagttctgtgtctacaagggcagcctctccagctacggagccgtgctgcccccgggtttcaggccacacttcgaggtgggcctggccgtggtggtgcaggaccagctgggagccgctgtggtcgccctcaacaggtctttggccatcaccctcccagagcccaacggcagcgcaacggggctcacagtctggctgcacgggctcaccgctagtgtgctcccagggctgctgcggcaggccgatccccagcacgtcatcgagtactcgttggccctggtcaccgtgctgaacgagtacgagcgggccctggacgtggcggcagagcccaagcacgagcggcagcaccgagcccagatacgcaagaacatcacggagactctggtgtccctgagggtccacactgtggatgacatccagcagatcgctgctgcgctggcccagtgcatggggcccagcagggagctcgtatgccgctcgtgcctgaagcagacgctgcacaagctggaggccatgatgctcatcctgcaggcagagaccaccgcgggcaccgtgacgcccaccgccatcggagacagcatcctcaacatcacaggagacctcatccacctggccagctcggacgtgcgggcaccacagccctcagagctgggagccgagtcaccatctcggatggtggcgtcccaggcctacaacctgacctctgccctcatgcgcatcctcatgcgctcccgcgtgctcaacgaggagcccctgacgctggcgggcgaggagatcgtggcccagggcaagcgctcggacccgcggagcctgctgtgctatggcggcgccccagggcctggctgccacttctccatccccgaggctttcagcggggccctggccaacctcagtgacgtggtgcagctcatctttctggtggactccaatccctttccctttggctatatcagcaactacaccgtctccaccaaggtggcctcgatggcattccagacacaggccggcgcccagatccccatcgagcggctggcctcagagcgcgccatcaccgtgaaggtgcccaacaactcggactgggctgcccggggccaccgcagctccgccaactccgccaactccgttgtggtccagccccaggcctccgtcggtgctgtggtcaccctggacagcagcaaccctgcggccgggctgcatctgcagctcaactatacgctgctggacggccactacctgtctgaggaacctgagccctacctggcagtctacctacactcggagccccggcccaatgagcacaactgctcggctagcaggaggatccgcccagagtcactccagggtgctgaccaccggccctacaccttcttcatttccccggggagcagagacccagcggggagttaccatctgaacctctccagccacttccgctggtcggcgctgcaggtgtccgtgggcctgtacacgtccctgtgccagtacttcagcgaggaggacatggtgtggcggacagaggggctgctgcccctggaggagacctcgccccgccaggccgtctgcctcacccgccacctcaccgccttcggcgccagcctcttcgtgcccccaagccatgtccgctttgtgtttcctgagccgacagcggatgtaaactacatcgtcatgctgacatgtgctgtgtgcctggtgacctacatggtcatggccgccatcctgcacaagctggaccagttggatgccagccggggccgcgccatccctttctgtgggcagcggggccgcttcaagtacgagatcctcgtcaagacaggctggggccggggctcaggtaccacggcccacgtgggcatcatgctgtatggggtggacagccggagcggccaccggcacctggacggcgacagagccttccaccgcaacagcctggacatcttccggatcgccaccccgcacagcctgggtagcgtgtggaagatccgagtgtggcacgacaacaaagggctcagccctgcctggttcctgcagcacgtcatcgtcagggacctgcagacggcacgcagcgccttcttcctggtcaatgactggctttcggtggagacggaggccaacgggggcctggtggagaaggaggtgctggccgcgagcgacgcagcccttttgcgcttccggcgcctgctggtggctgagctgcagcgtggcttctttgacaagcacatctggctctccatatgggaccggccgcctcgtagccgtttcactcgcatccagagggccacctgctgcgttctcctcatctgcctcttcctgggcgccaacgccgtgtggtacggggctgttggcgactctgcctacagcacggggcatgtgtccaggctgagcccgctgagcgtcgacacagtcgctgttggcctggtgtccagcgtggttgtctatcccgtctacctggccatcctttttctcttccggatgtcccggagcaaggtggctgggagcccgagccccacacctgccgggcagcaggtgctggacatcgacagctgcctggactcgtccgtgctggacagctccttcctcacgttctcaggcctccacgctgagcaggcctttgttggacagatgaagagtgacttgtttctggatgattctaagagtctggtgtgctggccctccggcgagggaacgctcagttggccggacctgctcagtgacccgtccattgtgggtagcaatctgcggcagctggcacggggccaggcgggccatgggctgggcccagaggaggacggcttctccctggccagcccctactcgcctgccaaatccttctcagcatcagatgaagacctgatccagcaggtccttgccgagggggtcagcagcccagcccctacccaagacacccacatggaaacggacctgctcagcagcctgtccagcactcctggggagaagacagagacgctggcgctgcagaggctgggggagctggggccacccagcccaggcctgaactgggaacagccccaggcagcgaggctgtccaggacaggactggtggagggtctgcggaagcgcctgctgccggcctggtgtgcctccctggcccacgggctcagcctgctcctggtggctgtggctgtggctgtctcagggtgggtgggtgcgagcttccccccgggcgtgagtgttgcgtggctcctgtccagcagcgccagcttcctggcctcattcctcggctgggagccactgaaggtcttgctggaagccctgtacttctcactggtggccaagcggctgcacccggatgaagatgacaccctggtagagagcccggctgtgacgcctgtgagcgcacgtgtgccccgcgtacggccaccccacggctttgcactcttcctggccaaggaagaagcccgcaaggtcaagaggctacatggcatgctgcggagcctcctggtgtacatgctttttctgctggtgaccctgctggccagctatggggatgcctcatgccatgggcacgcctaccgtctgcaaagcgccatcaagcaggagctgcacagccgggccttcctggccatcacgcggtctgaggagctctggccatggatggcccacgtgctgctgccctacgtccacgggaaccagtccagcccagagctggggcccccacggctgcggcaggtgcggctgcaggaagcactctacccagaccctcccggccccagggtccacacgtgctcggccgcaggaggcttcagcaccagcgattacgacgttggctgggagagtcctcacaatggctcggggacgtgggcctattcagcgccggatctgctgggggcatggtcctggggctcctgtgccgtgtatgacagcgggggctacgtgcaggagctgggcctgagcctggaggagagccgcgaccggctgcgcttcctgcagctgcacaactggctggacaacaggagccgcgctgtgttcctggagctcacgcgctacagcccggccgtggggctgcacgccgccgtcacgctgcgcctcgagttcccggcggccggccgcgccctggccgccctcagcgtccgcccctttgcgctgcgccgcctcagcgcgggcctctcgctgcctctgctcacctcggtgtgcctgctgctgttcgccgtgcacttcgccgtggccgaggcccgtacttggcacagggaagggcgctggcgcgtgctgcggctcggagcctgggcgcggtggctgctggtggcgctgacggcggccacggcactggtacgcctcgcccagctgggtgccgctgaccgccagtggacccgtttcgtgcgcggccgcccgcgccgcttcactagcttcgaccaggtggcgcagctgagctccgcagcccgtggcctggcggcctcgctgctcttcctgcttttggtcaaggctgcccagcagctacgcttcgtgcgccagtggtccgtctttggcaagacattatgccgagctctgccagagctcctgggggtcaccttgggcctggtggtgctcggggtagcctacgcccagctggccatcctgctcgtgtcttcctgtgtggactccctctggagcgtggcccaggccctgttggtgctgtgccctgggactgggctctctaccctgtgtcctgccgagtcctggcacctgtcacccctgctgtgtgtggggctctgggcactgcggctgtggggcgccctacggctgggggctgttattctccgctggcgctaccacgccttgcgtggagagctgtaccggccggcctgggagccccaggactacgagatggtggagttgttcctgcgcaggctgcgcctctggatgggcctcagcaaggtcaaggagttccgccacaaagtccgctttgaagggatggagccgctgccctctcgctcctccaggggctccaaggtatccccggatgtgcccccacccagcgctggctccgatgcctcgcacccctccacctcctccagccagctggatgggctgagcgtgagcctgggccggctggggacaaggtgtgagcctgagccctcccgcctccaagccgtgttcgaggccctgctcacccagtttgaccgactcaaccaggccacagaggacgtctaccagctggagcagcagctgcacagcctgcaaggccgcaggagcagccgggcgcccgccggatcttcccgtggcccatccccgggcctgcggccagcactgcccagccgccttgcccgggccagtcggggtgtggacctggccactggccccagcaggacaccccttcgggccaagaacaaggtccaccccagcagcacttagtcctccttcctggcgggggtgggccgtggagtcggagtggacaccgctcagtattactttctgccgctgtcaaggccgagggccaggcagaatggctgcacgtaggttccccagagagcaggcaggggcatctgtctgtctgtgggcttcagcactttaaagaggctgtgtggccaaccaggacccagggtcccctccccagctcccttgggaaggacacagcagtattggacggtttctagcctctgagatgctaatttatttccccgagtcctcaggtacagcgggctgtgcccggccccaccccctgggcagatgtcccccactgctaaggctgctggcttcagggagggttagcctgcaccgccgccaccctgcccctaagttattacctctccagttcctaccgtactccctgcaccgtctcactgtgtgtctcgtgtcagtaatttatatggtgttaaaatgtgtatatttttgtatgtcactattttcactagggctgaggggcctgcgcccagagctggcctcccccaacacctgctgcgcttggtaggtgtggtggcgttatggcagcccggctgctgcttggatgcgagcttggccttgggccggtgctgggggcacagctgtctgccaggcactctcatcaccccagaggccttgtcatcctcccttgccccaggccaggtagcaagagagcagcgcccaggcctgctggcatcaggtctgggcaagtagcaggactaggcatgtcagaggaccccagggtggttagaggaaaagactcctcctgggggctggctcccagggtggaggaaggtgactgtgtgtgtgtgtgtgtgcgcgcgcgcacgcgcgagtgtgctgtatggcccaggcagcctcaaggccctcggagctggctgtgcctgcttctgtgtaccacttctgtgggcatggccgcttctagagcctcgacacccccccaacccccgcaccaagcagacaaagtcaataaaagagctgtctgactgc

SEQ ID NO: 206 - DNA, 4335 bp, Homo Sapiens
gcgcggagctgggagtggcttcgccatggctgtgagaagggactccgtgtggaagtactgctggggtgttttgatggttttatgcagaactgcgatttccaaatcgatagttttagagcctatctattggaattcctcgaactccaaatttctacctggacaaggactggtactatacccacagataggagacaaattggatattatttgccccaaagtggactctaaaactgttggccagtatgaatattataaagtttatatggttgataaagaccaagcagacagatgcactattaagaaggaaaatacccctctcctcaactgtgccaaaccagaccaagatatcaaattcaccatcaagtttcaagaattcagccctaacctctggggtctagaatttcagaagaacaaagattattacattatatctacatcaaatgggtctttggagggcctggataaccaggagggaggggtgtgccagacaagagccatgaagatcctcatgaaagttggacaagatgcaagttctgctggatcaaccaggaataaagatccaacaagacgtccagaactagaagctggtacaaatggaagaagttcgacaacaagtccctttgtaaaaccaaatccaggttctagcacagacggcaacagcgccggacattcggggaacaacatcctcggttccgaagtggccttatttgcagggattgcttcaggatgcatcatcttcatcgtcatcatcatcacgctggtggtcctcttgctgaagtaccggaggagacacaggaagcactcgccgcagcacacgaccacgctgtcgctcagcacactggccacacccaagcgcagcggcaacaacaacggctcagagcccagtgacattatcatcccgctaaggactgcggacagcgtcttctgccctcactacgagaaggtcagcggggactacgggcacccggtgtacatcgtccaggagatgcccccgcagagcccggcgaacatttactacaaggtctgagagggaccctggtggtacctgtgctttcccagaggacacctaatgtcccgatgcctcccttgagggtttgagagcccgcgtgctggagaattgactgaagcacagcaccgggggagagggacactcctcctcggaagagcccgtcgcgctggacagcttacctagtcttgtagcattcggccttggtgaacacacacgctccctggaagctggaagactgtgcagaagacgcccattcggactgctgtgccgcgtcccacgtctcctcctcgaagccatgtgctgcggtcactcaggcctctgcagaagccaagggaagacagtggtttgtggacgagagggctgtgagcatcctggcaggtgccccaggatgccacgcctggaagggccggcttctgcctggggtgcatttcccccgcagtgcataccggacttgtcacacggacctcgggctagttaaggtgtgcaaagatctctagagtttagtccttactgtctcactcgttctgttacccagggctctgcagcacctcacctgagacctccactccacatctgcatcactcatggaacactcatgtctggagtcccctcctccagccgctggcaacaacagcttcagtccatgggtaatccgttcatagaaattgtgtttgctaacaaggtgccctttagccagatgctaggctgtctgcgaagaaggctaggagttcatagaagggagtggggctggggaaagggctggctgcaattgcagctcactgctgctgcctctgaaacagaaagttggaaaggaaaaaagaaaaaagcaattaggtagcacagcactttggttttgctgagatcgaagaggccagtaggagacacgacagcacacacagtggattccagtgcatggggaggcactcgctgttatcaaatagcgatgtgcaggaagaaaagcccctcttcattccggggaacaaagacgggtattgttgggaaaggaacaggcttggagggaagggagaaagtaggccgctgatgatatattcgggcaggactgttgtggtactggcaataagatacacagctccgagctgtaggagagtcggtctgctttggatgattttttaagcagactcagctgctatacttatcacattttattaaacacagggaaagcatttaggagaatagcagagagccaaatctgacctaaaagttgaaaagccaaaggtcaaacaggctgtaattccatcatcatcgttgttattaaagaatccttatctataaaaggtaggtcagatccccctccccccaggttcctccttcccctcccgattgagccttacgacactttggtttatgcggtgctgtccgggtgccagggctgcagggtcggtactgatggaggctgcagcgcccggtgctctgtgtcaaggtgaagcacatacggcagacctcttagagtccttaagacggaagtaaattatgatgtccagggggagaaggaagataggacgtatttataataggtatatagaacacaagggatataaaatgaaagatttttactaatatatattttaaggttgcacacagtacacaccagaagatgtgaaattcatttgtggcaattaagtggtcccaatgctcagcgcttaaaaaaacaaattggacagctacttctgggaaaaacaacatcattccaaaaagaacaataatgagagcaaatgcaaaaataaccaagtcctccgaaggcatctcacggaaccgtagactaggaagtacgagccccacagagcaggaagccgatgtgactgcatcatatatttaacaatgacaagatgttccggcgtttatttctgcgttgggttttcccttgccttatgggctgaagtgttctctagaatccagcaggtcacactgggggcttcaggtgacgatttagctgtggctccctcctcctgtcctcccccgcaccccctcccttctgggaaacaagaagagtaaacaggaaacctactttttatgtgctatgcaaaatagacatctttaacatagtcctgttactatggtaacactttgctttctgaattggaagggaaaaaaaatgtagcgacagcattttaaggttctcagacctccagtgagtacctgcaaaaatgagttgtcacagaaattatgatcctctatttcctgaacctggaaatgatgttggtccaaagtgcgtgtgtgtatgtgtgagtgggtgcgtggtatacatgtgtacatatatgtataatatatatctacaatatatattatatatatctatatcatatttctgtggagggttgccatggtaaccagccacagtacatatgtaattctttccatcaccccaacctctcctttctgtgcattcatgcaagagtttcttgtaagccatcagaagttacttttaggatgggggagaggggcgagaaggggaaaaatgggaaatagtctgattttaatgaaatcaaatgtatgtatcatcagttggctacgttttggttctatgctaaactgtgaaaaatcagatgaattgataaaagagttccctgcaaccaattgaaaagtgttctgtgcgtctgttttgtgtctggtgcagaatatgacaatctaccaactgtccctttgtttgaagttggtttagctttggaaagttactgtaaatgccttgcttgtatgatcgtccctggtcacccgactttggaatttgcaccatcatgtttcagtgaagatgctgtaaataggttcagattttactgtctatggatttggggtgttacagtagccttattcacctttttaataaaaatacacatgaaaacaagaaagaaatggcttttcttacccagattgtgtacatagagcaatgttggttttttataaagtctaagcaagatgttttgtataaaatctgaattttgcaatgtatttagctacagcttgtttaacggcagtgtcattcccctttgcactgtaatgaggaaaaaatggtataaaaggttgccaaattgctgcatatttgtgccgtaattatgtaccatgaatatttatttaaaatttcgttgtccaatttgtaagtaacacagtattatgcctgagttataaatatttttttctttctttgttttattttaatagcctgtcataggttttaaatctgctttagtttcacattgcagttagccccagaaaatgaaatccgtgaagtcacattccacatctgtttcaaactgaatttgttcttaaaaaaataaaatatttttttcctatggaaaaaaaaaaaaaaaaaa

SEQ ID NO: 207 - DNA, 1208 bp, Homo Sapiens
aaagcgagagtgagtgggaccggaggggcggggcatcatatgggcggggctgaggcgaggccccggcggccatcttgagccccgccttttacttcggcccgcttcttctggtcactccgccaccgtagaatcgcctaccatttggtgcaagcaaaaagcaatcagcaattggacaggaaaagaatggcattgaagcagatttccagcaacaagtgctttgggggattgcagaaagtttttgaacatgacagtgttgaactaaactgcaaaatgaaatttgctgtctacttaccaccaaaggcagaaacaggaaagtgccctgcactgtattggctctcaggtttaacttgcacagagcaaaattttatatcaaaatctggttatcatcagtctgcttcagaacatggtcttgttgtcattgctccagataccagccctcgtggctgcaatattaaaggtgaagatgagagctgggactttggcactggtgctggattttatgttgatgccactgaagatccttggaaaaccaactacagaatgtactcttatgtcacagaggagcttccccaactcataaatgccaattttccagtggatccccaaaggatgtctatttttggccactccatgggaggtcatggagctctgatctgtgctttgaaaaatcctggaaaatacaaatctgtgtcagcatttgctccaatttgcaaccctgtactctgtccctggggcaaaaaagcctttagtggatatttgggaacagatcaaagtaaatggaaggcttatgatgctacccaccttgtgaaatcctatccaggatctcagctggacatactaattgatcaagggaaagatgaccagtttcttttagatggacagttactccctgataacttcatagctgcctgtacagaaaagaaaatccccgttgtttttcgattgcaagagggttatgatcatagctactacttcattgcaacctttattactgaccacatcagacatcatgctaaatacctgaatgcatgaaaaaactccaaataagagaatctcttcaggattataaaagttgtaaaatgcaactgtattgctgagcaaaaaaaaaaaaaattcaaaacattggattttatagtgctaaaagggctttattctatagttgaatcacctctgaataaagatataaaacctaaaaaaaaaaaaaaaaa

SEQ ID NO: 208 - DNA, 2631 bp, Homo Sapiens
ggaggccgctgggacgcggttcagctcattccctgaggccggcccgcgtcccgtcaggcgccgcgcggggttagcgcggggtcagcggaggtcagcgggggtcagcagcagcggctccgagggcgcggcggacgcaggatgtacacgctgctgtcgggcttgtacaagtacatgtttcagaaggacgagtactgcatcctgatcctgggcctggacaatgctgggaagacgaccttcctggagcagtcgaaaacccgatttaacaagaactacaaggggatgagtctatccaaaatcaccaccaccgtgggcctaaacatcggcactgtggatgtgggaaaggctcggctcatgttctgggacttaggagggcaggaagagctgcagtctttgtgggacaagtattatgcggagtgtcacggcgtcatctacgtcattgactccaccgacgaggagaggctggctgagtccaagcaggcgtttgagaaggtggtgaccagcgaggcgctgtgcggtgtccccgtcttggtgctggccaacaagcaggatgtggagacgtgcctctcaatccctgacatcaagacggccttcagcgactgcaccagcaagatcggcaggcgagattgcctgacccaggcctgctcggccctcacagggtgagtgggggctgcacctgcgggggctttggggaccgagaccccccgcctcacacccgctgtcttcacagcaaaggggtgcgcgagggcatcgagtggatggtgaagtgtgtcgtgcggaatgtgcaccggccgccgcggcagagggacatcacgtaggcgcagccgcgctgccgtcgggacggctggtcccctggtgctggaggagtggcctcctgttggctcccatgctgctgatctggggggtgggtttgctttgctttggggttcttctatttactttgttttctcgaagacaaactttcctctatgtctggaaaagcgtaggcatccggaggctttggaggggagtctggcagcccggctggcccaggccctgcagcggcagcctttccacagggcgcagcggcggcctttcgaggccctttctggggggtctgagggagacctggttgggaattggggctccagtgctcaggctggcttgggctgcatgaggacagccctgtgggaccctcgggagaccccgtggctgtctccgccccatcgaggaggaggcccgtcagccatggctgccatctggcttctgccctgtgaccccgtgaccccgtgaccccgaagtggtctggggctgatcttgccttgaggaagacccaggccatgttcccaaaggccagcgggggccctggattgtgatgcagcctcgggacagggctgaggcctgcgggggaagacctataccccacgcctgggcctggcttcacctcaccctaatcccccgggagggagctgactgatgcaaaaagctgagggggcctgctgggagtggctgtttttatgccccagccccgcaagttggggagtgtttgtgggggtccagagccctcccccagccaggagagaacctcccggaggggttctctgtggggccctgtgtcccctgctcgggagtaaggctggtcctggggtcctccctgcacggaccccactgggcctgccgagtgctgtgttcttcctcagtctggctgtgggcaggagcggcctgcccagtgtcacccagggtgagtgcaaaataaagacggcgagtgtggctctgtccatcccttccctcctggagggtggaggctcctggctgttggacacggtgatggtgttactgggctgctcaggggctggtgggcaggtgaggggctccccaggtgggcctggagagtccaggcactcccttcctgcggatgtgggaaggacatggggtcctgggaggagctgctgggaaggggcatgagtcagggtgggggtggcgcagcagctgcggggctgtgactcacaggagtcgggccctggaagtccccgcgtcctctccaggggaccctgtgtgtgttctgcaggttggttcccaggacctgggggggacctccagccccgggaacctggccgtgctggggaggcgagtggctggtgcagccccccggttgctctgggtgcatcgggaggcttcagagcctgccccagagagggagaagcttcacttcccggaaagcatgggaggcctggaggaggtctttggcaggtcccctctcgggaaatcccctgtgagttgggagtgggaggaattcataagtggggggttagtgtgggccccggcgactagggctggcctgagccccatcctgttcttccagcaatgataccctcccaggccctgaccctcgctgagcttcaggggcccctgccacgtgccacagccactgggggcagaggtggcactccccactgatcctcccagggagggtctgtctgaggtaggggaagccccgggcagcagttctgatggcaggcagcctgagggatctgggcacagcgggcggctcaggtgtccccggctgccctcccagtagctgtgcaactacaaccagttttatgaaaaagctttataaaaataagctttaagaaacctcaaaaaaaaaaaaaaaaa

SEQ ID NO: 209 - DNA, 1557 bp, Homo Sapiens
ggcagcgcgccggccgcgagagagggccccgtcgcgaccgcgtccccttgggtccttgatcctgagctgaccgggtagccatggccttgcggctcctgaagctggcagcgacgtccgcgtccgcccgggtcgtggcggcgggcgcccagcgcgtgagaggaattcatagcagtgtgcagtgcaaactgcgctatggaatgtggcatttcctacttggggataaagcaagcaaaagactgacagaacgcagcagagtgataactgtagatggcaatatatgtactggaaaaggcaaacttgcaaaagaaatagcagagaaactaggcttcaagcactttcctgaagcggggattcattatccagacagtaccacaggagatgggaagcccctcgccaccgactataatggcaactgtagtttggagaaattttacgatgatccgagaagcaatgatggcaacagttaccgcctgcagtcctggttgtacagcagtcgcctgctgcagtactcagatgccttggagcacttgctgaccacaggacaaggtgttgtgttggagcgctccatcttcagtgactttgtgttcctggaggcgatgtacaaccagggattcatccgaaagcagtgtgtggaccactacaacgaggtgaagagcgtcaccatctgcgattacctgcccccccacctggtgatttacatcgatgtgcccgttccagaggtccagaggcggattcagaagaaaggagatccacatgaaatgaagatcacctctgcctatctacaggacattgagaatgcctataagaaaacctttctccctgagatgagtgaaaaatgtgaggttttacaatattctgcaagggaagctcaagattcaaaaaaggtggtagaggacattgaatacctgaagttcgataaagggccgtggctcaagcaggacaatcgcactttataccacctgcgattactggttcaggataagtttgaggtgctgaattacacaagcattcctatctttctcccggaagtcaccattggagctcatcagactgaccgtgtcttacatcagttcagagagctgccgggccgcaagtacagccctgggtacaacaccgaggtgggagacaagtggatctggctgaagtgaacgggccgccttctgctccagctgcatcacagtgatggccaagctgcatcagccgcactctcctggacgccatatagctttaagatcgggggagggtaaataatgcaaaaattgcacagtggaagaaggggtctcacaaaaagcaatccatcctgtagtataggtaatggagttgggggaagcagcttccattctggatgtttggaaccctttagctttgttttggaatggcccaccattctcactggaaaacagtggtctgctgtgaaaggccagctctcggcagcccctgtggtttcagcgctgccgctctgtgtcattcaggttgtgcacattgtttttcttctgacttccagaaataaaagtgtttccatgggaaaaaaaaaaaaaaaaaaaaaaaaaaaaaaaa

SEQ ID NO: 210 - DNA, 3508 bp, Homo Sapiens
ggcgcccctcctgccgccccccgcccggcctcgcactccgcttccggccgctctcgctgcggccgcacccgcgcccgtgcccgccccgcgcctgccccgcgcctcatggagggcgcagggccccggggggccgggccggcgcggcgccggggagccggggggccgccgtcaccgctgctgccgtcgctgctgctgctgctgctgctctggatgctgccggacaccgtggcgcctcaggaactgaaccctcgcggccgcaacgtgtgccgtgctcccggctcccaggtgcccacgtgctgcgctggctggaggcagcaaggggacgagtgtgggattgcggtgtgcgaaggcaactccacgtgctcagagaacgaggtgtgcgtgaggcctggcgagtgccgctgccgccacggctacttcggtgccaactgcgacaccaagtgcccgcgccagttctggggccccgactgcaaggagctgtgtagctgccacccacacgggcagtgcgaggacgtgacaggccagtgtacttgtcacgcgcggcgctggggcgcgcgctgcgagcatgcgtgccagtgccagcacggcacgtgccacccgcggagcggcgcgtgccgctgtgagcccggctggtggggcgcgcagtgcgccagcgcgtgctactgcagcgccacgtcgcgctgcgacccacagaccggcgcctgcctgtgccacgcaggctggtggggccgcagctgcaacaaccagtgcgcctgcaactcgtctccctgcgagcagcagagcggccgctgtcagtgccgcgagcgtacgttcggcgcgcgctgcgatcgctactgccagtgcttccgcggccgctgccaccctgtggacggcacgtgtgcctgcgagccgggctaccgcggcaagtactgtcgcgagccgtgccccgccggcttctacggcttgggctgtcgccgccggtgtggccagtgcaagggccagcagccgtgcacggtggccgagggccgctgcttgacgtgcgagcccggctggaacggaaccaagtgcgaccagccttgcgccaccggtttctatggcgagggctgcagccaccgctgtccgccatgccgcgacgggcatgcctgtaaccatgtcaccggcaagtgtacgcgctgcaacgcgggctggatcggcgaccggtgcgagaccaagtgtagcaatggcacttacggcgaggactgcgccttcgtgtgcgccgactgcggcagcggacactgcgacttccagtcggggcgctgcctgtgcagccctggcgtccacgggccccactgtaacgtgacgtgcccgcccggactccacggcgcggactgtgctcaggcctgcagctgccacgaggacacgtgcgacccggtcactggtgcctgccacctagaaaccaaccagcgcaagggcgtgatgggcgcgggcgcgctgctcgtcctgctcgtctgcctgctgctctcgctgctcggctgctgctgcgcttgccgcggcaaggaccctacgcgccgaccccgcccccgcagggagctttcgcttgggaggaagaaggcgccgcaccgactatgcgggcgcttcagtcgcatcagcatgaagctgccccggatcccgctccggaggcagaaactacccaaagtcgtagtggcccaccacgacctggataacacactcaactgcagcttcctggagccaccctcagggctggagcagccctcaccatcctggtcctctcgggcctccttctcctcgtttgacaccactgatgaaggccctgtgtactgtgtaccccatgaggaggcaccagcggagagccgggaccccgaagtccccactgtccctgccgaggcgccggcgccgtcccctgtgcccttgaccacgccagcctccgccgaggaggcgatacccctccccgcgtcctccgacagcgagcggtcggcgtccagcgtggaggggcccggaggggctctgtacgcgcgcgtggcccgacgcgaggcccggccggcccgggcccggggcgagattgggggcctgtcgctgtcgccatcgcccgagcgcaggaaaccgccgccacctgaccccgccaccaagcctaaggtgtcctggatccacggcaagcacagcgccgctgcagctggccgtgcgccctcaccaccgccgccaggctccgaggccgcgcccagccccagcaagaggaaacggacgcccagcgacaaatcggcgcatacggtcgaacacggcagcccccggacccgcgacccaacgccgcgccccccggggctgcccgaggaggcgacagccctcgctgcgccctcgccgcccagggcccgagcgcgcgccgcgccccggcctcttggagcccacggacgccggcggtcccccgcgaagcgcgccgaggctgcctccatgttggccgctgacgtgcgcggcaagactcgcagcctgggccgcgccgaggtggccctgggcgcgcagggccccagggaaaagccggcgcccccacagaaagccaagcgctccgtgccgccagcctcgcccgcccgcgcgcccccagcgaccgaaaccccggggcctgagaaggcggcgaccgacttgcccgcgcctgagaccccccggaagaagacccccatccagaagccgccgcgcaagaagagccgggaggcggcgggcgagctgggcagggcgggcgcacccaccctgtagcaggctgtggctcgtccgcgcgcagctccctcagcttcgcagcgccgcccgccaccccacacctcccacgctaccgggcacgggcggcctcctattggccgggcaccgcgcggctagcggaggttgcgtctcattggctcaggtcctgcagccgctcctggattggagcagtgtgctctggcgggaagggcccatcccgttggtcgaggcctgacaggcgcttagcgggcgactccctccccattggccgagttatggagcgctccgaccagacagcgtctcattggccaaagatgggagggttccgcttaaagaccgcctcttactggccaggagtggacttggttagggctaccttctcattggttgcagccagaggcacttctgcccgggctgcctctcccccgctagggcctggtgcctctggctggaggctccctcccttggccgtcccaatagagcccggggctacttccactggccaggctcccgggcatctggttgaccccagcctggggaggagggctggtctccgctcctcaggggcttagtccgtcccaccccttcccttccctggcgccccgggcccaggcccctcagctgtcagctggttttgatggcctcccactgccccacacgccgcgggacctccaggggcgactctagtggcctgaggagatgtatttataggcccccagcagggctgctcccccctcggccggtgccccaggatgggctcctcccggcgggggcttggccaaagctttcttaataaaatgcctttcccctc

SEQ ID NO: 211 - DNA, 5395 bp, Homo Sapiens
cgcctccccgcgcctcgttcgccgccgctgtcgccgccgccgcccgagactcgcgcagagcagttatggcggatcccgcagcccccacgcccgcagctcccgctccagcccaggccccggctccagccccggaggcagtcccggccccagccgcagcccccgtcccggcgccggcgcccgcctcggactcggcctccgggccgtcctcggactccggcccagaagccggctcgcagcgcctgctgttttctcacgacctggtgtcgggccgttaccgtggctccgtgcacttcgggctggtgcgcctcatccacggcgaggactcggactcggagggcgaggaggagggccgcgggagctcggggtgctccgaggccgggggcgcgggccacgaggagggccgggccagccccctgcgccgcggctacgtgcgcgtccagtggtacccggagggcgtcaagcagcatgtgaaggagaccaagctgaaactagaggaccgttctgtggtgccccgagatgtggtccggcacatgcgatccaccgacagtcagtgtggcacggtgatcgacgtcaacatcgactgtgccgtcaagctcatcggcaccaactgcatcatctatcccgtcaacagcaaggacctgcagcacatctggcccttcatgtatggggactacattgcctatgactgctggctggggaaggtctacgacttgaagaaccagatcatcctgaagctatccaacggcgccaggtgctccatgaacacggaagatggcgccaagctctacgacgtctgcccgcacgtcagcgactcgggtctcttcttcgatgattcctatggcttctacccaggccaggtgctcattggccctgccaagatcttctccagcgtccagtggctgtcaggtgtcaagcccgtgctcagcaccaagagcaagttccgagtggtggtggaagaggtgcaggttgtagagttgaaagttacatggattaccaagagtttctgtccagggggcacggacagcgtcagccccccaccctctgtcatcacccaggaaaacctaggcagggtgaagcgtctcggatgctttgaccatgctcagcggcagcttggggagcgctgtctgtatgtcttcccagccaaggtagagccagccaagattgcctgggaatgtccagaaaaaaactgcgcccagggggagggctctatggccaagaaggtgaagcgcctgttgaagaagcaggttgtgcggatcatgtcatgctccccagacacccagtgttcccgggaccattccatggaagacccagacaagaagggggaatccaaaaccaagagcgaagcggagtctgccagccctgaggagacgcccgatggctctgccagtccagtggagatgcaggacgagggtgcagaggagccccacgaggcaggagagcagctgcccccattcctgctaaaagaaggcagagatgacaggctgcactcggcagagcaggacgcagatgatgaggctgctgatgacacggacgacaccagttcggtgacctcctctgccagctccaccacttcctcccagagcggcagcggcacgagtcgcaaaaagagcatccccttgtccatcaagaacttaaagcgcaaacacaagaggaagaagaataaaatcactcgagacttcaagccaggggacagggtggcagtggaggtggtgaccacgatgacctcagccgacgtgatgtggcaggatggctccgtggaatgcaacatccgctccaacgacctcttccctgtgcaccacctggacaacaacgagttctgccctggagacttcgtggtagataagcgagtccagagctgtccagaccctgctgtctacggtgtggtacagtctggggaccacatcggccgtacctgcatggtgaagtggttcaagctgaggccgagtggggacgacgtggagctgattggagaagaggaagatgtgagtgtttacgacattgctgaccaccctgactttaggttccgtacaactgacatcgtcatccgcatcggcaatactgaggatggggctcctcacaaggaggatgagccatcggtgggccaggtggcccgtgtggacgtcagcagcaaggtggaggtggtgtgggctgacaactcaaagaccatcatcctgccccagcacttgtacaacatagagtctgagattgaggagtcagactacgattcggtagaaggcagcaccagcggggcatcctcggatgaatgggaagatgatagtgacagctgggagacggacaatgggctggtggaggacgagcaccccaagatagaggagccccccatcccacccctggagcagccggtggcccctgaggacaagggagtggtgatcagtgaagaggcagccacagctgccgtccagggggctgtggccatggctgcccccatggccgggctgatggagaaggctggcaaggacgggccacccaagagcttccgggagttgaaagaggccatcaagatcctggagagcctcaagaacatgactgtggagcagctgctgacgggctcgcccacctctccgactgtggagcctgagaagccaactcgggagaagaagtttctggatgacatcaagaagctacaggaaaacctcaagaagaccctggacaatgtggccattgtagaggaggagaagatggaagcagtgcccgacgtagagcgcaaggaggacaagcccgaggggcagtcacctgtgaaggctgagtggcccagcgaaaccccggtgctgtgccagcagtgtggcggcaagcctggcgtcaccttcaccagcgccaagggcgaggtcttctccgtactggagtttgcaccctcaaatcattcttttaagaaaattgagttccagcctccagaagccaagaagttcttcagcacagtgcggaaggagatggcgctgctggctacctcactgcctgagggcatcatggtcaagacttttgaagatagaatggacctcttctcagctctcatcaagggccccactcgaaccccctacgaggatggcctctacttgtttgacatccagctccccaacatctacccagccgtgcccccccacttctgctacctctcccaatgcagtggccgcctgaaccccaacctgtatgacaatgggaaggtgtgtgtcagcctcctgggcacctggattggaaaggggacagagaggtggacaagcaagtccagccttctccaggtgctcatctccatccaaggtctgatcctggtaaatgaaccatactacaacgaagccggcttcgacagtgaccgaggcctgcaggaaggctatgaaaacagtcgctgttacaatgagatggcgctgatccgcgtggtgcagtccatgacccagctggtgcggcggccccccgaggtctttgagcaggagatcaggcaacactttagcactggtggctggcggctggtgaaccgtatcgagtcctggctggaaacccatgccctgctggagaaggcccaggcactgcccaacggggtgcccaaggccagcagctcgccagagcccccagctgtagccgagctgtcagactccggccaacaagaacctgaggatggagggccagccccaggagaggcctcccagggctcagactcagagggcggtgcccagggcctggcctcagctagcagggaccacacagaccagacttcggagaccgcaccagacgcatcggtgccacccagtgtgaaaccaaagaagcggagaaagagctaccggagcttcttacctgagaagagtggctaccctgacatcggcttccccctcttcccactttccaagggtttcatcaagagcatccggggtgtcctgacgcagttccgggctgccctgctagaggcaggcatgccggagtgcacagaggacaagtagctgccaggcacagaggaaagagcatcaccgtgggagaggccagccgccgcctgctcactcccccccggaatcacccctcttcccatgcccctctgtccccactgcaaacccactgccctcttctccccaaggtgagtttgatgctgaagtgcaagaagtgtgttgagatgctgccgtttctattttgaagcgagctttcaacaggcgggtcccctgtggcaaagaaaatcggaaccctgttgccgattttccatttgtcaccccagcagaatgtccggcacttgctcccttgctgccccttctcaggtcagaggcgggtgttccagggcctgccgcggggctctctgggccggttccctgcagacccgcaggagagcacatgtgccttgcatgaagtgtgggttgcgccaacaattcccctggtccctttcaacctgtttagttcaactcaagcctccctgtgtcccagaccctcctgctgccaccaccacccaggtcctccctagtcctccagcgtcaacactatcccttgggagttgtagctgctgtcactgactcccggctatacatggcctgtcgaccacgttatagccctcaggcctgttgaacttgctctctaagagaggttgggaccaggctaggttccgggtgacgcccaggagaggtggtggccttcacacatgcacatggagttgaggaccagggagctgcagggaaagcaacagctataggtgccttgctcttctgtcggaggctgctgggggcaagagcagctgcacaaggccagggcaagtgctagggcccctcccccatcacatggtcacactgggacaggcgtgcagctcactgaactccaagcgagccagccctctcttggactagaaggcctactgtcagcccttcgcttacaaactgcaggctcaatccgaaggggacggccggcgggggctctcctagtgcccagagacaggcccagaggtttacaagttttctaagcttttgataatgtgaagctccaggccgagaggatgctgttgagcacattgcagctatgtaatttttggtgtatgtatgtaatatttaaggttggaaaaaaaactcaaaagcaaagatattaactcttattagaaaaaaagacaaaaaaaaagccaaagcatgatgcgtcttgtcagccttaagtgggctccacacctgtgctgtgctgtgaccgcccagccagcagagctgcgggaggatggagccggaccacacaccgtggcatttggaaccgagtcggtatcttgtttgagaaacacccggagtgactggtggggctgtgcttcccagtgcattgtacatgtggagatgtgaatgcctactgcttacgatatctgtataaagtgctgtgtgattaaacttttttttacttgcaaaaaaaaaaaaaaaaaaaaaaaaaaaaaaaaaaaaaaaaa

SEQ ID NO: 212 - DNA, 945 bp, Homo Sapiens
ccaagcgcggggccggagcggccttcccggagtcctttgcgcggcacctggcgacaaaatggctgcccgagggagacgggcggagcctcagggccgggaggctccgggccccgcgggcggtggcggtggcgggagccgttgggctgagtcgggatcggggacgtcgcccgagagcggggacgaggaggtgtcgggcgcgggttcgagcccggtgtcgggcggcgtgaacttgttcgccaacgacggcagcttcctggagctgttcaagcggaagatggaggaggagcagcggcagcggcaggaggagccgcccccgggtccgcagcgacccgaccagtcggccgccgccgctggccccggggatccgaagaggaagggcggtccgggctccacacttagcttcgtgggcaaacgcagaggcgggaacaaactagccctcaagacgggaatagtagccaagaagcagaagacggaggatgaggtattaacaagtaaaggtgacgcgtgggccaagtacatggcagaagtgaaaaagtacaaagctcaccagtgcggtgacgatgataaaactcggcccctggtgaaatgacgcccctcccccacctgcccatggcctgggactctctgcgatgtacataactatttaatgcagcggcagcggcgacagccttccctgagaggacttaaaagcagaaggaaaccgagatgcttcccgcagccgtggacgattctccaggactctttttttaccttgagcacttgcctcgtgagacttcatagaacagtggtttactgtcccccccttctcacctcctcattctctctggctctttctgtcttcctcttctcaccctcctccctccccttagccatcacttctgggaagtaaagaacttgacttagtgccggaaaaaaaaaaaaaaaaaaaaaaaaaaaaaaaaaaaa

SEQ ID NO: 213 - DNA, 1582 bp, Homo Sapiens
aggcggacgcaggcggggcggaagtgggcccggcgggctggggcggcgggagtgcgggtgggcgtttaaaggggccttcggcacccaggtcggttcgccgccgggactgctgacggggagggctaggtagccctgggagtcgggatctagaaggtagaggagaagcggggctgtctgacccccggaggtgacaaggggagaggggctgtgtgaataccctccatgggcagtaatgggatgactatccccagggagcattgcgaaggagagaggcggctgagggactgcactttctggggccccccgggagagtcagagggcagttaagagggatcacaggcccggcttggtactgtcactccccttcccactccctgctctcagcattctgtcacctccctaccccgtcgcggtgcccagccatggccagacctcccgtgcccggttcggtggttgtcccaaactggcacgagagtgccgagggcaaggagtacctggcttgcattctgcgcaagaaccgccggcgggtgtttgggctgcttgagcggccagtgctgctgccgcctgtgtccattgacactgccagctacaagatctttgtgtccgggaagagtggtgtgggcaagacggcgctggtggccaagctggctggcctggaggtgcctgtggtgcaccacgagaccaccggcatccagaccaccgtggtattttggccagccaagctgcaggccagcagccgtgtcgtcatgtttcgttttgagttctgggactgtggagagtctgcactcaaaaagttcgatcatatgctgctggcttgcatggagaacacagatgccttcctcttcctcttctccttcactgaccgtgcctcctttgaagacctccctggacagctggcccgcatagcaggtgaggcccctggtgtcgtcaggatggtcatcggctccaaatttgaccagtacatgcacacggacgtgcccgagcgggacctcacagccttccggcaggcctgggagctgcccctgctacgggtgaagagtgtgccggggcggcggctggctgatgggcgcacactggacgggcgggctgggctggccgacgttgcccacatactcaatggccttgctgagcagctgtggcaccaggaccaggtggcggctggcctgcttcccaaccccccagagagtgctcctgaatgagtcacgagtggttgcctgtgatcccacccccaaccctcaggtctcgacatagggctggaggctggggcaggaacatggatcctatctggaggactggccagcatggcctgatcagggaggatgtggccagagaaggcccacccgcgagcagcgctttccttgcagaattcatggcagggaggtggggaccaaggccctgagctcgaacatctcccgtggcctttccccctttggcagcaccgatggaggatgactgggagagggggtgcctctcaagttacttcaatcaagaacctgtattggttgaggtgacaccatctgttgtaacagataaaccccgaaatcccagtgctgaactccaaaaaaaaaaaaaaaaaaaaaaa

SEQ ID NO: 214 - DNA, 3475 bp, Homo Sapiens
gaggaggtcggctttgttctcgccccgccctctccccgcctcctccctagatatcgcgagagggcgggtccgcttggcttcggcgtcgcgtcgctcctgcgctggagctctaggccggcgtctctccgcgagccgcgggtcaagtggcagtggctaagggtgcgcgagtagccgccacccgttcggcgttggctctggcgtcggggtcgttgtgtcgtgacaaccgctgcggtagccgtttccgaggcagcagttgcggccgctttagccctgagcgggatctgcggctgcctgcgagtctctgctgtgccgacccttctcttcgcggaccccacgccaagcagcgaccctgagccgacagccggagcgcccggcaatggcggcctcgacggcctcgcaccggcccatcaaggggatcttgaagaacaagacctctacgacttcctctatggtggcgtcggccgaacagccccgcgggaatgtcgacgaggagctgagcaaaaaatcccagaagtgggatgaaatgaacatcttggcgacgtatcatccagcagacaaagactatggtttaatgaaaatagatgaaccaagcactccttaccatagtatgatgggggatgatgaagatgcctgtagtgacaccgaggccactgaagccatggcgccagacatcttagccaggaaattagctgcagctgaaggcttggagccaaagtatcggattcaggaacaagaaagcagtggagaggaggatagtgacctctcacctgaagaacgagaaaaaaagcgacaatttgaaatgaaaaggaagcttcactacaatgaaggactcaatatcaaactagccagacaattaatttcaaaagacctacatgatgatgatgaagatgaagaaatgttagagactgcagatggagaaagcatgaatacggaagaatcaaatcaaggatctactccaagtgaccaacagcaaaacaaattacgaagttcatagacgagatttgttcaacactgcaattgtttgttagatgtaaaccctgtgactatagtacgttgcttcttgttcttcacaattcatgacttaagtaccaaaatgcataccagttattatatattgccaagaattaaatgataaacttagagactgattagactgaaaatgcctaatcgatatatatattcttgtgcctagtactttaccacaaatacagtgtaatatcatcagtccaaaactgcattacttttgtaaaaacactggttaatttgtataagatattatagagctttttatgctttagaagttaaacaatatctttgggggggaactaatttattttcatcacttgaaatgtggtagctcttacaaagtttattgatttgatttttttaaaaatcaaaagccaattgaacaacaggatatatagactgataaatatttaggctgaatagtattttaacacttgtcttcaacttgatttgtctgtttaattgaaaagaattataagagttactgttgcattttctgacctactatttttaaaattcctgttgagtttctttgtgtttacaaggaaaggactgaactttttctcatcaaaactagcttttttccccacaaataaattatcaggttaaactttcaccaatgtctgctctgttttttgtttttggggggttttttgtttgtttttgttttttaatgtttttggtacactgggcagacttcagagcagttttttaaaaaaataaatattctaatgtagctatctcgccattccctttaaatacctgtcttaacctcctgcttttctttcctactcctttccacacatacgcacacaatcttctaccttttaaaggatcattaagactgtcaccacattaggagctctttctctcactcttctgtcatttgctgctatgttgaaattcttattttgaccatcaatgcctatgaattcttctaatacgtgaagaaaatagtttgagtagcagcagtgctataggtgggaaatacagtttagctgctgaatttctatacctctctgatttacagattgctaattaaatggctattattagtttggattaattagacttaagaaaacaactaactgagggttttttttgtttgttttttgagggttttctttgcatgagagttgtatgtaaccagtgatatgattattcctgaatgtacagacagaagtaagcctggacattgttaaatagtccctgctttaagggactacgataatgtgtactatgacaaacgtgctttattcttctaacgcagtaagaattaggtggaattttttccttcaaccaagtgcaggaaagccctgtgtgtcttggtttagttatggtttcatttctagccatacaattgatgaattgtgtacaacttttgttagtaccaaaataatctgttatatgaacagacttctaaaataacgtctgtatattttatatatagatacatatatgaaagaaggcttttattgaacagcttatcttccacttgcaggtttatggaaacagcagtatttgaaaataaataaaaagtgggagaattccttgctgttagaagaatgtggccattattttgattttttgaatgagatatataatcaaagtactgctgaactgtgagtgcagtattctaaacatttcagctaggaataccactgatttagaaacaaaactgtttgtctctggtttctgaatttaaaatgttgggattacctgtttaaatctgtcttgggggatgtagagattaagtctgtacatgtgcgtgcacatatattcatgcaccctctgattttggttttcttgtttctgagttcttagaaagtacccacatactcttttttttttttttgtagaagtagctgtcatagagtgaagaaaaggataagactttaaacagttgattctttttgtgttttctacaaactattttttgaaatttaaatcacaaactcattttctggtttttagaaagtagatgatgatttcagaggagtaaggcatgccaagcagcatgctcagtggggttttaggctgtcacatgcagctgagaaaaggtatgttcaagtcataagtaggtaattgatagggtatgaactagtcaaaatatgaaccattatgattcaagttagattttcctctggagagacagatctgaatgttcagttctagccaaggtagattttactttcaactttttaatcagtatcactttctgtgcttaactatttggtgttaccttgtctgttttcatttgtctaaaattctgcagagatgactaaaatttgacataatggtgtaaatggattgttaaggtaactttcagttgaagattaaagcaagatgccattttccccatgactttggttttgtttacatttttccctttcagttagtatacactacacgtactgtaataaaatacaataatatgacaaaaaaaaaa

SEQ ID NO: 215 - DNA, 3144 bp, Homo Sapiens
gcggtcattgtcctggcagagcggcgagccggtgagtgtggctgcggggtcgcgcccaccctctacctgtgccgggggccggaacctggccccggggagggcgcggcctcggggagacggcgtgcaggcccagcactgttggtcaccgcaggcctgtcttcctattcaccgtgggcagcagagggatggctgctcagctgctgactgatgaggcactgactgggagactagacctgaaatgaaagagttggatccaaagaatgacatttcggaagacaagctctccgttgttggggaggccacggggggacccacgaggaatggtgccaggggtcctggctcagaaggagtgtgggaaccaggcagctggccagagaggccgcggggagatgcaggtgcagagtgggagccattgggaattccccaggggaacaaactcttagggggctcagtacccgcatgtcatgaactgaaggcatttgccaaccaaggctgtgtcctggtcccaccacggctggacgaccccacagaaaagggggcctgtccacccgtaaggcgtggcaagaacttctccagcacttcagacctcagtaagccccccatgccctgcgaggagaagaaaacctacgactgcagcgagtgtggcaaggcctttagccgaagctcgtccctgataaagcaccaaaggatccacacgggagaaaagccgtttgagtgtgacacctgtgggaagcacttcatcgagcgctcgtccctcaccatccaccagcgggtgcacacgggcgagaagccctatgcctgcggggactgcggcaaggccttcagccagcgcatgaacctcactgtgcaccagcgcacgcacacgggcgagaagccgtatgtgtgcgacgtgtgtggcaaggccttccggaagacttcctctctcacccagcacgagcggatccacacgggggagaagccctacgcgtgcggggactgcggcaaggccttcagccagaacatgcacctcatcgtgcaccagcgcacgcacaccggggagaagccgtacgtgtgccccgagtgcgggcgagccttcagccagaacatgcacctgaccgagcaccagcgcacgcacaccggggagaagccgtacgcctgcaaggagtgcggcaaggccttcaacaagagctcctcgctcaccctgcaccagaggaaccacaccggcgagaagccctacgtgtgcggcgagtgcggcaaggccttcagccagagctcctacctcatccagcaccagcgcttccacatcggcgtgaagccgttcgagtgcagcgagtgcggcaaggccttcagcaagaactcctcgctcacgcagcaccagcgcatccacaccggcgagaagccctacgagtgctacatctgcaagaagcacttcacggggcgctcgtccctcatcgtgcaccagatcgtgcacaccggggagaagccctacgtgtgcggcgagtgcggcaaggccttcagccagagcgcctacctcatcgagcaccagcggatccacaccggcgagaagccgtacaggtgcggccagtgcgggaagtccttcatcaagaactcctccctcactgtgcaccagcggatccacacgggcgagaagccctaccgatgcggcgagtgcgggaagaccttcagccgcaacacgaacctgacgcgccacctgcggattcacacctgagcgcctctgtgcagggctctcactggcggtgcccaggacggacgccagatggctgcgcgctttgtcagcagtgctgtgagaagttctcccctggggtggggactcggggtcaggggagctcaggaatgtggggttgtggaggggctggctgatcacacatgccccctccttactgagcctcagaaagcaagcccctcggtgtctgacgtatctggggacacttcaaggttcactgtagctgagccatggccgctggtaacagacatcagggttccagactagccctcttgagtaactgtcctagagctgggacaggtcacgcctgcctccacatctctgtttcttcagcgggaaagtggagctggtggaggggagggaggagacatctccctctttgtcagatacatcctggagtccagatgcagcttgtcaccatctgcattttctccgtgggttgggagcgtgagggccttcctatccctccacccaccgtttccctgcagtgcacgctggcagccaccaagctaggaagtggcaggagtttgccggttgtttgtgaggggaaaaatttttttttcagagttagcaaataacagtaactactgctttgaatgccaaagtttcttagagtggtctgttacgttttttaaaaataaaacttttaattaagggagactatgttattttaaacagtcttctgttttggccagttgtctggtcaaaatcggcttcagtgattgtgggaggggcaagaaggaaaagaaacagcagcaggtttgatattcagaaagaaatatgcatggattcaataagtatatacatctgagcacagattatttttatagtgatttttgcagctaaatgtgaaggcaactgtcttaagtcccttcctgctgctgtaacaaaagaccttagactgggtaatttataaacaatagaaatttgtcactcatggttctggatgctgggaagtccaagatcaaggctctggcagatttggtgtctgatggggtatgttcttcataggtagtgcttgtgtcttgatgtgtgtcttcacgtggttgtaaacggcagacttcctcaggccccttataagggtgctaatcccagtcacaagggccctgacctcatgacctcccaaaggtcctccctcttcatactgttacattggggatcaagtttccaatatgtgaatacagggaagcaccaacagaccatatcagtaacttcgagtgagtttcctaaggccgactgaagctctgtttacacataagagtgttccccaaagtgcactttctctggggccttttaggccatacttttaattttgttatttgatactactggttgctaatgttctggcatttccagttgttccacactccctgacactggtgtacacaaataaataatacagaaaaaaaaaaaaaaaaaaa

SEQ ID NO: 216 - DNA, 2625 bp, Homo Sapiens
gcggatgtctgtttcctgggatattgtgagggcgggcggagatgtagacccggtagtgttgtgccttgtggtgacaactggcggcagcgcgccgcgggcccgagacttagtctcgggccgccatggccagcgtccacgagagcctctacttcaatcccatgatgaccaatggggttgtgcacgccaatgtgttcggcatcaaggactgggtgacgccgtacaagatcgcggtgctggtgctgctgaacgagatgagccgcacaggcgagggcgccgtcagcctcatggagcggcggaggctcaaccagctgctcctgcccctgctgcagggcccagatattacactgtcaaaactttacaagttaattgaagagtcttgtccacagctggcaaattcagtgcagatcagaatcaaactgatggctgaaggcgagttgaaggatatggaacagttttttgatgacctttcagattctttctctggaactgaaccagaggttcacaaaacaagtgtagtaggtttgtttctgcgtcacatgatcttggcctacagtaagctttctttcagccaagtgtttaaactgtacactgcccttcagcagtacttccagaatggtgagaaaaagacagtggaggatgctgatatggaactgaccagtagagatgagggtgaaagaaaaatggaaaaagaagaacttgatgtatctgtaagagaagaggaggtatcttgcagtgggcctctgtcccaaaaacaagcagaattttttctttctcaacaggcttctttgctaaagaatgatgagactaaggccctcactccagcttccttgcagaaggaattaaacaatttgttgaaatttaatcctgattttgctgaagcgcattatctcagctacttaaacaacctccgtgtccaagatgttttcagttcaacacacagtctcctccattattttgatcgtctgattcttaccggagccgaaagcaaaagtaatggggaagagggctatggccggagcttgagatacgccgctctgaatcttgccgccctgcactgccgcttcggtcactatcaacaggcagagctcgccctgcaggaggcaattaggattgcccaggagtccaacgatcacgtgtgtctccagcactgtttgagctggctttatgtgctggggcagaagagatccgatagctatgttctgctggagcattctgtgaagaaggcagtacattttgggttaccgtacctcgcctccctgggaatacagtcccttgttcaacagagagcttttgctgggaagacggcaaacaagctgatggatgccctaaaggactccgacctcctgcactggaaacacagcctgtcagagctcatcgatatcagcatcgcacagaaaacggccatctggaggctgtatggccgcagcaccatggcactgcaacaggcccagatgttgctgagcatgaacagcctggaggcggtgaatgcgggcgtgcagcagaacaacacagagtcctttgctgtcgcactctgccacctcgcagagctacacgcggagcagggctgttttgctgcagcttctgaagtgttaaagcacttgaaggaacgatttccgcctaatagtcagcacgcccagttatggatgctatgtgatcaaaaaatacagtttgacagagcaatgaatgatggcaaatatcatttggctgattcacttgttacaggaatcacagctctcaatagcatagagggtgtttataggaaagcggttgtattacaagctcagaaccaaatgtcagaggcacataagcttttacaaaaattgttggttcattgtcagaaactgaagaacacagaaatggtgatcagtgtcctactgtccgtggcagagctgtactggcgatcttcctcccctaccatcgcgctgcccatgctcctgcaggctctggccctctccaaggagtaccggttacagtacttggcctctgaaacagtgctgaacttggcttttgcgcagctcattcttggaatcccagaacaggccttaagtcttctccacatggccatcgagcccatcttggctgacggggctatcctggacaaaggtcgtgccatgttcttagtggccaagtgccaggtggcttcagcagcttcctacgatcagccgaagaaagcagaagctctggaggctgccatcgagaacctcaatgaagccaagaactattttgcaaaggttgactgcaaagagcgcatcagggacgtcgtttacttccaggccagactctaccataccctggggaagacccaggagaggaaccggtgtgcgatgctcttccggcagctgcatcaggagctgccctctcatggggtacccttgataaaccatctctagagaggacatccctgctgggctgctgtgcagagtataagattttggacttgttcatgtcccctctctccctataaatgatgtatttgtgacaccctatcttgtcaataaacagcattctgattagtttgtcttattttgttgctagtaactacgtatttgttttattccccttttcttcccttttggtagcaaaggacaccaactttttcttaataaatgggtattttgctaacaa

SEQ ID NO: 217 - DNA, 1943 bp, Homo Sapiens
cccccatccgcatcctcctcctcctgtcccctcttcctctctgtccctcaccaagccatcccctctttgcctctccccatccctcgctggcctgctcctgctccccttctcccatcctcccctcccccgtctctgcccagccagccccctcccgactccccagtttcatcggactccctggccccatcccgtccccgccctggcccctttgtgccccttctcatcgttttctccctccttcccgggcttggcgtcccttctccacccctaactccttccactcggcctccctgccccttcacggcccgcctgcctccctgcccaagtcctgagccaccatgctgaccccgatggtggccgggggggtggtgttccccggactcttcctcctctccaagaacacgctccagcggctgccccagctacgctgggaggaggccgacgcagtcattgtctcagccaggctggtgtcctctgtccaggccatcatggcctccactgccggctacatcgtctccacctcctgcaagcacatcattgatgaccaacactggctgtcctctgcctacacgcaatttgctgtgccctacttcatctacgacatctacgccatgttcctctgtcactggcacaagcaccaggtcaaagggcatggaggggacgacggagcggccagagccccgggcagcacgtgggccatagcgcgtggctacctgcacaaggagttcctcatggtgctccaccatgccgccatggtgctggtgtgcttcccactctcagtggtgtggcgacagggtaagggagacttctttctgggttgcatgttgatggcagaggtcagcacgcccttcgtctgccttggcaagatcctcatccagtacaagcagcagcacacactgctgcacaaggtgaacggggccctgatgctgctcagcttcctctgctgccgggtgctgctctttccctacctgtactgggcctacgggcgccatgccggcctgcccctgctggccgtgcccctggccatccctgcccacgtcaacctgggcgctgcgctgctcctggcccctcagctctactggttcttcctcatctgccgtggggcctgccgcctcttctggccccgctcccggccgcccccggcctgccaggcccaggactgaggccgggggccgggaccctccccctccccacccccacccccgtggagacagggctctggggctgatggctggggttgggagccagggtcctcttgcccggacaaccccaggactgacgatgaccccgaaagggaagaggccccatctctcggggactgagggggtggagagaggggacctcttccccctactctgcccccttcctgcacacccttgcgctggaggaggggagggggcaccgcctcccacccactgagggcaggagggcttgtggggagggacaccaacagggtttcaaggggaccaggagtcagaatgtggggagacgcctctgccaaggccatcccagcccctatgctgccatcccccagggctccccatcacccgagaggagaggacgccccaactaacccccgctggccctcgggcctcccgagtggccggctgcaaccacggctcctctccagggtaggccagcttgaggaatcttatttattttatttatttacccaaatttgaactagtctgttgggttgggggaaggaggtggctgctacccccaagccttcccagtgctgacaaccccgggggcaggcgagggcgcccagtccctcaccatcggctgcacatcgcgccctcgggccctgccatgtccctggtgctactgacctctcaaggcttcctccaatctggggtcgggggaccctgggaggtgctttacagaccgctaataaaagacgatctgcgtgaacgccaaaaaaaaaaaaaaaaaaaaaaaaa

SEQ ID NO: 218 - DNA, 2204 bp, Homo Sapiens
gagcggtgcggaggctctgctcggatcgaggtctgcagcgcagcttcgggagcatgagtgctgcagtgactgcagggaagctggcacgggcaccggccgaccctgggaaagccggggtccccggagttgcagctcccggagctccggcggcggctccaccggcgaaagagatcccggaggtcctagtggacccacgcagccggcggcgctatgtgcggggccgctttttgggcaagggcggctttgccaagtgcttcgagatctcggacgcggacaccaaggaggtgttcgcgggcaagattgtgcctaagtctctgctgctcaagccgcaccagagggagaagatgtccatggaaatatccattcaccgcagcctcgcccaccagcacgtcgtaggattccacggctttttcgaggacaacgacttcgtgttcgtggtgttggagctctgccgccggaggtctctcctggagctgcacaagaggaggaaagccctgactgagcctgaggcccgatactacctacggcaaattgtgcttggctgccagtacctgcaccgaaaccgagttattcatcgagacctcaagctgggcaaccttttcctgaatgaagatctggaggtgaaaataggggattttggactggcaaccaaagtcgaatatgacggggagaggaagaagaccctgtgtgggactcctaattacatagctcccgaggtgctgagcaagaaagggcacagtttcgaggtggatgtgtggtccattgggtgtatcatgtataccttgttagtgggcaaaccaccttttgagacttcttgcctaaaagagacctacctccggatcaagaagaatgaatacagtattcccaagcacatcaaccccgtggccgcctccctcatccagaagatgcttcagacagatcccactgcccgcccaaccattaacgagctgcttaatgacgagttctttacttctggctatatccctgcccgtctccccatcacctgcctgaccattccaccaaggttttcgattgctcccagcagcctggaccccagcaaccggaagcccctcacagtcctcaataaaggcttggagaaccccctgcctgagcgtccccgggaaaaagaagaaccagtggttcgagagacaggtgaggtggtcgactgccacctcagtgacatgctgcagcagctgcacagtgtcaatgcctccaagccctcggagcgtgggctggtcaggcaagaggaggctgaggatcctgcctgcatccccatcttctgggtcagcaagtgggtggactattcggacaagtacggccttgggtatcagctctgtgataacagcgtgggggtgctcttcaatgactcaacacgcctcatcctctacaatgatggtgacagcctgcagtacatagagcgtgacggcactgagtcctacctcaccgtgagttcccatcccaactccttgatgaagaagatcaccctccttaaatatttccgcaattacatgagcgagcacttgctgaaggcaggtgccaacatcacgccgcgcgaaggtgatgagctcgcccggctgccctacctacggacctggttccgcacccgcagcgccatcatcctgcacctcagcaacggcagcgtgcagatcaacttcttccaggatcacaccaagctcatcttgtgcccactgatggcagccgtgacctacatcgacgagaagcgggacttccgcacataccgcctgagtctcctggaggagtacggctgctgcaaggagctggccagccggctccgctacgcccgcactatggtggacaagctgctgagctcacgctcggccagcaaccgtctcaaggcctcctaatagctgccctcccctccggactggtgccctcctcactcccacctgcatctggggcccatactggttggctcccgcggtgccatgtctgcagtgtgccccccagccccggtggctgggcagagctgcatcatccttgcaggtgggggttgctgtgtaagttatttttgtacatgttcgggtgtgggttctacagccttgtccccctccccctcaaccccaccatatgaattgtacagaatatttctattgaattcggaactgtcctttccttggctttatgcacattaaacagatgtgaatattcaaaaaaaaaaaaaaaaaaaaaaaaaaaaaaaaaaa

SEQ ID NO: 219 - DNA, 3026 bp, Homo Sapiens
ttggctggatccgccatgcggagcggctaggtggtgcacgggaaacgcgggcgtaggtgaccggcggctttctcagttttggtggagacgggcgcatgtgggcgctttgctcgctgctgcggtccgcggccggacgcaccatgtcgcagggacgcaccatatcgcaggcacccgcccgccgcgagcggccgcgcaaggacccgctgcggcacctgcgcacgcgagagaagcgcggaccgtcggggtgctccggcggcccaaacaccgtgtacctgcaggtggtggcagcgggtagccgggactcgggcgccgcgctctacgtcttctccgagttcaaccggtatctcttcaactgtggagaaggcgttcagagactcatgcaggagcacaagttaaaggttgctcgcctggacaacatattcctgacacgaatgcactggtctaatgttgggggcttaagtggaatgattcttactttaaaggaaaccgggcttccaaagtgtgtactttctggacctccacaactggaaaaatacctcgaagcaatcaaaatattttctggtccattgaaaggaatagaactggctgtgcggccccactctgccccagaatacgaggatgaaaccatgacagtttaccagatccccatacacagtgaacagaggaggggaaagcaccaaccatggcagagtccagaaaggcctctcagcaggctcagtccagagcgatcttcagactccgagtcgaatgaaaatgagccacaccttccacatggtgttagccagagaagaggggtcagggactcttccctggtcgtagctttcatctgtaagcttcacttaaagagaggaaacttcttggtgctcaaagcaaaggagatgggcctcccagttgggacagctgccatcgctcccatcattgctgctgtcaaggacgggaaaagcatcactcatgaaggaagagagattttggctgaagagctgtgtactcctccagatcctggtgctgcttttgtggtggtagaatgtccagatgaaagcttcattcaacccatctgtgagaatgccacctttcagaggtaccaaggaaaggcagatgcccccgtggccttggtggttcacatggccccagcatctgtgcttgtggacagcaggtaccagcagtggatggagaggtttgggcctgacacccagcacttggtcctgaatgagaactgtgcctcagttcacaaccttcgcagccacaagattcaaacccagctcaacctcatccacccggacatcttccccctgctcaccagtttccgctgtaagaaggagggccccaccctcagtgtgcccatggttcagggtgaatgcctcctcaagtaccagctccgtcccaggagggagtggcagagggatgccattattacttgcaatcctgaggaattcatagttgaggcgctgcagcttcccaacttccagcagagcgtgcaggagtacaggaggagtgcgcaggacggcccagccccagcagagaaaagaagtcagtacccagaaatcatcttccttggaacagggtctgccatcccgatgaagattcgaaatgtcagtgccacacttgtcaacataagccccgacacgtctctgctactggactgtggtgagggcacatttgggcagctgtgccgtcattacggagaccaggtggacagggtcctgggcaccctggctgctgtgtttgtgtcccacctgcacgcagatcaccacacgggcttgccaagtatcttgctgcagagagaacgcgccttggcatctttgggaaagccgcttcaccctttgctggtggttgcccccaaccagctcaaagcctggctccagcagtaccacaaccagtgccaggaggtcctgcaccacatcagtatgattcctgccaaatgccttcaggaaggggctgagatctccagtcctgcagtggaaagattgatcagttcgctgttgcgaacatgtgatttggaagagtttcagacctgtctggtgcggcactgcaagcatgcgtttggctgtgcgctggtgcacacctctggctggaaagtggtctattccggggacaccatgccctgcgaggctctggtccggatggggaaagatgccaccctcctgatacatgaagccaccctggaagatggtttggaagaggaagcagtggaaaagacacacagcacaacgtcccaagccatcagcgtggggatgcggatgaacgcggagttcattatgctgaaccacttcagccagcgctatgccaaggtccccctcttcagccccaacttcagcgagaaagtgggagttgcctttgaccacatgaaggtctgctttggagactttccaacaatgcccaagctgattcccccactgaaagccctgtttgctggcgacatcgaggagatggaggagcgcagggagaagcgggagctgcggcaggtgcgggcggccctcctgtccagggagctggcaggcggcctggaggatggggagcctcagcagaagcgggcccacacagaggagccacaggccaagaaggtcagagcccagtgaagatctgggagaccctgaactcagaaggctgtgtgtcttctgccccacgcacgcacccgtatctgccctccttgctggtagaagctgaagagcacggtcccccaggaggcagctcaggataggtggtatggagctgtgccgaggcttgggctcccacataagcactagtctatagatgcctcttaggactggtgcctggcacagccgcgggccaggaggctgccacacggaagcaagcagatgaactaatttcatttcaaggcagtttttaaagaagtcttggaaacagacggcggcacctttcctctaatccagcaaagtgattccctgcacaccagagacaagcagagtaacaggatcagtgggtctaagtgtccgagacttaacgaaaatagtatttcagctgcaataaagattgagtttgcaattgtgaaaaaaaaaaaaaaaaaa

SEQ ID NO: 220 - DNA, 1835 bp, Homo Sapiens
gtggtgaggcctacagaagcggccttcagctggaccttggtctccccgccggacttcgagggtgtcatcgccgcccctgttgggggtgagcgccgcgcggctgcagcatgcctcacaggaagaaaaagccctttatagagaagaagaaagctgtgtcttttcacttggtccaccggagccaacgagatcctttagcagcagatgagagtgcaccccagagggttctattgcccacacaaaaaatagacaatgaagaaaggcgagcagaacagaggaagtatggagtgttctttgatgacgactatgactacctgcagcacctgaaggaaccatctgggccttcagagcttattccctcaagtaccttcagtgcacacaacaggagagaggagaaagaagaaacgctagtaattccaagcactggaattaagttgccttcatcagtgtttgcttcagagtttgaggaagatgttggattgttaaataaagcagctccagtttcaggacctcgactggattttgatcctgacattgttgcagctcttgatgatgattttgactttgatgatccagataatctgcttgaggatgactttattcttcaggccaataaggcaacaggagaggaagagggaatggatatacagaaatctgagaatgaagatgacagcgagtgggaagatgtggatgatgagaagggagatagcaatgatgactatgactctgcaggcctattgtcagatgaagactgtatgtctgtgcccggaaaaactcacagagctatagcagatcacttgttctggagtgaggaaacaaagagtcgcttcacggagtattcgatgacttcctcagtcatgaggagaaatgaacagctgaccctacatgatgagaggtttgagaagttttatgagcaatatgatgatgatgaaattggagctctggataatgcagaattggaaggttctattcaagtggacagcaatcgcttacaggaagttttgaatgactactataaagagaaggcagagaattgtgtaaaattgaatacccttgaacccttggaggatcaagacctgccaatgaatgagcttgatgagtctgaggaggaagaaatgattactgtagtccttgaagaagccaaagagaagtgggattgtgaatctatttgtagtacatactcaaatttatataaccatccacagcttatcaagtatcaaccaaagcccaaacaaattcgaatatcttctaaaacaggaatacctctcaatgtcttaccaaagaaaggactcacagcaaagcaaactgaaagaatacagatgattaatggcagtgatcttcctaaagtatcaactcagccacgttctaaaaatgaaagcaaagaagataaaagagcaagaaagcaagctataaaagaagagcgcaaggaacgaagagtggagaagaaagctaacaaattagcatttaaactggagaaaagaaggcaagaaaaagagctgctgaacttgaagaagaatgttgagggtctaaagctatagacagtggagcatacagggcaaggcactttattaggggctcctcatctttggttattgactagaaacttcagaaagacaaaactgtttgccatttttactggcagataagaggaaaatacaatatttgtattatttttatactagtaagtgtcccctgccaaccatcttgtaaatattgtaatactttaatttttaatattataagcttacatttgctctgaagtaaatgacttcatgaatgtgaaatgtttgataaattaaaggaaaatatcttcataaaaaaaaaaaaaaaaaaaaaaa

SEQ ID NO: 221 - DNA, 3834 bp, Homo Sapiens
ctgagggggccgggccggggctgcggggcgaacggcgcggctaggatccggcggctcagcccggggcggcgaggctcggcacggagatggcggcgcgctcggcgcagacagagctgtgaaccaaccccgctcacggctaacaagcccacccaccatggcgagccccactctgagccccgactcctcatcccaggaggccctgtcggcccccacctgctccccaacctctgactccgagaacctcagccccgatgagctggagctgctggccaagctcgaagagcagaaccggctcctggaggccgactccaagtccatgcgctccatgaatggctcgcggcggaacagtggctcctcgctagtgtccagctcctcggcctcctccaacctgagccacctggaggaggacacgtggatcctgtggggccggatcgccaacgagtgggaggagtggcggcgcaggaaggagaagctgctcaaggagctgatccgcaagggcatcccccaccacttccgggccatcgtgtggcagcttctgtgcagcgccacggacatgcccgtcaagaaccagtactccgagctgctcaagatgtcctcgccgtgcgagaagctgatccgcagggacatcgcccgcacctacccggaacatgagttcttcaagggccaggacagcctgggccaggaggtcctcttcaacgtcatgaaggcatactcgctggtagaccgggaggtgggctactgccagggaagcgccttcatcgtgggcctgctcctcatgcagatgcctgaggaggaggccttctgtgtgttcgtgcggctgatgcaggagtaccggctgcgggagctcttcaaacccagcatggccgagctcgggctctgcatctatcagttcgagtacatgctgcaggagcagctcccagacctcaacacccacttccgttcccaaagcttccacacatccatgtatgcctcgtcctggttcctcacactgttcctgaccaccttcccactccccgtcgccacccgggtctttgacatcttcatgtatgaggggctggagatcgtgttccgagtgggcctcgccctgctgcaggtgaaccaggcagagctgatgcagctggacatggaggggatgtcccagtacttccagagagtgatcccccaccagttcgacagctgcccggacaagctggtcctcaaagcctaccaggtcaagtacaaccccaagaagatgaagaggctggagaaggagtacgcagccatgaagagcaaggagatggaggagcagatcgagatcaaaagacttcggacggagaaccggctcctgaaacagcggattgaaaccctagagaaggggcaagtgacacgggcgcaggaggcggaggagaactacgtcatcaagcgggagctggcggtggtgcggcagcagtgcagctcggcggccgaggacctgcagaaggcacagagcaccatccggcagctacaggagcagcaggagaacccccgcctcacagaagacttcgtgtcccacctggagaccgagctggagcagtcgaggctgcgggagacggagacactgggggcccttcgggagatgcaggacaaggttctcgacatggaaaagaggaacagctcgctgcccgacgagaacaatgtggcgcagctgcaggaggagctgaaggcgctcaaggtgcgggaaggccaggcggtggcctcgacgcgagagcttaaactgcagctgcaggagctctcggacacctggcaggcccatctggcccgcggcggccgctggaaggagtccccacggaagctggtcgtgggcgagctgcaggacgagctgatgagcgtgcgtctgcgcgaggcccaggccctggccgagggccgcgagctgcggcagcgcgtggtggaacttgagacgcaggaccacatccaccgcaaccttctgaaccgcgtggaggcggagcgcgcggcgctgcaggagaagctgcagtacctggctgcacagaacaaggggctgcagacgcagctcagcgaaagccgccgcaagcaggccgaggccgagtgcaagagcaaggaggaggtgatggctgtgcgactgcgggaggcggacagcatggctgcggtggccgagatgcggcagcgcattgccgagctggagatccagagggaggaaggccgcatccagggccagctgaaccactcggactcatcgcagtacatccgcgagctcaaggaccagatcgaggagctgaaggccgaggtgcggctgctgaagggcccgccgcccttcgaggacccgctggctttcgatgggctgagcctggcgcggcacttggacgaggactcgctgccgtcgtcggacgaggagctacttggcgtaggcgtgggcgctgccctgcaggacgcattgtatcctctgtccccgcgcgatgcgcgcttcttccgccgtctggagcggccggccaaggacagcgagggcagctcagacagcgacgccgatgagctggccgcgccctacagccagggtctggacaactgaggccatgcccagcgcgcccggagtcaggaggccgcagccgcggggggcgcccgggcagtccgcgttctgctccccacctgccgcacttgacaaactacgcgccctctgtggctcggccacccctaaagcgaggcccggcgaggcagcgcagagggtagggtccgacctgggctcctcagggccccggggcaggctctctatccccagcagtgtttacccatcttggtctgtacccctccgggccctctggcgttccaggggtgcctggaggggctgactgctctcttaacaggagggcagagggcaggggacagacgacccagaggtcccagcactgaatgagcaggcagctcccacctcctggcaggcttccttctgggacaggggcgacattgctgggaagtgctcaggaggtagccgaggcctgaggaaggagagcgccagctctgggctggacatcagcaccccacaacactcctcgggatgaagtgacccttgactagcccctggccatctctaggggagtcaggccgctggggacagatggccaggccggcctctcctgcctggcgcaggcaccgtggcccctgcagcggaaaccaaagtccccctactatgtgcggggcgcctggggactgagtggctaacgggaagcctccctgcttctctggggccagagcagcttccaggaagtgaagagacccctctccccagtgccccacatctttctctgggagacactcgcgccccctatcctggccagtgatggaggggtatctctacaggggtcctcggtctccatctacttccctttcttcatgtgtttccagccccaccctcagccagagccaggcccccaggcaggagcttcccagcgagcggcctcccctcacttcctcctggtggtcccgttgtctctgctgaatcagagctgagaacggtgccaaaatccaacgatgccccccaggccccttcctcccttcccccggccccccgggcctcatgaccctgggggctgcccccctcggtgctcccggagcctccagtagagtagcgtcacaagcaatctccctggcgcttcctgggtggggacccctgctccgtccccgcttcctagctgcccacttttcagtgttacgaagcctggggaccggggcaggcacccacggggctctccacacgccccctacactgcccgccaccattttgcacactgcctgttcacatgtcgcccaggcgggaaaaatggaaaataaagtgtatttacacagtcaaaaaaaaaaaaaaaaaaaaaa

SEQ ID NO: 222 - DNA, 3288 bp, Homo Sapiens
accattcttccggtttcagaagttaaggctggtgtcctggccccagtccacctctgggagcgcctgcgccgctccgcggagagtccgtggatctcacagtgaaaaatgtttgctgacccttgacattgacaaactgctgacagctcagatgatccatgattggaaggatgtggtcatcaccaagatgtctttctttctccggttcccagttttccagacctgaagtgttttccaatcaaagcgaagagacgatctgtggatgttgaatatgcaaggagctgaagagagagacattagaagagagacttgtccaggctgggtaaacaagaacaagcctgctctggagcaggatgtctgtaaaattgactcatcagggatagtagtaaagaggttccaagaggatgaataccaagattctacatttgaagaaaaatatgcatgtgagggcatgaaggaaaactctcctagggagattgctgaatcatgccttttccaggaaggaggttttgggagaataactttcatccacaaagaagcaccccctgaaattattagtcaaggatataattttgagaaaagcttgcttttgacctcaagccttgttacacgtctcagggtttctacagaagagagtctgcatcagtgggaaacaagtaatatacaaaccaatgatatttcagaccaaagtaaatgtccaactctctgcacacagaaaaaatcttggaaatgtaatgaatgtggaaaaacctttactcagagctcatcccttacccaacatcagagaactcatactggagagagaccctacacatgtgaggaatgtgggaaagcctttagtcgtagttcattccttgttcaacatcaaagaattcacactggagtgaaaccatatggatgtgagcagtgtgggaaaacatttcgatgtcgatcatttcttactcagcatcaaagaattcacactggagagaaaccttataaatgcaatgaatgtgggaattccttccgcaatcactcacatctcactgaacaccagagaattcacactggagagaaaccttataaatgcaataggtgtgggaaggcattcaatcagaatacacaccttattcatcatcagagaattcacactggtgagaagccttacatatgcagtgaatgtggctcttcttttcgaaaacactcaaatcttacgcaacatcagagaattcacactggggaaaaaccccataaatgtgacgaatgtgggaaaactttccaaacaaaggcaaacctctctcagcatcagagaattcatagtggagagaaaccctataaatgtaaagaatgtggcaaagccttttgtcagagcccatctcttattaaacaccagcgaattcatactggagaaaaaccatataagtgtaaagaatgtggcaaagcgtttactcagagcaccccactcactaaacatcagagaatacatacaggggagagaccctacaaatgcagtgaatgtggtaaagccttcattcagagcatttgccttattcggcaccagagaagtcacactggagaaaaaccctataaatgcaatgaatgtggaaagggctttaatcagaacacctgcctcactcagcatatgagaattcatactggagagaagccctataaatgtaaagaatgtgggaaagcctttgctcatagctcatctcttactgaacatcatagaactcacactggtgagaagctctataaatgtagtgagtgtgagaaaaccttccgcaagtatgcacaccttagtgaacattacagaattcacactggtgagaagccttatgagtgtattgagtgtggaaagttcttcagacatagttcagtccttttcagacatcagaaacttcacagtggtgactaatgctgccatttaggttatgacagtttctctagcgaggatgactacgaatctgactgggagtagaggggcaggtagagttcctggagggaaggatgaaggagccttggctactgtactctgagaggaatgtttccagaaatggaggtgggagcttagggaatgcagagcctacttgaggtgggcatctgggaatacagggtagaaagaaattcctgcttttcagataaagcctacacattgccactgtctccccatgtgactcttacagcttgaggaggcatttgttagcacttctgttcactttactacatcctgccccacattctgacttgtcacccattttcgttggctggcaggttgagatgtttttcttaaacactgcctgtcagtgtgaagtggcacagctctgatgtagtgctaagtctagcctccagatttgaggcagccctgaccatgctaccatgggggaggctcccaacctgtggaagtggtcctgtgaaaaggagacagaaacaagtaagagccaaaaaaaaaaaaaaaaaaaatccatatccattcattaaaaaaatgagatataaagcaacaactgggctgacctctatagatctgccagtaaagaaggctttctttcattatcagggtgaaggtctttcctgattcttccaagctttgaggtgactcagagctaagaatgaaataggagaccaagttagaattcatgatactggtttatggggaggcagtcatacctgttcagagaaccaggaagactcaatatctatctcagaggaaatatggttacccaggaaagaaatggtctgctagagtgataagactcagaacaggaagcctgcatgtgactgagcaagtcacctacataaccctgcctgtactaaggtgtacacctgtctattgtaagtttgcctaggctgttggtgtacagagaccagaggagagagacacactaggactaacaatgtcctaacaaaatggtacttagtttgttggtctttaggagaaagcattagtaatgaaagaagaaagaattttcacttggttggacattggggctgcttaagaaagttgacatttgtcgtggaatgactttggaaagacttctaaaagaatctttttcaaatccctgaaaatcaggatagcacattttgctactgactgtgacagtgttttattcttttgagagaaatgacatagttttccctttatttcccaaattcctttcatgttcttaactgctacccagaaattgagcttcagaagattgaggatagcctttgattggtatttaaaataatttctaagctgtgaagcttatagcatttttaaagtatggctattaaaaacactaagttgattctggaaaaaaaaaaaaaaaa

SEQ ID NO: 223 - DNA, 3427 bp, Homo Sapiens
aggggaggaggaggcgcccgcctggttccctgcaaagcggccttatttatctgggcacagcctcagcctccccggtgggaggcttggggcggccgatcctctcccaccggggagctcctttccgtgcgctccccatgacgggaggtcgcccggcggacagcgtggcatgagccaggagcccgggccgagagcgtgccaggaagatgtcgagcccgggcatcgacggcgaccccaagcctccatgcttgcctcgaaacggtctggtgaagctgccgggccagcccaacggcctgggtgcggccagcatcaccaagggcacgccagccaccaagaaccgcccctgccagccaccacccccacccaccctcccaccaccaagcctggctgctccactgtcccgggctgccctggctgggggcccgtgcaccccggcaggtggaccagcctcagccttggcacctgggcacccagcggagcggccgccgctggccacggacgagaagatcctcaatgggctcttctggtatttctcggcctgcgagaagtgtgtgctggcccaggtgtgcaaggcctggcggcgcgtgctgtaccagcccaagttctgggcaggcctcacgccggtgctgcatgccaaggagctctacaacgtgctgcctggtggcgagaaggagttcgtgaacctgcagggttttgccgccagaggcttcgagggcttctgcctggttggcgtctccgacctggacatctgtgagttcattgacaactatgcgctctccaagaagggtgtcaaagccatgagcctcaagcgctccaccatcacggacgcaggcctcgaggttatgcttgaacagatgcagggcgtggtgcgtctggagctgtcgggctgcaacgacttcaccgaggccgggctgtggtccagcctgagcgcgcgcatcacctcgctgagcgtgagtgactgcatcaacgtggccgacgacgccatcgcggccatctcgcagctgctgcccaacctggcggagctgagcctgcaggcctaccacgtgacggacacggcgctggcctacttcacggcgcgccagggccacagcacgcacacgctgcgcctgctctcctgctgggagatcaccaaccacggcgtggtcaacgtggtgcacagcctgcccaacctcaccgcgctcagcctctcgggctgctccaaggtcaccgacgacggcgtggagctcgtggccgagaacctgcgcaagctgcgcagccttgacctctcgtggtgcccacgcatcaccgacatggcgctggagtacgtggcctgcgacctgcaccgcctagaggagctcgtgctcgacaggtgtgtacgcatcacggacactggcctcagctatctgtccaccatgtcgtccctccgcagcctctacctgcgatggtgctgccaggtgcaagacttcgggctgaagcacctcctggccctggggagtttgcgcctcctgtctccggcaggctgcccgctgctcaccaccaccgggctgtcgggcctggtgcagctgcaggagctggaggagctggagctgaccaactgccccggggccacccccgagctcttcaagtatttctcgcagcacctgccccgctgcctcgtcattgagtagcgcgaggcccccgccccggtcgcgggaacccggccatgacctgggcgggggcgcggggcgccgccgagccccctcttcccgccttgcgctcgggggagcccccgcgcccccggcccagcgcgggagacggggcgagccgagggaaagcccctccccgaccttcggtccctccgccctcccagccccgccccgggcaggggggcggcgggtgggcccgccccacgcacgcacgcacactcggggactttgtgcatgcccctcgtgcccgcactgcacgccgccctccgccacgccacagccacagccgccgccatcactcgctcgccctcccgcttggggggcggggctcggtccttgggggggctttgagctctccagactgtgcccttaccgccttccccgccacacccgctctgtcttcccactgtccccccaatcccgggcagggcccagtgggattgagggggctgggtcccccaggacacgggcccagaagagccccacgggcttcctgcatcttccaccgcaccatacctggagccctccgaggggtgtcaggggaaacaggccaccgccaaagccatggcccgccgccgagagcccaggccccacccgcacctcctcacccatccagcctgacccacgcggcctctcctcctccttgccgctgtgtggggcagtcccctgtccgccccaaaacccggccttggtccctggccaggctgagagaattgggcagggagagggcggaagggctggcgatcgcttggagtcattaacgtgatccaagctgactccggtcggcctcaacccaggggtggcgcaggcaccttgcaagcctcgagctgtagccaccctcaggcctgggaagaggcctgggccgacctcacacctcagcccttgcacccggccgggctcagttcaggcctgggcaccgagcttcaccctgggtgggtctcctcaggtggagtctgcagagtggacccagccaagggtcagggtcagcactgggtcagcgactccaatcttccagtggccagcacaccctagacaccccgaggagggagggctcctttctagcctgcccccccacccccacttcacccctccccagcttcccaaacttctgtctgcccaaatgggctctgaccgtgctctgtcggcccgagacatttggaagtcctgggggatgctggcaaatctcagctgttgctgaggagggggctgggaccccttcccatcccaaccttgagccccaggagataccgcgcccacacccaatcttgggacactccctatctggttggaagagagtaaccagtttccagagagccagagagtgagagagagaaagagagtgagagagagagagaaagagagagagagatgctgttgaatcagaaacagatcaacagcccaaagattttcctgtccctggagtgccagccccaggaagctccagggctgagtggtcaggagccagtttctccagcccctcctccccacaacccctagtggggaggggcagctgtccatttgcccaaagtattaatgcaactgaagctgtgatatttccaacgactgtaggaggaaaaattaaggggagagaggaaaacaaaaccaaccaacccctaaaatcattttcttattgtacataacgacctcattctcctgtatatgcggaagatataaccttatatttggtaagtgtttcttgtgctattttatcacgtgacctgtttataaaaatatatattaaaaaagttgtaaaaaaaaaaaaaaaa

SEQ ID NO: 224 - DNA, 2342 bp, Homo Sapiens
gggcaatttccgttaggtgctgaaggctgtggcgcgcggctgtccccattcccacgtgaagcgctacgctagcatcgctcggctggcggctcccagctcgccgcggagcagtcccggcagcagcgggggaccggaagtggctcgcggaggctcagaagctagtcccggagcccggcgtgtggcgcctcggagcacggtgacggcgccatgtccctaatctgctccatctctaacgaagtgccggagcacccatgtgtatcccctgtctctaatcatgtttatgagcggcggctcatcgagaagtacattgcggagaatggtaccgaccccatcaacaaccagcctctctccgaggagcagctcatcgacatcaaagttgctcacccaatccggcccaagcctccctcagccaccagcatcccggccattctgaaagctttgcaggatgagtgggatgcagtcatgctgcacagcttcactctgcgccagcagctgcagacaacccgccaagagctgtcacacgctctgtaccagcacgatgccgcctgccgtgtcattgcccgtctcaccaaggaagtcactgctgcccgagaagctctggctaccctgaaaccacaggctggcctcattgtgccccaggctgtgccaagttcccaaccaagtgttgtgggtgcgggtgagccaatggatttgggtgagctggtgggaatgaccccagagattattcagaagcttcaagacaaagccactgtgctaaccacggagcgcaagaagagagggaagactgtgcctgaggagctggtgaagccagaagagctcagcaaataccggcaggtggcatcccacgtggggttgcacagtgccagcattcctgggatcctggccctggacctctgcccgtccgacaccaacaagatcctcactggtggggcggataaaaatgtcgttgtgtttgacaaaagttctgaacaaatcctggctaccctcaaaggccataccaagaaggtcaccagcgtggtgtttcacccttcccaggacctggtgttttctgcttcccccgatgccactatcaggatttggtcggtccccaatgcctcttgtgtacaggtggttcgggcccatgagagtgctgtgacaggcctcagccttcatgccactggcgactatctcctgagctcctccgatgatcagtactgggctttctctgacatccagacagggcgtgtgctcaccaaggtgacagatgagacctccggctgctctctcacctgtgcacagttccaccctgacggactcatctttggaacaggaaccatggactctcagatcaagatctgggacttgaaggaacgtactaatgtggccaacttccctggccactcgggccccatcactagcatcgccttctctgagaatggttactacctggctacagcggctgatgactcctctgtcaagctctgggatctgcgcaagcttaagaactttaagactttgcagctggataacaactttgaggtaaagtcactgatctttgaccagagtggtacctacctggctcttgggggcacggatgtccagatctacatctgcaaacaatggacggagattcttcactttacagagcatagcggcctgaccacaggggtggccttcgggcatcacgccaagttcatcgcttcaacaggcatggacagaagcctcaagttctacagcctgtaggccctggcccttctgatggaagctgggcctcatctcagtagaggggtagaattagggtttgggggggggggtggggggaatctatggggggagggggctctgtggggtgggacattcacatcatttcactctggtctgagtggtggcctgagaaccatggtggcatggaccaccctcatccatgcaactccaggccccatgggaacggatgtggaaggaagaactgtcaccctcttaaggcccagggtcggagcccagggcctctcccttcctgtcgttcaatggacgtggtggtggctgttccacacccattttgttgcagttcctgtgagacaggagaggctgagccaagggaactgtgaaggggatgggcaggagggcttgtgcagggttttgtaagcagtgatctagtttcattaaaaaaagaaaacaataaccataaccacctccccgtgtctgtctgcaccaggagcacctgggactgggaaggtcaaggggagggagcacacactgggacactggcttccgggaagcccatcttcctttcctttcacagctcttaccctttttttttttttttaattgcacagcagaaataaaaacaaatctgcagatgaaaa

SEQ ID NO: 225 - DNA, 2565 bp, Homo Sapiens
ggactgacgccgagacgcgcgcgggtcagcggcgcggggacgcggggcgctgggcgcggggctgggggcgcaggccccgaggccgcaggagcgcgcggagcggcgatgagcaggcggccggtggcccgcggggcgcggagcccgtgacagcctcggccaggcgggcgctgcgatggaggccgagggcctggactggctcctggtgccactgcaccagctggtgtcctggggcgcggccgcggccatggtcttcggaggggtggtgccctacgtcccgcagtatcgggacattcgcaggacgcagaacgccgacggcttctccacctacgtgtgcctggtgctgctggtggccaacattttgcggatactcttctggtttggaaggcgctttgagtccccgctgctgtggcagagcgccatcatgatcctgaccatgctgctgatgctgaagctgtgcaccgaggtccgtgtggccaacgagctcaacgccaggcgccgctcctttacagctgcagatagcaaggatgaagaagtcaaggttgcccccaggcggtccttcctggacttcgacccccaccacttctggcagtggagcagcttctcggactacgtgcagtgcgtcctggccttcacgggcgtggcgggctacatcacctacctgtccattgactccgccctgtttgtggagaccctgggcttcctggctgtgctgaccgaagccatgctgggtgtgccccagctttaccgcaaccaccgccaccagtccacggagggcatgagcatcaagatggtgctcatgtggaccagtggtgacgccttcaagacggcctacttcctgctgaagggtgcccctctgcagttctccgtgtgcggcctgctgcaggtgctggtggacctggccatcctggggcaggcctacgccttcgcccgccacccccagaagccggcgccccacgccgtgcaccccactggcaccaaggccctctgacagtggggaggacgaggatgtgggaccgccagccgcgggcactggtgggccctgacctccccgcggggagggtgggtgctgtggcccctgcaggtgtggcagagatggggcatgggcattggggtctccatcagcctctgtggggtgtctcagggtgggcagtgggggtggggctgggacgctgtttgtgctcagcggggacagccagggttgatctggccccgagggttttggatgtttttaggatgacataaaaagcaagtgttttccccatttcctcttatgaaacaccgtctgagcccaaggtacacattgggcggcctgcaggaacctgctccaggtggacacacgggccagcagccgcgaaccttgaagctggggtgaccgcaggagaccctgtaaggcctgtgagcggagccctcgaccccgtgacaccctggccagacaccctgcttggactggggtggcctctgctacccaggggtctggcacgggggagggctggggctttctctgcctggtacacacggaaaggcggctgtgcggacgcagggtcaccgtgctccgggttttctgacagtcggtgtttcctgggcctttggagtggctgcgaggcctgaacgccttgtggatccgctgtgtccagcccggctgagcatcgccagggctagctcatgctgctcttgtcagcctctggttctcctcgagtccttggggacgtggcagatgccagcgaccatcagacaacgtggaggccctcatgggcaatggctgagggggccgggctgaggctgtgcacatgcagtctgcacgccactcttgggctctgctggcggagatccccttccttctgggtgcagactgcacctccggatgcagttttgatgtccatcttccaggagagacggtctcgggtccagggagtggagggggctgcccctgccgtgcaggtcctggccgatggcgccttaccctgctgccctgggcttttggcctgaagcaaattcctgagtggggggtactggggcctgccgcatcctgtcctgtccactgcccacccccgtgtgctggctccctcacttctggctgcagtgggagccgccagtctgacccttgtcaccgcacgctctgcccccaccccgttgcaagaggtcacaccatgtcagcagccttgcactgaccgcagccggcccccaggcctcagagttctggatgcttccgtgcggctccaacaggcatcgtcttcccttccgcaggtggaggggccgcttcccgcaggcatctgagctctgtgccggggccgtggccatgggaagatgttccacgctgcctcctcctcgagttttcctcggaaacactcttgaatgtctgagtgagggtcctgcttagctctttggcctgtgagatgctttgaaaatttttatttttttaagatgaagcaagatgtctgtagcggtaattgcctcacattaaactgtcgccgactgcaggcgcagtgactgctgaatgtaccctgtgtggcgacttggaatcaataaaccatttgtggatcctgaaaaaaaaaaaaaaaaaaaaaa

SEQ ID NO: 226 - DNA, 2780 bp, Homo Sapiens
gtggaagagccatccagagtgagtgcctggggcagagtgagagcaggaccagcgggcaggtggcggagcgggggtcggtggtggatggcccagccctggaaagccgaggtgaaggttacgagtccctgaggatctgtgggtgtgagccagccgcgtggccctgggcaacggcgctgccggacagaagtggcggttgctgacgcctggaaattcccctgaaggtggagcaccacccaacccccctgggtcccaccctccctcaaggcctcctccacctccacctccaccccgcctggcctggcgtccacctctgcggctcctacctgggtgcaatcgagttaaatggctgataagcagatcagcctgccagccaagctcatcaatggcggcatcgccgggctgatcggtgtcacctgcgtgtttcccatcgacctggccaagaccaggctgcagaaccagcagaacggccagcgcgtgtacacgagcatgtccgactgcctcatcaagaccgtccgctccgagggctacttcggcatgtaccggggagctgctgtgaacttgaccctcgtcacccccgagaaggccatcaagctggcagccaacgacttcttccgacatcagctctctaaggacgggcagaagctgaccctgcttaaagagatgctggcgggctgtggggctggcacctgccaggtgatcgtgaccacgcccatggagatgctgaagatccagctgcaggatgcagggcgcattgccgcccagaggaagatcctggctgcccagggccagctctcggcccaggggggtgcccagccctcagtggaggctccagctgcccctcggcccacggccacccagctgacccgcgacctgctgcggagccgtggcattgccggtctctacaagggactcggggccacgctgctcagggatgtccccttctctgtggtgtacttcccgctctttgccaacctgaaccagctgggccgcccggcgtccgaggagaagtcgcctttctacgtgtccttcctggccggctgtgtggctgggagtgccgccgctgtggccgtcaacccctgtgatgtggtgaagacgcggctccagtcacttcagcgaggcgtcaacgaggacacctactctgggatcctggactgtgccaggaagatcctgcggcacgagggcccctcggccttcctgaagggcgcctactgccgcgcgctggtcatcgcgccccttttcggcatcgcacaggtggtctacttcctgggcatcgcggagtccctgctggggctgctgcaggacccccaggcctgagcccagcacccgctccaccccagccagctgggcagggccggtgtggggctggagccaggcagctagcccaggacggagcaagggaagacccctccccagccctcccgtcggcaggggcagcagggggcagggtgcagggtccacataggtggtgcacacgcaagccccccggggtgctgcctgcaccgttgggatcaatgtctcatttatgtagaaaatgcagaaatctttacattcctcaagctagcccctgccccaatcctgccctggcctgaacacccccagggacagagctggtctctgggctgggggcccccgggcctgggccgggcaggctggaccatacccccagtccaccagctccagtctccacagccatcctggcccacacaggcaccccacacaaacctgtttattgaatctgctggacccaagcggctctccagcccttccgtccttccccagccgctcttgtcgccttggcaggacttgactctgcctccctggccagccttgcaagaggactggggtctcctgccctctctgttgagccaggaatcccaagtgaggggttgccctgaggtctgactcttggggcaagcccgccacccactgtgggactttctggtgggctcctcagctcccaccccaggctggggcccagattgtgaggtctgtgtgcatgtgtgtgtgtatgtgtgtgtgcatgcgtgtgtgtgttgtggggatctggcctggcccttggggatggggctgctggggactgccccccttcccgccgtggccaggcgctctgtgtgctgtgtgtgccccaggctctgttgaccccgtccaggaactaacttacccagcttggtctctcctgagtcctccaccctggcctgggattggccagggagcagggcgggcattgggaccagtgtggagcctgagggtgcctgccctgctctggagggagggccaggagctgccacacccccaagtcctctcagggcccaccctcctttttcagcctctgcataaggcccctgggtacactgcagaagccccatccttcccgcctccgggcataaggcccctgaccacacttcagaagccccatcccccctgccaccgggcgatccctgctgtgagccgaagctctccctgccccgccctggccatgtgatcgtgttggtgacagaccctgatgtgctggtgctgtgtccccaaaaccggggccctccacagaggccccttcccagcgacactacctggggctcaggcctggacccccccagttcacggttgctcctgggagctgcccctcccgtcacatcagaaccttggaagctgctgctgctgcttacagaattatatttttttcttttgaagagttttaagaagttgtaactttttgtgtcttgtcatgtcagagaataaataaatattctaagtagaaaaaaaaaaaaaaaaaaaaaaaaaaa

SEQ ID NO: 227 - DNA, 2990 bp, Homo Sapiens
cttggctccgcacctgctgggctggcgaacccgaaattgggcttggaacccgggagccagatcttggaccctgaactgcacctctgtcaagagcccagaggagaaagaatggctgtttcagtagcaatgtccaagctctgcattctccagactctgtgctttcctaagataggaacccagaagaggactgatcatttcttgcagctctaaaaaccatggctcggaaattagtgatgttcagggatgttgccattgacttctctcaggaagagtgggaatgcctggactctgctcagagagatttgtatagagatgtgatgttggagaactatagcaacttggtatcactagacttgccttcaaggtgtgcaagtaaggacttatctccagaaaagaacacttatgaaacagaattatcccaatgggaaatgagtgacagacttgaaaactgtgatcttgaagagtccaattccagggattatttggaagccaaaggcaagatggagaagcaacaagaaaatcagaaggaatatttcaggcaagggatgatcatatatgacaaaatgtccattttcaaccagcatacttacttatctcaacattcaagatgtcattctactgagaaaccctataaatgtaaggaatgtgggaaagccttcagacgagcctcacacctaacacaacatcaaagtattcatactggtgaaaaaccctatgaatgtaagcaatgcgggaaggcctttagtcgtgattcacaactcagtcttcatcagagacttcatactggtgagaaaccctatgcatgtaaggaatgtgggaaggcctttactcaaagctcacaacttattttacatcatagaattcatactggtgaaaaaccatataaatgtgaagaatgtgggaaagcctttattcgtagctcacaacttacccgacatcaaaaagttcatactggtgagaaaccttatgaatgtaaagaatgtgggaaggcctttactcagaattcacaacttacactacaccagagacttcatactggtgaaaagctctatgaatgtaaagaatgtaggaaggtctttactcagctctcacaacttattctgcataagagaattcataccggtgagaaaccctatgaatgtaaggaatgtggaaaagcttttatttgtggctcacagctttctcaacatcagaaaattcataatggggaaaaaccatatgaatgtaaggaatgtggaagggcctttattcggggctcactactgatgcaacatcagaggattcatactggtgaaaaaccctataaatgtgaagaatgtgggaaggcctttatccgtggctcacaacttactcaacaccagagaattcacaccaatgaaaagccctatgaatgtaaggaatgtggaaagatgtttagtcatggctcacaacttactcaacatcagagaatacacactggtgagaaaccctatcaatgtaaggaatgtggaaaagcgtttaatcgtggctcactccttacacgacaccagaggattcatactggtgagaaaccctatgaatgtaaagaatgtggaaaaacctttagtcgtggctcagaacttactcaacatgagcgaattcacacaggtgagaaaccctatgaatgtaaggaatgtgggaaatcttttattcgtggttcccagcttactcaacatcagagaatccatactggtgagaaaccttatgaatgtaaagaatgtagaatggcctttactcagagttcacatctttcccaacatcaaagacttcacactggtgagaaaccctatgtgtgtaatgaatgtggaaaggcctttgcgcgtggcttactacttatacaacatcagagaattcatactggtgagaaaccatatcaatgtaaggaatgtgggaaagcctttattcgtggttcacagttgactcaacatcagcgaattcacactggagaaaaaccctatgaatgcaaggagtgtggcaaggcctttagtcatggctctcagcttactctacatcagagaatccatactggtgagaagccctatgaatgcagagaatgtagaaaggcctttactcagagttcacatctttctcggcatcagagaattcatactggtgagaaaccatatcaatgtaaggaatgtgggaaggcctttactcgtggttcacagctaactcaacatcagagaattcatatcagtgagaaatcttttgaatataaggaatgtgggattgactttagtcatggctcacaagtttacatgtgaattgtctgattatttgagatcactatgaagaggttctctggttgttagcagcaaagaattctcacaaatgtgaatatgggcgcacatttgcctcataaagcacagcatcagataatttatgtgagagaaaatggtagtgtcattcatatagaaaaacatcattactggaaacctattaaacattagcaaattggagaatagttttaatatagtaaatgtaggaagccctttagccatattgaaaacaaatatctttttcaacgttatcttagctctactagttgatctttttgttatatgtatcatgatacttaacctctaccttggtttaatcattttaagatagacctaagtatattacctttattgtaagattcttggaagtattatgtaagttattacatgtaaaagctcttagaatggtgccttgaacgtagcataccacaaatattagctaccattttcactagtgttattttagagaatttgcatgagaggagagtacttatgagtataatgaatattgagaaatcttttatcaacacatccaagatgacttggttggggggcactgtatgccataatgaatgtgagaaagctgtcatttaaatctcatccattattgctataagaggaaattcatactgttaaaaaaaaaaaaacccagtggatataatcagtgtattattaaaaaaaaaaaaaaaaaaa

SEQ ID NO: 228 - DNA, 1385 bp, Homo Sapiens
gggaagtcctggcccttggcccaacctcctgctgtccccggtctgagggcccaagccccgcgtctccgccttgccgtccagcctgtccttggtgtggggtgcttggaagtgtgagcaccctctctggctctttgccggccccaagggtcgttgcggcggcccccgggcccagtcatcagccctcttttccggtgccggaactatcgtactggtgccctagtttcccagccggcaggcggagtgaggaggaagcggaggcgagaccgcgctcaacactggggaaaggaaggaggcgggccctgcgcgcagcattttgggaaagagtggaattctgggtgttaggcccgccattcgcttgactcacgccttcgccgtagcatctttcgcagcggaccgaagagaagaaaagtaggccagagccgaactctcttcctgccaagatgtctattggtgtgccgattaaagtactgcatgaggccgagggccacattgtgacatgtgagacgaacaccggtgaggtatatcgggggaagctcattgaagcagaggacaacatgaactgccagatgtccaacatcacagtcacatacagagatggccgagtggcacagctggagcaggtatacatccgtggcagcaaaatccgctttctgattttgcctgacatgctgaagaacgcacccatgttaaagagcatgaaaaataaaaaccaaggctcaggggctggccgaggaaaagctgctattctcaaggcccaagtggccgcaagaggaagaggacgtggaatgggacgtggaaacatctttcaaaagcgaagataattttctaagttgaacagaactttgtccttttttctttcaggttatctgagttcattggagtgggtgcttgtgcatatatgctaggtatcttttgccatctttctctttagatcaggggaaatgtttaagctaaataaatctggggggttttttgttctgttttgttttgttttctttgagaaaataaggactttgtgttcatttgaagtttgctttggctaaattttgacaccctgggggatgtcctgggagaatgccagtactttgaaatagcacagctattgatgagattttaagctgctgttcctggccagttgcaggttaagccccagaaaagttcaccttggagaagctccgagaacacacagattgtgtctcattcatcttcagacacaggcacatagtgtggcactttgttcagttaacatttgtggagctgtcatcagctcagctttaacaacacaggtgactctttcccttgataaagtcataggtaattcaggggctgggtgcggcggctcacgcatgtaatcccagcactttgggaggccaaggcgggcggat

SEQ ID NO: 229 - DNA, 549 bp, Homo Sapiens
cctttcctgttaggcgagagctgcgaaaggcgagagctgcgaagggccaggtgtcgggcgctgtttctcgttttcatcatatagacaaaacagccctgctgcaaagatggtcaacgtacctaaaacccgaagaaccttctgtaagaagtgtggcaagcatcagcctcacaaagtgacacagtataagaagggcaaggattctttgtatgcccagggaaggaggcgctatgatcggaagcagagtggctatggtgggcagacaaagccaattttccggaagaaggctaagaccacaaagaagattgtgctaaggctggaatgtgttgagcctaactgcagatccaagaggatgctggccattaagagatgcaagcattttgaactgggaggagataagaagagaaagggccaagtgatccagttctaaactttgggatatttttcttcaattttgaagagaaaatggtgaagccatagaaaagttacccgagggaaaataaatacagtgatattcttacgcaaaaaaaaaaaaaaaaaaaaaaaaaaaaa

SEQ ID NO: 230 - DNA, 641 bp, Homo Sapiens
acttcctctccagcccctgcgtaatcgataaggaaacccggacgctgctgcccctttctttttttcaggcggccgggaagatggcggacattcagactgagcgtgcctaccaaaagcagccgaccatctttcaaaacaagaagagggtcctgctgggagaaactggcaaggagaagctcccgcggtactacaagaacatcggtctgggcttcaagacacccaaggaggctattgagggcacctacattgacaagaaatgccccttcactggtaatgtgtccattcgagggcggatcctctctggcgtggtgaccaagatgaagatgcagaggaccattgtcatccgccgagactatctgcactacatccgcaagtacaaccgcttcgagaagcgccacaagaacatgtctgtacacctgtccccctgcttcagggacgtccagatcggtgacatcgtcacagtgggcgagtgccggcctctgagcaagacagtgcgcttcaacgtgctcaaggtcaccaaggctgccggcaccaagaagcagttccagaagttctgaggctggacatcggcccgctccccacaatgaaataaagttattttctcattccaaaaaaaaaaaaaaaaaaaaaaaaaaaaaaaa

SEQ ID NO: 231 - DNA, 1678 bp, Homo Sapiens
aagaaggaggccgcgcgagggctgacgaaccggaagaagaggaactgggcctgaaagggtaccggtgaccgctactgctgccggtgtttgcgtgtggcagggagccaggcctggcgagcggggtgtgtcgcgatgccggagctggcagtgcagaaggtggtggtccaccccctggtgctgctcagtgtggtggatcatttcaaccgaatcggcaaggttggaaaccagaagcgtgttgttggtgtgcttttggggtcatggcaaaagaaagtacttgatgtatcgaacagttttgcagttccttttgatgaagatgacaaagacgattctgtatggtttttagaccatgattatttggaaaacatgtatggaatgtttaagaaagtcaatgccagggaaagaatagttggctggtaccacacaggccctaaactacacaagaatgacattgccatcaacgaactcatgaaaagatactgtcctaattccgtattggtcatcattgatgtgaagccgaaggacctagggctgcctacagaagcgtacatttcagtggaagaagtccatgatgatggaactccaacctcgaaaacatttgaacacgtgaccagtgaaattggagcagaggaagctgaggaagttggagttgaacacttgttacgagatatcaaagacacgacggtgggcactctgtcccagcggatcacaaaccaggtccatggtttgaagggactgaactccaagcttctggatatcaggagctacctggaaaaagtcgccacaggcaagctgcccatcaaccaccagatcatctaccagctgcaggacgtcttcaacctgctgccagatgtcagcctgcaggagttcgtcaaggccttttacctgaagaccaatgaccagatggtggtagtgtacttggcctcgctgatccgttccgtggtcgccctgcacaacctcatcaacaacaagattgccaaccgggatgcagagaagaaagaagggcaggagaaagaagagagcaaaaaggataggaaagaggacaaggagaaagataaagataaggaaaagagtgatgtaaagaaagaggagaaaaaggagaaaaagtaaaacatgtattaaatagcttttttaatttgtaaattaaaatcttacaaactaaatcagtgtgctgctagagggttctttttcacttgacatgcttattagaaagctgacccaacaagagctctctgcctccggtcactcttgctgtggtgctacgtggaagtgaatggagactgatctcaaatctgaactgcagctttcgctgctgtgagttggggatatgatagtcagctcaggcttcagattgtatgagaaaaatgaagagaagtcaacaaatattttggtactcttcattcatttatctctaaaaccaggagttgaattttcctcatcttgaaagactcttggggtctgtttctggtattttacaaaattgctaagtggaatgcatgaattgcattatgttctctggtaacacgtagagttcagacccttctgaactctgttgataataccacaccatgttctggacccatagctctggcatcctcaggggttgtgatccagctccatatattgtttaccttcaaagatacaattaaatggcttgatttttaaaaaaaaaaaaaaaaaa

SEQ ID NO: 232 - DNA, 2617 bp, Homo Sapiens
ctcgctgcccaggcccccgacgccgcggcaggagccccccaagagcgcgggaagccccgtggacctggcgctcccggctcgggcgtggacggggcgggcgccggggcggggcgcgcgtcctcgcgggtctgaatggaagggtcgaggtcgtcgtcggcggcgagcagatcctgaagccagaactccaccccggcgcccgcgccatgcggcgggagaggtgcggcgccccccacccgcgtcgccgccatggaggtgctgcggcgctcctcggtcttcgccgccgagatcatggacgcctttgaccgctcgcccacagacaaggagctggtggcccaggccaaggcgctgggccgggagtacgtgcacgcgcggctgctgcgcgccggcctctcctggagcgcgcccgagcgtgccgcgccggtcccgggacgcctggctgaggtgtgcgcggtgctgctgcgcctgggcgatgagctggagatgatccggcccagcgtctaccgcaacgtggcgcgtcagctgcacatctccctgcagtctgagcctgtggtgaccgatgcgttcctggccgtggctggccacatcttctctgcaggcatcacgtggggcaaggtggtgtccctgtatgcggtggccgcggggctggccgtggactgtgtgaggcaggcccagcctgccatggtccacgccctcgtggactgcctgggggagttcgtgcgcaagaccctggcaacctggctgcggagacgcggcggatggactgatgtcctcaagtgtgtggtcagcacagaccctggcctccgctcccactggctggtggctgcactctgcagcttcggccgcttcctgaaggctgccttcttcgtgctgctgccagagagatgagctgcccacctggcagtggccgcagcctggccctctgggcccaacgcaggaggccctcagcacccgaacacatcttcctcctccccacccgagcctggagcactctaaccctcggagaccccctaagccccgttcctccgcagacccaggccctccggaaggggtgagtggggaggggctttcctgagcctggagctgggctttggggcagcctgcgaccctccccgcttgtgtcccttctcctgtgatctctgtgttttcccttttctttctggggccaggaagtcagggtcaactcccaggcctcagatgcaggggcccagaacacctgctctcacctgagccccaggtgaaggggcccgggaacacctgctctcacctgagccccaggtgaaggggcccgggaacacctgctctcacctgaaccccaggtgaaggggcccggaacacctgctctcacctgagccccaggtgaaggggcccggaacacctgctctcacctgagccccaggtgaaggggcccgggaacacctgctctcacctgagccccaggtgaaggggcccgggaacacctgctctcacctgaaccccaggtgaaggggcccagaacacctgctctcacctgagccccaggtgaaggggcccggaacacctgctctcacctgagccccaggtgaaggggcccgggaacacctgctctcacctgagcccctggtgaaggggcccggaacacttgctctcacctgagccccaggtgaaggggcccggaacacctgctctcacctgagcccccggtgaaggggcccggaacacttgctctcacctgagccccaggtgaaggggcccggaacacctcctctcacctgagccccaggtgaaggggcccggaacacctcctgtcacctgagccccaggtgaaggggcccgggaacacctctcacctgaacccgggggtcccatcccaggaagaagggccatctcaggacatgagtcctcaggggccctgcacattcaatctgaaggtgaccctggcctggctgaagctggaagagctgtggggactcagcctgtaaacagagcgtaaggttcacatgctggttgcttaatccgtttctggaggaagagtatgacacccacttgtgatggggtccttgtgcggtggggaccggggccggcgggctccaggccagcacacctaacccatggatgtggaacctacggccgagaaggaatgttgcatgagtcggatcccagtccattgtcagtggagggtgagggtgaccccatctgctatttttgtgctcatcctcatacaaccatttggggatgtgcctattagggctccgtaagaactcagatgcctgggaagcccagcccctcaggtgcccccacacacagccttcccttgacgcctacatttctaggcacatgtgaggcatctttcctggagccccgagccagccctgtccctccccagtgcagcatggcactcaggagatacaggctggacatggggcagtcgttctggggaggcctggcctagcagccacccacctgagccctcccggccaggcttcgtgctggggtgggccatgtgccaggacaggagggtcccggcggaaagccagccccggactcatcgtgacattgagatcccactggagggtaggggtggtaataaacttctccaaacgatcgttgtcattttagacagaaaaaaaaaaaaaaaaaa

SEQ ID NO: 233 - DNA, 1160 bp, Homo Sapiens
cgctgaccgagcgcaccccgcccccggcgccatcttcccgaccgcgagccgtccaggtctcagtgctgtgccccccccagagcctagaggatgtttcatgggatcccagccacgccgggcataggagcccctgggaacaagccggagctgtatgaggaagtgaagttgtacaagaacgcccgggagagggagaagtacgacaacatggcagagctgtttgcggtggtgaagacaatgcaagccctggagaaggcctacatcaaggactgtgtctcccccagcgagtacactgcagcctgctcccggctcctggtccaatacaaagctgccttcaggcaggtccagggctcagaaatcagctctattgacgaattctgccgcaagttccgcctggactgcccgctggccatggagcggatcaaggaggaccggcccatcaccatcaaggacgacaagggcaacctcaaccgctgcatcgcagacgtggtctcgctcttcatcacggtcatggacaagctgcgcctggagatccgcgccatggatgagatccagcccgacctgcgagagctgatggagaccatgcaccgcatgagccacctcccacccgactttgagggccgccagacggtcagccagtggtgggtgtccctcccagccaggcagagccccgcagtgcccgagaccctcccagccaggcggagccccgcagtgcccctgaggccctcagcccccacatgccctgtgctgcactcccaggctgcagaccctgagcggcatgtcggcgtcagatgagctggacgactcacaggtgcgtcagatgctgttcgacctggagtcagcctacaacgccttcaaccgcttcctgcatgcctgagcccggggcactagcccttgcacagaagggcagagtctgaggcgatggctcctggtcccctgtccgccacacaggccgtggtcatccacacaactcactgtctgcagctgcctgtctggtgtctgtctttggtgtcagaactttgggggccgggcccctccccacaataaagatgctctccgaccttcaaaaaaaaaaaaaaaaaaaaaaaaaaaaaaaaaaaaaaaaaaaaaaaaaaaaaaaaaaaaaaaaaaaaaaaaaaaaaaaaaaaaaaaaaaaaaaaaaa

SEQ ID NO: 234 - DNA, 2353 bp, Homo Sapiens
cctagcttggcgcggaatccgtgaattgcccgcggcccgagggtgcagctcccggactgactggctctgcccttccccatggacgcctcctctagcccgtggaatccaaccccggctcctgtcagcagccctcccctgctgctccccatccctgccatcgtcttcatcgctgtgggcatctatttgttgctgctgggtctagtcctgctgactaggaactgcctgctggcccagggctgctgcgcggacggtagctccccctgcaggaagcaaggttcctccgggcccccagactgctgctggacctgtgcagaagcctgcaactttcctctgcctagcccggcccacttcctggatgcttgctgcccccagcccaccagagctgactgggcacctcgctgcccccgctgctgcccactctgcgactgtgcctgtacgtgccagctccccgactgccagagcctcaactgtctctgcttcgagatcaagctccgatgaggacccagggcccctgccctctggggagcggccagcccccagggcccatgtgccctcctccctgaagagcctttccccacgccactggaaccacagatggcctgccgagcacccaggcctgggaactggaagtggcagcgcagggcctggctccctgcagggcaggactcttggccggctggacggcagctcctctggagggccagaaaagagaggggctagtgctcgggcaggtgccctggcttcccttcccctccacacgtcaacgattctatttgaagttgggcaggggggtggcgctgctcaccacacacaagtgttataggaggagtctggcccttgagtaccgggtacgcaggggtgcctcaaccacactccgtccacggactctccgttattttaggaggtccctggccaaagatttatttctcttgacaaccaagggcctccgtctggatttccaaggaagaatttcctctgaagcaccggaacttgctactaccagcaccatgccctaccaatatccagcactgaccccggagcagaagaaggagctgtctgacatcgctcaccgcatcgtggcacctggcaagggcatcctggctgcagatgagtccactgggagcattgccaagcggctgcagtccattggcaccgagaacaccgaggagaaccggcgcttctaccgccagctgctgctgacagctgacgaccgcgtgaacccctgcattgggggtgtcatcctcttccatgagacactctaccagaaggcggatgatgggcgtcccttcccccaagttatcaaatccaagggcggtgttgtgggcatcaaggtagacaagggcgtggtccccctggcagggacaaatggcgagactaccacccaagggttggatgggctgtctgagcgctgtgcccagtacaagaaggacggagctgacttcgccaagtggcgttgtgtgctgaagattggggaacacaccccctcagccctcgccatcatggaaaatgccaatgttctggcccgttatgccagtatctgccagcagaatggcattgtgcccatcgtggagcctgagatcctccctgatggggaccatgacttgaagcgctgccagtatgtgaccgagaaggtgctggctgctgtctacaaggctctgagtgaccaccacatctacctggaaggcaccttgctgaagcccaacatggtcaccccaggccatgcttgcactcagaagttttctcatgaggagattgccatggcgaccgtcacagcgctgcgccgcacagtgccccccgctgtcactgggatcaccttcctgtctggaggccagagtgaggaggaggcgtccatcaacctcaatgccattaacaagtgccccctgctgaagccctgggccctgaccttctcctacggccgagccctgcaggcctctgccctgaaggcctggggcgggaagaaggagaacctgaaggctgcgcaggaggagtatgtcaagcgagccctggccaacagccttgcctgtcaaggaaagtacactccgagcggtcaggctggggctgctgccagcgagtccctcttcgtctctaaccacgcctattaagcggaggtgttcccaggctgcccccaacactccaggccctgccccctcccactcttgaagaggaggccgcctcctcggggctccaggctggcttgcccgcgctctttcttccctcgtgacagtggtgtgtggtgtcgtctgtgaatgctaagtccatcaccctttccggcacactgccaaataaacagctatttaagggggaaaaaaaaaaaaaaaaaaaaaaaaaaaaaaaaaaaaaaaaaaaaaaaaaa

SEQ ID NO: 235 - DNA, 2335 bp, Homo Sapiens
acgtgacggactcagtagaccgccactggctgtgcacgttatggggtttccacctagggctcggcctgaggcttgtaacactccgttttcccccgagtcacaggggcagtcttgcccctcgcagctgggtcgcggtgtctctcaaaggtccccctctacaggggcttcgtgaggcccgggcccacagggcgctcggtcccggaagtgacgtctcccagaggggccggaagtggcagtggagggagggaagatggcggaggtggtgagtccggtgcccggggcggggcggagggagccaggggaggtgggtagagcccgaggccccccagtagccgaccctggcgtcgcgctgtctccccagggggagataatcgagggctgccgcctacccgtgctgcggcggaaccaggacaacgaagatgagtggcccctggccgagatcctgagcgtgaaggacatcagtggccggaagcttttctacgtccattacattgacttcaacaaacgtctggatgaatgggtgacgcatgagcggctggacctaaagaagatccagttccccaagaaagaggccaagacccccactaagaacggacttcctgggtcccgtcctggctctccagagagagaggtgccggcctcggcgcaggccagcgggaagaccttgccaatcccggtccagatcacactccgcttcaacctgcccaaggagcgggaggccattcccggtggcgagcctgaccagccgctctcctccagctcctgcctgcagcccaaccaccgctcaacgaaacggaaggtggaggtggtttcaccagcaactccagtgcccagcgagacagccccggcctcggtttttccccagaatggagccgcccgtagggcagtggcagcccagccaggacggaagcgaaaatcgaattgtttgggcactgatgaggactcccaggacagctctgatggaataccgtcagcaccacgcatgactggcagcctggtgtctgatcgaagccacgacgacatcgtcacccggatgaagaacattgagtgcattgagctgggccggcaccgcctcaagccgtggtacttctccccgtacccacaggaactcaccacattgcctgtcctctacctgtgcgagttctgcctcaagtacggccgtagtctcaagtgtcttcagcgtcatttgaccaagtgtgacctacgacatcctccaggcaatgagatttaccgcaagggcaccatctccttctttgagattgatggacgtaagaacaagagttattcccagaacctgtgtcttttggccaagtgtttccttgaccataagacactgtactatgacacagaccctttcctcttctacgtcatgacagagtatgactgtaagggcttccacatcgtgggctacttctccaaggagaaagaatcaacggaagactacaatgtggcctgcatcctaaccctgcctccctaccagcgccggggctacggcaagctgctgatcgagttcagctatgaactctccaaagtggaagggaaaacagggacccctgagaagcccctctcagaccttggcctcctatcctatcgaagctactggtcccagaccatcctggagatcctgatggggctgaagtcggagagcggggagaggccacagatcaccatcaatgagattagtgaaatcaccagcatcaagaaggaggatgtcatctccactctgcagtacctcaatctcatcaactactacaagggccagtacatcctcacactgtcagaggacatcgtggatggccatgagcgggccatgctcaagcggctcctgcggatcgactccaagtgtctgcacttcactcccaaggactggagcaagagggggaagtggtgaccagacactgcccactgcagtgccaagacggcagcaggactggggctgatagcccaccccgcccccactgcagctcccacaaagcactctaagggagatggggctgaggacagctcaaaaaggagaggacaggcctggcaggggcccactggtgcccagcaccaaggcgagctccgggctcagaccaactccaaggtcagctggccacaggcccaggcctcctctgaagcagggaccagagggagccaggcagctgtgtacagtgagaagggatccggatgggggagctctgtacagagggctggtgattgtaaaaatttcttttgtaaagtagaagttgggggtggggtgggtgctggctgcaaaaatttctggcttctcttacccctattgcccccggcaataaattgtttctatatgccaaaaaaaaaaaaaaaaaaaaaa

SEQ ID NO: 236 - DNA, 4574 bp, Homo Sapiens
agtggaacctggctctggggagaagccgcgtgagatccgcgcgggtgctagctagtcctttctcgtcgctgctcggctcgcggcccgtggggtcggccccgccaccgttgccgccatgcccatgaagggccgcttccccatccgccgcaccctgcaatatctgagccaggggaacgtggtgttcaaggactccgtgaaggtcatgacagtgaattacaacacgcatggggagctgggcgagggcgccaggaagtttgtgtttttcaacatacctcagattcaatacaaaaacccttgggtgcagatcatgatgtttaagaacatgacgccgtcacccttcctgcgattctacttagattctggggagcaggtcctggtggatgtggagaccaagagcaataaggagatcatggagcacatcagaaaaatcttggggaagaatgaggaaaccctcagggaagaggaggaggagaaaaagcagctttctcacccagccaacttcggccctcgaaagtactgcctgcgggagtgcatctgtgaagtggaagggcaggtgccctgccccagcctggtgccattacccaaggagatgagggggaagtacaaagccgctctgaaagccgatgcccaggactaaggcccacggtcactgtgggctggggtgatggtgtctgaccagtggggagattggaatgggattactttggcccagggaagcccctggttctgtccctggagactctggaaatccttttgcattaaaaggactttacacacctgtgtaaaaggatgtgggagaggagggtctgaagctgagctgctaaatgaatatccctgctctgctggtcaataaaacgcttcctaatagcagcttggcgtgtatctggtcctagtgaagaggaaggcctgtgtagcagaaaggctttgggcctgagaggttaaggccacagcctgttgacacctgttttggtcctgcgaccctttactggtctccgctggctttgaatcttcctctgggctctactctggagaacataagggctgctgtggttgagtctggctagcactgtctgtggttggcagtgtgtacacccctccgttcagttccttgggggtatttttcagaaatccaaaggcaacccttcgtgcagtgctcacttttttaagtacagttgattacccttgcctgctggggggcctagccatgggccagagatggaggagccccagtggctgacaggccagcctcactcaggcacgtacctgctgaccagtcagccactgccaacccatggcccagccactgtgtgcattagcagggaggtttgtaggccatggaggaaatgaggagacaccacctagtggagacattggggccctgctggggggatggtgtctatagctggctctgctggctccctcaggccctgcttaccaagctctggaggagggagtgctgcattactgagcaccttccttgttctttcctcataggacactgatgttactgtcactttagttatgctaaagtggaggtttcagcctccagaagacagcagagccttctagggtcaccttaagaataggtttagctaggctgggtgtggtggctcatgcctgtaatcccagcactttgggaggctgatgtgggcggatagttgagcccaggagttcgagaccagcctgggcaacatggcaagaccttgtctctacaaaaagtacaaaaattagatgggtgtggtgtttcgcgtctgtagtcccagctatttgggaagctgaggtgggaggatctcgagcctgcgagatcaaggctgcagtgaatcatgatcgtgcgctactgcactccagcctgggccacagagcaagactgtctcaagaaaaaaaattttttaaataagtttaattataaagtgaaggaccagttggaccacggacccctagaaactcagccaaggagacctgactttatctgagacaggaaggcagtggttaaaagaattaaaaaaggacagtggtgcttgacagagcaggactgaagttttcattcctctacctgctggggccttggtcaagtcctaaaagctttccaggtctgtaactggttttgtctgtaaaatggggaaaaggttaccttttctgccacatgaagtagctggctggtgaaatgatgtcatactacgatgtgtttcattaactgttggagattatcacattaaattgagcagatttggatcttttacatttgatgctcaagtttgattctgtaccagatctgggtttggggtgatggcttgtcgggggtgggaggggaaggtgggcagagactgatgtataatggacaggtgttccttgagtgacagacttacaaagggagtgtttaattgaaatctagcatcttgtctctctgctatcagcattttggctgggtggaaaaagctctcctccacagagagccctcccatgtctgctggtttcagttccccacccaactgactgaagtcttgaccttgataccacctgcctgggcgttctacttggctgcaagggctcttcagaaagcacctagttccttttggctttcatctgcagtgtaggtctccatagctagtgacacacaaagccttatgagagtattccttccctctagggcccaaagaggctgctaaccagcaggaatgtcctgaaccaaaaggagtggtgaccattctctagacagaataaatgtctggtccctaatgggacagataactagggtttgagttcaggcttgacacaggagcaatgggcagtgaggtggacagcccagaccctgaaaggacgtgtggagacagcagcagtcctgtggtgcagttactgcctgtgtggccagcttcacaggcagcagataatttgtggaaataaacattattttctttttttgttccctgtaggctacttgatcctggatagtttctctttaaacctttgtctttccctattttgtttagtagtgatgaaagatgggtttaaaatatacagaaatgggagaaaattaattagagaaaatgtgaggattttataattgataacatgttcttaattttacttgcacaagcagtgttcacagccttattctgaagtgaccacttttcttctctttgaggcactacctggcagcaccatctaaacctgtatcatctgctgtggtcccagttactcaggaggctgaggcaggaggatcacttgagcccaggaggttgaggctggagtgagccatgactgtaccactgcattccagcctgggtgacggagtgaggccctatctgcctgccagtgagttctgtcatgcatcagactttggacctcagaattttcacctggaacatgagaggtcagatgacataatgaatatgttctaacttctgaaacttttggagcttgtttttgcccttgatagcacgtatccttagagaataagcttgccaatttaaggcctgtctgtaatggcatctgaatgttccagcagcctaactgtgctctgctccagaaacatgtgtgtggcttccctacctccacaccaaggagctgccttgctgggtggatgtaaagactgtcctgccagggtttcccactaaaggtattaataagtccagtggaccacagagggcccaatccctcttggccgctaaggctaaggtaggagccagagagctgtagagacaggaccaccaggatgcttcatgtccataacacaagagagcgctgcattgtttgggggccaggcattactactatcatgaagaaaaatgaagagcaggatgcatgttagtctttaattcacttttaatagtataaacctcatttaggtagtagtattaagccacaacaataatgccacattgaaacagcatttaataaaatgcataaagctaattcatgcactgcaatactctatatacaaacacaacaatgcaaattcttcttcaagactgaagacattgattagatataaaattcagtttaaaaagaacatgctattttttaaatgccatcacataaacaaagtgatttcacagggagaagaaagctgtataaagctgcagctttcaacaggttttaaacctggcattaaaatgtaatggcaaaaccaatattttctatattgtgaagggcaaaggttacagaaacggtcccaagaaaatctaacacccaaattttcctttgatagatagatgcctttaaaagggctggtaatgcagttacattctaacagagaagtccaaactacaggtaaaaactacggcttgtactgtgaaaaatgtgcagcttttcagttataaaactagttgaacactggtttacaagataatccgtagaacagagagactgtagaaaaatattccagcacttgagttgtgtgtggcagcagcatttgagtccatgaatgctatggtcattaaaataattgattatactttcctaaagaaaagccattttttaatgcaaagtctactacttccaaatgttattccaaacattaaattttaacagtctatcaatcaataaatgttgaacattttttttctaaaaaaaaa

SEQ ID NO: 237 - DNA, 3048 bp, Homo Sapiens
cggccactcggcatctgggttttagtcaggcagtgctccaggcgcctggctgccaggctacgggagaaaagtcctccgctcggccgcacccgttagaggcgctctccactgctgtcctcttcagctcaagatggtggcctgccgggcgattggcatcctcagccgcttttctgccttcaggatcctccgctcccgaggttatatatgccgcaattttacagggtcttctgctttgctgaccagaacccatattaactatggagtcaaaggggatgtggcagttgttcgaattaactctcccaattcaaaggtaaatacactgagtaaagagctacattcagagttctcagaagttatgaatgaaatctgggctagtgatcaaatcagaagtgccgtccttatctcatcaaagccaggctgctttattgcaggtgctgatatcaacatgttagccgcttgcaagacccttcaagaagtaacacagctatcacaagaagcacagagaatagttgagaaacttgaaaagtccacaaagcctattgtggctgccatcaatggatcctgcctgggaggaggacttgaggttgccatttcatgccaatacagaatagcaacaaaagacagaaaaacagtattaggtacccctgaagttttgctgggggccttaccaggagcaggaggcacacaaaggctgcccaaaatggtgggtgtgcctgctgctttggacatgatgctgactggtagaagcattcgtgcagacagggcaaagaaaatgggactggttgaccaactggtggaacccctgggaccaggactaaaacctccagaggaacggacaatagaatacctagaagaagttgcaattacttttgccaaaggactagctgataagaagatctctccaaagagagacaagggattggtggaaaaattgacagcgtatgccatgactattccatttgtcaggcaacaggtttacaaaaaagtggaagaaaaagtgcgaaagcagactaaaggcctttatcctgcacctctgaaaataattgatgtggtaaagactggaattgagcaagggagtgatgccggttatctctgtgaatctcagaaatttggagagcttgtaatgaccaaagaatcaaaggccttgatgggactctaccatggtcaggtcctgtgcaagaagaataaatttggagctccacagaaggatgttaagcatctggctattcttggtgcagggctgatgggagcaggcatcgcccaagtctccgtggataaggggctaaagactatacttaaagatgccaccctcactgcgctagaccgaggacagcaacaagtgttcaaaggattgaatgacaaagtgaagaagaaagctctaacatcatttgaaagggattccatcttcagcaacttgactgggcagcttgattaccaaggttttgaaaaggccgacatggtgattgaagctgtgtttgaggaccttagtcttaagcacagagtgctaaaggaagtagaagcggtgattccagatcactgtatctttgccagtaacacatctgctctcccaatcagtgaaatcgctgctgtcagcaaaagacctgagaaggtgattggcatgcactacttctctcccgtggacaagatgcagctgctggagattatcacgaccgagaaaacttccaaagacaccagtgcttcagctgtagcagttggtctcaagcaggggaaggtcatcattgtggttaaggatggacctggcttctatactaccaggtgtcttgcgcccatgatgtctgaagtcatccgaatcctccaggaaggagttgacccgaagaagctggattccctgaccacaagctttggctttcctgtgggtgccgccacactggtggatgaagttggtgtggatgtagcgaaacatgtggcggaagatctgggcaaagtctttggggagcggtttggaggtggaaacccagaactgctgacacagatggtgtccaagggcttcctaggtcgtaaatctgggaagggcttttacatctatcaggagggtgtgaagaggaaggatttgaattctgacatggatagtattttagcgagtctgaagctgcctcctaagtctgaagtctcatcagacgaagacatccagttccgcctggtgacaagatttgtgaatgaggcagtcatgtgcctgcaagaggggatcttggccacacctgcagagggagacatcggagccgtctttgggcttggcttcccgccttgtctgggagggcctttccgctttgtggatctgtatggcgcccagaagatagtggaccggctcaagaaatatgaagctgcctatggaaaacagttcaccccatgccagctgctagctgaccatgctaacagccctaacaagaagttctaccagtgagcaggcctcatgcctcgctcagtcagtgcactaaccccagctgccggcagtgctggttctccaacagagtggtgtctagatttatcagagtaacgagaagacaaactccggcactgggtttgctccctgattaaagtgccttcagccaagaccatctctccctcctggtgaagtgtgacttcgaattagtttgcacttcctgttggaaggtagagcccactgctcattgtataagccccgaggcctagagtggcagccaagagccatctgaagccacctctctgcctgttcctcccaagaggccagggtggccaggggtggtgagggcagttctgcacccagccaaacacataacaataaaaaccaaactctgtgtcagcatctttgcccttctggtttaaacgcctccttcaaaaagcaatctggaagaaagccctgtgctttgggggagtaagaatgtgtgtgcagaattctaggcagcaccttagggagggactgggatgagagaaagtgggacctggtgggctcaaccacacacacctgtctgtgcagatgctttgcccaggcttctcaccacggtgtaccgggatattaaacctctttccccagcctggaaaaaaaaaaaa

SEQ ID NO: 238 - DNA, 2107 bp, Homo Sapiens
gcgtggtgggcagtgtgggcatcccagcactgagttctgcccgggagaagccgacccctcccgcaatgcccgccccgccgtgcgcctcctgccatgctgcacgcgccgccctccgccgtccgctctcgggccaagcgctgtgcggtgcctgcttctgcgccgccttcgaggccgaggtgctgcacacggtgctcgccggccgcctgctgccgcccggcgcggtggtggccgtgggcgcctcgggcggcaaggactccacggtgctggcgcacgtgctgcgcgcgctggcgccgcgcctgggcatctcactgcagctcgtggccgtcgatgagggcatcggtggctaccgggacgcggcgttggcggccgtgcggcgccaggcggcgcgctgggagctgccgctcacggtcgtggcctacgaagacctctttgggggctggacgatggacgccgtggcccgcagcacagccggctccggccgcagccgctcctgctgcaccttctgtggagtgctgcggcgccgggcgctggaggaaggggcgcgccgcgtgggagccacgcacatcgtgacaggtcacaacgccgacgacatggcggagaccgtgctcatgaacttcctacggggcgacgcggggcggctggcccggggcgggggcctgggctctcccggcgaggggggcgccctgccgcgctgccgcccgctgcagttcgcctcgcagaaggaggtggtgctgtacgcgcacttccgccgcctcgactacttctccgaggagtgcgtctacgcgcccgaggccttccgcggccacgcccgggacctgctcaagcgcctggaggcggcgcggccgtccgcggtgctggacctcgtgcactcggccgagcgcctggcgctggccccggccgcgcggcccccgcgccccggcgcctgctcccgctgtggggcgctggccagccgcgcgctctgccaggcctgcgcgctcctggacggcctgaaccgcggccggccccgcctggccatcggcaagggccgccggggtctggacgaggaggcgacgccggggacgcccggggatccggcccggccccccgcctccaaggccgtccccaccttctagcgacttcgggcctcccgccgggatctgatgccgcggggtgggggctgcctgtaaatgacactgtgaataaacccgttaccttacctggccttccatgtggggttgggaaggagacgggggcccattcacctgaaaccctgaagaagctgggaccccagacttcgaggtctcagggaagaagggtctcgaactgggcttcaggctctgagggaggagggggctgggggaccatcctaggtctgagagaggagagggccaggactaagcctagaagaagtgggactggggaccccaggcatctgtggctgaggaaggagggcctggggtcgtggactcctgggtctcagggaggagggggctgaacaccgtgtgattcttgagcgagtggggattggttggggacctcctgcccagggcctctgctggttctgggtgcgctcagcatggtcctgaccctccttgagcatcagattcctgatgtttcctgtttgcccgcagtggggtaagcggagcgtgacttgatggacacacgccattcacagccgccgtcacgatgcctcccttccagcgcttcgtgtgtagcacgcactgcaccctcatttcgtctccaccacggtctcactggctgtagcctgaagtggtaaatggccctaagacacccagtcggaaggggtcacaccgagggctccctccaaagctctcgaatatcacaggtcgtggaattggtcctcccccacccatcccctctcgaatctctcctggtatctctgtcacgggtgaggaggggttggatgcgttccccaaaccttggactctggaggcagggttgtgtgagcctgtcggtgacttagcctctttcatgtcccatttctcctatgaaaatataatcagcccccttcccccccgcccccccatcccccccgcatcaaggcaccactgggaggaaatggaagatcagagaagttgaggtgctcaataaatggtgaccacttgga

SEQ ID NO: 239 - DNA, 914 bp, Homo Sapiens
cccggggcggatcgactgacgccggggccgggatggcgacgcctcggccctgcgcggacgggccctgctgctcgcatcccagcgcggtgctcggcgtacagcagacgctggaggagatggacttcgagaggggaatctggtcggcagccctgaatggagacctgggccgagtgaagcatttaatccagaaggccgaggacccaagtcagcccgactcggccggctacactgcgctgcactatgccagccgcaatgggcactacgctgtgtgccagttcctgctggaaagcggagctaagtgtgatgcccagacccacgggggtgccactgctctgcaccgagccagctactgcgggcacactgaaatcgcgcggctcctgctatcacatgggtccaaccccagggtggtggatgacgacggcatgaccagtctgcataaggctgctgagaggggtcacggggacatctgctccctcctcctgcaacacagcccagccctgaaggccatccgggaccgaaaggcacggctagcatgtgacctgctgccttgcaacagtgacctgcgggacctgctatccagctgagccgccaccctatctccagctgcctttaaagggtacacagaccagttctccaagcccctgccttggtcagcatccatgctgctgggcagggaactgaggccagaccacccaggaagagccccagtctggtcactgtggaagcgagggagtagatttggtgtggctaaaagtgtttaagactggacagatgatcatattctaaattagttcatatgagacatctatttatttggaaaaaaataaagttatatccttacctcatcccacacccaaagataaattgcaagattaaagatctaaatataaaaacacaaaaaaaaaaaaaaaaaa

SEQ ID NO: 240 - DNA, 2793 bp, Homo Sapiens
ggcctgggccgccggcccggcgcgggcgccatgaagctgctgcggcgggcgtggcggcggcgggcggcgctaggcctgggcacgctggcgctgtgcggggcggcgctgctctacctggcgcgctgcgcggccgagcccggggaccccagggcgatgtcgggccgcagcccgcctccccccgcgcccgcgcgcgccgccgccttcctggcagtgctggtggccagcgcgccccgcgccgccgagcgccgcagcgtgatccgcagcacgtggcttgcgcggcgcggggccccgggcgacgtgtgggcgcgctttgccgtgggcacggccggcctgggcgccgaggagcggcgcgccctggagcgggagcaggcgcggcacggggacctgctgctgctgcccgcgctgcgcgacgcctacgaaaacctcacggccaaggtgctggccatgctggcctggctggacgagcacgtggccttcgagttcgtgctcaaggcggacgacgactccttcgcgcggctggacgcgctgctggccgagctgcgcgcccgcgagcccgcgcgccgccgccgcctctactggggcttcttctcgggccgcggccgcgtcaagccgggggggcgctggcgcgaggccgcctggcaactctgcgactactacctgccctacgcgctgggcggcggctacgtgctctcggccgacctggtgcactacctgcgcctcagccgcgactacctgcgcgcctggcacagcgaggacgtgtctctgggcgcctggctggcgccggtggacgtccagcgggagcacgacccgcgcttcgacaccgaataccggtcccgcggctgcagcaaccagtacctggtgacgcacaagcagagcctggaggacatgctggagaagcacgcgacgctggcgcgcgagggccgcctgtgcaagcgcgaggtgcagctgcgcctgtcctacgtgtacgactggtccgcgccgccctcgcagtgctgccagagaagggagggcatcccctgagccgccgcggcccggccctccgggacacctgcttcacccggcggcgccttggggcaggtgccgagcgggcgcactacgcccgggccccaaggcccccgtcccgcagccacgcttgtggtcgctgcgtcccggtctgcgtttgggagacccctgggggttgccggggcagcgcgccgtgtccaggtggaggtgcccgttcctggacctcagcgagcctgagccgggcccggccgcacgctgacccccgtgctgtccccgaccggctcacggggctgggctccgatcttccgtgtctcttatcagtggcgtttctcacgtctgcgtctcagatctaacgtggtttcacatcaatccgctttcatgggattttggtctctgtccagtgacttcgtggtaaatgtaactcagtgtttgcttgcgacttatttataaatattgtaagtttgtgtcgatgagtgtaagttggcagtgcgcacgtctcggtttttttacatgatttaaggaaagacttttatgtcagaacttggtgcctgtaccgtcaaccccgctgctgcccgtgtttaaacgcaggagaactttaaaactggccatctatcttttcagtgtacaagtcactgaacccattgtttctttctgaagagactttcctttcaaggcttcccatgggtccgcgccacacagggccggtgctgctttatttcagactctgccccaggttccaggaatccgaaccccggagtgctgacgcggttccccaacttccgccttaagaaaacaggaccagccggcaccaggcccgtctctcacgtactttaacacatccttgaaagcccctcgtttaatgagaaaagcgaacactgcggtccttgccaaagtaaaatgaagctgccccaggacaaggggttaccatgagctccctggagtccgacgcgggttttctctctgggggacctgggtggtccccgctgtggtctttgttgtcccactttgggaccgggtccagtctggggtctagtctcgagcatcagggtcaggctcggggcagggctgggttaggctccgggtcagtcttgccatgggtttgggagcaggtttgggttacttgcgtttgaaggcagcagtggtctcaggaggaagaaacgggggcgggagagagtggtgatctgtggtcagtgggtcagtgacctgcacggtgattctcccacctccaaaaggtaggggtgggactggaggcgtccctaggtcaggccgttgagttcgagctccgatgggccaccttgaatccaggactgaccgcccgtgtgtgcacagtttgttcttggacgaggactcgtgaggatcgagggctggggaccccggtgtgagcaggatggggccctgccctcccgtgggagttgtggactcgagcccaggggctgcccgtcacagcggtgtcccaggtccctgccatccgattttacctgggatgtcttctctggagtttggaattgcttgaggaaccctgcgtgtgcttggagaggccagagggcttgctgagaaccccatggacagtggagagcgggattcgaaccaagggctggactcccacacctctggcctgcgtcgcccagttctttgtggctctgaagaattggccgctgtggaaaagagcaaatgtccgagacccccaacaggaagagtctaaaaatccagtttgcaaccacttctgacctacaaaaaaatggaaatttagtgtttttcagcctaagacattaaatttcatatcagaacaaa

SEQ ID NO: 241 - DNA, 1 bp, Homo Sapiens
  misc_feature (1)..(1): n is a, c, g, or t
n

SEQ ID NO: 242 - DNA, 1 bp, Homo Sapiens
  misc_feature (1)..(1): n is a, c, g, or t
n

SEQ ID NO: 243 - DNA, 5217 bp, Homo Sapiens
agcgcgcggagggcggggcctccccgggctcggccgcgccgccgcctcctccgcctcctcctcctcaccagcgctaaagccgggactggaccgagcggagttgtgcgtgtcgccgaaggggggtgggccgggggaggggaggttcgttccgcggagccgcagccagaaccgggaccaagaatcgccttcagccctgtctggtgcatccttggcagaaagtgaggaggaaaacacccccattgttagatgaggtcttaatcatggaacatttgaagtcacgtaaagaaggttctttggcatggacacaagttcagtgggaggattagaattgactgatcagactcctgttttattagggagtacggccatggcaactagtctcacgaatgtaggaaactcatttagtggtccagctaatcctttagtgtctagatctaataagtttcagaactcgtcagtggaagatgatgatgatgttgtttttatcgaacctgtacaacctcccccaccttctgtaccagtggtagctgatcaaagaaccataacatttacatcatcaaaaaatgaagaactacaaggaaatgattccaaaattactccttcctcaaaagagttggcatctcagaagggaagtgtaagtgagacaattgtcattgatgatgaagaggacatggaaacaaatcaagggcaagagaaaaattcctccaattttattgaacgaagacctcctgagactaaaaacagaaccaatgatgtggatttctccacttccagtttttcaagaagtaaggtaaatgcaggaatgggtaatagtggtatcaccacagaaccagactctgaaattcagattgctaatgttacaactttagaaacaggtgtaagctctgtgaatgatggccaattagaaaatactgacgggcgagatatgaacttaatgattacacatgtaacatcactgcagaataccaacttgggagatgtctctaacggactgcagtcaagtaattttggtgttaatatacaaacatacaccccatctttaacttcacagaccaagactggagtaggaccttttaatcctggtagaatgaatgtggcaggagacgtttttcagaatggagaatctgcaactcatcataatcctgattcttggatctcccagtcagcttcatttccccgtaatcagaaacaaccaggggtggactctttatcaccagtggcctcacttcctaaacagattttccagccgtctgtccaacagcagcctactaaaccagttaaagtcacttgtgcaaactgcaaaaaacctttacagaagggccagacagcttatcaacgaaaaggatcagctcacctcttttgttctaccacctgcctttcttccttctcccacaagcctgctccaaagaaactctgtgttatgtgtaaaaaagatataactacaatgaaaggaaccattgttgctcaagtggattcaagtgagtccttccaggaattctgtagtacatcttgtttatctctctatgaagacaaacagaatcctactaaaggagctctaaataaatcaagatgtacaatctgtggtaaactaactgagattcgccatgaagtcagctttaaaaatatgactcataagctgtgcagtgaccactgctttaatagatatagaatggccaatggtttaataatgaattgctgtgaacagtgtggagagtacttgcccagtaaaggtgctggaaataatgttctggtgattgatggtcaacagaaaagattttgctgtcaaagttgtgtcagtgaatacaaacaggtaggtagccatccaagcttcctgaaggaggttcgagatcacatgcaggactctttcttaatgcagcctgagaaatatggaaaactgacaacttgtactggttgccgaacacagtgcaggttttttgatatgactcagtgtataggtcctaatggatatatggagccatattgttcaactgcttgtatgaacagtcacaagacaaaatatgcaaaatcacaaagtttgggaattatttgccatttttgtaagcgaaactctttacctcaataccaagccacaatgcctgatggaaaactgtacaacttttgcaattccagttgtgtggctaaatttcaggctctaagtatgcagtcatctccaaatggccagtttgtagcgccaagtgatattcagttgaaatgcaactactgcaaaaattccttttgttcaaaaccagaaatcctggaatgggagaacaaagtgcatcagttctgcagcaaaacttgttcagatgactataagaagttgcattgcatagttacatattgcgaatactgtcaagaggagaagactcttcatgaaacagtaaatttctctggcgttaagagacctttctgtagtgaaggctgcaaattattatacaaacaggattttgccagacgtttaggattgagatgtgttacttgcaactattgttctcagctatgtaagaagggagcaactaaagaactcgatggtgttgtgagagatttctgcagtgaagattgctgtaaaaaatttcaggattggtactacaaggctgcaaggtgtgactgttgtaaatctcaaggaactcttaaagagcgagttcagtggcgtggggaaatgaaacatttctgtgatcaacattgcttactgcgtttctactgtcaacaaaatgagcccaacatgacaactcagaaaggacctgaaaacttacattatgatcagggttgtcagacatctcgaaccaaaatgacaggttcagcaccacccccttctccaacacctaacaaagagatgaagaacaaagcagttctttgcaaacctttaacaatgacaaaagctacttactgtaaacctcacatgcagaccaaatcttgtcagacagatgatacttggaggacagaatatgttccagtgcctatccctgtgcctgtgtatatcccagttcctatgcacatgtacagtcagaatattcctgttcctactacagttcctgttcctgtgccagttcctgtttttctgcctgctccattggacagcagtgagaagattcctgcagcaattgaggagctaaaaagcaaggtttcttcagatgctcttgatacagagttgcttacaatgacggatatgatgagtgaagacgaggggaaaacagagacaaccaacatcaacagtgtaattattgaaacagatataattggttcagaccttttgaagaactctgacccagagacacagtccagcatgcctgatgtaccatatgaaccagatttggatatcgaaatagattttcccagagctgctgaggagcttgatatggaaaatgaatttttattaccacctgtttttggcgaagaatatgaggaacagcccagacctcgatctaaaaaaaagggagccaagagaaaggctgtatcaggataccagtctcatgatgatagttctgacaattcagaatgcagctttcctttcaaatatacgtatggcgtaaatgcatggaaacactgggtcaaaactaggcaacttgatgaagatcttctggtattagatgagttaaaatcttctaaatcagtaaagttaaaagaggatctactctctcacaccacagctgagcttaactatgggttagctcattttgtcaatgagatccgacggccaaatggagagaattatgcacctgacagcatctattacctttgccttggaatacaggagtatttgtgtggaagtaatcgaaaagacaacatatttattgatcctggataccaaacatttgagcaagaattgaataaaatactgcgaagctggcaaccaagcatacttccagatgggtcaatattctctcgagttgaagaagactatctctggaggataaaacaactaggatcacactctccagtagctcttctgaatacactgttctactttaacactaagtattttggcctgaaaacagtggaacaacacttaagactttcctttggcactgtgtttaggcattggaaaaaaaatcctttaacgatggaaaacaaagcgtgtcttcgataccaagtgtcttccttgtgtggaacagataatgaagataaaattactactggaaaaagaaaacatgaagatgatgagccagtatttgaacaaattgaaaacacagccaatccttccagatgtcctgtgaaaatgtttgaatgctacttgtctaaaagtccacagaatcttaatcagaggatggatgttttttatttgcaaccagaatgctctagttctacagatagccctgtctggtatacgtctacttcactggaccgaaacaccttggaaaatatgcttgtacgggttcttctagtaaaagatatttatgataaagacaattatgaactggatgaagacacagactaaaaaggaacgttgcagaagcaatcgggataaaacagcattagatagtcatgctgctagatctttattatggaaaacatttcaagtttactccttctgttttgagttttgtagcagtgtacccacgctgggtattaccatgtaaataatctgtgagtgaaagttgccattattctatgtagtggttttaggatacttaacaaatacattcaaattctttttttattattatttatttgattaggtatgtttgtaactttttacattacagaatatgaatgagaatgtgccatgtataatttttttcttgtagtaagaaacatccatattgcacaactctactgttgcaaagcttccttggaagggggctcttttactgggttcttaaccagatggttgtgtatgggtagcactactaaaagtttagaacttgcagtgtctttcggaatttttaaaataaactgtaaactaataggctggggtttttgttttgttttggggttttgttttgtttggttttacattttagttactgaagccttacaaggttatgtagagagataccatcttctgtaccaaaaatagacaagagaatgctgtcaatattggtgtactgtaatgtgaatctatgctggtgaaaacaattttttgttccccttattaaaaccttagtgtccttttctcatttgtggctttctgcatcacccaatcaataaaaaacaaatatatatatgtatatatatgtatgtatgtgtgtgtgtatatatatatatatatatatatatata

SEQ ID NO: 244 - DNA, 1 bp, Homo Sapiens
  misc_feature (1)..(1): n is a, c, g, or t
n

SEQ ID NO: 245 - DNA, 1208 bp, Homo Sapiens
ggcggcgacagggagggaggaagcctaggagtccgccgcgggacggaggcctgggggaactgggagttcagctttctgcagagggccactaggaacctcggattgcccacggaagccagccactttctttgacagtccagcccacctcctcttctgcccggagaagctccaggggctgcctttgtgatcacagcatcttcacaaggaccaaaggaaaataagatttcttgtaagaacaccgtgaccacatctttaaaatgacccatttcgtggctcccacaagatttacacctccacactgaggccggaagtggttttgcccctataaaacatggcgaaaagctttcttgtctccaaggaaacgccacgtaatgagtcaaagctgtggcgcacgcgcagaagtacaagctaccggaagtgatggcgcccctactaaagccttggggttagtacgcgtgcgcagcagtttcttccgacagttgtgttgtgccaatggtggagaagaaaacttcggttcgctcccaggaccccgggcagcggcgggtgctggaccgggctgcccggcagcgtcgcatcaaccggcagctggaggccctggagaatgacaacttccaggatgacccccacgcgggactccctcagctcggcaagagactgcctcagtttgatgacgatgcggacactggaaagaaaaagaagaaaacccgaggtgatcattttaaacttcgcttccgaaaaaactttcaggccctgttggaggagcagaacttgagtgtggccgagggccctaactacctgacggcctgtgcgggacccccatcgcggccccagcgccccttctgtgctgtctgtggcttcccatccccctacacctgtgtcagctgcggtgcccggtactgcactgtgcgctgtctggggacccaccaggagaccaggtgtctgaagtggactgtgtgagcctgggcattcccagagaggaagggccgctgtgcactgcccggccttcagaaagacagaatttcatcacccaatgcagggggagctcttcctggaccaagggaggagccgctcattcacccaacaaaactgtgtcttatctgccaggaaagaccagcctcactcctgggaactgtctggcaggtaggctgggccccccagtgctgttagaataaaaagcctcgtgccggaaaaaaaaaaaaaaaaaaaaa

SEQ ID NO: 246 - DNA, 1204 bp, Homo Sapiens
cgccgaccccttcgcttccgctccgcgttcccacaatgcagtgcggctgagcgcctcggagcccgcggggacgctgcggggggacccgtgctgaggcggcggcggcgacgtgggctgcggcgggcccgcggcgtcgggcggtgcggatgtcgggctgggcggacgagcgcggcggcgagggcgacgggcgcatctacgtggggaaccttccgaccgacgtgcgcgagaaggacttggaggacctgttctacaagtacggccgcatccgcgagatcgagctcaagaaccggcacggcctcgtgcccttcgccttcgtgcgcttcgaggacccccgagatgcagaggatgctatttatggaagaaatggttatgattatggccagtgtcggcttcgtgtggagttccccaggacttatggaggtcggggtgggtggccccgtggtgggaggaatgggcctcctacaagaagatctgatttccgagttcttgtttcaggacttcctccgtcaggcagctggcaggacctgaaggatcacatgcgagaagctggggatgtctgttatgctgatgtgcagaaggatggagtggggatggtcgagtatctcagaaaagaagacatggaatatgccctgcgtaaactggatgacaccaaattccgctctcatgagggtgaaacttcctacatccgagtttatcctgagagaagcaccagctatggctactcacggtctcggtctgggtcaaggggccgtgactctccataccaaagcaggggttccccacactacttctctcctttcaggccctactgagacaggtgatgggaattttttctttattttttaggttaactgagctgctttgtgctcagaatctacattccagattgaggatttagtgtcttaggaaatttttttaattttttttttttaaagaagaaaaaaaactacataatttctaccagggccatattagcagtgaaacattttaaactgcagaaattgtggttttggttcagaaacaagttgtatatttttcacccctgattatgggaaaaaaatcagttctgtctttgtgggttgctctactatggagatcaacagttactgtgactgagtcggcccattctgtttagaaatatattttaaatgtttagtaattgaaaaaaaaaaaaaaaaaaaaaaaaaaaaaaaaaaaaaaaaaa

SEQ ID NO: 247 - DNA, 2702 bp, Homo Sapiens
attggctctgctggtaagtggtctattcctgcccacccccgggtgactagcttggccagtagtcgaccccacccggggaccgactctgggggttggagagactcttggggccggggtcgggcactccagctttcttctagccccgagctgggattccctggcctgcgccagctgcgtacacggcgagtacaccgcacctgcccgggacttcacccgcagctgcgagactcctccattcccggagggctccccacacctgctgcggccgtgccccatctccccgcagctgcggcgctgagcacccccatgtcgagaggctgagaccaggacagcagccctgaccaacgctccaataggccgggatccagccatacttcaatggatcccaggggtatcttgaaggcatttcccaagcggcagaaaattcatgctgatgcatcatcaaaagtacttgcaaagattcctaggagggaagagggagaagaagcagaagagtggctgagctcccttcgggcccatgttgtgcgcactggcattggacgagcccgggcagaactctttgagaagcagattgttcagcatggcggccagctatgccctgcccagggcccaggtgtcactcacattgtggtggatgaaggcatggactatgagcgagccctccgccttctcagactaccccagctgcccccgggtgctcagctggtgaagtcagcctggctgagcttgtgccttcaggagaggaggctggtggatgtagctggattcagcatcttcatccccagtaggtacttggaccatccacagcccagcaaggcagagcaggatgcttctattcctcctggcacccatgaggccctgcttcagacagccctttctcctcctcctcctcccaccaggcctgtgtctcctccccaaaaggcaaaagaggcaccaaacacccaagcccagcccatctctgatgatgaagccagtgatggggaagaaacccaggttagtgcagctgatctggaagccctcatcagtggccactaccccacctcccttgagggagattgtgagcctagcccagcccctgctgtcctggataagtgggtctgtgcacagccctcaagccagaaggcgaccaatcacaacctccatatcacagagaagctggaagttctggccaaagcctacagtgttcagggagacaagtggagggccctgggctatgccaaggccatcaatgccctcaagagcttccataagcctgtcacctcgtaccaggaggcctgcagtatccctgggattgggaagcggatggctgagaaaatcatagagatcctggagagcgggcatttgcggaagctggaccatatcagtgagagcgtgcctgtcttggagctcttctccaacatctggggagctgggaccaagactgcccagatgtggtaccaacagggcttccgaagtctggaagacatccgcagccaggcctccctgacaacccagcaggccatcggcctgaagcattacagtgacttcctggaacgtatgcccagggaggaggctacagagattgagcagacagtccagaaagcagcccaggcctttaactctgggctgctgtgtgtggcatgtggttcataccgacggggaaaggcgacctgtggtgatgtcgacgtgctcatcactcacccagatggccggtcccaccggggtatcttcagccgcctccttgacagtcttcggcaggaagggttcctcacagatgacttggtgagccaagaggagaatggtcagcaacagaagtacttgggggtgtgccggctcccagggccagggcggcggcaccggcgcctggacatcatcgtggtgccctatagcgagtttgcctgtgccctgctctacttcaccggctctgcacacttcaaccgctccatgcgagccctggccaaaaccaagggcatgagtctgtcagaacatgccctcagcactgctgtggtccggaacacccatggctgcaaggtggggcctggccgagtgctgcccactcccactgagaaggatgtcttcaggctcttaggcctcccctaccgagaacctgctgagcgggactggtgacccatggctgggggtgctgaggagagccgagttggactggctacccctcctggccacccagtactccctccagcctcagctggctgaacctcgccgctccaaccaccagcttcctcagcgagcagggcccagggctctgggcctgaagcaagagccagcccggctcccagtgtctgcccggctcccagtgtctgcccagccctctcccagacaggagcaggctgccaccccttctacctcaccactgcccctcgaagaattttgcaaatggccccttgccccattttaagcaggagcaggtggctggtttgaagccccaggtatcccccttccctgctatgggaaaggccaagctgctgggtggggacagaagctgcaggggagagggaagcagccgtgctgtcaacatcatccggcaccctctggggtaggagaacagccattccacatgtgttccctctatccgtcctgcttcctgggcagctggtggtgctgggaatggggtgccccagccttggtgaggacagtgttgggaggcccaggggcccagtaaagtgcatttgacattgaaaaaaaaaaaaaaaaaaaaaaaaaaa

SEQ ID NO: 248 - DNA, 2558 bp, Homo Sapiens
acgcggggcgcgcggctccgtcggctaccgcgggcgggcgcaggcgacgggcacggcgggcgagcgggcggtatggcggcggcggggcccgcggcggggccgacggggcccgagcccatgccgagctacgcgcagctagtgcagcgcggctggggcagcgcgctggcggcggcgcggggctgcacggactgcggctgggggctggcgcgtcgcggcctggctgagcacgcgcacctggcgccgcccgagctgctgctgctggcgctcggcgcgctgggctggaccgccctgcgctccgcggccactgcgcgcctctttcggcccctggcgaagcggtgctgcctccagcccagagatgccgccaagatgcccgagagcgcttggaagtttctcttctacctgggcagctggagctacagtgcctacctgctgtttggcaccgactaccccttcttccatgacccaccatctgtcttctacgactggacgccgggcatggcagtgccacgggacattgcagccgcctacctgctccagggaagcttctatggccactccatctacgctacgctatacatggacacctggcgcaaggactcggtggtcatgctgctccaccacgtggtcactctcatcctcatcgtctcctcctacgccttccggtaccacaatgtgggcatccttgtgctcttcctgcacgatatcagtgacgtgcagcttgagttcaccaagctcaacatttacttcaagtcccgcggcggctcctaccatcggctgcatgccttggcagcagacttgggctgcctcagcttcggcttcagctggttctggttccgcctctactggttcccgctcaaggtcctgtatgccaccagtcactgcagtctgcgcacggtgcctgacatccccttctacttcttcttcaatgcgctcctgctgctgctcacccttatgaacctctactggttcctgtacatcgtggcgtttgcagccaaggtgttgacaggccaggtgcacgagctgaaggacctgcgggagtatgacacagccgaggcccagagcctgaagcccagcaaagccgagaagccactgaggaacggcctggtgaaggacaagcgcttctgaacccctcggccccgcccccgtggacccggccccaccccgaataccccggccacgctccccgtccttggccgcccctccaccccctccaactctgctcctctagggccgccgccacctcccctgggaccccgccccctcatcctgcctccagttcccggccacgccccccaggacccctgcccctccggggacaccggccccgccctcagcccactggtcccgggccgccgcggaccctgcgcactctctggtcatcgcctgggaggaagatgccaccgccgcagcaaggtccctgcggccaccacctcctcctcctcctggccctgctgctgccctcgctgcccctgacccgcgcccccgtgcccccaggcccagccgccgccctgctccaggctctaggactgcgcgatgagccccagggtgcccccaggctccggccggttcccccggtcatgtggcgcctgtttcgacgccgggacccccaggagaccaggtctggctcgcggcggacgtccccaggggtcaccctgcaaccgtgccacgtggaggagctgggggtcgccggaaacatcgtgcgccacatcccggaccgcggtgcgcccacccgggcctcggagcctgcctcggccgcggggcattgccctgagtggacagtcgtcttcgacctgtcggctgtggaacccgctgagcgcccgagccgggcccgcctggagctgcgtttcgcggcggcggcggcggcagccccggagggcggctgggagctgagcgtggcgcaagcgggccagggcgcgggcgcggaccccgggccggtgctgctccgccagttggtgcccgccctggggccgccagtgcgcgcggagctgctgggcgccgcttgggctcgcaacgcctcatggccgcgcagcctccgcctggcgctggcgctacgcccccgggcccctgccgcctgcgcgcgcctggccgaggcctcgctgctgctggtgaccctcgacccgcgcctgtgccaccccctggcccggccgcggcgcgacgccgaacccgtgttgggcggcggccccgggggcgcttgtcgcgcgcggcggctgtacgtgagcttccgcgaggtgggctggcaccgctgggtcatcgcgccgcgcggcttcctggccaactactgccagggtcagtgcgcgctgcccgtcgcgctgtcggggtccggggggccgccggcgctcaaccacgctgtgctgcgcgcgctcatgcacgcggccgccccgggagccgccgacctgccctgctgcgtgcccgcgcgcctgtcgcccatctccgtgctcttctttgacaacagcgacaacgtggtgctgcggcagtatgaggacatggtggtggacgagtgcggctgccgctaacccggggcgggcagggacgcgggcccaacaataaatgccgcgtgg

SEQ ID NO: 249 - DNA, 2221 bp, Homo Sapiens
tttttttttttttgccggagtcgagcgggtgctgctagcggaggcgccatattggaggggacaaaactccggcgacagcgagtgacacaaataaacccctggacccccttgttccctcagctctaagggccgcgatgttgtacctagaagactatctggaaatgattgagcagcttcctatggatctgcgggaccgcttcacggaaatgcgcgagatggacctgcaggtgcagaatgcaatggatcaactagaacaaagagtcagtgaattctttatgaatgcaaagaaaaataaacctgagtggagggaagagcaaatggcatccatcaaaaaagactactataaagctttggaagatgcagatgagaaggttcagttggcaaaccagatatatgacttggtagatcgacacttgagaaagctggatcaggaactggctaagtttaaaatggagctggaagctgataatgctggaattacagaaatattagagaggcgatctttggaattagacactccttcacagccagtgaacaatcaccatgctcattcacatactccagtggaaaaaaggaaatataatccaacttctcaccatacgacaacagatcatattcctgaaaagaaatttaaatctgaagctcttctatccacccttacgtcagatgcctctaaggaaaatacactaggttgtcgaaataataattccacagcctcttctaacaatgcctacaatgtgaattcctcccaacctctgggatcctataacattggctcgttatcttcaggaactggtgcaggggcaattaccatggcagctgctcaagcagttcaggctacagctcagatgaaggagggacgaagaacatcaagtttaaaagccagttatgaagcatttaagaataatgactttcagttgggaaaagaattttcaatggccagggaaacagttggctattcatcatcttcggcacttatgacaacattaacacagaatgccagttcatcagcagccgactcacggagtggtcgaaagagcaaaaacaacaacaagtcttcaagccagcagtcatcatcttcctcctcctcttcttccttatcatcgtgttcttcatcatcaactgttgtacaagaaatctctcaacaaacaactgtagtgccagaatctgattcaaatagtcaggttgattggacttacgacccaaatgaacctcgatactgcatttgtaatcaggtatcttatggtgagatggtgggatgtgataaccaagattgccctatagaatggttccattatggctgcgttggattgacagaggcaccaaaaggcaaatggtactgtccacagtgcactgctgcaatgaagagaagaggcagcagacacaaataaaggtggtccttttgtttgatgaagaaataaacttcagctgaagattttatataggactttaaaaagaagagaagagaaagaagaaacaatgcatttccaggcaaccacttaaaggatttacatagacaatcctataagatcttgaacttgaattttatgggttgtattttaataatgtaagtaaattatttatgcactcctggtgtgctatgaatattattccagttagccttggattatttcagtggccaacatatgcagacatttgtactcctcaaccattttctcaaagtaatgggcattctatgatttagacttcaaggaattccaatgatgaagattttaaggaaagtattttatattcaacaggtatattctgctgcatgtactgtactccagagctgttatgtaacactgtatataaatggttgcaaaaaaaaaaaaaagtcagtgcttctaaaaagaatttaagataatggtttttaaaatgcctttataataagctttgtttctttgtgaaactaattcagcaggctgaaggaaatggttcatgtgataatgtgggctggtatcctctagagtacctgggtacataaacagaaactcctgtaggtaaaaagtaatttgtgccattagtctttctatgtttctgcatccagatagagtgcagttcatgagggagggggcgggggactgaaggggaaagggcgttaaagtgatacatttttataccaaatgtgtttatttttttgtgcaagtaatccttaaaattgcaattgtattaggtgttaaaataaagtttttaaaaaattaaaaaaaaaaaaaaaaaa

SEQ ID NO: 250 - DNA, 2271 bp, Homo Sapiens
cggaagtcggcggcggtggcggaggcggtgagtgcgcggctccggggctggccgactccgctagtggcccggccggcctgggctcgggggctccgggctctgggctctgggtgcgcggaccgggccaggctgcttgaagacctcgcgacctgtgtcagcagagccgccctgcaccaccatgtgcatcatcttctttaagtttgatcctcgccctgtttccaaaaacgcgtacaggctcatcttggcagccaacagggatgaattctacagccgaccctccaagttagctgacttctgggggaacaacaacgagatcctcagtgggctggacatggaggaaggcaaggaaggaggcacatggctgggcatcagcacacgtggcaagctggcagcactcaccaactacctgcagccgcagctggactggcaggcccgagggcgaggtgaacttgtcacccactttctgaccactgacgtggacagcttgtcctacctgaagaaggtctctatggagggccatctgtacaatggcttcaacctcatagcagccgacctgagcacagcaaagggagacgtcatttgctactatgggaaccgaggggagcctgatcctatcgttttgacgccaggcacctacgggctgagcaacgcgctgctggagactccctggaggaagctgtgctttgggaagcagctcttcctggaggctgtggaacggagccaggcgctgcccaaggatgtgctcatcgccagcctcctggatgtgctcaacaatgaagaggcgcagctgccagacccggccatcgaggaccagggtggggagtacgtgcagcccatgctgagcaagtacgcggctgtgtgcgtgcgctgccctggctacggcaccagaaccaacactatcatcctggtagatgcggacggccacgtgaccttcactgagcgtagcatgatggacaaggacctctcccactgggagaccagaacctatgagttcacactgcagagctaaccccacctctgggcctggccagtgggctcctggggggccctgccttgaggggcactgtggacaggaaaccttcctttgccatactgcattgcactgcccgtggcttggccagcatcccccggatcagggccctgtggtttgcgtgttacccatctgtgtccccatgcccagttcagggtctgcctttatgccagtgaggagcagcagagtctgatactaggtctaggaccggccgaggtataccatgaacatgtggatacacctgagcccactcttgcacatgtacacaggcactcacatggcacacacatacactcctgcgtgtgcacaagcacacacatgcaagccatatacatggacaccgacacaggcacatgtacgtgcacaggtgtgctacacatgtgcacacatgcacagttgcacagacacacacacacaggtgcacacacacgatgccgaacaaggcagaagggcgactctcacctctcatgtgcttctggccagtaggtctttgttctggtccaacgacaggagtaggcttgtatttaaaagcggcccctcctctcctgtggccacagaacacaggcgtgcttggactcttgacaagcagacctgctcctgcagaggagacagccacatttggaattgggcaccgagaagacctgagaaaaacccactctctcttttttttttttttgagacggagtcttgctctgtcacccaggctggagtgcagtggcacgatctcggctcactgcaacctccgcctcccaagttcaagcaattctcctgccccagcctcctgattagctgggattacaggcgtgtgccaccatgcccagctaatttttgtgtttttagtagagacggggtttcaccatgttggtcaggctggtcttgaactcctgacgtggtgatccacctgcctcggcctcccaaagtgctgggattacaggcgtgagccaccacgcctggccgaaaaacccactctcataacagaagtgcagactcattgctagattcagtgcccttgagtgtgccagaggtcctctgtgtttgagacaatcctgtgtgtgccaggaggctccgtgtgcaccaggggctctcagaatcccgcttacccagctggagaccatgcctctggcagccccatctcagccagccctgctctctccctcttccctccaggtgaggcaaacttcataggaatctgtacctgaatgtgagctcctgataataaaactctgaggctttggtgagcg

SEQ ID NO: 251 - DNA, 3891 bp, Homo Sapiens
gcgcactctggggaaagcggagctgcaccccgccccgtattgctgctcagctcctcagctgtgcgtgcgagggacgtcgggggtggcgccgcagcagttgcccctggtaacgggggaggcagcaggaggaggaggaggaggagggactcggcgggaggatgggcttgctctcaattttgcgcaagttgaaaagtgcaccagaccaggaggtgagaatacttctcctgggcttggataatgctggcaagaccactcttctgaagcagcttgcatctgaagacatcagccacatcacacctacacagggtttcaacatcaaaagtgtacaatcacaaggttttaaactgaatgtatgggacattggtggacagaggaaaatcagaccatactggaagaattattttgaaaataccgatattcttatatatgtaatcgacagtgcagacagaaaaagatttgaagagacgggtcaggaactagcggaattactggaggaagaaaaactaagttgtgtgccagtgctcatctttgctaataagcaggatttgctcacagcagcccctgcctctgaaattgcagaaggactgaacctgcataccatccgcgaccgagtctggcagatccagtcttgctcagctctcacaggagagggcgttcaggatggcatgaactgggtctgcaaaaatgtcaatgcaaagaagaaataaaatctagacgaatggagatgcaggagctgcgggagccgaattcggtcctgaaaaacactaatttgctgctttctgaccaaatgtttttccatctgtgtacagctccagctgtttgaagagagggaacaacacggtttagaaagaatccccattccagcagtagatttaactgatctctgaggttcagtatcatttttcaaataaaggaattatattatttcctctgcataattgaaatagtattaaatgtctcaaagcacatgattagaaaatgagatcttttaaatgagcaagagattgcattgcagtttagacaattccagtgggcttttttttcctctcaaaaaaaaaaaaagaaaaagaaaaagaggaagaagcagctttgctgagttcatttatttactgacccgtcccttgcattccctccatggttttgaaaccacagacagtgtttgctggtgctgtcagtgatttttaccgtcactagcccagccaggcttcagtctgtccgacaggaagctgctgggtgggggtggggggagaaaaggcagataattaaaccatctcatcgtcttgcaggtcggagactacgtatgtaatcctcactctttggacagaaaaaaaaaaaaaagtctttcttgcagacaagtcactacagaaacataccccatcccacccacccctgcctctgccccagccagccacacagagaagcaaattcttatgacttttgactgtaatgacatctggaatgtaaggagaggtgggaggtttaattccagaaaaattacaaggtccttaaaaagctctcacatcgagggctcaggctagcgtaaacaggctttctccagctcagtggagcagtgagcagccgactctgagattagctggcttctccacggccgtcctatagacaggatttctaaagctcaaagaattctgtgtttaaacgatcacaataggccgctgctatcagattttagaaataaatgcagctttaccatgaacctgctccactgagaaaagccaggcagatcgatttttagatcaatttttacagtgctggcaacttggtggtgtgggatgctcctggatggagagggtttgctgctggggaggacatgggtgtgtgtgtgactgcaggggtcgtgtccaaggaatcaagagtcaccccagctgctgggctcctctgcctctctgcagcagaatgtccgtcctctgttgattgattggagaggaatagcagaacatttctcctgcccctcgttgcaaaacgagcttgtttccctgaacctcagaaatcctcagcttcaaacatggggaaacaggccagagcattgcccggctcctgaattaaactctgttctggtgcctgagctcaggggttttcagagaatgaataagagactgtccagtgactggtgggtccctgggggccagctgccttctcatcctgggaggtggcccttcccaagcccatcagggcgtgtgagcagactgaaggggccgctgcagcccctggccctcaatacccagctgcttctggctaagagtgcagcagagactgaggcatagccagcttcaaaagcgatctgacatgaaagtcattaacaaagccagccgtgaaaaggtgccccagagttgctgtggacagacctgtaaggacttgcaaaacaaaagaaagtgaggggtttttttaacctcagagctagctgctctctgcagcctcctccactggcttctctggctcacccaagctctcccttacagaggcaacacagaattataaggaatcagaaatcccccttctaccaggctgcaaatgtggctctagcacttgcaaattgttttttcttccgaatagttcagcagggacaagttatctgaggggcaaaatgcctgcttggaggtctgcaattttggaacactgcagtatggaactttggcattggagggtctgtaaaatatttttgttcttttaccaccaacttaggggactgttttaaagagccatcccaaggcctctcctagcaggcagaagccactcctctgataacggcctctgtaaatgttctgatttgctctcagctgcagagacacagagacactgcagatgtcacacgctttcatcttccctttgagcccttttgaaccctcctggggctctggggtagatgagagaagcctgaaaaaggcagagtttgaaagctcccatttaaaaacaaaatactttttaaagccctcttgcctcttccctgcccactcctgccccctgaccagaagacagaatttgaagctggaaagggaagaccccttttcccctcctcctgtccccagtgagtcttagcgagacttttgccctgcgcacaattgcatctgaatgtgcgggggagagggctgggggccggagggcaggcaaggcctggggggtgctcgtgatatgtgctcaagccagttgtgggaaaaactcgagtcctcccctcctcccgacctaccccgtgtggctgcttttggctggattccctgcacccagtgcaacacaccctttccccttcactctcccttggttactatggaaacaagggtgtcattgatgtgggctgagctggggaacatgtcggtgcacagctgaaagtcagcgattatgccggcggttagaaatgtgccagggttaaaggagtccgcagctcccacggctgctgggaggacatggtcctgcccccttccttcctccctccctccgtctccacttctctctccttgcttttgacaaatttctttattcccctctggactaaagtagtggctatttttgtgccactctgcgccccaccctcactgttggccgctccttatccggcctggcctggagggtgacaccatgtcaccctcaccaggactcgtctctccattcccgtcagagtttgctttgatttccctttcctttccttctcggggaccagttcttacttccttttatttttagctctgcactccatgtggtttcagggttcagtctgatccatcaaaaggttctttttttataatcccttttgaaaatgataatcaaaggaagagatgtggtgtttggtcatgtggaaaactcaatgtataatttagacgtctgtcaaaaatccgacaaataaaatttagctggaacgaaaaaaaaaaaaaaaaaaaaaaa

SEQ ID NO: 252 - DNA, 3089 bp, Homo Sapiens
aggcgcctgagaggctctctaccggtgagggtttgcggggaagatggagtatcccgcgccggccacggtgcaggccgcggacggcggagcggccgggccttacagcagctcggagttgctggagggccaggagccggacggggtgcgctttgaccgcgagagggcgcgccgcctgtgggaagccgtgtccggtgcccagccggtgggtagagaggaagtggagcacatgatccagaagaaccaatgtctcttcaccaacacccagtgtaaggtttgctgcgccttgcttatttctgagtcccagaagctggcacattaccagagcaaaaaacatgccaacaaagtgaagagatacctagcaatccatggaatggagacattaaagggggaaacgaagaagctagactcagatcagaagagcagcagaagcaaagacaagaaccagtgctgccccatctgtaacatgaccttttcctcccctgtcgtggcccagtcgcactacctggggaagacccacgcaaagaacttaaagctgaagcagcagtccactaaggtggaagccttgcaccagaatagagagatgatagacccagacaagttctgcagcctctgccatgcaactttcaacgaccctgtcatggctcaacaacattatgtgggcaagaaacacagaaaacaggagaccaagctcaaactaatggcacgctatgggcggctggcggaccctgctgtcactgactttccagctggaaagggctacccctgcaaaacatgtaagatagtgctgaactccatagaacagtaccaagctcatgtcagcggcttcaaacacaagaaccagtcaccaaaaacagtggcatcatccctgggccagattccaatgcaaaggcaacccattcagaaagactcaaccaccttggaagactagaggtgattctgcccagcatcccatattgggccagccatgagccagcttcccgtgactgctcagcccttggctccctcttgctcgttgttctcaccaggaaagtacacgggcctgaggcaggattgggccacagacagcctctcattggtccgggctaattcactcctgctgctcccctttggcaggggtcctgtaggtcatgacaggggaggcaagggtattgagagactcggggtctcgcggggtggtagtttggagggtggctttccccatttcccaacccctctgggccttaggtgctgaggcccctgccacctgtctttcctctaaaggtcagttttgggccagttcttgcaactaaagagcagagatctctctgggccctagacatttccagcaaaacctggaactttcatgccaaacctggggcagggcaggaaacagaggaaatggctgcaacatgggagcttggagctaatacgacactctgccttcccccagaaggtgcaggctttcctgagtcttagaccagatatggccagttgcgcaggtttctgccaactgtgaagtatcctcctggagcagtgacacaatcttggcggagcattgctacccccgctgccccctccacagttcctgaatggtgctaaggatctgcagcagttggcaacgagctggggctgggggcggcctccatgtccactgagatcataggacactccaatggggatgggacctttcccctcctccatcagaggtgctctgaccctaggttacacgggaaagtgccccacatgcaagtctccctgagggttctgcccctaaaggcagactgcctcatgcccgctagctgtgaggttcattgctaccctcggccctactagccctctcttcccccttgtgcagcggaccacttgcccagtttgctgtggtgctagccttccccatcatccaccgggtgatttctgggtcccagggaaagaaagagagagctgatgcaggtttctacagtgaggaacaggcgtttcccaggccccacacccagatttctctatctttgctgtgttttatggcctgggactgagtccacacggatagatttttccttgtaaccttgagacgagaattccaaggagtgtcaccatcagaggcttctcttcattgtgtcaaagaagcccctagctgctctcgtggcctccttcccccactccctatcccttcacctgtgaaatgcctttgctttgcatattgtgtgtggatgtgtgtgtgtgtgtgtgtgtgtttgtgtgtatgtgtgtgcttctgtgtgtgcctaatgctctgtctcttggtcactgaagcatccaaataaagaatttccctcatgggccagactacaacttaacagacctagggttttgagccatattgccattggatctagtatgtctgtcttgacccctcacccccaccccattcagacctcagtagtccccagtagtcactttaggagttgggacagagtcgagcaccctgtgaaagtctcccttgagttcaggtgccctgaactcagtacagcctcatcttctcatccaccaccttctcctgcttctcctgtcacatagggcctcatgaaggtctttaaagggtttaagctggggatctgctttatgtttgagagaactgttctggctgttatgtaaaggagtgcagggaggggcaggaaaggagacaaggaggccagtatggacactgtgtccagtatggctttccaggctaatcacttagggcagagacccagccttattcatctctacttcctgatgtccatagtggtgtgtcatgaatttttattgaatgaacaaatgaggtgtatgaggagagatggttttctcctgctcagctcttacacagtgataggtttgttccatgggacttatcataggcctggtgattcttgaaagagcatttttcatgactcaaaaatgagctgagaaggagtgttatggccaggtgcggcgtcatgcacctatagtcccagctgctcaggaggctaaggcagaaagaccattcaagcccaggagttccagcctgaagtatgctgtgatcatgcctgtgaataaccactgcactccagccagggcaacataacaagactctatctaaaaaaaaaaaaaaaaaa

SEQ ID NO: 253 - DNA, 3723 bp, Homo Sapiens
ggacaccacgccagtgctttcctgccttccttccgagatggaaagaggagctcctagctcacttaagccggggtagggctggttctcctttccgagccaaaatcccaggcgatggtgaattatgaacgtgccacaccatgaagctcttgtggcaggtaactgtgcaccaccacacctggaatgccatcctgctcccgttcgtctacctcacggcgcaagtgtggattctgtgtgcagccatcgctgctgccgcctcagccgggccccagaactgcccctccgtctgctcgtgcagtaaccagttcagcaaggtggtgtgcacgcgccggggcctctccgaggtcccgcagggtattccctcgaacacccggtacctcaacctcatggagaacaacatccagatgatccaggccgacaccttccgccacctccaccacctggaggtcctgcagttgggcaggaactccatccggcagattgaggtgggggccttcaacggcctggccagcctcaacaccctggagctgttcgacaactggctgacagtcatccctagcggggcctttgaatacctgtccaagctgcgggagctctggcttcgcaacaaccccatcgaaagcatcccctcttacgccttcaaccgggtgccctccctcatgcgcctggacttgggggagctcaagaagctggagtatatctctgagggagcttttgaggggctgttcaacctcaagtatctgaacttgggcatgtgcaacattaaagacatgcccaatctcacccccctggtggggctggaggagctggagatgtcagggaaccacttccctgagatcaggcctggctccttccatggcctgagctccctcaagaagctctgggtcatgaactcacaggtcagcctgattgagcggaatgcttttgacgggctggcttcacttgtggaactcaacttggcccacaataacctctcttctttgccccatgacctctttaccccgctgaggtacctggtggagttgcatctacaccacaacccttggaactgtgattgtgacattctgtggctagcctggtggcttcgagagtatatacccaccaattccacctgctgtggccgctgtcatgctcccatgcacatgcgaggccgctacctcgtggaggtggaccaggcctccttccagtgctctgcccccttcatcatggacgcacctcgagacctcaacatttctgagggtcggatggcagaacttaagtgtcggactccccctatgtcctccgtgaagtggttgctgcccaatgggacagtgctcagccacgcctcccgccacccaaggatctctgtcctcaacgacggcaccttgaacttttcccacgtgctgctttcagacactggggtgtacacatgcatggtgaccaatgttgcaggcaactccaacgcctcggcctacctcaatgtgagcacggctgagcttaacacctccaactacagcttcttcaccacagtaacagtggagaccacggagatctcgcctgaggacacaacgcgaaagtacaagcctgttcctaccacgtccactggttaccagccggcatataccacctctaccacggtgctcattcagactacccgtgtgcccaagcaggtggcagtacccgcgacagacaccactgacaagatgcagaccagcctggatgaagtcatgaagaccaccaagatcatcattggctgctttgtggcagtgactctgctagctgccgccatgttgattgtcttctataaacttcgtaagcggcaccagcagcggagtacagtcacagccgcccggactgttgagataatccaggtggacgaagacatcccagcagcaacatccgcagcagcaacagcagctccgtccggtgtatcaggtgagggggcagtagtgctgcccacaattcatgaccatattaactacaacacctacaaaccagcacatggggcccactggacagaaaacagcctggggaactctctgcaccccacagtcaccactatctctgaaccttatataattcagacccataccaaggacaaggtacaggaaactcaaatatgactcccctcccccaaaaaacttataaaatgcaatagaatgcacacaaagacagcaacttttgtacagagtggggagagactttttcttgtatatgcttatatattaagtctatgggctggttaaaaaaaacagattatattaaaatttaaagacaaaaagtcaaaacaaaaatattttctaacttgtaagttctatttaaagggggtgggggggaatcttgggaacgttgtggggtacaagccacaagttaacttgctatgctgccagaagggatttctggtataaggttgaaattgctgagataaaataaactaaaacaacaaacatccttaaagaggtagggtgtgggctgctgagggggcaagagggatagactgaatctgtcattttttagaagatgcttcataggacacaggactatccatttctacagacatctttcttaagccgagagctgtctttgcagaattatcttattaaaaaaaaatacaaaaaaaaagcaccatgaatttgtactgtgccaaaatgatagtggcaataatatttttcttcagaggctaaggggaagatagacctgtacatgtattttaagcaggaaaaccaccaaaattcaaacgaacccttaaaggggctgagtctttgtccatgtgcacaagtcttgggggtctgtgcactggacacacatgtgccttgcctgacagaattgcttagaaaggagcagagaaggacgggagctggcgtagctctcagtctaatgctttcacattgcaccagattcctgcagttgggcttaacccactctgcaaggcatgtgtctattcagggtttcccaggaggaggaggcccctgaaggggtgcggcagcaggggggtgggaagggagggtaaagcagagagaatgtattcacaggaggccataaattagcattgtgccatgtccacctgttgttcctggactctgacacatgattgtagacaatgatggcattttatgatttttaaaaaagattttgtttgttttaaggtggagagggaggagaagcctgaattggggagcttgggagtggaagcttttctcatgcttgtgatttggtgactcttctaaatgctgattcattagggattattacagcggatgtcaactggttgtggtgatggggtgggggcagaacatgagtagcaaagaaaagggagagacgaaaagggtacaggctcacgtaaagtaatgaagcctttcccaaccaggatggttcacaaaaaagctgtgagatccacagttacaagtgacacgcatgcacacatggagttccacatggggtactgttgaatggagcacactgatgggaagcttccctctcccaggccccctcaggagaaggtggaagagaaagggtgggcgtgggtggggaaggcagagatctctgttattctggtccatctaatgatgtaacttctttcagttattattttagctttaaaaggaaataaggggttcagatttgaaagggggtggtatgggtgggggaggggaattgccaacaaaagaacactgattgtaatgtgagaaaagtgtatttttgtattttaataaatattgttgaatttttaaaaaaaaaaaaaaaaaa

SEQ ID NO: 254 - DNA, 1450 bp, Homo Sapiens
ataagctgggtcccgatgccgcgagcggaatctcggcgctcccggaagtggcctgaaggcggcgcgccagtcccgagcagtgctcgctcctgctcggggcgctgcggccccgggcgtcgccatgaccagtgagctggacatcttcgtggggaacacgacccttatcgacgaggacgtgtatcgcctctggctcgatggttactcggtgaccgacgcggtggccctgcgggtgcgctcgggaatcctggagcagactggcgccacggcagcggtgctgcagagcgacaccatggaccattaccgcaccttccacatgctcgagcggctgctgcatgcgccgcccaagctactgcaccagctcatcttccagattccgccctcccggcaggcactactcatcgagaggtactatgcctttgatgaggcctttgttcgggaggtgctgggcaagaagctgtccaaaggcaccaagaaagacctggatgacatcagcaccaaaacaggcatcaccctcaagagctgccggagacagtttgacaactttaaacgggtcttcaaggtggtagaggaaatgcggggctccctggtggacaatattcagcaacacttcctcctctctgaccggttggccagggactatgcagccatcgtcttctttgctaacaaccgctttgagacagggaagaaaaaactgcagtatctgagcttcggtgactttgccttctgcgctgagctcatgatccaaaactggacccttggagccgtcggtgaggcccccactgacccagactcacagatggatgacatggacatggacttagacaaggaatttctccaggacttgaaggagctcaaggtgctagtggctgacaaggaccttctggacctgcacaagagcctggtgtgcactgctctccggggaaagctgggcgtcttctctgagatggaagccaacttcaagaacctgtcccgggggctggtgaacgtggccgccaagctgacccacaataaagatgtcagagacctgtttgtggacctcgtggagaagtttgtggaaccctgccgctccgaccactggccactcagcgacgtgcggttcttcctgaatcagtattcagcgtctgtccactccctcgatggcttccgacaccaggccctctgggaccgctacatgggcaccctccgcggctgcctcctgcgcctgtatcatgactgaggtgcctcccaacgctccgcccacgctgacaataaagttgctctgagtttggagactggtcctcgctccggggagcaagtggggggcgtgcagatgtgcctgtgtctgtctctgagcacctggtgtccgtgtacaaggatggatgtgtacagtggctccttgggaactgagacatatctcagggaatggtgtctgtgctcagcccatccaccagaagagtctgctcacaagcca

SEQ ID NO: 255 - DNA, 1411 bp, Homo Sapiens
gcgcgttcctgccccgcacacgcacgcgcgaacccttcagcttcttgttcctttgggccgcgggctgtaccaagtaaacccaggcagcgaggggcaaagcacggcgccccccgcgcgggtctcgtcgacggcccgacgcgcatagcccctcttcccacagcgctacaggactagtccgtctcgccgcgcaagcgccctaggctcttcacgccccctgcgcgctgtcctaccctacttgcgacgcaggcgcagaggctgggcgtgcagccgccgccgcagagccggagcgggggccgccggcgccgcatccctctctacctgccaacatcctgtattagagaacttgtggccggaggtgtggctgtggagagctggccggggagggacgctgctcagctgctgctctgctcctgtctcctgtcccctcccccggtcatgacagagacccgtgagccagctgagactgggggctacgccagcttggaagaagatgatgaagacctttccccaggccccgagcattcctctgattcagaatacactctctcagagccggactccgaagaggaagaagatgaggaggaggaggaagaggagaccactgacgatcctgaatatgatcctggctacaaggtgaagcagcgccttggcgggggccgtggtggcccatcccgccgggccccccgtgcagcccagcccccggcccagccttgccagctctgtggccgctcaccccttggggaggccccaccgggaaccccaccctgccggctctgctgccctgctacagccccccaggaagcaccagcccctgaaggcagggccctcggggaggaagaggaggaaccacctcgggctggggagggccgaccagctgggcgggaggaggaggaggaagaggaggaggagggaacctaccactgtacggaatgtgaggattccttcgacaacctgggggagctgcacgggcacttcatgctgcatgcccggggtgaggtgtaggcagagcccccatacggggagcttggcagaaggggtggggtgggaggagggggctgaggaaattggggttgtgacagtggtcatgggggatggggtactgccggtctgtgttgtcttagaagtagatgtgtgatggccagaataaaagccaaaatctgtatctgtgtgtgttggttcagagtgtgtgtgtgtgtgtgtgtattcccgcccgtgtgtgtgtttgtgtgtgtgtgtgtgtgtgtgtattccccctgggctccttcttggggaaccttggggtcttttgggaaagataacatttactgcgtgcttgtattcgatgaggtttccatgtatttacttacagaccccataatgtaaaggctctaataatagaattttgtttctcactcaaaaaaaaaaaaaaaaa

SEQ ID NO: 256 - DNA, 2147 bp, Homo Sapiens
gcctgcgcagtgcatcaccgcaggcgggcctcgcgggtccgggagcgcggcggagacgatgcctgagatcagagtcacgcccttgggggccggccaggacgtgggccgaagctgcatcctggtctccattgcgggcaagaatgtcatgctggactgtggaatgcacatgggcttcaatgacgaccgacgcttccctgacttctcctacatcacccagaacggccgcctaacagacttcctggactgtgtgatcattagccacttccacctggaccactgcggggcactcccctacttcagcgagatggtgggctacgacgggcccatctacatgactcaccccacccaggccatctgccccatcttgctggaggactaccgcaagatcgccgtagacaagaagggcgaggccaacttcttcacctcccagatgatcaaagactgcatgaagaaggtggtggctgtccacctccaccagacggtccaggtagatgatgagctggagatcaaggcctactatgcaggccacgtgctgggggcagccatgttccagattaaagtgggctcagagtctgtggtctacacgggtgattataacatgaccccagaccgacacttaggagctgcctggattgacaagtgccgccccaacctgctcatcacagagtccacgtacgccacgaccatccgtgactccaagcgctgccgggagcgagacttcctgaagaaagtccacgagaccgtggagcgtggtgggaaggtgctgatacctgtgttcgcgctgggccgcgcccaggagctctgcatcctcctggagaccttctgggagcgcatgaacctgaaggtgcccatctacttctccacggggctgaccgagaaggccaaccactactacaagctgttcatcccctggaccaaccagaagatccgcaagactttcgtgcagaggaacatgtttgagttcaagcacatcaaggccttcgaccgggcttttgctgacaacccaggaccgatggttgtgtttgccacgccaggaatgctgcacgctgggcagtccctgcagatcttccggaaatgggccggaaacgaaaagaacatggtcatcatgcccggctactgcgtgcagggcaccgtcggccacaagatcctcagcgggcagcggaagctcgagatggaggggcggcaggtgctggaggtcaagatgcaggtggagtacatgtcattcagcgcacacgcggacgccaagggcatcatgcagctggtgggccaggcagagccggagagcgtgctgctggtgcatggcgaggccaagaagatggagttcctgaagcagaagatcgagcaggagctccgggtcaactgctacatgccggccaatggcgagacggtgacgctgcccacaagccccagcatccccgtaggcatctcgctggggctgctgaagcgggagatggcgcaggggctgctccctgaggccaagaagcctcggctcctgcacggcaccctgatcatgaaggacagcaacttccggctggtgtcctcagagcaagccctcaaagagctgggtctggctgagcaccagctgcgcttcacctgccgcgtgcacctgcatgacacacgcaaggagcaggagacggcattgcgcgtctacagccacctcaagagcgtcctgaaggaccactgtgtgcagcacctcccagacggctctgtgactgtggagtccgtcctcctccaggccgccgccccttctgaggacccaggcaccaaggtgctgctggtctcctggacctaccaggacgaggagctggggagcttcctcacatctctgctgaagaagggcctcccccaggcccccagctgaggccggcaactcacccagccgccacctctgccctctcccagctggacagaccctgggcctgcacttcaggactgtgggtgccctgggtgaacagaccctgcaggtcccatccctggggacagaggccttgtgtcacctgcctgcccaggcagctgtttgcagctgaagaaacaaactggtctccaggctgtcttgcctttattcctggttagggcaggtggtcctagacagcagtttccagtaaaagctgaacaaaagactacttggtactctcaaaaaaaaaaaa

SEQ ID NO: 257 - DNA, 2967 bp, Homo Sapiens
cttcttgtcagcatctgttagtggaggttgggaagcctctcctccttccccctccctctttgcctccacctggctcctccccatgttcgtccatcacccctcccccctttcccaaggacaatctgcaagaaagcagcggcggaggagagctaagactaaaagagtggatcatgacccatgaagagcaccatgcagccaaaaccctggggattggcaaagccattgctgtcttaacctctggtggagatgcccaaggtatgaatgctgctgtcagggctgtggttcgagttggtatcttcaccggtgcccgtgtcttctttgtccatgagggttatcaaggcctggtggatggtggagatcacatcaaggaagccacctgggagagcgtttcgatgatgcttcagctgggaggcacggtgattggaagtgcccggtgcaaggactttcgggaacgagaaggacgactccgagctgcctacaacctggtgaagcgtgggatcaccaatctctgtgtcattgggggtgatggcagcctcactggggctgacaccttccgttctgagtggagtgacttgttgagtgacctccagaaagcaggtaagatcacagatgaggaggctacgaagtccagctacctgaacattgtgggcctggttgggtcaattgacaatgacttctgtggcaccgatatgaccattggcactgactctgccctgcatcggatcatggaaattgtagatgccatcactaccactgcccagagccaccagaggacatttgtgttagaagtaatgggccgccactgtggatacctggcccttgtcacctctctgtcctgtggggccgactgggtttttattcctgaatgtccaccagatgacgactgggaggaacacctttgtcgccgactcagcgagacaaggacccgtggttctcgtctcaacatcatcattgtggctgagggtgcaattgacaagaatggaaaaccaatcacctcagaagacatcaagaatctggtggttaagcgtctgggatatgacacccgggttactgtcttggggcatgtgcagaggggtgggacgccatcagcctttgacagaattctgggcagcaggatgggtgtggaagcagtgatggcacttttggaggggaccccagataccccagcctgtgtagtgagcctctctggtaaccaggctgtgcgcctgcccctcatggaatgtgtccaggtgaccaaagatgtgaccaaggccatggatgagaagaaatttgacgaagccctgaagctgagaggccggagcttcatgaacaactgggaggtgtacaagcttctagctcatgtcagacccccggtatctaagagtggttcgcacacagtggctgtgatgaacgtgggggctccggctgcaggcatgaatgctgctgttcgctccactgtgaggattggccttatccagggcaaccgagtgctcgttgtccatgatggtttcgagggcctggccaaggggcagatagaggaagctggctggagctatgttgggggctggactggccaaggtggctctaaacttgggactaaaaggactctacccaagaagagctttgaacagatcagtgccaatataactaagtttaacattcagggccttgtcatcattgggggctttgaggcttacacagggggcctggaactgatggagggcaggaagcagtttgatgagctctgcatcccatttgtggtcattcctgctacagtctccaacaatgtccctggctcagacttcagcgttggggctgacacagcactcaatactatctgcacaacctgtgaccgcatcaagcagtcagcagctggcaccaagcgtcgggtgtttatcattgagactatgggtggctactgtggctacctggctaccatggctggactggcagctggggccgatgctgcctacatttttgaggagcccttcaccattcgagacctgcaggcaaatgttgaacatctggtgcaaaagatgaaaacaactgtgaaaaggggcttggtgttaaggaatgaaaagtgcaatgagaactataccactgacttcattttcaacctgtactctgaggaggggaagggcatcttcgacagcaggaagaatgtgcttggtcacatgcagcagggtgggagcccaaccccatttgataggaattttgccactaagatgggcgccaaggctatgaactggatgtctgggaaaatcaaagagagttaccgtaatgggcggatctttgccaatactccagattcgggctgtgttctggggatgcgtaagagggctctggtcttccaaccagtggctgagctgaaggaccagacagattttgagcatcgaatccccaaggaacagtggtggctgaaactgaggcccatcctcaaaatcctagccaagtacgagattgacttggacacttcagaccatgcccacctggagcacatcacccggaagcggtccggggaagctgccgtctaaacctctctggagtgaggggaatagattacctgatcatggtcagctcacaccctaataagtccacatcttctcagtgttttagctgtttttttcattaggtttccttttattctgtaccttgcagccatgaccagttctggccaggagctggaggagcaggcagtgggtgggagctccttttaggtagaatttaacatgacttctgccccagctttatctgtcacacaaggctgggcacctctagtgctactgctagatatcacttactcagttagaattttcctaaaaataagctttatttatttctttgtgataacaaagagtcttggttcctctactacttttactacagtgacaaattgtaactacactaataaatgccaactggtcactgtgaaaaaaaaaaaaaaaaaaaaaaaaaaaaaaaaaaaaaaaaaaaaaaaaaaaaaaaaaa

SEQ ID NO: 258 - DNA, 3684 bp, Homo Sapiens
gagttttgcttccgaggtcaaggcgagtagcatgtgcgggagactcacgttgccggcgaagtgggagagagaaaagtggtaacctggggctgggggccggcgcggcggagctcggagtagtagagcggagtgaagacacgggggaggatagagactggcattcctttgggccgggggattggcgggagtcgtgctgggtgctctcgccgtgttgaggtcccagtgaggggaaggagaagcggaagagggtctctagtcggggcctagggcaaagggactacaaaaaggatgcagatgactatagaaatgaggacgacgaggagatgctgtggaggagcagtagaggtgagaagatgatgcaaagaaactgtgtcagtgaggaactgtatagagggtcatagaggtgaggtggcggagagaaactaactaacggaccatagaggtgggggagccattgtagaaggacgtggacgcgaaagggtcgtgtagatgggcatatgtgtgaagcagcaacgtagaggggctgaagaggagaaattcatggagagaaagaatgcacctagagtgagctctgcagagtgctgcgtgggatatccctagagtttggtctagtgaaggcacgctaaccaggcacctaaggcatttcaagtagtgacttcccacatttggctaggaatgtgggtcctcctccgaagtgggtaccccctccgtatcttgttacccctgcgtggggagtggatgggtcggaggggcctgccccgaaacttggccccaggccctcctcgcagacgttacaggaaggagactctccaagccttggatatgccagtgttgcctgtaactgcaactgaaatccgccagtatttgcgggggcatgggatccccttccaggatggtcacagttgcctgcgggcactgagcccctttgcagagtcttcacagctcaaaggccagactggtgttaccacttccttcagcctcttcattgacaagaccacaggccactttctctgcatgaccagcctagcagaagggagctgggaagacttccaggccagcgtggaggggcgaggggatggggccagggaggggtttctgcttagcaaggcaccagaatttgaggacagcgaggaggtccggaggatctggaaccgagcaatacctctctgggagctgcctgatcaggaggaggttcagctggctgatacaatgtttggccttaccaaggttacagatgacacactcaagcgtttcagtgtgcgatatctgcgacctgctcgcagtcttgtcttcccttggttctcccctgggggctcaggattacgaggcctgaagctcctagaggctaaatgccagggggatggagtgagctacgaggaaaccactattccccgacccagcgcctaccacaatctgtttggattaccactgattagtcgtcgagatgctgaggtggtactgacgagtcgtgagcttgacagcctggccttgaaccagtccacggggctgcctacccttactctaccccgaggaacgacctgcttaccccctgccttactcccttacctggaacagttccggcggattgtattctggttgggggatgaccttcggtcctgggaagccgccaagttgtttgcacgaaaactgaaccccaaacgatgcttcttggtgcgaccaggagaccagcaaccccgtcccctggaggccctgaacggaggcttcaatctttctcgtattcttcgtaccgccctgcctgcctggcacaagtccatcgtatctttccggcagcttcgggaggaggtgctaggagaactgtcaaatgtggagcaagcagctggcctccgctggagccgctttccagacctcaatcgtatcttgaagggacatcgaaagggcgagctgacggtcttcacagggccaacaggcagtggaaagacgacattcatcagtgagtatgccctggatttgtgttcccagggggtgaacacactgtggggtagcttcgagatcagcaatgtgagactagcccgggtcatgctgacacagtttgccgaggggcggctggaagatcaactggacaaatatgatcactgggctgaccgctttgaggacctgcccctctatttcatgactttccatggacagcaaagcatcaggactgtaatagatacaatgcaacatgcagtctacgtctatgacatttgtcatgtgatcatcgacaacctgcagttcatgatgggtcacgagcagctgtccacagacaggatcgcagctcaagactacatcatcggggtctttcggaagtttgcaacagacaataactgccatgtgacactggtcattcacccccggaaagaggatgatgacaaggaactgcagacagcgtccatttttggctcagccaaagtgagtggcctttagcggagctcaagctttggaaaatagagtgggcaagccaggaagcagacaatgttctgatcctgcaggacaggaagctggtaaccgggccagggaaacggtatctgcaggtgtccaagaaccgctttgatggagatgtaggtgtcttcccgcttgagttcaacaagaactccctcaccttctccattccaccaaagaacaaggcccggctcaagaagatcaaggatgacactggaccagtggccaaaaagccctcttctggcaaaaagggggctacgacacagaactctgagatttgctcaggccaggcccccactcccgaccagccagacacctccaagcgttcaaagtgaaggccgtgcagagctggtcactgaaatgagcctgataggataggctggagcataaaactctgcaagggctcctctatcctgtggtcctgagctgtgtgcccttctcagtctgaggggcctaacctagagcaggtttccatagtgagaaaattcaatgtagcagactactgagaaactactgtgttgctcaggctttgtttgaggtcctgtatatacagcactgaaaagagagataaagtccctgcctgcatgcattctggcggaagagacaagcaagcaatgaacaaattagcagaaaacctagttttagtgaaaaatgctgtaaagaaaatagaaatgcgatagagtgctggcaggctagtgtagataagtggtctgaaaaggtgtctctgagccgagggcatgtgagctggggcctaaacaactagaaggagagagccacgtgaacatccggcgaaggggacccaggcagagagaaaaggaaatccaagccctgaggtaggaatgagcaggtcagattcaaggcagtgaggtcaggccgcatgaacctggaggggaatcggggacttcatgcgaaactccagcctaggctttcaaagtcaaagggtgatacagtgggtaccaagctcctctgctccccactttgtagagcctagcatgaggtggcatgtactagaattggatcctaggtgcttagccctgcaatatcagggcctcactggtgggagctgcctcgggctgggttgcttggtcatagagccatagaaggaagctgtcagcccggagtgcctgccacctagacactgatgccattgtgtgctgcctcaagactgctggagtcaggacattttatagagccttttccagttttactaaaaaatttttccattgaaaaaaaaaaaaaaaaaaa

SEQ ID NO: 259 - DNA, 1754 bp, Homo Sapiens
tggagcagcggggcctggcacacagtaggcgttctataaatgtgtcacaagaatggcttccctcaggaaggcggcattaccgctgcctttctgcagaaaaggaaactaaggctcagcaagaaccaccgcccagccagagccaaggtcacagagcacgtccgtggcacgcgtccaggtcgtgccacagcagggccggcggcttcgacgcgggcagccgggtcccttttctttgacagatggggaaaccgaggcccggccggctgccggggctcctcgcacctaccccagcaactcaaattcaccacctcggactcctgcgaccgcatcaaagacgaatttcagctactgcaagctcagtaccacagcctcaagctcgaatgtgacaagttggccagtgagaagtcagagatgcagcgtcactatgtgatgtactacgagatgtcctacggcttgaacatcgagatgcacaaacaggctgagatcgtcaaaaggctgaacgggatttgtgcccaggtcctgccctacctctcccaagagcaccagcagcaggtcttgggagccattgagagggccaagcaggtcaccgctcccgagctgaactctatcatccgacagcagctccaagcccaccagctgtcccagctgcaggccctggccctgcccttgaccccactacccgtggggctgcagccgccttcgctgccggcggtcagcgcaggcaccggcctcctctcgctgtccgcgctgggttcccaggcccacctctccaaggaagacaagaacgggcacgatggtgacacccaccaggaggatgatggcgagaagtcggattagcagggggccgggacagggaggttgggaggggggacagaggggagacagaggcacggagagaaaggaatgtttagcacaagacacagcggagctcgggattggctaaactcccatagtatttatggtggccgccggcgggggccccagcccagcttgcaggccacctctagctttcttcctaccccattcccggcttccctcctcctcccctgcagcctggttaggtggatacctgccctgacatgtgaggcaagctaaggcctggagggtcagatgggagaccaggtcccaagggagcaagacctcgcgaagcgcagcagccccggcccttcccccgttttgaacatgtgtaaccgacagtctgcctgggccacagccctctcaccctggtactgcatgcacgcaatgctagctgcccctttcccgtcctgggcaccccgagtctcccccgaccccgggtcccaggtatgctcccacctccacctgccccactcaccacctctgctagttccagacacctccacgcccacctggtcctctcccatcgcccacaaaagggggggcacgagggacgagcttagctgagctgggaggagcagggtgagggtgggcgacccaggattccccctccccttcccaaataaagatgagggtactaaagttgtcttggtttttattttattattatttttttctttttccagtatactagcttgtcttttaagaaaggggatattaaaaaaaaaaaaagacaaaagtgtttttaaaaaaaagcaacacccacacctgtgtctgtatatagtcagcttatctcgtgttcaatcgtctgatctctacagagagaagtggaaaatgctgtatcaagggtgggcttagctgtgcctttccaataaagatgtgagaagcttcaaaaaaaaaaa

SEQ ID NO: 260 - DNA, 1659 bp, Homo Sapiens
gctgggggcgggtcctgcggcaccgcccgggaagctgcgcgagggtcgacagcctccgccacatcctccacctctcttggtccagcgagcgttgccgggccagggtcaagcggagggctccgacggcgcggacggagcgaagcgccgagccatggcgcaccaaacgggcatccacgccacggaagagctgaaggaattctttgccaaggcacgggctggctctgtgcggctcatcaaggttgtgattgaggacgagcagctcgtgctgggtgcctcgcaggagccagtaggccgctgggatcaggactatgacagggccgtgctgccactgctggacgcccagcagccctgctacctgctctaccgcctcgactcacagaatgctcagggcttcgaatggctcttcctcgcctggtcgcctgataactcccccgtgcggctgaagatgctgtacgcggccacgcgggccacagtgaaaaaggagtttggaggtggccacatcaaggatgagctcttcgggactgtgaaggatgacctctcttttgctgggtaccagaaacacctgtcgtcctgtgcggcacctgccccgctgacctcggctgagagagagctccagcagatccgcattaacgaggtgaagacagagatcagtgtggaaagcaagcaccagaccctgcagggcctcgccttccccctgcagcctgaggcccagcgggcactccagcagctcaagcagaaaatggtcaactacatccagatgaagctggacctagagcgggaaaccattgagctggtgcacacagagcccacggatgtggcccagctgccctcccgggtgccccgagatgctgcccgctaccacttcttcctctacaagcacacccatgagggcgacccccttgagtctgtagtgttcatctactccatgccggggtacaagtgcagcatcaaggagcgaatgctctactccagctgcaagagccgcctcctcgactccgtggagcaggacttccatctggagatcgccaagaaaattgagattggcgatggggcagagctgacggcagagttcctctacgacgaggtgcaccccaagcaacacgccttcaagcaggccttcgccaagcccaagggcccagggggcaagcggggccataagcgcctcatccgcggcccgggtgaaaatggggatgacagctaggaggctggagcagggccggccacgtgtggactgtggggctgcccaccttccgctccctgccaccatcctccttcctgggctccaggaaagtgtttctgggaggtcaggagggctggcagctgaacgcacttgcagcgtccgagggccaccgggctggcattttgtgacccttccctgttgctgtccctgcatctcgtctgtgtgcccagggtgtccggggaccctgcctggctggcttaagggggctgggtcaggggcctggcatgaacctggcctcccggggagctgagactagggtcccagcacagcccagaaacctttggccacaagaagtggggtcagtcagggctggggcaggggtcactgcagtttgggatggttgaatgctgtattttctaaagaataaaatatttttaaatcaagaaaaaaaaaaaaaaaaaaaaaaaaaaaaaaaaaaa

SEQ ID NO: 261 - DNA, 7184 bp, Homo Sapiens
cggcgcggcgggagcagagatctgcggccgtttgcagcttgcggtagggaggcgtggtggtctgaagcctccgagcagccgcggccatggcggatgtaaccgcccgtagtctgcaatacgagtacaaggcgaactcgaatcttgtgctccaagctgaccgttctctcattgaccggacccgccgggatgaacccacaggagaggtgctgtcccttgttgggaagctggagggcacccgtatgggagacaaggctcaacggaccaaaccgcagatgcaggaggaaagaagagccaagcgaagaaagcgtgatgaggaccggcatgacatcaacaagatgaagggttatactctgctgtcggagggcattgatgagatggtgggcatcatctacaagcccaaaactaaagagactcgggagacctatgaggtgctactcagcttcatccaggctgctcttggggaccagccacgtgatatcctttgtggggcagctgatgaagttctagctgttctaaagaatgaaaagctgcgggacaaggaaaggcgaaaggagattgacctgctgctgggtcaaacagatgataccagataccatgtgctagtgaacctgggcaaaaagatcacagactatggtggagataaggaaatccaaaatatggatgacaacattgatgagacatacggtgtgaatgtgcagtttgagtctgatgaggaggaaggtgatgaagacgtatacggggaggttcgagaagaggcatctgatgatgacatggaaggggacgaggctgtcgtgcgctgcaccctctcggctaatctcgtagcctcaggtgaactgatgagttccaagaagaaggatttgcaccctcgggatattgatgcattttggctgcagcggcagctcagtcgtttctatgatgatgccatcgtgtcgcagaagaaggcagatgaagtattggagattttgaagacggccagtgatgatcgggaatgtgaaaatcagctggttctgctgcttggtttcaacacctttgatttcattaaagtgttgcggcagcacaggatgatgattttatactgtaccttgctggccagtgcacaaagtgaagctgaaaaggaaaggattatgggaaagatggaagctgacccagagctatccaagttcctctaccagcttcatgaaaccgagaaggaggatctgatccgagaggaaaggtcccggagagagcgagtgcgtcagtctcgaatggacacagatctggaaaccatggatctcgaccagggtggagaggcactggctccacggcaggttctggacttggaggacctggtttttacccaagggagccactttatggccaataaacgctgtcagcttcctgatggatccttccgtcgccagcgtaagggctatgaagaggtgcatgtgcctgctctgaagcccaagccctttggctcagaagaacaactgcttccagtggaaaagctgccaaagtatgcccaggctgggtttgagggcttcaaaacactgaatcggatccagagtaagctctaccgtgctgcccttgagacggatgagaatctgctgctgtgtgctcctactggtgctgggaagaccaacgtggccctgatgtgcatgctccgagagattgggaaacacataaacatggacggcaccatcaatgtggatgacttcaagattatctacattgcccccatgcgctccttggtgcaggagatggtgggcagctttggaaagcgcctggccacttatggcatcactgttgctgaactgactggggaccaccagctgtgcaaagaagagatcagtgccactcagatcatcgtctgcacccccgagaagtgggacatcatcacccgcaagggtggtgagcgcacctacacccagctggtgcggctcatcattctggatgagattcatcttctccacgatgacagaggtcctgtcttagaagctttagtggccagggccatccgaaacattgagatgacccaagaggatgtccgactcattggtctcagtgccaccctacccaactatgaagatgtagccacctttctacgtgttgaccctgccaagggtctcttttactttgacaacagcttccgtccagtgcctctggaacagacatatgtgggtatcacagagaaaaaagctatcaagcgtttccagatcatgaatgaaatcgtctatgaaaaaatcatggaacatgctggaaaaaatcaggtgctggtgtttgtccactcccggaaggagactggaaagacagccagggccatccgggacatgtgcctagaaaaggacactctgggtctgtttctgagggagggctcagcctccacagaagtcctgcgaacagaagctgagcagtgcaagaacctagagctgaaggatcttctgccttatggctttgctattcatcacgcaggcatgaccagggttgaccgaacactcgtggaggatctttttgctgataaacatattcaggttttagtttccacagcaactctagcttggggtgtgaatctccctgcacatacagtcatcatcaaaggcacccaggtgtacagtccagagaaggggcgttggacagaactgggagcactggacattctgcagatgctgggacgtgccggaagaccccagtatgacaccaagggtgaaggcatactcatcacatctcatggggagctacagtactacctgtccctcctcaatcaacaacttcctattgaaagccagatggtttcaaagcttcctgacatgctcaatgcagaaatcgtgctaggaaatgtccagaatgccaaggatgcggtgaactggctgggctatgcctacctctatatccgaatgctgcgatccccaaccctctatggcatctctcatgatgacctcaagggagatcccctgctggaccagcgccgactagatctggttcatacagctgccctgatgctggacaagaacaatctggtcaagtacgacaagaagacgggcaacttccaggtgacagaactgggccgtatagccagccactactacatcaccaatgatacagtgcagacttacaaccagctgctgaagcccaccctgagtgagattgagcttttcagggtcttctcattgtcctctgagttcaagaacatcacagtgagagaggaggagaagctggagctgcagaagttgctggagagggtgcctatccctgtaaaggagagcattgaggaacccagtgctaagatcaacgttcttctgcaagccttcatctcacagctgaaattggagggctttgcactgatggctgacatggtgtatgtcacacagtcggctggccggttgatgcgagcgatatttgaaattgtcctgaaccgaggttgggcacagcttacagacaagaccctgaacctctgcaagatgatcgacaaacgcatgtggcagtccatgtgtcctctgcgccagttccggaaactccctgaggaagtagtgaagaagattgagaagaagaatttcccctttgagcgtctgtacgacctgaatcataatgagattggggagcttatccgcatgccaaagatggggaagaccatccacaaatatgtccatctgtttcccaagttggagttgtcagtgcacctgcagcctatcacacgctccaccctgaaggtggagctgaccatcacgccagacttccagtgggatgaaaaggtgcatggttcatccgaggctttttggattctggtggaggatgtggacagcgaggtgattctgcaccatgagtattttctcctcaaggccaagtacgcccaggacgagcacctcattacattcttcgtgcctgtctttgaaccgctgccccctcagtacttcatccgagtggtgtctgaccgctggctctcttgtgagacccagctgcctgtctccttccggcacctgatcttgccggagaagtacccccctccaaccgaacttttggacctgcagcccttgcccgtgtctgctctgagaaacagtgcctttgagagtctttaccaagataaatttcctttcttcaatcccatccagacccaggtgtttaacactgtatacaacagtgacgacaacgtgtttgtgggggcccccacgggcagcgggaagactatttgtgcagagtttgccatcctgcgaatgctgctgcagagctcggaggggcgctgtgtgtacatcacccccatggaggccctggcagagcaggtatacatggactggtacgagaagttccaggacaggctcaacaagaaggtggtactcctgacaggcgagaccagcacagacctgaagctgctgggcaaagggaacattatcatcagcacccctgagaagtgggacatactttcccggcgatggaagcagcgcaagaacgtgcagaacatcaacctcttcgtggtggatgaggtccaccttatcgggggcgagaatgggcctgtcttagaagtgatctgctcccgaatgcgctacatctcctcccagattgagcggcccattcgcattgtggcactcagctcttcgctctccaatgccaaggatgtggcccactggctgggctgcagtgccacctccaccttcaacttccatcccaatgtgcgtcccgtccccttggagctgcacatccagggcttcaacatcagccatacacaaacccgcctgctctccatggccaagcctgtgtaccatgctatcaccaagcactcgcccaagaagcctgtcattgtctttgtgccgtctcgcaagcagacccgcctcactgccattgacatcctcaccacctgtgcagcagacatccaacggcagaggttcttgcactgcaccgagaaggatctgattccgtacctggagaagctaagtgacagcacgctcaaggaaacgctgctaaatggggtgggctacctgcatgaggggctcagccccatggagcgacgcctggtggagcagctcttcagctcaggggctatccaggtggtggtggcttctcggagtctctgctggggcatgaacgtggctgcccacctggtaatcatcatggatacccagtactacaatggcaagatccacgcctatgtggattaccccatctatgacgtgcttcagatggtgggccacgccaaccgccctttgcaggacgatgaggggcgctgtgtcatcatgtgtcagggctccaagaaggatttcttcaagaagttcttatatgagccattgccagtagaatctcacctggaccactgtatgcatgaccacttcaatgctgagatcgtcaccaagaccattgagaacaagcaggatgctgtggactacctcacctggacctttctgtaccgccgcatgacacagaaccccaattactacaacctgcagggcatctcccatcgtcacttgtcggaccacttgtcagagctggtggagcagaccctgagtgacctggagcagtccaagtgcatcagcatcgaggacgagatggacgtggcgcctctgaacctaggcatgatcgccgcctactattacatcaactacaccaccattgagctcttcagcatgtccctcaatgccaagaccaaggtgcgagggcttatcgagatcatctccaatgcagcagagtatgagaacattcccatccggcaccatgaagacaatctcctgaggcagttggctcagaaggtcccccacaagctgaataaccctaagttcaatgatccgcacgtcaagaccaacctgctcctgcaggctcacttgtctcgcatgcagctgagtgctgagttgcagtcagatacggaggaaatccttagtaaggcaatccggctcatccaggcctgcgtggatgtcctttccagcaatgggtggctcagccctgctctggcagctatggaactggcccagatggtcacccaagccatgtggtccaaggactcatacctgaagcagctgccacacttcacctctgagcatatcaaacgttgcacagacaagggagtggagagtgttttcgacatcatggagatggaggatgaagaacggaacgcgttgcttcagctgactgacagccagattgcagatgtggctcgcttttgtaaccgctaccctaatatcgaactatcttatgaggtggtagataaggacagcatccgcagtggcgggccagttgtggtgctggtgcagctggagcgagaggaggaagtcacaggccctgtcattgcgcctctcttcccgcagaaacgtgaagagggctggtgggtggtgattggagatgccaagtccaatagcctcatctccatcaagaggctgaccttgcagcagaaggccaaggtgaagttggactttgtggccccagccactggtgcccacaactacactctgtacttcatgagtgacgcttacatgggatgtgaccaggagtacaaattcagcgtggatgtgaaagaagctgagacagacagtgattcagattgagtcctgaggcatttacttttgggtaaaggagagttgagcctgaattaggaatgtgtacattgtaggaatcctggttgtggggaccaggtctgtgggcctcaggtctggccagccagggctggtgctgtccccgcctacctccacttcctttcccttgctcactctggatccagtgacagcaggtgtcatgggtcaagcataaatcatatatagcattttcaggcatgttcctggtagttcttttgagtctgacattctaataaaataatttgtagaaaccatttgtctttgtagtgattccaaattaaaagttttctttctccaacctgagggcacggccaaaaagatctggttattttttagccaggaacgtgcttgttaatgagtatgtctggaggacagacctgctcattaggtgtgctgtcccctgtagcctcgtgagtcagcccagaggagggtacatgcgactgtggcctggcctcagtggtacccacacatcagcactaccacaagaaccaacactgagcctcggaagctagatcacaggttaggggtttctctagatgggggttctgaaatttgcagtgtctgctcctgggaggcagcaccagaaagggcactgaaatgtactagctggatgtgacccagtcttaataaacaggttttctaatccagaaaaaaaaaaaa

SEQ ID NO: 262 - DNA, 6030 bp, Homo Sapiens
gcccctgcgcgccgcccgagccggtcccgctgagccgcgggccccgtgccctgcgatggctcggctggtgcagcgcggcgccaggtgccagccgtcctcccgctgagacgcgcccgagtggggacccgctgggcctcggggctcgcagccttcgcctccccgccgcgcccgctccctttctggggactccgccgctgtttctggggacgaggggacaggggacccagacaaagcccactttgtgcagggagttggccgcaggcggggaatgtgcgcgtcggcgcgcgccccctccccgctcccggccagctgcgagtcttggctcccggacttgtctcgtcgcgtcggagaaatcgccccccagcgccgctctcccgcccgggggtcttggttccgagctcgcgcggccgggagtcgcctcggtcttccttggggcgcgcgcagatgtgagcgtgcgagagttgtgtaggggattttgttccctccgaaactgagacccagggcgcccagtgggcacccgtgccttgactctgtcctttctgcagccgctggtccgagctgtctggcctcagtttccctccgacttttctccgctctgccagccctcactgctgcccgtcattgttctcgcagttagatgggggtgctttgtgacggctgccaagttggggtgtgttctctttattccgtttttcaaacagaacaaggcctccaaggctgaccccagacaacccaccccctcggaccctaattcaccttattgcactgattttttttatcaagtcgtattttattgtacaggagccacgccctgatttcttaaaggcgccttgcactctggccatgtgttatctctgcagccggtgtgtgggaggcctcttgtgagccagttgttttcccgcctccaccacccccctcgaagatttagggatgccaggggggaagaaggtggctgggggtggcagcagcggtgccactccaacgtccgctgcggccaccgccccctctggggtcaggcgtttggagaccagcgaaggaacctcagcccagagagatgaggagccagaagaggaaggggaagaggacctgcgagacggaggcgtccccttctttgtcaaccggggtgggctacctgtggatgaggccacctgggaaaggatgtggaaacacgtggccaagatccaccccgatggagagaaggtggcgcaacggatccgtggggccacagacctgcccaagatccccataccgagtgtgcctacgttccagccgtctacacctgtccctgagcgcctggaagctgtgcagcgctacatcagagagctgcagtacaatcacacagggacacagttctttgaaattaagaagagcagacctctgacagggctgatggacctggccaaggaaatgaccaaagaggccctgccaatcaaatgcctggaagccgtgatcctgggaatttacctcaccaacagcatgcccaccctggagcgcttccccatcagcttcaagacctacttctcagggaactacttccgccacatcgtgctgggggtgaacttcgcgggccgctacggtgcgctgggcatgagtcggcgcgaggacctgatgtacaagccgcccgccttccgcacgctcagcgagctcgtgctggacttcgaggccgcctacggccgctgctggcacgtgctcaagaaggtgaagctgggccagagcgtgtcacacgacccgcacagcgtggagcagatcgagtggaagcactcggtgctggacgtggagcgcctgggccgcgatgacttccgcaaggagctggagcgccacgcccgcgacatgcggctcaagattggcaaagggacgggccctccctctcccaccaaggaccggaagaaggatgtttcttccccgcagcgggcccagtccagcccccaccgcaggaacagccgcagtgaaagacggccctcgggtgacaagaagacttccgagcccaaagccatgccagaccttaacgggtaccagatccgggtctgaggcggatgccagcaccccaggccccacccactcttgggggccaggatccacctgctggaaccagccttatgcatggggaaggcggggctggtgacaaggcagggcaagaggctgcaggaagagtgtgttccagctcagccccccaagctgctctcgctcccactgagccaagccccctaactttgggcctagaggccgttagtattttatttggagtttttaactctacaactgaagtttaaggtatttggggaaaacttagtccaaatggatctgctgatggtgggaaggccagtgcttaacaaatccatgtgtcatggggccaggtgagggaaactgctggttctgctggtgcctctgcccctggcttctctctgggagttgggtgcatcttatcagtgggaaatctcccagccttaccaggcctgtgatggggggtgggggtggggtggagatgtttctccagttctgcctgccctggcagaatcttgacccagggaaagggaagcagggtaggagtccttctgagaaaggtctgtgtagcccattaaccaggagcttggcacaggccacatctgccccaagagcatgagctcgtggctcaggagagccttcaggcccttgaggcccccatgggcagtgctgtgtgggcagaggaggggtgatatgagagcgagcccagggaaggacctctgggcaaaaagttcccaggccctaactgcgtctacttgctcagtcccagctctgcctgttgctctagcccacaggctccctgcggagggtctgggcttggcggaggacccagaatggcactgaggccagcatggctgtgggagttgagcaaaccctgggtgccagtccaggagctgtggctggacatggggtgatggggcgggatgcttgggcctgggtctctccgccagcagtgccaggagcccttgctggggaaatcaagaccagactaggatgcttctgccccaggcctgccttccattctttaacagcccatcttggcttggggttgcaatgatggctgggccagtcacttgtggcagggcatcagggccctggcagggaagaacctaggcacctggggttgtccccagcctgcccgtcagcatgagatacccagtgggaaagtgagaggatgcggagaggttggcagagccaggggtaggttctggaggctcaagcaacaaggaggtgcaggtaaagggtgcagtgcagccactgagggacagctgggaactgggggatgcaagtgagaaagggatgtgggggagagttcaggatcaggctgcttgaggagtaatgggttacctacagcagagacgagatggctgtttgtcaggaggcggtagaaaggtagaaaggattcagattgtggaagggtaaacggatgagatgaccattaaggttttgttttactgagaggctgtaagtctgccagggacagctgtcagtaaggctgcagaagggctggggggctacacaaggaagagcagaactagggttgtaagctcaaatgacgagcaaacggtgagaaggaggcctgaagggctgtgtggggactatggctacctgaagagggcacaccctgttaaaggggccacagctgctcagctgttcttacagtgccggccctgtgttgccagattgtctgctttgtcagaggccagaattctgactttttatgtgaaataggatttttaaatgctggtgatcacttaaaaaaaacttaaaaacccaatactggcaaaagaggatgccagtttgcaatccctgaagtagagagagctcgtgctggggagaagtccaccaagatgctttgaggcgggctgtagcaaagtcctgtttctcagagctgggctgggctggggtaggatccttgcagctgaggaggaggaaaagccactgagtctcctcccagagcgggacaaaccagaggccctttgcagttgctgggtcaccagcgggggtggcgcatggagtacagacagtgtagctcttggcctgccagggagacggatggtgcctttgaagcaaagaggaagggaaggcagaaccagggatgcctttgctgatgagagtgcctgtcagggaaggcgccacaggctggcagctcttcaaaccagcagcgcttgacccagagccagatccagcatggcctggccagaggcaccctgggaggccagctggtcagtcccttgcctccccaagttccccctggggtcaatgagccctgggaggatgcctaacctaactccagccagactaataggggcatggtgacccttgactcaccatcccatcccagctttcagggagtgggggtagtgtggtctccatgttcctactatgcctaagaagagatggctcaccttgggaggtgccaggctgaaactaggtcctttccgggtctggatgctgccgctcaggagcaggggcgtggcctcagctgcctctgggagcttcccgggaatgacagggtttgaggggagtagatatgagagggagccgctcctggttctggagtcttaggaggttccaacttgcaggatcctttcccagagccctccatggagaaaacagcaaaatgaagcccttacctgcttgctgtctgcaagggagggagccgagccccagctgataatcccccagcactcacccttcctgagctgagacttcggggctgtggagaccagcacaggacatagtggtgctttttaaatttatttttaactgtttctcatatgtagcaacccctcctcccctcctgggcatgtttacacaggctctgctctgggggctggcctggctgtgaggtttctggggaggcagagaggcagggactttggggccttagtcaccatccatggtatcacctcatctcacttcctgtgagggacagggcctggctgatgtgatcccagctccccccagttcaggactgtctttcagctcctttgcccctggaggtgggggctgctggctgaggaggggtcaaggtgagttcaagaaagctacctgtggaaaatggaccaggttgggggggtgattgcaaagtctccccaaagcctggctcctcatgctcagtgccaggggcagaacactggggagccaggtatagagagccttcctgtcataactgccagtcctcttcctccaaggcctctgcatattctcatgttcccctcacccatcatgccagccacccctatccctcttctagcagggccaagatggggacagcagcagccctctggccttgggatgtgatgataaagcaagcctagggccagggtttggggagcagagagagccaagaagttgaccacgtgtgatttccagcccttcccactgggacttgacttcccaggtcaaggagtccgtctcattctggctggtcgagtgaccagaggcctgtgtgaatgtgtgcacctgcttttcctgcctggaatgttttctggctcagctgcagcaacatctgtgagcccagtgtctgccctgtgtccctgggctcgctccaagtgcaggaacatacatgcagggcccaacatgatgatggtgtgaagggcaggaaacagtcctctgaaggagtggggaggtgggcagtctgcccccgccaggtaccatcgcctcctgccagcttccttagaccaggcagggctgccatggtgctagctgcaagtccatcagtattgaccgtctcgctccatcttggtcctccggagtcccaagtttccttttcatcaaatctgacaagagagaagaaacatgggtgtgcttggcccacagggcctggtggtgatggacctccccgctccctcaagctctggatggctgcagtgttgtactagactttgttcaggctgttctcatctcagtattgccccttcctttcactttcacacttcatctcattcctgttgtcactttccccgaaacgaataaagtctccccagctcctgctgtgtaggctgggcagaaaccacaacacgt

SEQ ID NO: 263 - DNA, 4006 bp, Homo Sapiens
aagtgggcgggggaaggcgcgagagcgagcgcgagagggaaaaggagggagggggtggggaagagggaatcttatatcacgtgacaggggcggcgcggcccggggtgtcagtgtggaggagactgagtattctaccttgtaaatactgttatttgtatatactgtaaatgatgacatcggtgggcactaaccgagcccggggaaactgggaacaacctcaaaaccaaaaccagacacagcacaagcagcggccacaggccactgcagaacaaattagacttgcacagatgatttcggaccataatgatgctgactttgaggagaaggtgaaacaattgattgatattacaggcaagaaccaggatgaatgtgtgattgctttgcatgactgcaatggagatgtcaacagagctatcaatgttcttctggaaggaaacccagacacgcattcctgggagatggtcgggaagaagaagggagtctcaggccagaaggatggtggccagacggaatccaatgaggaaggcaaagaaaatcgagaccgggacagagactatagtcggcgacgtggtgggccaccaagacgggggagaggtgccagccgtggacgagagtttcgaggtcaggaaaatggattggatggcaccaagagtggagggccttctggaagaggaacagaaagaggcagaaggggccgtggccgaggcagaggtggctctggtaggcgaggaggaaggttttctgctcaaggaatgggaacctttaacccagctgattatgcagagccagccaatactgatgataactatggcaatagcagcggcaatacgtggaacaacactggccactttgaaccagatgatgggacgagtgcatggaggactgcaacagaggagtgggggactgaagattggaatgaagatctttctgagaccaagatcttcactgcctctaatgtgtcttcagtgcctctgcctgcggagaatgtgacaatcactgctggtcagagaattgaccttgctgttctgctggggaagacaccatctacaatggagaatgattcatctaatctggatccgtctcaggctccttctctggcccagcctctggtgttcagtaattcgaagcagactgccatatcacagcctgcttcagggaacacattttctcatcacagtatggtgagcatgttagggaaaggatttggtgatgtcggtgaagctaaaggcggcagtactacaggctcccagttcttggagcaattcaagactgcccaagccctggctcagttggcagctcagcattctcagtctggaagcaccaccacctcctcttgggacatgggctcgacgacacaatccccatcactggtgcagtatgatttgaagaacccaagtgattcagcagtgcacagcccctttacaaagcgccaggcttttaccccatcttcaaccatgatggaggtgttccttcaggagaagtcacctgcagtggctacctccacagctgcacctccacctccgtcttctcctctgccaagcaaatccacatcggctccacagatgtcgcctggatcttcagacaaccagtcctctagccctcagccggctcagcagaaactgaaacagcagaagaaaaaagcctccttgacttctaagattcctgctctggctgtggagatgcctggctcagcagatatctcagggctaaacctgcagtttggggcattgcagtttgggtcagagcctgtcctttctgattatgagtccacccccaccacgagcgcctcttcaagccaggctccaagtagcctgtataccagcacggccagtgaatcatcctctacaatttcatctaaccagagtcaggagtctggttatcagagcggcccaattcagtcgacaacctatacctcccaaaataatgctcagggccctctttatgaacagagatccacacagactcggcggtaccccagctccatctcttcatcaccccaaaaggacctgactcaggcaaagaatggcttcagttctgtgcaggccacgcagttacagaccacacaatctgttgaaggtgctacaggctctgcagtgaaatctgattcaccttccacttctagcatcccccctctcaatgaaacggtatctgcagcttccttactgacgacaaccaatcagcattcatcctccttgggtggcttgagccacagtgaggagattccaaatactaccaccacacaacacagcagcacgttatctacgcagcagaataccctttcatcatcaacatcttctgggcgcacttcgacatccactcttttgcacacaagtgtggagagtgaggcgaatctccattcttcctccagcactttttccaccacatccagcacagtctctgcacctcccccagtggtcagtgtctcctccagtctcaatagtggcagtagcctgggcctcagcctaggcagcaactccactgtcacagcctcgactcgaagctcagttgctacgacttcaggaaaagctcctcccaacctccctcctggggtcccgccgttgttgcctaatccgtatattatggctccagggctgttacatgcctacccgccacaagtatatggttatgatgacttgcagatgcttcagacaagatttccattggattactacagcatcccatttcccacacccactactccgctgactgggagggatggtagcctggccagcaacccttattctggtgacctcacaaagttcggccgtggggatgcctcctccccagccccggccacaaccttggcccaaccccaacagaaccagacgcagactcaccataccacgcagcagacattcctgaacccggcgctgcctcctggctacagttacaccagcctgccatactatacaggggtcccgggcctccccagcaccttccagtatgggcctgctgtgttccctgtggctcctacctcttccaagcagcatggtgtgaatgtcagtgtgaatgcatcggccacccctttccaacagccgagtggatatgggtctcatggatacaacactggtgtttcagtcacctccagtaacacgggcgtgccagatatctcgggttctgtgtactccaaaacccagcagtcctttgagaaacaaggttttcattccggtactcctgctgcttccttcaacttgccttcagccctaggaagtgggggccccatcaatccggccacagctgctgcctacccacctgccccctttatgcacattctgaccccccatcagcagccgcattctcagatccttcaccatcacctgcagcaggatggccagacgggcagcgggcaacgtagccagaccagctccatcccgcagaagccccagaccaacaagtctgcctacaacagctacagctggggggccaactgaggccctgaccctcttctcccggtcccatcttctgagagggcttctcagcctggaaactatggaaacagcatcaaagagaaaggaatgtggggggtttccgctgccccccacccccagcggcccaccccatgcctcagcttcatgtctgtcccattcctataccatccccaccctgttgtatgtattataggatttgtattttctccttttttttcccccttccattccttctcccctcttgcattcaagattatgaaactttgctatgggccctgcacttcctttgcttcctcctgttcaccctggtggtgtacggatgaggcggggaggtgggacccccaaacatatatcagcccaacagccctaagtctccttctttattattaggaaaacaacaacaacaacaaacaaaaaaatggcgtcatgaatatgaacagcattgtcagatgaattagttgaagtggttttttttttgttttttttttttttttgtactgtgtcctcaaatttaatggattaatgtgtcttgtatatataaaaagaaaacctctaccttcaaaaaaaaaaaaaaaaaa

SEQ ID NO: 264 - DNA, 2643 bp, Homo Sapiens
acacaacgcgcaggcgccgcctagaagtgacttctccaaaaagtgtgttagttcccggtcacctgagctccgggtgacgcggctgcggtagctgcggatacaagccttccgcgggtcctgcctggcgaccccgacctcctcctgctgtctctccgctccgccaccccgaacccgccaaggtcctgtccttttcctcctgtcctttgccagcgttgggccggaccgggccgagccgggccgcccgggcgcagtctttaaccatggcgtccctcttcaagaagaaaaccgtggatgatgtaataaaggaacagaatcgagagttacgaggtacacagagggctataatcagagatcgagcagctttagagaaacaagaaaaacagctggaattagaaattaagaaaatggccaagattggtaataaggaagcttgcaaagttttagccaaacaacttgtgcatctacggaaacagaagacgagaacttttgctgtaagttcaaaagttacttctatgtctacacaaacaaaagtgatgaattcccaaatgaagatggctggagcaatgtctactacagcaaaaacaatgcaggcagttaacaagaagatggatccacaaaagacattacaaacaatgcagaatttccagaaggaaaacatgaaaatggaaatgactgaagaaatgatcaatgatacacttgatgacatctttgacggttctgatgacgaagaagaaagccaggatattgtgaatcaagttcttgatgaaattggaattgaaatttctggaaagatggccaaagctccatcagctgctcgaagcttaccatctgcctctacttcaaaggctacaatctcagatgaagagattgaacggcaactcaaggctttaggagtagattagtcaaaagaagtcatactattttgcttacttataattatgtagtataaaccaagcacagtgcagatttcttttacaaaacacatgtattttgcaaaaaaaaaaaaaatgaagaccatgagtgaacagttgtttcctaacccatggctatttagaatcttttgccaaagaatgacaatgatgcaaaaatgggaacagtttggattttaattagaactgtttaggagtgatgatgtgtaaaaagttgacttctcttttgcatggcacagagaaattatattccttacttcatgtcagtttatgttctaaatctttttcactgaatataaaaatcttgttaaatgccattaggcaccaacttaaagagggttgtaaaaatattaaaagtatatcgttaattctgtatctgttgcttgtcttttgtaagtgattatgtgttatgaccataggtggttacagctgccaaattatttttaaatggtcaaaaagaagagtgctatttaaacatctgtcttaaacaaaaactgtcataacttttcttttttctttttccattaggagaacattctagttggtaaatttcaaaatgtgcttgacacctgccttaaatagcacagacctattgtgcacatctttaaattatttcagctggcagaaaagaattacatttaaaactgaaatcaaggcctcaatacaaagattatcctggctcttttctatctctgtgggcctaattgaaatatgtactcttattttagacacgcctctgttaaaacagaccaggttttcctggtctcagacctatgatgacttgtccctttgatgtcactactgtgaattgaatataattagtaaaaatagacgatgaataaataacactttatagtaagaaaacaatatattttggccatctaaaaatgagaattataattatatgaattataatttaaactgtttaattttgtttaatgtgtatattgaatcttccaaattgaagccattattctcaattaagtactacaactatgacaatgcttgacctacatttctaaaataaaaattcacattttttgataaataaactacagttttaccagaaattactatctaaatgtgtattagcagtattttttaaggtgaaattgccttggtatctaatgaatgtgtagacagggagataaaatgaaggattgccagactagttagaatagaatttaggattaggttagttttgaaaaatgatgttgtaatatatgggttctaacacatcctaccataaaaactggaggagatatgtgtaacctggttaatttgggatggtggacattttgggctaatactgacaaaatacatcttaggactagtatacatgtgacacggattgctaggaggaatgaaaaactaaactgtatagtttatattccgtaaaccattttataatgttcaaagattaggttttgttattgatagtattaaatacacagtttctcttaacagtgatgggtgaaaacattttaccggattatggaatgtttaccagaacatgttttgattcttgaatgtacataataatgccatctaacttatttacgttcttgtttacatgtgggagcttttgttttcaaaaattattttgttaaaaaatctcaataaagatttattattgttgttcttttcttaccttttttgctctttttggttcctgctaaaattaaaaattttatgcataaaaaaaaaaaaaaaa

SEQ ID NO: 265 - DNA, 2683 bp, Homo Sapiens
agggcggtgtcaatgcaccctccagcggtgcgcgcaggcgggagaagggagggcggcccgggcaagtgagacagttaaggcagtgtccccaccacacccccacccagattggccacgccgagctggttcttgacagaaggccttcgcggaggaagagggggcacagctgcacaggacaccctacggagcctgcgggcgtggaactttgccaggcgcacgggaacgcgcgcccttcctgtcagcctcccggggcgccaggctcccgcggcccgcagcgggacagcctcagttgtgtgggctggacccagtcgctggggtaccgaccagtcctggaaggcgcagaggacgtggagtggggaggctgccttcctatgtgcgaagggccagccgggcacgcagtcctcagaccctagtccgcacccggcaggtccccacggcacctgctgcgccctcctcgccgctcccccaacctccccatctcagaaaactaccagttctctcccgccccccggcgcccctttcccaggaacgtgcggaggcgggagaagaggaagacaggaagggggtggggatgtgaagcgaccgtcccagccttccccgcccgccacccccaccccaactcggcagccgtcacgtgatgcctggagtgggaggtggggagaaaaggcgagacttttgtgggtgctcccgatcgccagtagttccttcagtctcagccgccaactccggaggcgcggtgctcggcccgggagcgcgagcgggaggagcagagacccgcagccgggagcccgagcgcgggcgatgcaggctccgcgagcggcacctgcggctcctctaagctacgaccgtcgtctccgcggcagcagcgcgggccccagcagcctcggcagccacagccgctgcagccggggcagcctccgctgctgtcgcctcctctgatgcgcttgccctctcccggccccgggactccgggagaatgtgggtcctaggcatcgcggcaactttttgcggattgttcttgcttccaggctttgcgctgcaaatccagtgctaccagtgtgaagaattccagctgaacaacgactgctcctcccccgagttcattgtgaattgcacggtgaacgttcaagacatgtgtcagaaagaagtgatggagcaaagtgccgggatcatgtaccgcaagtcctgtgcatcatcagcggcctgtctcatcgcctctgccgggtaccagtccttctgctccccagggaaactgaactcagtttgcatcagctgctgcaacacccctctttgtaacgggccaaggcccaagaaaaggggaagttctgcctcggccctcaggccagggctccgcaccaccatcctgttcctcaaattagccctcttctcggcacactgctgaagctgaaggagatgccaccccctcctgcattgttcttccagccctcgcccccaaccccccacctccctgagtgagtttcttctgggtgtccttttattctgggtagggagcgggagtccgtgttctcttttgttcctgtgcaaataatgaaagagctcggtaaagcattctgaataaattcagcctgactgaattttcagtatgtacttgaaggaaggaggtggagtgaaagttcacccccatgtctgtgtaaccggagtcaaggccaggctggcagagtcagtccttagaagtcactgaggtgggcatctgccttttgtaaagcctccagtgtccattccatccctgatgggggcatagtttgagactgcagagtgagagtgacgttttcttagggctggagggccagttcccactcaaggctccctcgcttgacattcaaacttcatgctcctgaaaaccattctctgcagcagaattggctggtttcgcgcctgagttgggctctagtgactcgagactcaatgactgggacttagactggggctcggcctcgctctgaaaagtgcttaagaaaatcttctcagttctccttgcagaggactggcgccgggacgcgaagagcaacgggcgctgcacaaagcgggcgctgtcggtggtggagtgcgcatgtacgcgcaggcgcttctcgtggttggcgtgctgcagcgacaggcggcagcacagcacctgcacgaacacccgccgaaactgctgcgaggacaccgtgtacaggagcgggttgatgaccgagctgaggtagaaaaacgtctccgagaaggggaggaggatcatgtacgcccggaagtaggacctcgtccagtcgtgcttgggtttggccgcagccatgatcctccgaatctggttgggcatccagcatacggccaatgtcacaacaatcagccctgggcagacacgagcaggagggagagacagagaaaagaaaaacacagcatgagaacacagtaaatgaataaaaccataaaatatttagcccctctgttctgtgcttactggccaggaaatggtaccaatttttcagtgttggacttgacagcttcttttgccacaagcaagagagaatttaacactgtttcaaacccgggggagttggctgtgttaaagaaagaccattaaatgctttagacagtgtatttataccagttgatgtctgttaattttaaaaaaatgttttcattggtgtttgtttgcgtatccagaaagcagttcatgttatccata

SEQ ID NO: 266 - DNA, 2437 bp, Homo Sapiens
ctcgggttccggacaggccccttgtgacgtggccgcgcgccgggggcggccccgggccgggggccgggcggccgggcggccgggcggggcagagcctgggcggggcgcggcaccgcagctggatggctggggccgcccggatcgccgccgccgccgccgcacggtggccttttgtgtttttcagtacgtggcatgcctggatgtccctgccctggctgtggcatggcgggcccaaggctcctcttcctcactgcccttgccctggagctcttgggaagggctgggggttcccagccggccctccggagccgggggactgcgacggcctgtcgcctggacaacaaggaaagcgagtcctggggggctctgctgagcggagagcggctggacacctggatctgctccctcctgggttccctcatggtggggctcagtggggtcttcccgttgcttgtcattcccctagagatggggaccatgctgcgctcagaagctggggcctggcgcctgaagcagctgctcagcttcgccctggggggactcttgggcaatgtgtttctgcatctgctgcccgaagcctgggcctacacgtgcagcgccagccctggtggtgaggggcagagcctgcagcagcagcaacagctggggctgtgggtcattgctggcatcctgaccttcctggcgttggagaagatgttcctggacagcaaggaggaggggaccagccaggcccccaacaaagaccccactgctgctgccgccgcgctcaatggaggccactgtctggcccagccggctgcagagcccggcctcggtgccgtggtccggagcatcaaagtcagcggctacctcaacctgctggccaacaccatcgataacttcacccacgggctggctgtggctgccagcttccttgtgagcaagaagatcgggctcctgacaaccatggccatcctcctgcatgagatcccccatgaggtgggcgactttgccatcctgctccgggccggctttgaccgatggagcgcagccaagctgcaactctcaacagcgctggggggcctactgggcgctggcttcgccatctgtacccagtcccccaagggagtagaggagacggcagcctgggtcctgcccttcacctctggcggctttctctacatcgccttggtgaacgtgctccctgacctcttggaagaagaggacccgtggcgctccctgcagcagctgcttctgctctgtgcgggcatcgtggtaatggtgctgttctcgctcttcgtggattaactttccctgatgccgacgcccctgccccctgcagcaataagatgctcggattcactctgtgaccgcatatgtgagaggcagagagggcgagtggctgcgagagagaatgagcctcccgccagacaggagggaggtgcgtgtggatgtatgtggtgtgcacatgtggccagaggtgtgtgcgcgagaccgacactgtgatccctgtgctgggtccggggcccagtgtagcgcctgtccccagccatgctgtggttacctctccttgccgccctgtcaccttcacctcccggagtaagcagcgaggaagagcagcactggtcccaagcagaggccttgccctgctgggaccccgggagtgagagcagcccaaggatccagggtgcagggaactccagagctgcccacctcccactgccccctcagcacacacacagtccccaggcggcctaggggccaaggctggggcggctttggtcccttttcctggcccttccttccccacttctaagccaaagaaaggagaggcaggtgctcctgtaccccagccccactcagcactgacagtccccagctcctagtagtgagctgggaggcgcttcctaagaccctttcctcagggctgccctgggagctcattcctggccaacacgccctggcagcaccagcagctcttgccacctccagctgccaaacagcagcctgccgggcagggagcagccccaggccagagaggcctcccggtccagctcagggatgctcctgccagcacaggggccagggactcctggagcaggcacatagtgagcccgggcagccctgcccagctcaggcccctttccttccccattgaggttggggtaggtgggggcggtgagggctccacgttgtcagcgctcaggaatgtgctccggcagagtgctgaagccataatccccaaccatttcccttggctgacgcccaggtactcagctggcccactccacagccaggcctggccctgcccttcaccgtggatgttttcagaagtggccatcgagaggtctggatggttttatagcaactttgctgtgattccgtttgtatctgtaaatatttgttctatagataagatacaaataaatattatccacataaaaaaaaaaaaaaaaaa

SEQ ID NO: 267 - DNA, 4611 bp, Homo Sapiens
aagcccctgagtagctgctccgggagctgtggtgccctctccttctccctttggctcctctcctgctgccttacagtgcccccagagccggctaggggcatggacttcacctcctggtcctctcttcctcaggtatggcgttgacggtggatgtggccgggccagcgccctggggcttccgtatcacagggggcagggatttccacacgcccatcatggtgactaaggtggccgagcggggcaaagccaaggacgctgacctccggcctggagacataatcgtggccatcaacggggaaagcgcggagggcatgctgcatgccgaggcccagagcaagatccgccagagcccctcgcccctgcggctgcagctggaccggtctcaggctacgtctccagggcagaccaatggggacagctccttggaagtgctggcgactcgcttccagggctccgtgaggacatacactgagagtcagtcctccttaaggtcctcctactccagcccaacctccctcagcccgagggccggcagccccttctcaccaccaccctctagcagctccctcactggagaggcagccatcagccgcagcttccagagtctggcatgttccccgggcctccccgctgctgaccgcctgtcctactcaggccgccctggaagccgacaggccggcctcggccgcgctggcgactcggcggtgctggtgctgccgccttccccgggccctcgttcctccaggcccagcatggactcggaagggggaagcctcctcctggacgaggactcggaagtcttcaagatgctgcaggaaaatcgcgagggacgggcggccccccgacagtccagctcctttcggctcttgcaggaagccctggaggctgaggagagaggtggcacgccagccttcttgcccagctcactgagcccccagtcctccctgcccgcctccagggccctggccacccctcccaagctccacacttgtgagaagtgcagtaccagcatcgcgaaccaggctgtgcgcatccaggagggccggtaccgccaccccggctgctacacctgtgccgactgtgggctgaacctgaagatgcgcgggcacttctgggaggacgcttgtgctatggagggaatgagattgtcactggaagctttggaggggatggtggagggcgccaagcggagggacaggaggaagaccaggagacccatccagccaagctggtgagacaacctctgatcctgaggaccggccgcccaccaagggttgggcccccggggccaggttgatctaccgacaccttccacttctttcctgggagagactgctggcttcattggtgattgatttggaggggggaaaaagggcagggtggctcaggctttaggcccaggtactggggaggcctgaggagccctcctggagctcaggaggccgaggctgccttgagctgtgatcgtgccactgcattccagcctgggagagagagaggacctgtctgttgaaaaaaacacaaaaacaaatgaatgcatgtggccagtgccaggtgagctgccctgggggttcactggagttgaggcaggggacagtagtctcccctgccagcctaggattttgggcgtcattcacccactacccctagtgctagtcccagaggatgctgcggagggggcagcctcagctctcttttcagagaagatcaaagctgggcttcccagggtgcctggctggtccctgccggcagctttgtgctctccggctctttgtgaaaggaatcttggcgcagatgtttgtgttgcctcctcaggcacctgtagatataatttacaccatgatatcattgtctcaccttttgcctgggtggctgcctgagaaaggtctttctttttatagaaaagatcaaggctgtctggcgcgggactccatgagccccaggcgctggtcagaaacggggtagtctctttggcgccacctagtgtccagtttggcccatggcggggcccattcacggggcaacactgggcttctgggcacagcgggaatacagaaagatacagcactcctcatgccttcctggaggtagaaggccagtggcagcgactgagctggcatgaatgaataagaggatgtggcactgagcgccaagggctaccttggaacgcaccgaggagcgtcccgtgagttcaaagcagtggccgtgatgcaaaaggagggctgggtcttggagacgtggagaagaggaatgctgagtgatggggtggctgctggggggatgcttagctcagagcagtggctgatggggacactgagataagatcggaggggagctgtcaatgccagaagtggtttgaacttccccttgaggctctagggacattttgttttgagacatggtcttgctctattgcccaggctggagtgcagtggtacagtcttagctcactgcagcctccacctcccaggctcaagagatcctcccacagcctcccaggtagctgggactacaggcgtgcaccaccacacccagctaatttttaagtttttttttttttttaagagatggggtctcactatgttgcccaggctggtctcgaacttcgggccccaagccatcctcccaccttggctttccaaagtgttgggattacaagcgtgagctaaccttgcccagcctctgggaacacttggaaggttttaagcagagaagtgacaggttggaaaagatggtttggattattgatatggacagattcccacctgtatgtagcacgccatgctgggccagcagtgtcataggagtggagggggataagtggggactggggacatgtgaaatgatgggcattccagtgaggcatcgaatgccttctgagggctttgtaggttccagctcaaatccccctctggctcttgttctttggtgtggcagccatctctcctcccaggggtcctgagggtttcagcaccagggttctctgcagccacacaatcagcccggctcgggagcaaactcccctggaagaacggagttatgagttggtcagcagaggaggctggggacaggcagtttttggtcttttacctctgatcttgtccccaacctaagccagctagctgcgtgctcccactccctctgccgcacgccgcccgtctatgttcccggactttgtccagtgcagtgccctcttcccttcctgcactgaggagattaactgaagtgacagattagagttagaagtggcccaaaggagcatctggtacaaccccctttggttagagaagggaaagtgacttttccaaagctgcacagctagacagtcataatggctaagctctgggggtgcttttgatgtgctagggatacttccaatgctttaactcacttaatcctcacaacccgagataggtactgttaccatcctctctgcagacgaggaaaccgaggaccaggaggttcagtaaatggtccaagtactcctagctagtaaggaatggatctacagcctgcctcccaggtttctggcttgtggggggcagagtttgtccctctgtcatcagaggcagccttccaggcacagctctggtcacctctggtcacaactggaggtcaccacagccctccccagcgctctgtaggctctcagctttgtgcttcctcccacgggtactagctccagctgagcttgcaggaaacccacttcctgaagccaggacttccccatgggaagtgcaggggccactgggcagcctgagggctgaccctgctcaggacactgtctgtctcaggaactcatggcagtggtttaccttgtcaggagtgcatggacgggctgcccctcccattccttcaagcatcactcagagagccctggcctggctctaggcttgggactgcggctgccacaggaagggggcatccccctactttgggtgttgggtcagatcctgcccccgtgcccgccagggctcaggttcctctgagctggtcctgggccaggacgcatctgcatggcggtggtggggaggaggggtgcgccatggcctggaggggagtgtgtgttggggtgtgtgtgtggaggttcttttgagtcacacacaaagcattgtgctgagacactgcattcctgctggctgggcttcctgtttccagatgcattcctgtcccagagtcaccacagagactgtttggaatcccgccccacattctccaaattcagggcgcgatctggcaaaggctccctcccccaccctcttactttggagggagtctgggctccctcctacccagggagggctggcagggctctggcacggccggggtgtgattccacacatcttcttggtcttgcataaggcagttcctggagacccagcactctggttctctctctgcctgtgagaagcggaatgggtactgtctaggaggactgggcagggtgggggcaacccagaggacccatggctagcagggaagggcctgggcttgaatgtgactctgttgagacatggccagcaattctggcacttggctgtcattcggctggcctgcgcagagattggctgtgggcctcagtttccccattttataaagttttaaaatctg

SEQ ID NO: 268 - DNA, 3563 bp, Homo Sapiens
aaaccgtgggcacccgaccgacgcacacgcgcagccccacgacagtatcagtatttaatttccactagagacagaactaagcctaaccatcaccaggctcaagccgcctaccccaaaaccgagaacggaactgcccggtccccccgaaaagaagggcggaacatttcggccaagtcctcagactaccgaaccggagagctccgaaaggggactacctgcgcctgcgcaccgccatcttgttaaaagagcccgcctctccctcggccggtcactctttcgccacgggcggggttgcaccatccggcagggcggggcccggccatggcgaccgcggagcccagcgggcgcgcgttgcggttgtctaccccgggaccccggcccagcggggctcgggaccgcgcgccgggagctgcggggccaccctccgggcagatcggtaatagagccctccgtctgggggagcgcacccccgcggccgtggaaaagcgggggccatacatggtgacgcgcgcaccctccattcaagccaagctgcagaagcaccgggacctggccaaggccgttctgcggagaaaaggcatgctgggggcctcgccgaaccgcccagactcttcagggaaaaggtcagtgaagtttaacaagggctatactgctcttagccagagtccagatgaaaacctggtgtccctcgactctgacagtgatggggagctgggatccagatactcctccgggtattcatctgcagagcaggtgaaccaggatgtgagccggcagctgcttcaggatgggtatcacctggatgagattccagatgacgaggacttggacctcatcccccctaagcccatggcctcttcaacatgctcctgctgctggtgctgtcttggggactcttcttcctgtaccctccagtagacattaccctccaaggtgggccctgctcaccatgaggcctacagagccctgttggccactcatagctcacacagtgcagtgagcactgaagtcactgacccctagaaagtgacctgcaggtagcccttacctgttgcttctcaggccagaggcccccatctgggctgtgggctgataggtagaattctgtagttttcctctgctgttggagcagagtttggagaagtcactttaataagggcaagacagaaaattctggttcttatggtgggtgacaaaggtggctaaggaaaacacttgcagacagcttgattggtatttgtcatagtgcttcagggaggcaaaaagggagctcttgtgcccaggctgtgctagatagtgttgaatggaggcagaaaatagcactttatggtttattatagctggcaatccaaaaaagaaactgtttgagaccagttcgagaaattccgtttgctctattcttcctagctctaagatggtttgcaggcttgaccttcaagacagcataaagtgagtccttttgtccctcttcaggttgcacctgtctaactatgacagggatcatagcaggttgcttaatgatacagcaggatcctggcttccagaatccctggacctggggcatccccaactggtccaaccgtccgggtgagtttagtgattctggtttgcccttccctagttagagaaaaactgctctgacatgttcatatttatttatttgtatttccttggtctgggtgagtttcttcacccagtctttgagctaaagattaggtcgaaggtactggggctggccccagaagcctgcagtttttattattaccagcagagggagctacagggagcagtccggtgccttcctattgtttactttttaaacttttgagaagtagcaatggactcgtgagagtgggtatacagctgtgtgggctttgtcctagactgaggcttacagacaggaagggtaagagagacctaagccagctcctagacccttgcctgaggaaatcagtccaccagtgtagagggcctcccttcactccagcatggaccattctattgccagattcttctggtcacagcatgggccttactggatactcaggattgggctttaagcagacctctgggtgtgacacagcctctttcagcccccagcccaaacagcagaaataggcataatttctgctgtgacaccccctacccacaaattggagagtatatcttgctatactctataccaagcctctttctagaatttttccaacaggttttgttttgttttttggcttaactcagaaccatggtgagcgttctgctttgttttgttggagacagggtctctgtcacccaggctggagtgcagtggtgtaatcacagctcactgcagcctcaacctcccaggcccaagcagtcctcccacatggtgagctttgaatgggcatagacagggttcccagcccaatagtcgggattggggtataggttctacatgggaaagtatccagtctcttgctttactcagtgtcctgtgaccaccagaggcatgagagggacaacacactcttttcgctctaccacaaggggtgactagaagatgagcaagtctaataaaaagatacggccttatttgttatttgtctgacaaccatccttacgatggtaatcctgtgagtgcctgatggacatctatctttgtgtttttctcaaaccatggaaggttgagaggaatatacagtatctgggggctgacttactctactagctaggagcatcacagcagagagataggacagagaccagagtcatgccagcttggggtcttgggaagagaggcagatggttactctgttctggaatgggactctgcagctctatgcagtggccaacattctgagcactttgtgcaaatgcttgtagagctcaagaacatctccatccagaaccccttccccatctgcagagaccatgtccaggcctttcttgtgtctgcagaggtgaagtgcacatgtggaaagggatcaaatgtagcacagtgtaaagaaagacagcaacacaggtagagggacccagtgtgtgctgggaggtggctgtggaaggtaagtatagacctacatctctgttggggaggtggtcagggcagaatggcctgggtgtttagcagcttctaggggtgagggtggcaggaccccaaaaccaaggccctctgcatcgttgttgtaataatcagctctggcatattcagctgcaactgtccctgaagaagaggtttctgagctggctgaccccatgtaggagggtgttaccttgtagaaaaagctggagggacctggtgggacagtgcagtgaggcagggtagaaatggtcagttgtttagggccagtggccacataccaaaataccaccaatgtgcccagggccaaactgccttaattctgagtgctgtgtgttctgcaggtgacagtttcctgaggagaggggtgtatccaggcttacctcccagcaggagtggtaccatatggtgtttatgtactactctatagaactcttggcttgcacttctacagctctgtacatttataagaataaatgcaatcacactagttgaaaaaaaaaaaaaa

SEQ ID NO: 269 - DNA, 5221 bp, Homo Sapiens
ggcccgagccaccgactgcaggaggagaaggggttgtgctcctggccgaggaaggagaaaggggcggggccggcgggcagcgtgcggcagtgcggagctcctgagaccggcgggcacacgggggtctgtggcccccgccgtagcagtggctgccgccgtcgcttggttcccgtcggtctgcgggaggcgggttatggcggcggcggcagtgagagctgtgaatgaattctccgggtggacgagggaagaagaaaggctccggcggcgccagcaacccggtgcctcccaggcctccgcccccttgcctggcccccgcccctcccgccgccgggccggcccctccgcccgagtcgccgcataagcggaacctgtactatttctcctacccgctgtttgtaggcttcgcgctgctgcgtttggtcgccttccacctggggctcctcttcgtgtggctctgccagcgcttctcccgcgccctcatggcagccaagaggagctccggggccgcgccagcacctgcctcggcctcggccccggcgccggtgccgggcggcgaggccgagcgcgtccgagtcttccacaaacaggccttcgagtacatctccattgccctgcgcatcgatgaggatgagaaagcaggacagaaggagcaagctgtggaatggtataagaaaggtattgaagaactggaaaaaggaatagctgttatagttacaggacaaggtgaacagtgtgaaagagctagacgccttcaagctaaaatgatgactaatttggttatggccaaggaccgcttacaacttctagagaagatgcaaccagttttgccattttccaagtcacaaacggacgtctataatgacagtactaacttggcatgccgcaatggacatctccagtcagaaagtggagctgttccaaaaagaaaagaccccttaacacacactagtaattcactgcctcgttcaaaaacagttatgaaaactggatctgcaggcctttcaggccaccatagagcacctagttacagtggtttatccatggtttctggagtgaaacagggatctggtcctgctcctaccactcataagggtactccgaaaacaaataggacaaataaaccttctacccctacaactgctactcgtaagaaaaaagacttgaagaattttaggaatgtggacagcaaccttgctaaccttataatgaatgaaattgtggacaatggaacagctgttaaatttgatgatatagctggtcaagacttggcaaaacaagcattgcaagaaattgttattcttccttctctgaggcctgagttgttcacagggcttagagctcctgccagagggctgttactctttggtccacctgggaatgggaagacaatgctggctaaagcagtagctgcagaatcgaatgcaaccttctttaatataagtgctgcaagtttaacttcaaaatacgtgggagaaggagagaaattggtgagggctctttttgctgtggctcgagaacttcaaccttctataatttttatagatgaagttgatagccttttgtgtgaaagaagagaaggggagcacgatgctagtagacgcctaaaaactgaatttctaatagaatttgatggtgtacagtctgctggagatgacagagtacttgtaatgggtgcaactaataggccacaagagcttgatgaggctgttctcaggcgtttcatcaaacgggtatatgtgtctttaccaaatgaggagacaagactacttttgcttaaaaatctgttatgtaaacaaggaagtccattgacccaaaaagaactagcacaacttgctagaatgactgatggatactcaggaagtgacctaacagctttggcaaaagatgcagcactgggtcctatccgagaactaaaaccagaacaggtgaagaatatgtctgccagtgagatgagaaatattcgattatctgacttcactgaatccttgaaaaaaataaaacgcagcgtcagccctcaaactttagaagcgtacatacgttggaacaaggactttggagataccactgtttaaggaaatacctttgtaaacctgcagaacattttacttaaaagaggaaacacaagatcttcaatgaacgtcatcggctacagaaacagcctaagtttacaggactttttagagtcttacatatttgtgcaccaaacttgaagatgaaccagaaaacagacttaaacaaaatatacaatgcaaatgtaattttttgttgtttaaggccttgccttgatggtcacagttatcccaatggacactaagttagagcacaacaaaacctgattctggtcttctttaccaatataatcataatgtaaataataatttgtatattgtgttgcagatgaaagtattccaggaacagtgaatggtagaagacacaagaacatttgtttgtttgtcttctgatgttttttcttaaaatagtaatttctcctacttttcttttctactgttgtcttaactacaggtgattggaatgccaaacactcttaagtttattttcttttttcgttttataaattcagtgtgccaaatgaaacttttttcctaagtaactgtaataggaaaaagtttattttgagagtttcttcttcataaatctacagacattaaacaattgttgtgttctttttaccttttatttttctattaccttgctaccaaacagtttagatagcaatataatagcaaaaaagcaaatatggtaaaatagagaaggtttgaaggtttgagttactctgtcatataacatgtagatcagtcttcatgtgacctgcagtatttttttttctaatgtatttgtcagaaatctgttgtagactgttaacttcttcctgatggaatttattttctgcaagaattattctgatatttaagagagccaattttaactgctgtgaaaatgtttccagtgcaagagaagggaaatactaggaactaagacatttctaatttattgcttattactttcttaattttacaggataattataagcaagtggaactaccatcttttattcttaataattattaatcccttcaatgaaactttaaaaaaactgaatttttatacatggcatacatttttctagttccttctgcttgctttattaactcaaaagttctagttctagtctgttgatctgccttttgttctcccaaaatgtacagtaattccatttgtttgtataaatatgcctggattttcattataaaaatgtcattgtagggagtagagactcatatcatggccttttaaatattgtaataaaggcaaatagatatttgcccttagtttactggttaaaagtttgtttacagaacttttctctggtgcttaaatgatgctatgtaaaatgtcatgagtggaaagaatatttgtagtagtaacaagaatttttcatttaggaaagatttcttaggttttgaaagaatacattaaaataaaaaacttgcccctactaggtaagaactttataatgaagacatacattcttcttaattttactcttgctcttgttaaagatttgtttgaatatagaagatgcatgatttctgggtttttttttttttttgagacagagtttcgctcttgttgcccaggctggagtgcaatggcgcaatctcgactcaccacaacctccgcctcccaggttcaagcaattctcctgcctcagcctcccgagtagctgggattacaggcatgcgccactaccccagctaattttgtatttttagtagagatggggtttctccatgttggtcaggctggtcttgaactcctgacctcaggtgatccgcctgcctcggcctcccaaagtgctgggattacaggcataagccactgcgcccagccagaagatgcatgatttcttaggatcatatgctgtttgtagccataaggtaaatcatgtctcttccaatcatgactttggaactccctgaataataaaaatgagagttgagataaataggggaaaaaaaatttttttcaagccagagctatgcatatgttaggtgatgggtagtatccctttaaggtctcaaacattacaacatcaattatgaaatactgataacgaaaggtagtaatgaaatatatatgatgaaaagaattgagaagttctaaattaagacatttcagttaagctcataaaatttcattgttttcatttaaaagattaacgttattgatacttggataactggctaatcatattaaaggactatgtggttccagctcaacttttaatatattgtctcctttaaaactatcatggttataattctattgggaaagacttttagataacaaagatttcaaatgttaaaagagataaaagtcaggttaatactatcttaaacactgagtcagaaaatcattactgtatagaagttgctttcctgatcaagtctgaacttcagctagtgctagagaactattttctatgacttaactctaaccaagttttattttaagctgtttctttgatagaagggccatgaaaatagagtaatgatatagtaggagataagggattggtttggtctttttcaataaagatagaagttgctgaagttttctgaattaataatgacttagattgtgaccttttagattcggtgttgagctctgtgttgtattacttcctaaaagataatgcttaaacattaagcattagtgtgctcttcatgttaatatggcagagttttgtaaactaaattaaaacttactgatatattggactttgagccaagggaaagaatgagtactatctttccagatatcttaagggtaaaagcttattctaagacagtctgtccattgagaatattagatttctgacttgcaaatatgtttgtactccagaagaattagaggaaaagcagatactagaattctaatttaattacatatacagccgtctttgtttatagtgtagaattctttatattttgtacaaaaactaattcttttggtaaaatgaaccatttacagttcggttttggactctgagtcaaaggattttcctttaaatgcttgtctcaattttagtctggtcttttgtacttttcttcagaagaaatgaattaaagggtacagttgcataaagtgggtttttatcctaatgtattggaaataaatgataaactttaaaaaaaaa

SEQ ID NO: 270 - DNA, 1555 bp, Homo Sapiens
tcagcgcggctcatcttcgcccagccaggacacgcaggatcgcgttatctgtccctcccgcgggcacattgggagttgtagtctaattatatatttccgcccttagtgtggggagagcgggaactactcgacccacagagccgatcgcggagcggattctgcttttaggagtacccgccaacaagcgggaccgagcaggaatccgtatctgggaacaggatgcccctgtcccgctggttgagatctgtgggggtcttcctgctgccagccccctactgggcaccccgggagaggtggctgggttccctacggcggccctccctggtgcacgggtacccagtcctggcctggcacagtgcccgctgctggtgccaagcgtggacagaggaacctcgagccctttgctcctccctcagaatgaacggagaccagaattcagatgtttatgcccaagaaaagcaggatttcgttcagcacttctcccagatcgttagggtgctgactgaggatgagatggggcacccagagataggagatgctattgcccggctcaaggaggtcctggagtacaatgccattggaggcaagtataaccggggtttgacggtggtagtagcattccgggagctggtggagccaaggaaacaggatgctgatagtctccagcgggcctggactgtgggctggtgtgtggaactgctgcaagctttcttcctggtggcagatgacatcatggattcatcccttacccgccggggacagatctgctggtatcagaagccgggcgtgggtttggatgccatcaatgatgctaacctcctggaagcatgtatctaccgcctgctgaagctctattgccgggagcagccctattacctgaacctgatcgagctcttcctgcagagttcctatcagactgagattgggcagaccctggacctcctcacagccccccagggcaatgtggatcttgtcagattcactgaaaagaggtacaaatctattgtcaagtacaagacagctttctactccttctaccttcctatagctgcagccatgtacatggcaggaattgatggcgagaaggagcacgccaatgccaagaagatcctgctggagatgggggagttctttcagattcaggatgattaccttgacctctttggggaccccagtgtgaccggcaaaattggcactgacatccaggacaacaaatgcagctggctggtggttcagtgtctgcaacgggccactccagaacagtaccagatcctgaaggaaaattacgggcagaaggaggctgagaaagtggcccgggtgaaggcgctatatgaggagctggatctgccagcagtgttcttgcaatatgaggaagacagttacagccacattatggctctcattgaacagtacgcagcacccctgcccccagccgtctttctggggcttgcgcgcaaaatctacaagcggagaaagtgacctagagattgcaagggcggggagaggaggctctcaataaataatcgtgtaaccttcaaaaaaaaaaaaaaaaaaa

SEQ ID NO: 271 - DNA, 5983 bp, Homo Sapiens
gaaggcgaggcggggagagactgggaaacagagcagcaagagaaagggcgcacgctggggtcctcctggacccggcgtgtcctcctctccgccacccctttctctccctcccgacgctctagccccagacccgcgcctcctccccttcccctcccacgctgcccacttcccttcccctctacccctcgaaccctcctccccggttctgcgctcctccctccgccctccctccgcccgggctgcctcctccctcctcctccccgggaggcatcacttcgtcccgacccggaggaggacgcgagccccttgcgggcggtcatcacagcccagcctcggggctgccacagcgcgttgcgcctgtgcgccctcggtccccgcgtccactgagcgccgcgctcggggatggggcccggccggccggcccccgcgccctggcctcgtcacctgctgcgctgcgtcctgctcctcgggtgcctgcacctcggccgtcccggcgcccctggggacgccgccctcccggaacccaacgtcttcctcatcttcagccatggactgcagggctgcctggaggcccagggcgggcaggtcagagtcaccccggcttgcaataccagcctccctgcccagcgctggaagtgggtctcccgaaaccggctattcaacctgggtaccatgcagtgcctgggcacaggctggccaggcaccaacaccacggcctccctgggcatgtatgagtgtgaccgggaagcactgaatcttcgctggcattgtcgtacactgggtgaccagctgtccttgctcctgggggcccgcaccagcaacatatccaagcctggcacccttgagcgtggtgaccagacccgcagtggccagtggcgcatctacggcagcgaggaggacctatgtgctctgccctaccacgaggtctacaccatccagggaaactcccacggaaagccgtgcaccatccccttcaaatatgacaaccagtggttccacggctgcaccagcacgggccgcgaggatggtcacctgtggtgtgccaccacccaggactacggcaaagacgagcgctggggcttctgccccatcaagagtaacgactgcgagaccttctgggacaaggaccagctgactgacagctgctaccagtttaacttccagtccacgctgtcgtggagggaggcctgggccagctgcgagcagcagggtgcggatctgctgagcatcacggagatccacgagcagacctacatcaacggcctcctcactgggtacagctccaccctgtggatcggcttgaatgacttggacacgagcggaggctggcagtggtcggacaactcgcccctcaagtacctcaactgggagagtgaccagccggacaaccccagtgaggagaactgtggagtgatccgcactgagtcctcgggcggctggcagaaccgtgactgcagcatcgcgctgccctatgtgtgcaagaagaagcccaacgccacggccgagcccacccctccagacaggtgggccaatgtgaaggtggagtgcgagccgagctggcagcccttccagggccactgctaccgcctgcaggccgagaagcgcagctggcaggagtccaagaaggcatgtctacggggcggtggcgacctggtcagcatccacagcatggcggagctggaattcatcaccaagcagatcaagcaagaggtggaggagctgtggatcggcctcaacgatttgaaactgcagatgaattttgagtggtctgacgggagccttgtgagcttcacccactggcacccctttgagcccaacaacttccgggacagtctggaggactgtgtcaccatctggggcccggaaggccgctggaacgacagtccctgtaaccagtccttgccatccatctgcaagaaggcaggccagctgagccagggggccgccgaggaggaccatggctgccggaagggttggacgtggcacagcccatcctgctactggctgggagaagaccaagtgacctacagtgaggcccggcgcctgtgcactgaccatggctctcagctggtcaccatcaccaacaggttcgagcaggccttcgtcagcagcctcatctacaactgggagggcgagtacttctggacggccctgcaggacctcaacagcaccggctccttcttctggctcagtggggatgaagtcatgtacacccactggaaccgggaccagcccgggtacagccgtgggggctgcgtggcgctggccactggcagcgccatggggctgtgggaggtgaagaactgtacctcgttccgggcccgctacatctgccggcagagcctgggcactccagtgacgccggagctgccggggccagatcccacgcccagcctcactggctcctgtccccagggctgggcctcggacaccaaactccggtattgctataaggtgttcagctcagagcggctgcaggacaagaagagctgggtccaggcccagggggcctgccaggagctgggggcccagctgctgagcctggccagctacgaggaggagcactttgtggccaacatgctcaacaagatcttcggtgaatcagaacccgagatccacgagcagcactggttctggatcggcctgaaccgtcgggatcccagagggggtcagagttggcgctggagcgacggcgtagggttctcttaccacaatttcgaccggagccggcacgacgacgacgacatccgaggctgtgcggtgctggacctggcctccctgcagtgggtggccatgcagtgcgacacacagctggactggatctgcaagatccccagaggtacggacgtgcgggagcccgacgacagccctcaaggccgacgggaatggctgcgcttccaggaggccgagtacaagttctttgagcaccactccacgtgggcgcaggcgcagcgcatctgcacgtggttccaggccgagctgacctcggtgcacagccaggcggagctagacttcctgagccacaacttgcagaagttctcccgggcccaggagcagcactggtggatcggcctgcacacctctgagagcgatgggcgcttcagatggacagatggttccattataaacttcatctcctgggcaccaggcaaacctcggcctgtcggcaaggacaagaagtgcgtgtacatgacagccagccgagaggactggggggaccagaggtgcctgacagccttgccctacatctgcaagcgcagcaacgtcaccaaagaaacgcagcccccagacctgccaactacagccctggggggctgcccctctgactggatccagttcctcaacaagtgttttcaggtccagggccaggaaccccagagccgggtgaagtggtcagaggcacagttctcctgtgaacagcaagaggcccagctggtcaccatcacaaaccccttagagcaagcattcatcacagccagcctgcccaatgtgacctttgacctttggattggcctccatgcctcgcagagggacttccagtgggtggagcaggagcctttgatgtatgccaactgggcacctggggagccctctggccctagccctgctcccagtggcaacaaaccgaccagctgtgcagtggtcctgcacagcccctcagcccacttcactggccgctgggacgatcggagctgcacggaggagacccatggcttcatctgccagaagggcacggacccctccctgagcccgtccccagcagcgctgccccccgccccgggcactgagctctcctacctcaacggcaccttccggctgcttcagaagccgctgcgctggcacgatgccctcctgctgtgtgagagccgcaatgccagcctggcctacgtgcccgacccctacacccaggccttcctcacgcaggctgcccgagggctgcgcacgccgctctggattgggctggctggcgaggagggctctcggcggtactcctgggtctcagaggagccgctgaactacgtgggctggcaggacggggagccgcagcagccggggggctgtacctacgtagatgtggacggggcctggcgcaccaccagctgtgacaccaagctgcagggggctgtgtgtggggttagcagtgggccccctcctccccgaagaataagctaccatggcagctgtccccagggactggcagactccgcgtggattcccttccgggagcactgctattctttccacatggagctgctgctgggccacaaggaggcgcgacagcgctgccagagagcgggtggggccgtcctgtctatcctggatgagatggagaatgtgtttgtctgggagcacctgcagagctatgagggccagagtcggggcgcctggctgggcatgaacttcaaccccaaaggaggcactctggtctggcaggacaacacagctgtgaactactccaactgggggcccccgggcttgggccccagcatgctgagccacaacagctgctactggattcagagcaacagcgggctatggcgccccggcgcttgcaccaacatcaccatgggtgtcgtctgcaagcttcctcgtgctgagcagagcagcttctccccatcagcgcttccagagaacccagcggccctggtggtggtgctgatggcggtgctgctgctcctggccttgctgaccgcagccctcatcctttaccggaggcgccagagcatcgagcgcggggcctttgagggtgcccgctacagccgcagcagctccagccccaccgaggccactgagaagaacatcctggtgtcagacatggaaatgaatgagcaacaagaatagagccaggcgcgtgggcagggccagggcgggaggagctggggagctggggccctgggtcagtctggccccccaccagctgcctgtccagttggcctatggaagggtgcccttgggagtcgctgttgggagccggagctgggcagagcctgggctggtggggtgccaccctcccacaagggctgggctgagacccagctgagtgcagcgtggcgtttccctttctgggggggcctgaggtcttgtcacctggtcctgtgcccccacaggaaccagaggtaggatgggagggggaacgagagcctctttctccccagagcccccggcccaggcctgttgatccgcgccccaggacccccttctttgcagagcccgaggagcctcccctgtcccctcgggcagatctgttgtgtctctcttcccacctggcagcctcagctctgtgcccctcaccctgctccctctcgccccttctctcccaccccttccttctgagccgggccctggggattggggagccctcttgttcctgatgagggtcagctgagggggctgagcatccatcactcctgtgcctgctggggtggctgtggggcgtggcaggaggggcctaggtgggttgggcctgagaaccagggcacgggtgtggtgtctgctgggctggagataagactggggagagacaccccaacctcccagggtgggagctgggccgggctgggatgtcatctcctgccgggcgggggagggctctgcccctggaagagtcccctgtggggaccaaaataagttccctaacatctccagctcctggctctggtttggagcaaggggaagggttgccagagtcctgggggccccagaggagcaggagtctgggagggcccagagttcaccctctagtggatccaggaggagcagcacccgagccctggagtggcccagtacccttccaagaggccacagtcccagccaggacaaagtatgcggcccatcctggtgcgacagcgtgggacaatgtgaacatggactcgaagacatggccctttctctgtagttgattttttaaatgtgccattattgtttttaaaaaaaaaggaaaaaagaaaagcaaacaaataaaacacctttaagaggcttgaaa

SEQ ID NO: 272 - DNA, 6221 bp, Homo Sapiens
agtaacaataggaagtgtccgtagagctgggagtagactcctggctcatgccagctgcgccctcttttctctacctccttcctcttccccccttctcctttccctctttcccttccctcccacctcccgggaaccctggctgagtgtgcgtgtgtgggagcgcgagagccccccgacagccaccccttggggcgcgcggctgcagttagggccttggcccctccaccagaggaaggtgctgccacgtgtctgctccttctgaacctccaggtttctgctacgttgccccatggaggacacacccccctcactcagctgctccgactgtcagcgccactttcccagcctcccagagctctctcggcaccgagaactgctccatccatctcccaaccaggacagtgaggaggctgacagcatccctcggccctaccgttgtcagcagtgtgggcggggctaccgtcaccccgggagcctggttaaccatcgtcggacccacgagactggccttttcccctgtaccacctgtggcaaggacttctccaatcccatggctctcaagagccatatgaggacacatgctcctgagggccgccgcaggcacaggcccccacgccccaaggaagccactccacacctccagggtgagacggtgtccactgactcctggggccaaaggcttggctctagtgaaggctgggaaaaccagacaaaacatacagaagagacacctgactgtgaatctgtacctgaccccagggcagcttcgggtacgtgggaagatctgcccaccagacaaagagaaggcttggcaagccacccaggtcctgaggatggtgcagacggctggggaccctccactaactctgccagagcccctcctctccccatcccagccagcagccttcttagcaacttggaacagtatctggctgaatcagtagtgaacttcacagggggccaggagcccacccagtcccctcctgctgaggaggagcggcggtacaaatgtagtcagtgtggcaagacctacaagcacgccgggagcctcaccaaccaccgccagagccacacgctgggcatctacccctgtgccatctgtttcaaggagttctctaacctcatggctctgaagaaccactctcgactgcatgcccagtatcggccttaccactgtccccactgcccccgtgtcttccggctcccccgggagctgctggaacaccagcagtcccatgagggtgaaaggcaggagccacgctgggaggagaaagggatgcccaccaccaatgggcacacagatgagagcagccaggaccagctccccagtgcacagatgctgaatggctctgcggagctcagcacctctggggagctggaggacagtggcctggaggaataccggcctttccgctgtggggactgtggccgtacttaccgccatgctgggagcctcatcaaccatcgaaagagccaccagacaggtgtctacccctgctcactctgttctaagcagctgttcaatgcggctgccctcaaaaaccatgtgcgggctcatcacaggcccaggcaaggagttggggaaaatgggcagccatcagtcccaccagctcccctgctgctggctgagaccacccacaaagaggaagaggaccccaccaccaccctggaccatcggccctataagtgcagtgagtgtggtcgtgcttaccgccaccgggggagcctggtgaaccatcgccacagccatcggactggagagtaccagtgctcactctgtccccgcaagtaccccaatctcatggccctgcgcaaccacgtgcgggtacattgcaaggctgctcgccgaagtgcagacatcggggctgagggtgcccccagccacctcaaggtagaactcccgcctgacccagtggaggcagaggcagccccgcacacagatcaggaccatgtgtgcaaacatgaagaagaggccacggacatcaccccagcagcagacaagacagcagcacatatctgtagcatctgtgggctgctctttgaagacgctgagagccttgaacgtcatggcctgactcatggggcaggggaaaaggaaaatagcagaacagagaccacaatgtcacctcctagggcctttgcctgccgagactgtggaaagagctatcgccactcaggcagccttatcaaccacaggcagacccaccagacaggagacttcagttgtggggcctgtgccaagcacttccacaccatggctgccatgaagaaccacttgcgccggcacagtcggcggcggagcaggcggcatcggaagcgggctggcggtgccagcggtgggagagaagccaaactcctggcagcggagagctggacccgggagctagaagacaatgaaggcctggagtctccccaagacccttcaggggaaagtcctcatggggctgaaggcaacctggaaagtgatggggactgtttgcaggctgaatctgaaggggacaaatgtgggcttgagagggatgagacccatttccagggtgataaagagagcggaggcactggggaaggactggaaaggaaggatgccagtttacttgacaacttggacatcccaggtgaggaaggtggtggcactcacttctgcgatagcctcactggggtggatgaagaccagaagccagccactggccaacccaactcctcttcccactctgccaatgctgtcactggctggcaggctggggccgctcacacatgctctgactgtgggcattctttcccccatgccactggcctgctgagccacaggccctgccacccaccaggcatctatcagtgctccctctgcccgaaggagtttgactctctgcctgccctccgcagccacttccagaaccataggcctggggaggcgacctcagcacagcctttcctctgctgcctctgtggcatgatcttccctgggcgggctggctacaggcttcaccggcgccaggcccacagctcctctggcatgactgagggctcagaggaggagggggaagaggaaggagtggcagaggcagcccctgcacgcagtccaccactgcagctctcggaagcagagctgctgaatcagctgcagcgggaggtggaagcgctggacagtgcagggtatgggcacatctgtggctgctgtggtcagacctacgatgacctggggagcctggagcgtcaccaccaaagtcagagttctgggactactgcagacaaggctcccagccccttgggagtggcaggtgatgccatggagatggtcgtggacagtgtcttggaggacatagtgaattctgtctctggagagggtggagatgccaagtctcaagagggagcaggcacccccttgggagacagcctctgcatccagggtggggaaagtttgttggaggctcagccccgccccttccgctgcaaccagtgtggcaagacctatcgccatgggggcagcctggtgaaccaccgcaagatccaccagactggagactttctctgccctgtctgctcccgctgctaccccaacctggctgcctaccgtaatcatctgcggaaccaccctcgctgcaaaggctctgagccccaggttgggcccatcccagaggcagcaggtagcagtgagctgcaggttgggcccatcccagaaggaggcagcaacaagccccagcacatggcagaggaggggccggggcaagcagaagtcgagaagctccaggaagaacttaaagtggagcccctggaggaagtggccagggtgaaagaagaggtgtgggaggagaccactgtgaagggggaggagatagagcccaggctggagactgccgagaagggctgccagactgaagccagctctgagcggcccttcagctgcgaggtgtgtggccgatcctacaagcacgccggcagcctcatcaaccaccggcagagccaccagaccggccactttggctgtcaggcctgctccaagggcttctcaaacctcatgtccctcaagaaccaccggcgcatccatgcagatccccgacgtttccgctgcagcgagtgtgggaaggccttccgcctgcggaaacagctggccagccaccagcgggtccacatggaacggcgtgggggtgggggcacccgaaaggcgactcgggaagatcggcccttccgctgtgggcagtgcgggcggacctatcgccacgccggcagcctcctgaaccaccggcgcagccacgagacgggccagtacagctgccccacctgccccaagacctactccaaccgcatggccctgaaggaccaccagaggctgcactcagagaatcggcggcgacgggctggacggtccaggcgcacagctgtgcgttgcgccctctgtggccgcagcttccctggccggggatctttggagcggcacctgcgggagcatgaggagacagaaagggagccagccaatggccagggaggcctggatggcacagcggccagtgaggcgaacctgactggcagccagggactagagacccaattgggtggtgctgagccagtaccccacttggaggatggagtcccaaggccaggggagcgcagtcagagccccatcagggcagcaagctcagaagccccagagccactgtcctggggtgcagggaaggcaggtgggtggccggtaggtgggggactggggaatcatagtggaggctgggttcctcagttcctaactaggtcagaggagccagaggacagtgtccacaggagtccttgccacgctggtgactgccagctcaatggacctactctgagtcacatggatagctgggacaacagagacaacagctctcagctgcagccagggagccactcctcttgcagccagtgtggcaagacttactgccagtcaggcagcctcttgaaccacaacaccaacaagacagaccgacactattgcctgctctgctccaaggagttcttaaatcctgtggccacaaagagccacagccacaaccacatagacgcccagacctttgcctgtcctgactgtggcaaagcctttgagtcccaccaggaactggccagccacctgcaggctcatgcccggggccacagccaggtgccagcccagatggaggaggccagagatcccaaagccgggactggggaggaccaggtggttctccctggtcaagggaaagcccaggaggccccatcagaaacccccagaggcccaggagagagtgtggagagagccaggggaggacaagcggtgacgtccatggcggctgaggacaaggagcggcccttccgctgcacccagtgcgggcgctcctaccgccatgctggcagcctgctgaaccaccagaaggcccacaccacagggttgtacccgtgctccctctgtcccaaacttctccctaacctgctgtctcttaagaaccacagcaggacccacacggaccccaagcgccactgctgcagcatctgtggcaaggcctttcggacagctgcccggctggagggccacgggcgggtccatgcaccccgggaggggcctttcacctgcccccattgtccccgccacttccgccgccgaatcagcttcgtgcagcaccagcagcagcaccaggaggagtggacggtggccggctccggagccccagtggcaccagtgacgggcagaggggacttgccattgccccctccacccacccccacgaccccactcctggatccttcaccccagtggcctgcagacctcagcttctccctctgaacttcaagtctccaaagatcagaatctgggggagggagcgcgtgcagggaggggcttgatctccacattttctcaggagtagttcgggcatccccatatcttctcctctccccttgtgaagaggacccagatctggcttctttcccaaggagggggtggggtgttcctcgcgtccctgtccttgaaggacctccttcccccagcctcatcaccgtgctcttctcagcgccaccctcagcagccagattgcaacaccagggagaggcggatgcagagccccaccggtgggaaagttgcctgtggaagggagccttttgctacaatttgtaacttattttctaaagtctattttgtaacaatttatttaagtttaaaaaaaggaaaactgctgccccccaaaaaaagaaattttcaaaacaaaaaaaaaaaaaaa

SEQ ID NO: 273 - DNA, 5277 bp, Homo Sapiens
acagccaataggccagggcccgtgctgtgattggccgcagcagtgttgacggatacgtgagaagaaaacggcgtggtagctcggagtgtggaatcgggcgcgaacctgagttctgagaagtgtggaagcacgtctgaggcaagcggaataacctggcccccgacgctcgggcctcggagctgcacgtgcgtgcccgatcgccttcggctctttccggccgctcggggcgcttcgggagtcctcggggccgcctcgctcaccttcggctatttccgcgttcctggcgcgccgttgtcccggcaacgcgcggcggctcagcggcctggcagaggtttcagcgctgaggaggcctgagttccgtcatggccctctattatgaccaccagatagaagccccggatgcagcagggtcaccctcatttatcagctggcaccctgtccatccattcttggcagttgcttacatcagcacaacctcaacaggcagcgtggatatttacctggagcaaggggagtgcgtgccagatacacacgtcgagaggccgttccgggttgcttccctgtgctggcacccgacgcggctggtgctggctgtgggctgggagactggagaagtgacggtgtttaacaagcaggacaaggagcagcacacgatgcccctgacacacacagccgacatcaccgtgctccgttggagccccagtggaaactgcctgctgtctggggacaggcttggtgtcttgctcttgtggaggttggaccaaaggggccgagtgcaagggacgcctctgctgaaacacgagtatgggaaacacctcacgcactgcatcttccggctcccccctcctggcgaggacctggttcagttggcaaaggcagctgtgagcggtgatgagaaagccctggacatgtttaactggaagaagagcagttctggaagtttgctgaagatggggtctcacgaggggctgttgttctttgtcagtctgatggacgggacagtgcactatgtggatgagaagggcaagaccactcaggtggtgtccgcagacagcacgattcagatgctgttctacatggagaagagggaggcactggtggtggtcacagagaacctccggctgtccctgtacacggtgcctcctgagggcaaagcagaagaagtgatgaaggtcaagctgagcgggaaaaccggccgccgggcagacatcgctttgattgaaggcagccttctcgtgatggccgtcggggaggctgccctcagattctgggacatagaacgaggagagaattatatactgagtccagatgagaagtttggctttgagaaaggagagaatatgaactgtgtgtgttactgtaaagtcaaaggtcttctggccgctggtaccgacagagggcgagtagccatgtggaggaaagtaccagacttcctgggcagccccggggcagagggcaaggacaggtgggcccttcagacccctaccgagctccaaggaaacatcacgcaaatccagtggggttccaggaagaacctgctggcagtgaacagcgtcatctccgtggccatcctcagcgagcgggccatgtcgtcacacttccaccagcaagtggccgccatgcaggtctccccgagtctgctgaatgtgtgcttcctgtccacgggggtcgcacacagcctgcgcaccgacatgcacatcagtggagtgtttgccaccaaggatgctgtcgcagtctggaacggaaggcaggtggcgatcttcgagctttctggagccgcgatacggagtgcagggaccttcttgtgtgagacgcctgtgttagcaatgcatgaagaaaacgtttacacggtggagtcaaaccgagttcaagttcgaacctggcaggggactgtcaaacaactcctccttttctcggagactgaggggaatccctgcttcttggacatctgtgggaatttcctggttgtagggacagacttggctcactttaaaagctttgatctttcccgaagagaggccaaagcacactgtagctgcaggagcctggcggagctggtccctggggtggggggcatcgcttctctgcggtgcagcagcagcgggagcaccatcagcatcctccccagcaaggctgacaacagccctgattccaaaatctgcttctacgatgttgaaatggacacagtgaccgtctttgacttcaagactggacaaattgatcggagagagacgctgtcctttaatgagcaagagactaataagagccacctctttgtggatgagggactgaaaaattatgttcccgtgaaccacttctgggaccagagtgagccccggctgtttgtatgcgaagccgtgcaggagacgccgcgctcccagcctcagtctgcaaacgggcagccccaagatgggcgcgctggccctgcggcagatgttttgatcctgtccttcttcatttccgaagagcacggcttcctgcttcatgagagcttcccccggcctgccacctcccacagtctcctggggatggaagtgccttattactacttcacaagaaagcccgaagaagcagacagagaagacgaggtggagcctgggtgccaccacatccctcagatggtgtccaggagacccctgcgagactttgtggggctggaggactgcgacaaggccacccgggacgccatgctccacttcagcttctttgtcaccataggagacatggacgaagccttcaaatccatcaagctcatcaaaagtgaggccgtctgggagaacatggcgcgcatgtgcgtgaagacccagcggctggacgtggccaaggtgtgcctggggaacatgggccatgcccgcggggcccgagcgctgcgtgaggcggagcaggagccggagctagaggcccgcgtggccgtgctggccacgcagctgggcatgctggaggacgccgagcagctgtacaggaagtgcaagcgccacgacctcctgaacaagttctaccaggctgcgggccggtggcaggaggccctccaggtagccgagcaccacgatcgcgtgcacctgcgcagcacctaccaccgctatgccgggcacctggaggccagcgccgactgcagccgggccctcagttactacgagaagtcggacacgcaccgcttcgaggtgcccaggatgctgtcggaggacctgccgtccctggagctctacgtgaataaaatgaaggataagaccctgtggcggtggtgggcgcagtacctggagagccagggcgagatggacgccgcgctgcactactacgagctggcccgggaccacttctccctggtccgcatccactgcttccagggcaatgtccagaaggctgcgcaaatagccaacgagacaggaaacctggcggcctcctaccacctcgcccgccagtacgagagccaggaggaggtcgggcaggcggtgcacttctacacccgggcacaggccttcaagaatgccatccgcctgtgcaaggagaacggcctggacgaccagctcatgaacttggccctgctgagctcccccgaggacatgatcgaggcggcccgatactacgaggagaagggcgtgcagatggacagggcggtcatgctgtaccacaaggctggccacttctccaaggccctggagctggcctttgccacccagcagtttgtggccctacagctcatagcagaggacctggatgagacgtcagaccctgcgctcctggcccgctgctccgacttcttcatcgagcacagtcagtacgagagggcggtagagctgctgctggctgccaggaagtatcaggaagccctgcagctgtgcctggggcagaacatgagcatcaccgaggagatggcggaaaagatgaccgtggccaaggactcctcggacctgcctgaggagtcgcggcgggagctgctggagcagatagcagactgctgcatgcgccagggcagctaccacctggccaccaagaagtacacgcaggccggcaacaagctgaaggccatgagggcgctgctcaaatccggagacacggagaaaatcacgttcttcgcgagcgtgtccaggcagaaggaaatctacatcatggctgctaactacctgcagtccctggactggcggaaggagccggagatcatgaagaacatcatcggcttctacaccaaggggcgggccctggacctcctggctggcttttatgacgcttgtgcccaggtggagattgatgaataccagaactacgacaaagcccacggggcgctgaccgaggcctacaagtgcctggccaaggccaaggccaagagccccctggaccaggagaccaggctggcgcagctgcagagcaggatggcactggtgaagaggttcatccaggcccgcaggacgtacacagaggaccccaaggagtccatcaagcagtgtgagctgctcctggaggaaccagacctggacagcaccatccgcatcggggacgtctatggcttcctggtggagcactacgtgcggaaggaggaataccagacggcctacagattcctggaggagatgcggcggcggcttcccttggccaacatgtcctactacgtgagcccgcaggccgtggacgccgtgcaccgggggctgggtctcccactgccacgcaccgtccccgagcaggtccgccacaacagcatggaggacgccagggagctggacgaggaggtggtggaagaggcagatgacgacccctgaggggcctgggccccaggaccagcgtgctgctgcagaaaggcatcttctggaatttttttgtcagctgtggcaaagccagcatttttgctgggaaaaaacatgtctgtgttggaatacgcgacagagctgggcgagaacgcagcggcccgggccggcggagggtgtgacccgtctgcaccttgctctgtcccacctgcctctgggtgcccggcagctccactagatttttggattcattcctttgaagggagtcgggttcacccttccatcgtattctcccaactacacattgtaaagcctgagaaacttctagaacctcaggaagctgcagctggagggctggggcacctgcccccctgctccccacacatcatatcctccccatactcctgcagggcccacggctcctgagcaacagctgggacacccgggccttggcggctgcaccccctgctaggctctgcccaccggccaccaacactcctgtaattccaataaagcagtttattttctgagaaaaaaaaaa

SEQ ID NO: 274 - DNA, 5472 bp, Homo Sapiens
ctgaactttagctctctggccggcgcctctgttgcccggaagggaggcaagcccccttagagttgccagtaacggacatggctgcggcccccggaggaggggacgtgaagtgaggagggggttgggaggggagaggacgcgggcgaggaagaccagccccggggccccgatgttgtgactgtgacagactcactggggtttgtacatgctggggaggagccttcctttcaggggtgaccacattcatctgggcatgcctgcagtactcttggcccatggacctgaaggagaagcacctgggcgagcctccctcagccctgggcctgtccacgcggaaggccctcagcgtcctgaaggagcagctggaggcagtgctggaaggacatctcagggagcggaagaagtgtctgacgtggaaggaggtgtggagaagcagcttcctccaccacagtaaccgctgctcctgcttccactggccgggggcctcactcatgctactggccgtgctgctgctgctgggctgctgcgggggacagccagccgggagccgtggggtggggctggtgaatgcctcggccttgttcctgttactgcttctcaaccttgtgctcatcgggcggcaagaccggctgaagcgtcgggaggtagagcggaggctgcgagggatcattgaccaaatccaagatgccctcagggatggcagggagatccagtggcccagtgccatgtatccagacctccacatgccttttgcgccatcctggtccttgcactgggcctacagagacggacacctggtcaacctgccagtcagcctgctggttgaaggagacatcatagctttgaggcctggccaggaatcgtttgcttctctgagggggatcaaggatgacgagcacatcgtcctggagccgggagacctcttcccccccttctcccctccaccctcaccccggggagaagtggagagagggccacagagcccccagcagcaccggcttttccgtgtccttgagacccctgtgattgacaacatcagatggtgcctggacatggccctgtcccgaccagtcactgccctggacaatgagcggttcacagtgcagtcggtgatgctacactatgctgtgcccgtggtcctggccggcttcctcatcaccaatgccctgcgcttcatcttcagtgccccgggggtcacttcctggcagtacaccctcctccagctccaggtgaatggcgtcctgcccatcctccccctgctctttccagtcctctgggttctggcaactgcctgtggagaggcccgtgtcctggcccagatgagcaaggcctcacccagctccctgctggctaagttctcagaggatactctcagcagctatacggaggctgtctcctctcaggaaatgctgcgctgcatttggggccacttcctgagggtgctcggggggacatcgccaacgctgagccacagttccagcctgctgcacagcctgggctctgtcacggtcctgtgctgtgtggacaaacaggggatcctgtcatggccaaatcccagcccagagactgtactgttcttcagcgggaaggtggagccccctcacagcagccatgaggacctcaccgatggcctatccacccgctccttctgccatcccgagccccatgaacgagacgccctcctggctggctccctgaacaacaccctgcacctttccaatgagcaggagcgtggcgactggcctggcgaggctcccaagccccccgagccctattcacaccacaaagcgcatggccgcagcaaacacccatctggctccaacgtgagcttcagcagggacaccgagggtggtgaagaagagcccagcaagacccagcctgggatggagagcgacccctacgaagcagaggactttgtgtgtgactaccacctggagatgctgagcctgtcccaggaccagcagaacccctcctgcatccagtttgatgactccaactggcagctgcacctcacctccctcaaacccctgggcctcaatgtgctgctgaacctgtgtgatgccagcgtcaccgagcgcctgtgccgattctccgaccacctgtgcaacatcgccctgcaagagagccacagcgccgtgctgcccgtccatgtgccctggggcctctgcgagcttgcccgcctcattggcttcactcctggggccaaggagcttttcaagcaggagaaccatctggcgctgtaccgcctccccagtgccgagacaatgaaggagacatcgctggggcggctctcctgtgtcaccaagcggcggcctcccctcagccacatgatcagcctcttcattaaagacaccaccaccagcacagagcagatgctgtcccatggcaccgctgatgtggtcttagaggcctgcacagacttctgggacggagctgacatctaccctctctcgggatctgacagaaagaaagtgctggacttctaccagcgagcctgcctgtctgggtattgctctgccttcgcctacaagcccatgaactgcgccctgtcctctcagctcaatggcaagtgcatcgagctggtacaggtgcccggccaaagcagcatcttcaccatgtgcgagctgcccagcaccatccccatcaagcagaacgcccgccgcagcagctggagctctgacgaagggatcggggaggtgctggagaaggaagactgcatgcaggccctgagcggccagatcttcatgggcatggtgtcctcccagtaccaggcccggctggacatcgtgcgcctcattgatgggcttgtcaacgcctgcatccgctttgtctacttctctttggaggatgagctcaaaagcaaggtgtttgcagaaaaaatgggcctggagacaggctggaactgccacatctccctcacacccaatggtgacatgcctggctccgagatccccccctccagccccagccacgcaggctccctgcatgatgacctgaatcaggtgtcccgagatgatgcagaagggctcctcctcatggaggaggagggccactcggacctcatcagcttccagcctacggacagcgacatccccagcttcctggaggactccaaccgggccaagctgccccggggtatccaccaagtgcggccccacctgcagaacattgacaacgtgcccctgctagtgccccttttcaccgactgcaccccagagaccatgtgtgagatgataaagatcatgcaagagtacggggaggtgacctgctgcctgggcagctctgccaacctgcggaacagctgcctcttcctccagagcgacatcagcattgccctggatcccctgtacccatcccgttgctcctgggagacctttggctacgccaccagcatcagcatggcccaggcctcggatggcctttctcccctgcagctgtcagggcagctcaacagcctgccctgttccctgacctttcgccaggaggagaccatcagcatcatccggcttatcgaacaggctcggcatgccacctatggcatccgtaagtgcttcctcttcctgctgcagtgccagctgactcttgtggtcatccagttcctttcttgcctggtccagctgccgccactcctgagtaccaccgacatcctgtggctgtcctgcttttgctaccctctgctcagcatctctctgctggggaagcccccccatagctccatcatgtctatggcaacggggaaaaacctccagtccattcccaagaagacccagcactacttcctgctctgcttcctgctcaagttcagcctcaccatcagctcctgcctcatctgctttggcttcacactgcagagcttctgtgacagctcccgggaccgcaacctcaccaactgctcctccgtcatgctgcccagcaacgacgacagggctccagcctggtttgaggactttgccaatggactgctgtcggctcagaagctcacggccgccctgattgtcctgcacactgtcttcatttccatcacccatgtgcatcgcaccaagcccctgtggagaaagagccccttgaccaacctctggtgggccgtgacagtgcctgtggtgctgctgggtcaggtggtccagacggctgtggacctgcagctgtggacacacagggacagccacgtccactttggcctggaggacgtgcccctgctgacatggctcctgggctgcctgtccctggtccttgtggtggtgaccaatgagatcgtgaagctacatgagattcgggtccgagtccgctaccagaagcgacagaagctgcagtttgaaactaagctgggcatgaactctcccttctgagccactggctgtggtggctgtagttgcccccgtccctggggctaaagccagacccatttctgaacaggggagtttgtatcatgaatgtttccaggtttgctcctgcacccgtggcactggaaacccagctccccgtgtcagaccccgctgtcttcctgagccctggggctcactgtggaggagctgacggcctgggcccttggccagtcctggctcttccctgggcctcaccagggacactcttgaatgtatggcctcaggcgctccctagaggggccctaaaccccctcacctgtgagctaccccctttagggatcccttgcccccttggagatcccttgccccccagtgcctctgctcgtgggtccctggacacggccttgaagccaaccttctttggaggagcaacagcagcagccttggccgacgcgtccaactcccaaggctgccgtggagggcaggggggtggtgcttgcctggatgtggccccgagtgcctcccctccctccctctgtgggggagtctcccgcctgaacctgaagatggagcagggcccccgcttcgccctggagcctcttcctgtgcctggctcaagctggctgcctgtcagtcttggggaatctggcccaggtctcctcagcctctgccccagttctgggagaagtttctactggtgtatattttttactggaaatgagccttttaggaatgaatgtagactggtttgtattaaaatgtgtcaattgctaagaaatacctgtggctggtctgtaaggccactccagggtctgcccacccccggcggtggctggcaaagggaggcctaaaccttcctccatctacgcgggtgggtccctcaggtctggctcaggcgagacccctagggtcaggggtccccatgtcacagaggcaaacacacagcccagtcacgtggaatggtgttttcattggtgttagttgggggaagaggttaatggttacagagccagggcctgggccaatggggtcaggctctccctgccctcaggtgggcagtcggggctcctgctgtggtccgaagcccctcccccattgtgtcctctcaggcagttgatagaataaattccatttaaaatataaaaaaaaa

SEQ ID NO: 275 - DNA, 815 bp, Homo Sapiens
agagaacctagcggttacgccaacgcgcgcgtgcgcccttgcgcgtttctctcttcccactcgggtttgacctacagccgcccgggagaagatggctgccccagcagtgtccgggctctcccggcaggtgcgatgcttcagtacctctgtggtcagaccatttgccaagcttgtgaggcctcctgttcaggtatacggtattgaaggtcgctatgccacagctctttattctgctgcatcaaaacagaataagctggagcaagtagaaaaggagttgttgagagtagcacaaatcctgaaggaacccaaagtggctgcttctgttttgaatccctatgtgaagcgttccattaaagtgaaaagcctaaatgacatcacagcaaaagagaggttctctcccctcactaccaatctgatcaatttgcttgctgaaaatggtcgattaagcaatacccaaggagtcgtttctgccttttctaccatgatgagtgtccatcgcggagaggtaccttgcacagtgacctctgcatctcctttagaagaagccacactctctgaattaaaaactgtcctcaagagcttcctaagtcaaggccaagtattgaaattggaggctaagactgatccgtcaatcttgggtggaatgattgtgcgcattggcgagaaatatgttgacatgtctgtcaagaccaagattcagaagctgggcagggctatgcgggagattgtctaaaagtgttggttttctgccatcagtgaaaattcttaaacttggagcaacaataaaaagcttccagaacagatcaaaaaaaaaa

SEQ ID NO: 276 - DNA, 2638 bp, Homo Sapiens
accgacgcggcgaaggagcgcgccatggagcatgtgacagagggctcctgggagtcgctgcctgtgccgctgcacccgcaggtgctgggcgcgctgcgggagctgggcttcccgtacatgacgccggtgcagtccgcaaccatccctctgttcatgcgaaacaaagatgtcgctgcagaagcggtcacaggtagtggcaaaacactcgcttttgtcatccccatcctggaaattcttctgagaagagaagagaagttaaaaaagagtcaggttggagccataatcatcacccccactcgagagctggccattcaaatagacgaggtcctgtcgcatttcacgaagcacttccccgagttcagccagattctttggatcggaggcaggaatcctggagaagatgttgagaggtttaagcaacaaggtgggaacatcattgtggccactccaggccgcttggaggacatgttccggaggaaggccgaaggcttggatctggccagctgtgtgcgatccctggatgtcctggtgttggatgaggcagacagacttctggacatggggtttgaggcaagcatcaacaccattctggagtttttgccaaagcagaggagaacaggccttttctctgccactcagacgcaggaagtggagaacctggtgagagcgggcctccggaaccctgtccgggtctcagtgaaggagaagggcgtggcagccagcagtgcccagaagaccccctcccgcctggaaaactactacatggtatgcaaggcagatgagaaatttaatcagctggtccattttcttcgcaatcataagcaggagaaacacctggtcttcttcagcacctgtgcctgtgtggaatactatgggaaggctctggaagtgctggtgaagggcgtgaagattatgtgcattcacggaaagatgaaatataaacgcaataagatcttcatggagttccgcaaattgcaaagtgggattttagtgtgcactgatgtgatggcccggggaattgatattcctgaagtcaactgggttttgcagtatgaccctcccagcaatgcaagtgccttcgtgcatcgctgcggtcgcacagctcgcattggccacgggggcagcgctctggtgttcctcctgcccatggaagagtcatacatcaatttccttgcaattaaccaaaaatgccccctgcaggagatgaagccccagagaaacacagcggaccttctgccaaaactcaagtccatggccctggctgacagagctgtgtttgaaaagggcatgaaagcttttgtgtcatatgtccaagcttatgcaaagcatgaatgcaacctgattttcagattaaaggatcttgattttgccagccttgctcgaggttttgccctgctgaggatgcccaagatgccagaattgagaggaaagcagtttccagattttgtgcccgtggacgttaataccgacacgattccatttaaagataaaatcagagaaaagcagaggcagaaactcctggagcaacaaagaagagagaaaacagaaaatgaagggagaagaaaattcataaaaaataaagcttggtcaaagcagaaggccaaaaaagaaaagaagaaaaaaatgaatgagaaaaggaaaagggaagagggttctgatattgaagatgaggacatggaagaacttcttaatgacacaagactcttgaaaaaacttaagaaaggcaaaataactgaagaagaatttgagaagggcttgttgacaactggcaaaagaacaatcaagacagtggatttagggatctcagatttggaagatgactgctgattccagtgccacagatgaacccacaaggacatagctgttccctaacttggtggatggctccagtttgcttttaacgaaaatcacaacttcaggagacatctgaaaagaatgatgtctctgaaagctgtcctttcagatgagggagaaatgaaggatttcacacttcagaatattttactaaaaacattccagtcttggccgggtgcggtggctcctgcctataatcccagcactttgggaggctgaggcaggaggatcacttgagcccaggagttcaagaccagcctgggaacacagcgagaccctctcattaaaaacaacaaaacaaaacaattccagtcttggagtagtctaacagaagaaaatgtaaaattatttgagtgtaaataatagatgtcagtatttatcatgatgggtcacatatagacatatgtacatattatatatatatatatatatatatatatatatatatatatatatatataagctcttttttctgaggctattttatagttatttttaaacataaagatacagaagtcttcttgacttctgattttcaaaaccattcctcagtatcttcaggcatttgacctcctgaatgtgcttggccctgggcttcagttatcctttgatgtcctgcaggggtggctaatgtgctggggtttttctgtgttaatagtcacagtattgttttattggtgaatagctgaaaaacagagggattaagtcatattccgggaaagagaattatagtttttatgcctcctgttgaataaatggtgtcctgataaaaaaaaaaaaaaaa

SEQ ID NO: 277 - DNA, 1511 bp, Homo Sapiens
ggttagggcggggcgtgcttccgcgtctagccggagaaacttgagccggctgccccgcccacggtgcccgaagccccaaaggctggaattaggggctagaagtctggcacccaccgcctggccaggtgttcgggacgcgaccaggtgggcggtcgccccgccccgggagcgcggcttaatagctgagagcccgggggccaggccgcggctgcggcccaggcaacgccctgagggtggccacgctgccaggtgttccactcccccgggactatgggcaagggcccggggcggggagggcggcaggtgctgacactggagctgcgccggaggtcggggaactcggcctcctaagactgaggacactcgcctgctgggccggtcgagctgtgcggtgccctccgggacgcagggggcgctgcagccacgctgggtcaggctccgcagggccctcccaacccggggactaacggcgccggtgacgacttcgccgcgcgttggtcagccatggccaccgctctcgcgctacgtagcttgtaccgagcgcgaccctcgctgcgctgtccgcccgttgagcttccctggtgagcttggaccccgcgccctcgaccatccagccccctagggccggcgactgccagcccagcaccttccggcctctcgggctgcccggcccggccccgcgcccctgaccctttccctccgcagggccccgcggcgagggcatcggctctcgccggcggatgacgagctgtatcagcggacgcgcatctctctgctgcaacgcgaggccgctcaggcaatgtacatcgacagctacaacagccgcggcttcatgataaacggaaaccgcgtgctcggcccctgcgctctgctcccgcactcggtggtgcagtggaacgtgggatcccaccaggacatcaccgaagacagcttttccctcttctggttgctggagccccggatagagatcgtggtggtggggactggagaccggaccgagaggctgcagtcccaggtgcttcaagccatgaggcagcggggcattgctgtggaagtgcaggacacgcccaatgcctgtgccaccttcaacttcctgtgtcatgaaggccgagtaactggagctgctctcatccctccaccaggagggacttcacttacatctttgggccaagctgctcaatgaaccgccaggaactgacctgctgactgcactctgccaggcttcccaatgctttcactcttatctaccctttggcacttatcttgcttatcaacataataatttatacacttctcccattttgtatcaggtgtgttgctggccaggagctgatggctcactgggctcttggaggggaatgtgaagaaaccaaggagtcactttttcatctagattacttaggattccttgacttttcagaagtcgggaagcagtatgtttgcctgttgtagacctacttgctcacatgcagatttgagaggacctcaacggcttttctcacaaaaaaaaa

SEQ ID NO: 278 - DNA, 1820 bp, Homo Sapiens
gccggggccaggaggaggcgggcgcaggaggcgcgtgctcagtgtgctgggtaccaggcgactccgggacagggggtctcggccgtcggcgtcatggtttcgcgcgtgcagctcccgcctgagatccagctggctcagcgcctggcggggaatgagcaggtgacccgggaccgggcggtgaggaagctccggaaatacatcgtcgccaggactcagcgggccgcaggtggttttacgcacgacgagctgctgaaggtgtggaaaggactgttttattgcatgtggatgcaggacaagccactcctccaggaagaattaggaaggactatttcccagctcgttcatgcttttcagaccacggaggcgcagcacctgttccttcaggccttctggcagaccatgaatcgcgagtggacgggcattgacaggctgcgcctggataaattctacatgctcatgcggatggtcctgaacgagtccttgaaggttctgaagatgcaaggctgggaagaaagacagatcgaggagctgctagagctgctgatgactgagatcctgcaccccagcagccaggcccccaacggtgtgaagagccacttcatcgagatcttcctggaggagctgaccaaagtgggcgccgaggagcttacggcagaccagaacctgaagttcatcgaccccttctgcagaattgctgcccggaccaaggattccttggttttgaacaacatcactcgaggcatctttgagacgattgtggagcaggccccgcttgccattgaagacctcctgaatgaactggacacacaggatgaggaggtggcgtcggacagtgatgagtcctctgagggtggtgagcgtggagacgcgctgtcccagaagaggtctgagaagccgcccgcaggctccatctgcagggctgaacctgaggctggtgaggagcaggcaggtgacgacagggacagtggcggccccgttctccagtttgactacgaggcagttgctaacagactgtttgaaatggccagccgccagagcaccccttctcagaacagaaagcgtctctacaaagtgatccggaagctgcaggacctggcaggaggcattttccctgaagatgagatcccagagaaggcctgcaggcgcctgcttgaagggaggcggcagaagaagacgaagaagcagaagcgtctgctcaggttgcagcaggagagagggaaaggtgagaaggagcccccgagcccgggcatggagaggaagaggagcaggaggaggggtgtaggggccgaccccgaggcgcgggcagaggctggtgagcagccaggcacagctgagcgggccctgctccgagatcagcccaggggccgtggccagagaggggctcgccagagaaggaggacacctcggcccctgaccagtgcccgagcaaaggcggccaatgtccaggagccggagaagaagaagaaacgcagggagtgatgtggccgggccaaggacaggcagggagggaggccaggcctcgcttgcaccgcgggacgaggctgaccgggctgttctgtagactcaggaccgtggctccagaactcctgtgccaggcgggagggaagggcggcactggagagatgggcccatcattaggggccagcatcccaggaactggacctttccccagagcctccgcctgtggctgtgatgaccttgggccagaaggtcaaactccgaagactgaaactctgcctgcagcaggactggccgcccctgctgtggggggttcagaaaataaaatgccgcgcagcccttgccagggaaaaaaaaaaaaa

SEQ ID NO: 279 - DNA, 9410 bp, Homo Sapiens
cgccctcgagtggaggacgagaaggaaagcaccatgacgtccatccatttcgtggttcacccgctgccgggcaccgaggaccagctcaatgacaggttacgagaagtttctgagaagctgaacaaatataatttaaacagccacccccctttgaatgtattggaacaggctactattaaacagtgtgtggtgggaccaaatcatgctgcctttcttcttgaggatggtagagtttgcaggattggtttttcagtacagccagacagattggaattgggtaaacctgataataatgatgggtcaaagttgaacagcaactcgggggcagggaggacgtcaaggcctggtaggacaagcgactctccatggtttctctcaggttctgagactctaggcaggctggcaggcaacaccttaggaagccgctggagttctggagtgggtggaagtggtggaggatcctctggtaggtcatcagctggagctcgagattcccgccggcagactcgagttattcggacaggacgggatcgagggtctgggcttttgggcagtcagccccagccagttattccagcatctgtcattccagaggagctgatttcacaggcccaagttgttttacaaggcaaatccagaagtgtcattattcgagaacttcagagaacaaatcttgatgtgaaccttgctgtaaataatttacttagccgggatgatgaagatggagatgatggggatgatacagccagcgaatcttatttgcctggagaggatcttatgtctctccttgatgccgacattcattctgcccacccaagtgtcattattgatgcagatgccatgttttctgaagacattagctattttggttacccttcttttcgtcgttcatcactttccaggctaggctcatctcgagttctccttcttcccttagagagagactctgagctgttgcgtgaacgtgaatccgttttacgtttacgtgaacgaaggtggcttgatggagcctcatttgataatgaaaggggttctaccagcaaggaaggagagccaaacttggataagaagaatacacctgttcaaagtccagtatctctaggagaagatttgcagtggtggcctgataaggatggaacaaaattcatctgtattggggctctgtattctgaacttctggctgtcagcagtaaaggagaactttatcagtggaaatggagtgaatctgagccttacagaaatgcccagaatccttcattacatcatccacgagcaacatttttggggttaaccaatgaaaagatagtcctcctgtctgcaaatagcataagagcaactgtagctacagaaaataacaaggttgctacatgggtggatgaaactttaagttctgtggcttctaaattagagcacactgctcagacttactctgaacttcaaggagagcggatagtttctttacattgctgtgccctttacacctgcgctcagctggaaaacagtttatattggtggggtgtagttccttttagtcaaaggaagaaaatgttagagaaagctagagcaaaaaataaaaagcctaaatccagtgctggtatttcttcaatgccgaacatcactgttggtacccaggtatgcttgagaaataatcctctttatcatgctggagcagttgcattttcaattagtgctgggattcctaaagttggtgtcttaatggagtcagtttggaatatgaatgacagctgtagatttcaacttagatctcctgaaagcttgaaaaacatggaaaaagctagcaaaactactgaagctaagcctgaaagtaagcaggagccagtgaaaacagaaatgggtcctccaccatctccagcatccacgtgtagtgatgcatcctcaattgccagcagtgcatcaatgccatacaaacgacgacggtcaacccctgcaccaaaagaagaggaaaaggtgaatgaagagcagtggtctcttcgggaagtggtttttgtggaagatgtcaagaatgttcctgttggcaaggtgctaaaagtagatggtgcctatgttgctgtaaaatttccaggaacctccagtaatactaactgtcagaacagctctggtccagatgctgacccttcttctctcctgcaggattgtaggttacttagaattgatgaattgcaggttgtcaaaactggtggaacaccgaaggttcccgactgtttccaaaggactcctaaaaagctttgtatacctgaaaaaacagaaatattagcagtgaatgtagattccaaaggtgttcatgctgttctgaagactggaaattgggtacgatactgtatctttgatcttgctacaggaaaagcagaacaggaaaataattttcctacaagcagcattgctttccttggtcagaatgagaggaatgtagccattttcactgctggacaggaatctcccattattcttcgagatggaaatggtaccatctacccaatggccaaagattgcatgggaggaataagggatcccgattggctggatcttccacctattagtagtcttggaatgggtgtgcattctttaataaatcttcctgccaattcaacaatcaaaaagaaagctgctgttatcatcatggctgtagagaaacaaaccttaatgcaacacattctgcgctgtgactatgaggcctgtcgacaatatctaatgaatcttgagcaagcggttgttttagagcagaatctacagatgctgcagacattcatcagccacagatgtgatggaaatcgaaatattttgcatgcttgtgtatcagtttgctttccaaccagcaataaagaaactaaagaagaagaggaagcggagcgttctgaaagaaatacatttgcagaaaggctttctgctgttgaggccattgcaaatgcaatatcagttgtttcaagtaatggcccaggtaatcgggctggatcatcaagtagccgaagtttgagattacgggaaatgatgagacgttcgttgagagcagctggtttgggtagacatgaagctggagcttcatccagtgaccaccaggatccagtttcaccccccatagctccccctagttgggttcctgaccctcctgcgatggatcctgatggtgacattgattttatcctggcccccgctgtgggatctcttaccacagcagcaaccggtactggtcaaggaccaagcacctccactattccaggtccttccacagagccatctgtagtagaatccaaggatcgaaaggcgaatgctcattttatattgaaattgttatgtgacagtgtggttctccagccctatctacgagaacttctttctgccaaggatgcaagagggatgaccccatttatgtcagctgtaagtggccgagcttatcctgctgcaattaccatcttagaaactgctcagaaaattgcaaaagctgaaatatcctcaagtgaaaaagaggaagatgtattcatgggaatggtttgcccatcaggtaccaaccctgatgactctcctttatatgttttatgttgtaatgacacttgcagttttacatggactggagcagagcacattaaccaggatatttttgagtgtcgaacttgtggcttgctggagtcactgtgttgttgtacggaatgtgcaagggtttgtcataaaggtcatgattgcaaactcaaacggacatcaccaacagcctactgtgattgttgggagaaatgtaaatgtaaaactcttattgctggacagaaatctgctcgtcttgatctactttatcgcctgctcactgctactaatctggttactctgccaaacagcaggggagagcacctcttactattcttagtacagacagtcgcaaggcagacggtggagcattgtcaatacaggccacctcgaatcagggaagatcgtaaccgaaaaacagccagtcctgaagattcagatatgccagatcatgatttagagcctccaagatttgcccagcttgcattggagcgtgttctacaggactggaatgccttgaaatctatgattatgtttgggtcgcaggagaataaagaccctcttagtgccagcagtagaataggccatcttttgccagaagagcaagtatacctcaatcagcaaagtggcacaattcggctggactgtttcactcattgccttatagttaagtgtacagcagatattttgcttttagatactctactaggtacactagtgaaagaactccaaaacaaatatacacctggacgtagagaagaagctattgctgtgacaatgaggtttctacgttcagtggcaagagtttttgttattctgagtgtggaaatggcttcatccaaaaagaaaaacaactttattccacagccaattggaaaatgcaagcgtgtattccaagcattgctaccttacgctgtggaagaattgtgcaacgtagcagagtcactgattgttcctgtcagaatggggattgctcgtccaactgcaccatttaccctggctagtactagcatagatgccatgcagggcagtgaagaattattttcagtggaaccactaccaccacgaccatcatctgatcagtctagcagctccagtcagtctcagtcatcctacatcatcaggaatccacagcagaggcgcatcagccagtcacagcccgttcggggcagagatgaagaacaggatgatattgtttcagcagatgtggaagaggttgaggtggtggagggtgtggctggagaagaggatcatcatgatgaacaggaagaacacggggaagaaaatgctgaggcagagggacaacatgatgagcatgatgaagacgggagtgatatggagctggacttgttagcagcagctgaaacagaaagtgatagtgaaagtaaccacagcaaccaagataatgctagtgggcgcagaagcgttgtcactgcagcaactgctggttcagaagcaggagcaagcagtgttcctgccttcttttctgaagatgattctcaatcgaatgactcaagtgattctgatagcagtagtagtcagagtgacgacatagaacaggagacctttatgcttgatgagccattagaaagaaccacaaatagctcccatgccaatggtgctgcccaagctccccgttcaatgcagtgggctgtccgcaacacccagcatcagcgagcagccagtacagccccttccagtacatctacaccagcagcaagttcagcgggtttgatttatattgatccttcaaacttacgccggagtggtaccatcagtacaagtgctgcagctgcagcagctgctttggaagctagcaacgccagcagttacctaacatctgcaagcagtttagccagggcttacagcattgtcattagacaaatctcggacttgatgggccttattcctaagtataatcacctagtatactctcagattccagcagctgtgaaattgacttaccaagatgcagtaaacttacagaactatgtagaagaaaagcttattcccacttggaactggatggtcagtattatggattctactgaagctcaattacgttatggttctgcattagcatctgctggtgatcctggacatccaaatcatcctcttcacgcttctcagaattcagcgagaagagagaggatgactgcgcgagaagaagctagcttacgaacacttgaaggcagacgacgtgccaccttgcttagcgcccgtcaaggaatgatgtctgcacgaggagacttcctaaattatgctctgtctctaatgcggtctcataatgatgagcattctgatgttcttccagttttggatgtttgctcattgaagcatgtggcatatgtttttcaagcacttatatactggattaaggcaatgaatcagcagacaacattggatacacctcaactagaacgcaaaaggacgcgagaactcttggaactgggtattgataatgaagattcagaacatgaaaatgatgatgacaccaatcaaagtgctactttgaatgataaggatgatgactctcttcctgcagaaactggccaaaaccatccatttttccgacgttcagactccatgacattccttgggtgtatacccccaaatccatttgaagtgcctctggctgaagccatccccttggctgatcagccacatctgttgcagccaaatgctagaaaggaggatctttttggccgtccaagtcagggtctttattcttcatctgccagtagtgggaaatgtttaatggaggttacagtggatagaaactgcctagaggttcttccaacaaaaatgtcttatgctgccaatctgaaaaatgtaatgaacatgcaaaaccggcaaaaaaaagaaggggaagaacagcccgtgctgccagaagaaactgagagttcaaaaccagggccatctgctcatgatcttgctgcacaattaaaaagtagcttactagcagaaataggacttactgaaagtgaagggccacctctcacatctttcaggccacagtgtagctttatgggaatggttatttcccatgatatgctgctaggacgttggcgcctttctttagaactgttcggcagggtattcatggaagatgttggagcagaacctggatcaatcctaactgaattgggtggttttgaggtaaaagaatcaaaattccgcagagaaatggaaaaactgagaaaccagcagtcaagagatttgtcactagaggttgatcgggatcgagatcttctcattcagcagactatgaggcagcttaacaatcactttggtcgaagatgtgctactacaccaatggctgtacacagagtaaaagtcacatttaaggatgagccaggagagggcagtggtgtagcacgaagtttttatacagccattgcacaagcatttttatcaaatgaaaaattgccaaatctagagtgtatccaaaatgccaacaaaggcacccacacaagtttaatgcagagattaaggaaccgaggagagagagaccgggaaagggagagagaaagggaaatgaggaggagtagtggtttgcgagcaggttctcggagggaccgggatagagactttagaagacagctttccatcgacactaggccctttagaccagcctctgaagggaatcctagcgatgatcctgagcctttgccagcacatcggcaggcacttggagagaggctttatcctcgtgtacaagcaatgcaaccagcatttgcaagtaaaatcactggcatgttgttggaattatccccagctcagctgcttctccttctagcaagtgaggattctctgagagcaagagtggatgaggccatggaactcattattgcacatggacgggaaaatggagctgatagtatcctggatcttggattagtagactcctcagaaaaggtacagcaggaaaaccgaaagcgccatggctctagtcgaagtgtagtagatatggatttagatgatacagatgatggtgatgacaatgcccctttgttttaccaacctgggaaaagaggattttatactccaaggcctggcaagaacacagaagcaaggttgaattgtttcagaaacattggcaggattcttggactatgtctgttacagaatgaactatgtcctatcacattgaatagacatgtaattaaagtattgcttggtagaaaagtcaattggcatgattttgctttttttgatcctgtaatgtatgagagtttgcggcaactaatcctcgcgtctcagagttcagatgctgatgctgttttctcagcaatggatttggcatttgcaattgacctgtgtaaagaagaaggtggaggacaggttgaactcattcctaatggtgtaaatataccagtcactccacagaatgtatatgagtatgtgcggaaatacgcagaacacagaatgttggtagttgcagaacagcccttacatgcaatgaggaaaggtctactagatgtgcttccaaaaaattcattagaagatttaacggcagaagattttaggcttttggtaaatggctgcggtgaagtcaatgtgcaaatgctgatcagttttacctctttcaatgatgaatcaggagaaaatgctgagaagcttctgcagttcaagcgttggttctggtcaatagtagagaagatgagcatgacagaacgacaagatcttgtttacttttggacatcaagcccatcactgccagccagtgaagaaggattccagcctatgccctcaatcacaataagaccaccagatgaccaacatcttcctactgcaaatacttgcatttctcgactttacgtcccactctattcctctaaacagattctcaaacagaaattgttactcgccattaagaccaagaattttggttttgtgtagagtataaaaagtgtgtattgctgtgtaatattactagcaaattttgtagatttttttccatttgtctataaaagtttatggaagttaatgctgtcatacccccctggtggtaccttaaagagataaaatgcagacattccttgctgagtttatagcttaaaggcctaaggagcactagcaacatttggctatattggtttgctagtcaccaacttctgggtctaaccccagccaaagatgacagcagaacaacataatttacactgtgatttatctttttgctgagggggaaaaaatgtaaatgttctgaaaattcactgctgcctttgtggaaactgtttcagcaaaggttcttgtatagagggaatagggaatttcaaaataaaaaattaagtatgttctgtgttttcattttaactttttttatggtgtttaatttgtggttggctgcaactgtgtatcatgtatatggaacttgtaaaaaagttctcgacattcagatcttaagagatgaaatcacttttacctataaaaaccacttttattgcggtttgactgcattgagctctaggatattaaatgatatcactaatattttgcatgtaatttgctcatttgagtgagggcactttttttgtacatatgatggggccaatgcacaatacttttatcacaatcaactttttctttgtatccctatttcaatgagcagtcagtctcaagaggttactgcacttcagttctaactagacatttgtactaaggtatttcagttatgtaaactcagcctgggcactttctgataactgtaaaatgttttataagatcatgattattgaagatacattttggaaaattttaaatgttcgtgagcagcttaactacttttgtatctagccttttttaagtatcttgttacatttacttttttaaataaagaaattacagaagaaatgtcaagaaaaaaaaaaaaaaaa

SEQ ID NO: 280 - DNA, 7299 bp, Homo Sapiens
ctccgctgcctgagtcctcggcgaacatggcggcccccgagtcagggccggctttgagtccaggcactgcagagggtgaggaggagacgattctctatgacttgttggtcaacaccgagtggccaccggagactgaagtacagcctagaggcaaccaaaaacatggtgcatcctttatcatcacgaaagcaattcgagatcgtttattatttttacgccaatacatctggtacagcccggcaccttttttgctccctgatggactggttcgcttggttaataaacagataaactggcatttggtacttgcaagcaatggaaagcttttggctgctgttcaagatcagtgtgtggaaatcaggtctgcaaaagatgattttacatccattattgggaaatgtcaagttccgaaagacccgaaaccccagtggagacgggtagcatggagttacgattgtaccctactggcctatgccgaaagcacaggaactgtgagggtgtttgatctcatgggaagtgaactctttgtcatttccccggcatctagttttataggtgacttaagctatgccattgctgggttgatatttttagaatataaagcaagtgcacagtggtctgcagaactcctggtcatcaattaccgaggagaacttagaagttaccttgtaagtgttggaacaaatcagagctaccaagaaagtcactgtttcagcttcagtagtcattatcctcatggaatcaacacagctatttaccaccctggtcacagacttttacttgttggtggatgtgaaactgctgaagtaggcatgtcaaaagcttctagctgtggcctttctgcctggagagttctttcaggatcaccgtattataagcaggttactaatggtggagacggggttactgcagtaccgaagacactgggattattaaggatgttaagtgtcaagttttacagtcgccagggacaagaacaggatggaatttttaagatgagcctttctccagatgggatgctcctggcagccattcacttctcagggaaactgagcatctgggcgattccatctctgaagcaacaaggggaatggggtcaaaatgagcagccaggctatgatgaccttaatcctgattggaggctctctactgagaagagaaaaaaaatcaaagataaagagtccttttacccactgatagatgtcaattggtgggcagacagtgcagtgactttagctcgatgctctggtgctttaactgtttcatctgtgaaaactttgaagaatttactgggaaaatcctgtgaatggtttgaaccatcacctcaagtcactgctacccatgatgggggatttttaagtttggagtgtgagattaaacttgcccccaaacgatctcgtttggagactagagctggagaagaagatgaaggagaagaggattctgattctgattatgaaatatctgccaaggctcgctactttggttatataaaacagggcctttacttggtgactgaaatggagcgatttgcaccaccacggaaacgcccacgaaccattactaaaaactaccgccttgtgagtttgcgctccacgacaccagaggaactttatcagaggaagattgaaagtgaagagtatgaggaagccttgtccttggctcatacctacggcctggatactgaccttgtatatcagaggcagtggaggaagtcagcggtcaacgttgcttcaattcagaattatttgagtaaaataaagaagcgatcctgggttctccatgagtgtttggaaagagttcctgaaaatgtggatgctgcaaaagaactgcttcagtatggattaaaaggcacagacctggaggctcttttagcaatagggaaaggagcagatgatggcagatttacattacctggtgaaatagacattgacagtatctcctatgaagagctttcaccacctgatgaagagcctgccaagaataaaaaggaaaaggagctcaagaagagacaagaactactgaaattagtgaacttttccaagttgacactggaacaaaaggaactttgccgttgtagacggaagttattaacctacttagatcgacttgcaacatatgaggaaatcctaggagtgcctcatgcatctgaacagagatatgatgctgaattctttaagaaattcagaaatcagaatattgttctctcagcaagaacttatgctcaggaaagtaatgtacaagccctggaaattctgtttacttaccatggttccgacctgcttcctcatcgccttgcaattctgtccaactttccagagaccacttctccacatgaatattctgttttgctgcccgaagcttgttttaacggtgactccctgatgatcattccttggcatgaacataaacaccgagctaaagattggtgcgaggagttggcttgcagaatggttgttgagccgaatctccaagatgaaagtgaattcttgtatgctgcacagcctgagttactaaggttcaggatgacccagcttacggtggagaaggttatggactggtatcagaccagagcagaggaaatagagcattatgctcggcaggtggactgtgcattgtcacttattcgacttgggatggagcggaatattcctggtttgctggttctctgtgacaatttggttactctggaaacattggtttatgaagccaggtgtgatgtaactctaaccctgaaagaactccagcagatgaaagacattgaaaaactaagattactgatgaatagttgttctgaggataaatatgtgacaagtgcctaccagtggatggttccctttcttcatcgttgtgagaaacagtcgcctggtgtggctaatgagctattaaaagaatatttagtaactttagctaaaggggacttaaaatttcccctgaagatatttcagcattccaaaccagatctgcagcaaaaaattattcctgatcaggaccaactgatggcaatagcactagagtgcatctatacctgtgaacgaaatgatcaactctgtctttgctatgacctactagaatgtctgccagaaagaggatatggtgataagacagaggcaaccacaaagcttcatgacatggtagaccaactggaacaaattctcagtgtgtcagagcttttggaaaaacatggactcgagaaaccaatttcatttgttaaaaacactcaatctagctcagaagaggcacgcaagctgatggttagattgacgaggcacactggccggaagcagcctcctgtcagtgagtctcattggagaacgttgctgcaagacatgttaactatgcagcagaatgtatacacatgtctagattctgatgcctgctatgagatatttacagaaagccttctgtgctctagtcgccttgaaaacatccacctggctggacagatgatgcactgcagtgcttgttcagaaaatcctccagctggtatagcccataaagggaaaccccactacagggtcagctacgaaaagagtattgacttggttttggctgccagcagagagtacttcaattcttctaccaacctcactgatagctgcatggatctagccaggtgctgcttacaactgataacagacagaccccctgccattcaagaggagctagatcttatccaagccgttggatgtcttgaagaatttggggtaaagatcctgcctttgcaagtgcgattgtgccctgatcggatcagtctcatcaaggagtgtatttcccagtcccccacatgctataaacaatccaccaagcttctgggccttgctgagctgctgagggttgcaggtgagaacccagaagaaaggcggggacaggttctaatccttttagtggagcaggcacttcgcttccatgactacaaagcagccagtatgcattgtcaggagctgatggccacaggttatcctaaaagttgggatgtttgtagccagttaggacaatcagaaggttaccaggacttggccactcgtcaagagctcatggcttttgctttgacacattgccctcctagcagcattgaacttcttttggcagctagcagctctctgcagacagaaattctttatcaaagagtgaatttccagatccatcatgaaggaggggaaaatatcagtgcttcaccattaactagtaaagcagtacaagaggatgaagtaggtgttccaggtagcaattcagctgacctattgcgctggaccactgctaccaccatgaaagtcctttccaacaccacaaccaccaccaaagcggtgctgcaggccgtcagtgatgggcagtggtggaagaagtctttaacttaccttcgaccccttcaggggcaaaaatgtggtggtgcatatcaaatcggaactacagccaatgaagatctagagaaacaagggtgtcatcctttttatgaatctgtcatctcaaatccttttgtcgctgagtctgaagggacctatgacacctatcagcatgttccagtggaaagctttgcagaagtattgctgagaactggaaaattggcagaggctaaaaataaaggagaagtatttccaacaactgaagttctcttgcaactagcaagtgaagccttgccaaatgacatgaccttggctcttgcttaccttcttgccttaccacaagtgttagatgctaaccggtgctttgaaaagcagtccccctctgcattatctctccagctggcagcgtattactatagcctccagatctatgcccgattggccccatgtttcagggacaagtgccatcctctttacagggctgatcccaaagaactaatcaagatggtcaccaggcatgtgactcgacatgagcacgaagcctggcctgaagaccttatttcactgaccaagcagttacactgctacaatgaacgtctcctggatttcactcaggcgcagatccttcagggccttcggaagggtgtggacgtgcagcggtttactgcagatgaccagtataaaagggaaactatccttggtctggcagaaactctagaggaaagcgtctacagcattgctatttctctggcacaacgttacagtgtctcccgctgggaagtttttatgacccatttggagttcctcttcacggacagtggtttgtccacactagaaattgaaaatagagcccaagaccttcatctctttgagactttgaagactgatccagaagcctttcaccagcacatggtcaagtatatttaccctactattggtggctttgatcacgaaaggctgcagtattatttcactcttctggaaaactgtggctgtgcagatttggggaactgtgccattaaaccagaaacccacattcgactgctgaagaagtttaaggttgttgcatcaggtcttaattacaaaaagctgacagatgaaaacatgagtcctcttgaagcattggagccagttctttcaagtcaaaatatcttgtctatttccaaacttgttcccaaaatccctgaaaaggatggacagatgctttccccaagctctctgtacaccatctggttacagaagttgttctggactggagaccctcatctcattaaacaagtcccaggctcttcaccggagtggcttcatgcctatgatgtctgcatgaagtactttgatcgtctccacccaggtgacctcatcactgtggtagatgcagttacattttctccaaaagctgtgaccaagctgtctgtggaagcccgtaaagagatgactagaaaggctattaagacagtcaaacattttattgagaagccaaggaaaagaaactcagaagacgaagctcaagaagctaaggattctaaagttacctatgcagatactttgaatcatctggagaaatcacttgcccacctggaaaccctgagccacagcttcatcctttctctgaagaatagtgagcaggaaacactgcaaaaatacagtcacctctatgatctgtcccgatcagaaaaagagaaacttcatgatgaagctgtggctatttgtttagatggtcagcctctagcaatgattcagcagctgctagaggtggcagttggccctcttgacatctcacccaaggatatagtgcagagtgcaatcatgaaaataatttctgcattgagtggtggcagtgctgaccttggtgggccaagggacccactgaaggtcctggaaggtgttgttgcagcagtccacgccagtgtggacaagggtgaggagctggtttcacctgaggacctgctggagtggctgcggcctttctgtgctgatgacgcctggccggtgcggccccgcattcacgtgctgcagattttggggcaatcatttcacctgactgaggaggacagcaagctcctcgtgttctttagaactgaagccattctcaaagcctcctggccccagagacaggtagacatagctgacattgagaatgaagagaaccgctactgtctattcatggaactcctggaatctagtcaccacgaggctgaatttcagcacttggttttacttttgcaagcttggccacctatgaaaagtgaatatgtcataaccaataatccatgggtgagactagctacagtgatgctaaccagatgtacgatggagaacaaggaaggattggggaatgaagttttgaaaatgtgtcgctctttgtataacaccaagcagatgctgcctgcagagggtgtgaaggagctgtgtctgctgctgcttaaccagtccctcctgcttccatctctgaaacttctcctcgagagccgagatgagcatctgcacgagatggcactggagcaaatcacggcagtcactacggtgaatgattccaattgtgaccaagaacttctttccctgctcctggatgccaagctgctggtgaagtgtgtctccactcccttctatccacgtattgttgaccacctcttggctagcctccagcaagggcgctgggatgcagaggagctgggcagacacctgcgggaggccggccatgaagccgaagccgggtctctccttctggccgtgagggggactcaccaggccttcagaaccttcagtacagccctccgcgcagcacagcactgggtgtgagggccacctgtggccctgctccttagcagaaaaagcatctggagttgaatgctgttcccagaagcaacatgtgtatctgccgattgttctccatggttccaacaaattgcaaataaaactgtatggaaacgatgagcaagtaaaaaaaaaaaaaatt

SEQ ID NO: 281 - DNA, 2369 bp, Homo Sapiens
cctgggcgccagcgcagcgtagcaaatccaggcagcgccacgcgcggccggggccgggcggaaccgagaagccgggaccgcgctgcgacgcgccggccgcatggagcctgccgccggtttcctgtctccgcgccccttccagcgtgcggccgccgcgcccgctcccccggccgggcccgggccgcctccgagtgccttgcgcggacctgagctggagatgctggccgggctaccgacgtcagaccccgggcgcctcatcacggacccgcgcagcggccgcacctacctcaaaggccgcttgttgggcaaggggggcttcgcccgctgctacgaggccactgacacagagactggcagcgcctacgctgtcaaagtcatcccgcagagccgcgtcgccaagccgcatcagcgcgagaagatcctaaatgagattgagctgcaccgagacctgcagcaccgccacatcgtgcgtttttcgcaccactttgaggacgctgacaacatctacattttcttggagctctgcagccgaaagtccctggcccacatctggaaggcccggcacaccctgttggagccagaagtgcgctactacctgcggcagatcctttctggcctcaagtacttgcaccagcgcggcatcttgcaccgggacctcaagttgggaaattttttcatcactgagaacatggaactgaaggtgggggattttgggctggcagcccggttggagcctccggagcagaggaagaagaccatctgtggcacccccaactatgtggctccagaagtgctgctgagacagggccacggccctgaggcggatgtatggtcactgggctgtgtcatgtacacgctgctctgcgggagccctccctttgagacggctgacctgaaggagacgtaccgctgcatcaagcaggttcactacacgctgcctgccagcctctcactgcctgcccggcagctcctggccgccatccttcgggcctcaccccgagaccgcccctctattgaccagatcctgcgccatgacttctttaccaagggctacacccccgatcgactccctatcagcagctgcgtgacagtcccagacctgacaccccccaacccagctaggagtctgtttgccaaagttaccaagagcctctttggcagaaagaagaagagtaagaatcatgcccaggagagggatgaggtctccggtttggtgagcggcctcatgcgcacatccgttggccatcaggatgccaggccagaggctccagcagcttctggcccagcccctgtcagcctggtagagacagcacctgaagacagctcaccccgtgggacactggcaagcagtggagatggatttgaagaaggtctgactgtggccacagtagtggagtcagccctttgtgctctgagaaattgtatagccttcatgcccccagcggaacagaacccggcccccctggcccagccagagcctctggtgtgggtcagcaagtgggttgactactccaataagttcggctttgggtatcaactgtccagccgccgtgtggctgtgctcttcaacgatggcacacatatggccctgtcggccaacagaaagactgtgcactacaatcccaccagcacaaagcacttctccttctccgtgggtgctgtgccccgggccctgcagcctcagctgggtatcctgcggtacttcgcctcctacatggagcagcacctcatgaagggtggagatctgcccagtgtggaagaggtagaggtacctgctccgcccttgctgctgcagtgggtcaagacggatcaggctctcctcatgctgtttagtgatggcactgtccaggtgaacttctacggggaccacaccaagctgattctcagtggctgggagcccctccttgtgacttttgtggcccgaaatcgtagtgcttgtacttacctcgcttcccaccttcggcagctgggctgctctccagacctgcggcagcgactccgctatgctctgcgcctgctccgggaccgcagcccagcctaggacccaagccctgaggcctgaggcctgtgcctgtcaggctctggcccttgcctttgtggccttcccccttcctttggtgcctcactgggggctttgggccgaatcccccagggaatcagggaccagctttactggagttgggggcggcttgtcttcgctggctcctaccccatctccaagataagcctgagccttagctcccagctagggggcgttatttatggaccacttttatttattgtcagacacttatttattgggatgtgagccccaggggggcctcctcctaggataataaacaattttgcagaattggaaaaaaaaaaaa

SEQ ID NO: 282 - DNA, 715 bp, Homo Sapiens
tgcagacttgtaggcagcaactcaccctcactcagaggtcttctggttctggaaacaactctagctcagccttctccaccatgagcctcagacttgataccaccccttcctgtaacagtgcgagaccacttcatgccttgcaggtgctgctgcttctgtcattgctgctgactgctctggcttcctccaccaaaggacaaactaagagaaacttggcgaaaggcaaagaggaaagtctagacagtgacttgtatgctgaactccgctgcatgtgtataaagacaacctctggaattcatcccaaaaacatccaaagtttggaagtgatcgggaaaggaacccattgcaaccaagtcgaagtgatagccacactgaaggatgggaggaaaatctgcctggacccagatgctcccagaatcaagaaaattgtacagaaaaaattggcaggtgatgaatctgctgattaatttgttctgtttctgccaaacttctttaactcccaggaagggtagaattttgaaaccttgattttctagagttctcatttattcaggatacctattcttactgtattaaaatttggatatgtgtttcattctgtctcaaaaatcacattttattctgagaaggttggttaaaagatggcagaaagaagatgaaaataaataagcctggtttcaaccctctaattcttgcctaaaaaaaaaaaaaaaaa

SEQ ID NO: 283 - DNA, 3189 bp, Homo Sapiens
ggccgcttgcttcctgtttgtccgacgaggagacatggcggcggcgccggtagcggctgggtctggagccggccgagggagacggtcggcagccacagtggcggcttggggcggatggggcggccggccgcggcctggtaacattctgctgcagctgcggcagggccagctgaccggccggggcctggtccgggcggtgcagttcactgagacttttttgacggagagggacaaacaatccaagtggagtggaattcctcagctgctcctcaagctgcacaccaccagccacctccacagtgactttgttgagtgtcaaaacatcctcaaggaaatttctcctcttctctccatggaggctatggcatttgttactgaagagaggaaacttacccaagaaaccacttatccaaatacttacatttttgacttgtttggaggtgttgatcttcttgtagaaattcttatgaggcctacgatctctatccggggacagaaactgaaaataagtgatgaaatgtccaaggactgcttgagtatcctgtataatacctgtgtctgtacagagggagttacaaagcgtttggcagaaaagaatgactttgtgatcttcctgtttacattgatgacaagtaagaagacattcttacaaacagcaaccctcattgaagatattttgggtgttaaaaaggaaatgatccgactagatgaagtccccaatctgagttccttagtatccaatttcgatcagcagcagctcgctaatttctgccggattctggctgtcaccatttcagagatggatacagggaatgatgacaagcacacgcttcttgccaaaaatgctcaacagaagaagagcttgagtttggggccttctgcagctgaaatcaatcaagcggcccttctcagcattcctggctttgttgagcggctttgcaaactggcgactcgaaaggtgtcagagtcaacgggcacagccagcttccttcaggagttggaagagtggtacacatggctagacaatgctttggtgctagatgccctgatgcgagtggccaatgaggagtcagagcacaatcaagcctccattgtgttccctcctccaggggcttctgaggagaatggcctgcctcacacgtcagccagaacccagctgccccagtcaatgaagattatgcatgagatcatgtacaaactggaagtgctctatgtcctctgcgtgctgctgatggggcgtcagcgaaaccaggttcacagaatgattgcagagttcaagctgatccctggacttaataatttgtttgacaaactgatttggaggaagcattcagcatctgcccttgtcctccatggtcacaaccagaactgtgactgtagcccggacatcaccttgaagatacagtttttgaggcttcttcagagcttcagtgaccaccacgagaacaagtacttgttactcaacaaccaggagctgaatgaactcagtgccatctctctcaaggccaacatccctgaggtggaagctgtcctcaacaccgacaggagtttggtgtgtgatgggaagaggggcttattaactcgtctgctgcaggtcatgaagaaggagccagcagagtcgtctttcaggttttggcaagctcgggctgtggagagtttcctccgagggaccacctcctatgcagaccagatgttcctgctgaagcgaggcctcttggagcacatcctttactgcattgtggacagcgagtgtaagtcaagggatgtgctccagagttactttgacctcctgggggagctgatgaagttcaacgttgatgcattcaagagattcaataaatatatcaacaccgatgcaaagttccaggtattcctgaagcagatcaacagctccctggtggactccaacatgctggtgcgctgtgtcactctgtccctggaccgatttgaaaaccaggtggatatgaaagttgccgaggtactgtctgaatgccgcctgctcgcctacatatcccaggtgcccacgcagatgtccttcctcttccgcctcatcaacatcatccacgtgcagacgctgacccaggagaacgtcagctgcctcaacaccagcctggtgatcctgatgctggcccgacggaaagagcggctgcccctgtacctgcggctgctgcagcggatggagcacagcaagaagtaccccggcttcctgctcaacaacttccacaacctgctgcgcttctggcagcagcactacctgcacaaggacaaggacagcacctgcctagagaacagctcctgcatcagcttctcatactggaaggagacagtgtccatcctgttgaacccggaccggcagtcaccctctgctctcgttagctacattgaggagccctacatggacatagacagggacttcactgaggagtgaccttgggccaggcctcgggaggctgctgggccagtgtgggtgagcgtgggtacgatgccacacgccctgccctgttcccgttcctccctgctgctctctgcctgccccaggtctttgggtacaggcttggtgggagggaagtcctagaagcccttggtccccctgggtctgagggccctaggtcatggagagcctcagtccccataatgaggacagggtaccatgcccacctttccttcagaaccctggggcccagggccacccagaggtaagaggacatttagcattagctctgtgtgagctcctgccggtttcttggctgtcagtcagtcccagagtggggaggaagatatgggtgacccccaccccccatctgtgagccaagcctcccttgtccctggcctttggacccaggcaaaggcttctgagccctgggcaggggtggtgggtaccagagaatgctgccttcccccaagcctgcccctctgcctcattttcctgtagctcctctggttctgtttgctcattggccgctgtgttcatccaagggggttctcccagaagtgaggggcctttccctccatcccttggggcacggggcagctgtgcctgccctgcctctgcctgaggcagccgctcctgcctgagcctggacatggggcccttccttgtgttgccaatttattaacagcaaataaaccaattaaatggagactattaaataactttattttaaaaatgaaaaaaaaaaaaaaaaaaaa

SEQ ID NO: 284 - DNA, 4255 bp, Homo Sapiens
gcggagcgcgaggaggtggagccgcgggctgcgggctccggcgcctgcgtccgcccggccagcccggctctgcgctgcgagaggccggacggcagtcgcggctgcgctcgggagagagcgcgggggacatggggcgcggcggcccgcctgggcctcgcaggctccggagccccgagtgagcgagagcgtccccagccgcctacctggccatggccaacggagtgatcccgccgcccgggggcgcctcccccctaccccaggtccgggtgcccttggaggagccccctctaagtccagacgtggaggaggaggacgatgacttgggcaagaccttggctgtgagcaggtttggggacctcatcagcaagcccccggcctgggaccccgagaagcccagccgcagctacagcgagcgggactttgagtttcaccggcacacatcccaccacacccaccacccgctctcagcgcgcctgcctccaccccacaagctgcggcggctgccccccacctctgcccggcacaccaggagaaagaggaagaaggagaaaacctctgctcctccctccgaggggacccctcccatccaggaggaggggggagctggagtggatgaggaagaggaggaagaggaggaagaggaaggagaatctgaggcagaacctgtggagccccccccctcagggaccccacagaaggcaaagttctccattggaagtgacgaggatgacagtccaggcctccctgggagggctgctgtcaccaagcccctgccctcggtgggcccacacactgacaagagcccccagcactccagcaggccgtgctctgagctgagggacggtgatggaaccaccgacctggccctgtcaagtccaaggctgctgtgttgcctccccagctcccccagcccccgggcccgggcctcccgactcgctggggagaaaagccggccctggagcccatcggccagttatgacctgcgggagcgactgtgcccaggcagtgccctgggcaacccaggtggtccagagcagcaggtgcccacagatgaggcggaggcccagatgctgggttctgcagacctggacgacatgaagagtcaccgactggaggacaaccctggtgtgcggcgacacttagtgaaaaagccctcccggacgcagggcgggaggggcagtcccagcggcctggcccccatccttcgcaggaagaagaagaagaaaaagctggaccggaggcctcatgaggtgttcgtggagctgaacgagctgatgctggaccgcagccaggagccccactggcgggagacggcccgctggatcaagtttgaggaggacgtggaggaggagacggagcgctgggggaagccccatgttgcctcgctctccttccgtagccttctggagctcaggaggaccatcgcccatggagctgccctcctggacctggagcaaaccaccctgccaggcattgcacacctcgtggtggagaccatgattgtgtctgaccagatccggccggaggacagggccagcgtcctacgtaccctgctactgaagcacagccatcccaacgatgacaaggacagtggcttctttccccgaaacccatcgagctccagcatgaactcggttctggggaatcatcacccaactcccagccatggccctgatggggcggtgcctaccatggctgatgacctgggggagccagccccactctggccacatgaccctgacgccaaggagaagcccctccacatgcctgggggagatggtcaccgggggaaaagcctgaagctgctggagaagatccctgaagatgctgaggccacggttgtgcttgtgggttgtgtgcctttcttggagcagcctgcagcagccttcgtgcgtctgaatgaggctgtactcctggagtctgtgcttgaggtccctgtcccggtccgcttcctcttcgtgatgctggggcccagccacaccagcactgactatcacgagcttgggcgctccattgccacccttatgtctgacaagctgtttcatgaggctgcctaccaggcagatgaccggcaagacctcctaagtgccatcagcgagttcctggatggcagcattgtgatccccccgtccgaggtggagggccgtgacctgctgcgctccgtggctgctttccagcgagagctgcttaggaagcggcgagagcgtgaacagaccaaagtcgagatgaccacacggggtggctacacggcccctgggaaagaactgtctttggagttggggggctctgaggcgacccctgaagatgaccccttgctgcggacgggctcggtatttggggggcttgtgcgggatgtgaggcgccggtacccgcactaccccagtgacctgcgagatgcgctgcactcccagtgtgtggccgctgtgctcttcatctacttcgcagccctcagccctgccatcaccttcggggggctgctgggagagaagaccgaggggctgatgggcgtgtccgagctgatcgtgtccaccgctgtgctcggcgtcctcttctctctgctgggagctcagccgctgcttgtggttggcttctctgggccgctgcttgtgtttgaggaagccttcttcaagttctgccgagcccaggacctggagtacctcactggccgggtgtgggttggtctctggctggtggtcttcgtccttgccctggtggccgccgaaggcagcttcctggtccgctacatctcgcctttcacccaggagatctttgcctttctcatctcactcattttcatctacgagaccttctacaagctctacaaggtgttcacagagcacccactgctgccgttctacccccctgagggggccctggaggggtccctggatgctggtctggagccaaatggcagtgccctgccccccaccgagggcccccccagcccgaggaaccagcccaatacggcactgctctcactcatcctcatgctcgggaccttcttcatagccttcttcctgcgcaagttcaggaacagccgcttcctggggggcaaggctcgtcgcatcatcggggactttggcatccccatctccatcctggtgatggtcctggtggattactccatcacagacacctacacgcagaagctgacagtgcctacagggctctcagtgacctctcccgataagcgctcgtggttcatcccacccctgggcagtgcccgtcctttcccgccgtggatgatggtggcagccgctgttcccgccctcctcgtcctcatcctgatcttcatggagacacagatcacggcgcttatcgtcagccagaaggcgcggaggctgctcaagggctccggtttccacctggacctgctcctcattggctccctgggggggctctgtgggctgtttgggttgccctggctcacggctgccacggtccgctccgtcacccatgtcaatgcgttgacagtgatgcgtactgccatcgcgcctggtgacaagccccagatccaggaggtgcgggagcagcgggtcactggtgtgctcatcgccagcctcgtgggcctgtccatcgtcatgggggctgtgctgcgtcggatcccattggctgtgctctttgggatcttcctgtacatgggggtcacgtccctgtctggtatccagctgtcccagcgtttgttgctcatcctcatgccggcaaaacaccatcctgagcagccctatgtgaccaaggtgaagacgtggcggatgcatctgttcacctgcatccagctgggctgcatcgcactgctctgggtggtcaagtccacggcggcctcactcgcctttcccttcctgctgctgctcacggtgcctctgaggcattgccttctgccccggctcttccaggacagggagctgcaggcgctggactcggaagatgctgaaccaaacttcgatgaggatggccaggatgagtacaatgagctgcacatgccagtgtgacccttgaagacagtgcccctcagagaccccaagaccttagggattgacacctgggcctcaggcagagcccagccctgggctggggggctcctcaggacccagagatgtgcctggaaccactcctgatgccatggctagagtggcccccctgacttctgcccggggtgttgacctcgcctcacctttcacagaccagaccggcacaggctttgagctcattataaccacactccttgtctcgtgtctgcctcaaaaaaaaaaaaaaa

SEQ ID NO: 285 - DNA, 2117 bp, Homo Sapiens
gctgctgcagcggctgctgctgctactgcggctcctgctgccgccgccgccgccgctcggcctcaggcagctgcatcctcggccgggccgggtccccgccccgcgccgcgcccggccccgccatggtgtcctggatcatctctcgcctggtggtgctcatctttggcaccctgtacccagcctattcttcctacaaggccgtgaagacaaaaaacgtgaaggaatatgtgaaatggatgatgtactggatcgtctttgccttcttcaccacggccgagacgctcacggatatagtgctctcctggttccccttctactttgaactgaagatcgccttcgtgatatggctgctgtccccttacaccaagggctccagcgtgctctaccgcaagttcgtgcacccaacgctgtccaacaaggagaaggagatcgacgagtacatcacgcaggcccgagacaagagctatgagaccatgatgagggtgggcaagaggggcctgaaccttgccgccaatgctgcagtcacagctgccgccaagggggtgctgtcagagaagctccgcagcttcagcatgcaggacctgaccctgatccgggacgaggacgcactgcccctgcagaggcctgacggccgcctccgacccagccctggcagcctcctggacaccatcgaggacttaggagatgaccctgccctgagtctaaggtccagcacaaacccggcagattcccggacagaggcttctgaggatgacatgggagacaaagctcccaagagggccaaacccatcaaaaaagcgcccaaagctgagccactggcttccaagacactgaagacccggcccaagaagaagacctctggcgggggcgactcagcttgagcccctccacccccgcaggctgcagagcaaggatgaagcctcaggaggggcctcagacccagcccctgctccacactgtgccagtagcctaggtgtctcaggcccctgggccccgcagatggccatttccggtgcctgcccagtggccactcttctggaaggggcttggaaaagaggaaggaggcccagctgtgggggttgagggtagagggtggaccagaggctgaggactgagccacccaaggaggtggggactgctcggcctccaccgctgttccgctgcagccccgccctgccccacccacccagtgccttgctgaagcccatagcaatccgcttctcagaggtcctatcgtgtttccactgctcgccttggtttgggagcagggagggggaagtcctagcccagatggaccaaggacgggcctgaaggcacatgggggaaagggagcacacggggaggacgttggggaccctgggtggggcctccaggtgcagctgtggatggaagacagggattggcctgtgcttcagcgaccaggatggccaggccagagctgcagctgggggctcttttcctggtcattgggtggggctgagtgccacatgttcccacattaaaaaggggggtccagggctgtgtgagtgtgtctttctgggtctagggctcggggtagtttgggtcaaggactgtccctccagcagtcgcctcctcccaccctgagccccacagtcatctggccctttccctgctcaaccctccatcctaggctctgagcctcagaggacccagcccatgagagaacggggatctggggggcctctcacctgctcctatgaccttgctcccttttaggtcaccccattgccaccgtgcccctgggctggactcccatgctcctcagggcccacccctgctctgtctggtacaggcccctgctgagtgggcccctctcctctgcccctggggtccatcccctcttgcccagggtccccatcctgtaccaagcagactgggccctaagacccctggcagaacccagcctctgctcacacccgccccagcttctgccacggcttcagtcagggccaggaggaacacgtgaaggagaaagagaaatgcaggagccgcggggctcccggttccttgggaagagggtgcccattggacctttggcactggatgagccaataaaccaaactctggcacctcatttaaaaaaaaaaaaaaaaaaa

SEQ ID NO: 286 - DNA, 3922 bp, Homo Sapiens
gcccgcgtcacgggggcgggagtcagctgagctgccggggcgaggttgggatcacctggcaccggctgaagggagcctgtgatttttttgtagcgggggcggggagtaaggtgcaagactgcgccagattcaaggacgagggctgcccgattatctcgctgcataaggcaagagcaagaggatcctcaggattttaaagaggaggcgacggctgcaggttcccaggatctgtcagaggctggggagttacagcttccattctggggcgacggggaccccgggggggtagcccttttgtaatccccaggccccggacaaagagcccagaggccgggcaccatggcgtccatcctggatgagtacgagaactcgctgtcccgctcggccgtcttgcagcccggctgccctagcgtgggcatcccccactcggggtatgtgaatgcccagctggagaaggaagtgcccatcttcacaaagcagcgcattgacttcaccccttccgagcgcattaccagtcttgtcgtctccagcaatcagctgtgcatgagcctgggcaaggatacactgctccgcattgacttgggcaaggcaaatgagcccaaccacgtggagctgggacgtaaggatgacgcaaaagttcacaagatgttccttgaccatactggctctcacctgctgattgccctgagcagcacggaggtcctctacgtgaaccgaaatggacagaaggtacggccactagcacgctggaaggggcagctggtggagagtgtgggttggaacaaggcactgggcacggagagcagcacaggccccatcctggtcgggactgcccaaggccacatctttgaagcagagctctcagccagcgaaggtgggcttttcggccctgctccggatctctacttccgcccattgtacgtgctaaatgaagaagggggtccagcacctgtgtgctcccttgaggccgagcggggccctgatgggcgtagctttgttattgccaccactcggcagcgcctcttccagttcataggccgagcagcagagggggctgaggcccagggtttctcagggctctttgcagcttacacggaccacccacccccattccgtgagtttcccagcaacctgggctacagtgagttggccttctacacccccaagctgcgctccgcaccccgggccttcgcctggatgatgggggatggtgtgttgtatggggcattggactgtgggcgccctgactctctgctgagcgaggagcgagtctgggagtacccagagggggtagggcctggggccagcccacccctagccatcgtcttgacccagttccacttcctgctgctactggcagaccgggtggaggcagtgtgcacactgaccgggcaggtggtgctgcgggatcacttcctggagaaatttgggccgctgaagcacatggtgaaggactcctccacaggccagctgtgggcctacactgagcgggctgtcttccgctaccacgtgcaacgggaggcccgagatgtctggcgcacctatctggacatgaaccgcttcgatctggccaaagagtattgtcgagagcggcccgactgcctggacacggtcctggcccgggaggccgatttctgctttcgccagcgtcgctacctggagagcgcacgctgctatgccctgacccagagctactttgaggagattgccctcaagttcctggaggcccgacaggaggaggctctggctgagttcctgcagcgaaaactggccagtttgaagccagccgaacgtacccaggccacactgctgaccacctggctgacagagctctacctgagccggcttggggctctgcagggcgacccagaggccctgactctctaccgagaaaccaaggaatgctttcgaaccttcctcagcagcccccgccacaaagagtggctctttgccagccgggcctctatccatgagctgctcgccagtcatggggacacagaacacatggtgtactttgcagtgatcatgcaggactatgagcgggtggtggcttaccactgtcagcacgaggcctacgaggaggccctggccgtgctcgcccgccaccgtgacccccagctcttctacaagttctcacccatcctcatccgtcacatcccccgccagcttgtagatgcctggattgagatgggcagccggctggatgctcgtcagctcattcctgccctggtgaactacagccagggtggtgaggtccagcaggtgagccaggccatccgctacatggagttctgcgtgaacgtgctgggggagactgagcaggccatccacaactacctgctgtcactgtatgcccgtggccggccggactcactactggcctatctggagcaggctggggccagcccccaccgggtgcattacgacctcaagtatgcgctgcggctctgcgccgagcatggccaccaccgcgcttgtgtccatgtctacaaggtcctagagctgtatgaggaggccgtggacctggccctgcaggtggatgtggacctggccaagcagtgtgcagacctgcctgaggaggatgaggaattgcgcaagaagctgtggctgaagatcgcacggcacgtggtgcaggaagaggaagatgtacagacagccatggcttgcctggctagctgccccttgctcaagattgaggatgtgctgcccttctttcctgatttcgtcaccatcgaccacttcaaggaggcgatctgcagctcacttaaggcctacaaccaccacatccaggagctgcagcgggagatggaagaggctacagccagtgcccagcgcatccggcgagacctgcaggagctgcggggccgctacggcactgtggagccccaggacaaatgtgccacctgcgacttccccctgctcaaccgccctttttacctcttcctctgtggccatatgttccatgctgactgcctgctgcaggctgtgcgacctggcctgccagcctacaagcaggcccggctggaggagctgcagaggaagctgggggctgctccacccccagccaagggctctgcccgggccaaggaggccgagggtggggctgccacggcagggcccagccgggaacagctcaaggctgacctggatgagttggtggccgctgagtgtgtgtactgtggggagctgatgatccgctctatcgaccggccgttcatcgacccccagcgctacgaggaggagcagctcagttggctgtaggagggtgtcacctttgatggggggtgggcaatggggagcagtggcttgaacccacttgagaaggctgcctcctaggctctgctcagtcatcttgcaattgccacactgtgaccacgttgacgggagtagagtagcgctgttggccaggaggtgtcaggtgtgagtgtattctgccagcttttcatgctgttcttcagagctgcagttatgccagaccatcagcctgcctcccagtagaggcccttcacctggagaagtcagaaatctgacccaattccaccccctgcctctagcacctcttctgtccctgtcattccccacacacgtcctgttcacctcgagagagagagagagagagcacctttcttccgtctgttcactctgcggcctctggaatcccagctcttctctctcagaagaagccttctcttcctcctgcctgtaggtgtcccagaagtgagaaggcagccttcgaagtcctgggcattgggtgagaaagtgatgctagttggggcatgcttttgtgcacactctctggggctccagtgtgaagggtgccctggggctgagggccttgtggaggatggtcggtggtggtgatggaggtggagagcattaaactgtctgcactgcaaaaaaaaaaaaaaaaaaaaaaaaaaaa

SEQ ID NO: 287 - DNA, 2298 bp, Homo Sapiens
cttagttccgggcgcgctgcgaccgttggggctttgttcgcgggggtcacagctctcatggctgcagctagcgtgaccccccctggctccctggagttgctacagcccggcttctccaagaccctcctggggaccaagctggaagccaagtacctgtgctccgcctgcagaaacgtcctccgcaggcccttccaggcgcagtgtggccaccggtactgctccttctgcctggccagcatcctcagctctgggcctcagaactgtgctgcctgtgttcacgagggcatatatgaagaaggcatttctattttagaaagcagttcggccttcccagataatgctgcccgcagggaggtggagagcctgccggccgtctgtcccagtgatggatgcacctggaaggggaccctgaaagaatacgagagctgccacgaaggccgctgcccgctcatgctgaccgaatgtcccgcgtgcaaaggcctggtccgccttggtgaaaaggagcgccacctggagcacgagtgcccggagagaagcctgagctgccggcattgccgggcaccctgctgcggagcagacgtgaaggcgcaccacgaggtctgccccaagttccccttaacttgtgacggctgcggcaagaagaagatcccccgggagaagtttcaggaccacgtcaagacttgtggcaagtgtcgagtcccttgcagattccacgccatcggctgcctcgagacggtagagggtgagaaacagcaggagcacgaggtgcagtggctgcgggagcacctggccatgctactgagctcggtgctggaggcaaagcccctcttgggagaccagagccacgcggggtcagagctcctgcagaggtgcgagagcctggagaagaagacggccacttttgagaacattgtctgcgtcctgaaccgggaggtggagagggtggccatgactgccgaggcctgcagccggcagcaccggctggaccaagacaagattgaagccctgagtagcaaggtgcagcagctggagaggagcattggcctcaaggacctggcgatggctgacttggagcagaaggtcttggagatggaggcatccacctacgatggggtcttcatctggaagatctcagacttcgccaggaagcgccaggaagctgtggctggccgcatacccgccatcttctccccagccttctacaccagcaggtacggctacaagatgtgtctgcgtatctacctgaacggcgacggcaccgggcgaggaacacacctgtccctcttctttgtggtgatgaagggcccgaatgacgccctgctgcggtggcccttcaaccagaaggtgaccttaatgctgctcgaccagaataaccgggagcacgtgattgacgccttcaggcccgacgtgacttcatcctcttttcagaggccagtcaacgacatgaacatcgcaagcggctgccccctcttctgccccgtctccaagatggaggcaaagaattcctacgtgcgggacgatgccatcttcatcaaggccattgtggacctgacagggctctaactgccccctactggtgtctgggggttgggggcagccaggcacagccggctcacggaggggccaccacgctgggccagggtctcactgtacaagtgggcaggggccgcgcttgggcgcttgggagggtgtcggcctgcagccaagttcactgtcacgggggaaggagccaccagccagtcctcagatttcagagactgcggaggggcttggcagacggtcttagccaagggctgtggtggcattggccgagggtcttcgggtgcttcccagcacaagctgcccttgctgtcctgtgcagtgaagggagaggccctgggtgggggacactcagagtgggagcacatcccagcagtgcccatgtagcaggagcacagtggatggccttgtgtccctcgggcatgacaggcagaaacgagggctgctccaggagaagggcctcctgctggccagagcaaggaaggctgagcagcttggttctcccctctggcccctggagagaagggagcattcctagacccctgggtgcttgtctgcacagagctctggtctgtgccaccttggccaggctggctgtgggagagggtctggtcccacgccgcctctgctcagaccactgtgtgggaggtgcacagcacagcctgcgggtaaagtgtgagagcttgccatccagctcacgaagacagagttattaaaccattcaaatctctgtggtcaaaaaaaaaaaaaaaaaaaaaa

SEQ ID NO: 288 - DNA, 3227 bp, Homo Sapiens
cagcagacggcagacggtgcccggcgcccacgggaagctgaagatacagcggtaaacaaacctccatgtctcaagctgaccacacttgtatctggacttgccagctgattagctctgttcccaccaggctcgttcaaagacccacagcttgagggggcagagggctgcccctgatggggcctggcaatgactgagcaggcccagccccagaggacaaggaagagaaggcatattgaggagggcaagaagtgacgcccggtgtagaatgactgccctgggagggtggttccttgggccctggcagggttgctgacccttaccctgcaaaacacaaagagcaggactccagactcttcttgtgaatggtcccctgccctgcagctccaccatgaggcttctcgtggccccactcttgctagcttgggtggctggtgccactgccgctgtgcccgtggtaccctggcatgttccctgcccccctcagtgtgcctgccagatccggccctggtatacgccccgctcgtcctaccgcgaggctaccactgtggactgcaatgacctattcctgacggcagtccccccggcactccccgcaggcacacagaccctgctcctgcagagcaacagcattgtccgtgtggaccagagtgagctgggctacctggccaatctcacagagctggacctgtcccagaacagcttttcggatgcccgagactgtgatttccatgccctgccccagctgctgagcctgcacctagaggagaaccagctgacccggctggaggaccacagctttgcagggctggccagcctacaggaactctatctcaaccacaaccagctctaccgcatcgcccccagggccttttctggcctcagcaacttgctgcggctgcacctcaactccaacctcctgagggccattgacagccgctggtttgaaatgctgcccaacttggagatactcatgattggcggcaacaaggtagatgccatcctggacatgaacttccggcccctggccaacctgcgtagcctggtgctagcaggcatgaacctgcgggagatctccgactatgccctggaggggctgcaaagcctggagagcctctccttctatgacaaccagctggcccgggtgcccaggcgggcactggaacaggtgcccgggctcaagttcctagacctcaacaagaacccgctccagcgggtagggccgggggactttgccaacatgctgcaccttaaggagctgggactgaacaacatggaggagctggtctccatcgacaagtttgccctggtgaacctccccgagctgaccaagctggacatcaccaataacccacggctgtccttcatccacccccgcgccttccaccacctgccccagatggagaccctcatgctcaacaacaacgctctcagtgccttgcaccagcagacggtggagtccctgcccaacctgcaggaggtaggtctccacggcaaccccatccgctgtgactgtgtcatccgctgggccaatgccacgggcacccgtgtccgcttcatcgagccgcaatccaccctgtgtgcggagcctccggacctccagcgcctcccggtccgtgaggtgcccttccgggagatgacggaccactgtttgcccctcatctccccacgaagcttccccccaagcctccaggtagccagtggagagagcatggtgctgcattgccgggcactggccgaacccgaacccgagatctactgggtcactccagctgggcttcgactgacacctgcccatgcaggcaggaggtaccgggtgtaccccgaggggaccctggagctgcggagggtgacagcagaagaggcagggctatacacctgtgtggcccagaacctggtgggggctgacactaagacggttagtgtggttgtgggccgtgctctcctccagccaggcagggacgaaggacaggggctggagctccgggtgcaggagacccacccctatcacatcctgctatcttgggtcaccccacccaacacagtgtccaccaacctcacctggtccagtgcctcctccctccggggccagggggccacagctctggcccgcctgcctcggggaacccacagctacaacattacccgcctccttcaggccacggagtactgggcctgcctgcaagtggcctttgctgatgcccacacccagttggcttgtgtatgggccaggaccaaagaggccacttcttgccacagagccttaggggaccgtcctgggctcattgccatcctggctctcgctgtccttctcctggcagctgggctagcggcccaccttggcacaggccaacccaggaagggtgtgggtgggaggcggcctctccctccagcctgggctttctggggctggagtgccccttctgtccgggttgtgtctgctcccctcgtcctgccctggaatccagggaggaagctgcccagatcctcagaaggggagacactgttgccaccattgtctcaaaattcttgaagctcagcctgttctcagcagtagagaaatcactaggactactttttaccaaaagagaagcagtctgggccagatgccctgccaggaaagggacatggacccacgtgcttgaggcctggcagctgggccaagacagatggggctttgtggccctgggggtgcttctgcagcctcgaaaaagttgcccttacctcctagggtcacctctgctgccattctgaggaacatctccaaggaacaggagggactttggctagagcctcctgcctccccatcttctctctgcccagaggctcctgggcctggcttggctgtcccctacctgtgtccccgggctgcaccccttcctcttctctttctctgtacagtctcagttgcttgctcttgtgcctcctgggcaagggctgaaggaggccactccatctcacctcggggggctgccctcaatgtgggagtgaccccagccagatctgaaggacatttgggagagggatgcccaggaacgcctcatctcagcagcctgggctcggcattccgaagctgactttctataggcaattttgtacctttgtggagaaatgtgtcacctcccccaacccgattcactcttttctcctgttttgtaaaaaataaaaataaataataacaataatacgggggaaaggaacgaaaggaaaaaaaaaaaaaaaaaaaaaaa

SEQ ID NO: 289 - DNA, 1715 bp, Homo Sapiens
aagtgccgcctcacagtcctgccagagacaggagacgccgggccgcccgcgccgtctgtcccaagagctcctcctggacatccgcttgactctccgtcgtctccaattggccgtcggggaacggaagccgaagcaaactagtgaacccggaagtgcttcgcggcggaggcccgggcaactcttttgaatggaatcgggctgattcatcgccggtttgcagacagagccgcgtcgggtgtgcgccgctgctgctgttgcctctgtcttcgcgtcaccacagaggcaagacaagggtccatatcgcggcatccggctcccgcccgtcttcaggagagaaagaaaaaataaaatatacttggggaagttgtacctgccagaattagcaagagctttctttaagaagacatttgtcaaactcaacaaattgaaggttaacaccttaagagttgtagttactgaccagaaatatggacagacttcttagacttggaggaggtatgcctggactgggccaggggccacctacagatgctcctgcagtggacacagcagaacaagtctatatctcttccctggcactgttaaaaatgttaaaacatggccgtgctggagttccaatggaagttatgggtttgatgcttggagaatttgttgatgattataccgtcagagtgattgatgtgtttgctatgccacagtcaggaacaggtgtcagtgtggaggcagttgatccagtgttccaagctaaaatgttggatatgttgaagcagacaggaaggccggagatggttgttggttggtatcacagtcaccctggctttggttgttggctttctggtgtggatatcaacactcagcagagctttgaagccttgtcggagagagctgtggcagtggttgtggatcccattcagagtgtaaaaggaaaggttgttattgatgccttcagattgatcaatgctaatatgatggtcttaggacatgaaccaagacaaacaacttcgaatctgggtcacttaaacaagccatctatccaggcattaattcatggactaaacagacattattactccattactattaactatcggaaaaatgaactggaacagaagatgttgctaaatttgcataagaagagttggatggaaggtttgacacttcaggactacagtgaacattgtaaacacaatgaatcagtggtaaaagagatgttggaattagccaagaattacaataaggctgtagaagaagaagataagatgacacctgaacagctggcaataaagaatgttggcaagcaggaccccaaacgtcatttggaggaacatgtggatgtacttatgacctcaaatattgtccagtgtttagcagctatgttggatactgtcgtatttaaataaagcaacgaaaaacgctattaatgatgccttcagtgtatattcctctgttgttcctaatgctcaaaatcaagggacctctgaaggtgtacttggctaaatgtaagacatctggcatcatttgcagcactgtaacaccttcagtctcagttgtgcaattacttctgtttctttagtcagggtctttgcagattctaaagttatacatgaatacatcaaagtggacaaattttgttaagatcccatttaatatttgaaaaaatcagtagcacaaatatattttgattgtcacttacaaaataaaatacatttacagtc

SEQ ID NO: 290 - DNA, 1614 bp, Homo Sapiens
ggctggagacccgtgctctgggccggcgccttcaccatggcctcggcagagctggactacaccatcgagatcccggatcagccctgctggagccagaagaacagccccagcccaggtgggaaggaggcagaaactcggcagcctgtggtgattctcttgggctggggtggctgcaaggacaagaaccttgccaagtacagtgccatctaccacaaaaggggctgcatcgtaatccgatacacagccccgtggcacatggtcttcttctccgagtcactgggtatcccttcacttcgtgttttggcccagaagctgctcgagctgctctttgattatgagattgagaaggagcccctgctcttccatgtcttcagcaacggtggcgtcatgctgtaccgctacgtgctggagctcctgcagacccgtcgcttctgccgcctgcgtgtggtgggcaccatctttgacagcgctcctggtgacagcaacctggtaggggctctgcgggccctggcagccatcctggagcgccgggccgccatgctgcgcctgttgctgctggtggcctttgccctggtggtcgtcctgttccacgtcctgcttgctcccatcacagccctcttccacacccacttctatgacaggctacaggacgcgggctctcgctggcccgagctctacctctactcgagggctgacgaagtagtcctggccagagacatagaacgcatggtggaggcacgcctggcacgccgggtcctggcgcgttctgtggatttcgtgtcatctgcacacgtcagccacctccgtgactaccctacttactacacaagcctctgtgtcgacttcatgcgcaactgcgtccgctgctgaggccattgctccatctcacctctgctccagaaataaatgcctgacacctccccacaacctgcaatctgtcgggcactcttctcgttcaactccctgtagccctttgggactttgcggtcccctaagtagaaaattcctatgggcctgtctcctgggggcctctgtctgctggtggtctgcttaccacagaatcctaaggggcaggagtgcctgggcatgtgtctgtgggagccttgcagtcagttgtgtttggacaagtgcaacagtcaggctgctgattcctgtggcatgcaggctgtagaggttgacaaatggaggggggtgttgagggtgagccctagttgattttttaaaatttaaactctggtaagaacatttaatatgagacctactctctttttttctttacttatttatttatctatttatttcaagacagggtctcactctgtcacctaggctggggtgcaatggtgcaatcatggctcactgcagcctcaacctcccaggctcaagtgatcctcccacctcagcctcccaaagtgctaggattacaggcatgagtcaccgcgcctggccaagatcacctaacaaaattgtaagtgtgtacgatacttaaaatttaagagattatgtgcacggcagacctctagaactgaatagtcttgcatcttgcataattcagaacttcatcatcttgcataactgaaactttgtgcctgttaccagaaaaaaaaaaaaaaa

SEQ ID NO: 291 - DNA, 7896 bp, Homo Sapiens
ctcggtgcggttccgccgggcgcgaggagccgccgagacctccgcctgcgaacaaagaggaggccgtgcggggcgcggcgcccgcggagcatggcggaccgcagcctggagggcatggcgctgcccctggaggtgcgggcgcgcctggccgagctggagctggagctgtcggaaggtgacatcacacaaaaaggatatgaaaagaagaggtcaaagttaattggagcctaccttccgcagcctccgagggtggaccaagctttgccgcaagaacgccgggctcctgtcactccttcctccgcctctcgctaccaccgccgacggtcttcagggtcacgagatgagcgctatcggtcagacgtccacacggaagctgtccaggcggctctggccaaacacaaagagcggaagatggcagtgcctatgccttccaaacgcaggtccctggtcgtgcagacctcgatggacgcctacacccctccagatacctcttctggctcagaagatgaaggctcagtgcagggggactcccagggcacccccacctccagccagggcagcatcaatatggagcactggatcagccaggccatccacggctccaccacgtccaccacctcctcgtcctctacgcagagcgggggcagcggggctgcccacaggctggcggacgtcatggctcagacccacatagaaaatcattctgcacctcctgacgtaaccacgtacacctcagagcactcgatacaggtggagagaccgcagggttccacggggtcccggacagcgcccaagtacggcaacgccgagctcatggagaccggggatggagtaccagtaagtagccgggtgtcagcaaaaatccagcagcttgtcaataccctcaaacgaccgaaacgaccacctttacgagaattctttgtcgatgactttgaagaattattagaagttcaacaaccggatccgaaccaaccaaagccggagggggcccagatgctggccatgcgcggagagcagctgggcgtggtcacgaactggccgccgtcgctggaggccgcactgcagaggtggggcaccatctcgcccaaggcgccctgcctgaccaccatggacaccaacgggaagcccctctacatcctcacttacggcaagctgtggacaagaagtatgaaggtcgcttacagcattctacacaaattaggcacaaagcaggaacccatggtccggcctggagatagggtggcactggtgttccccaacaatgatccggctgccttcatggcggctttctacggctgcctgctggccgaggtggtccccgtgcccatcgaggtgccgctcaccaggaaggacgcagggagccagcagataggtttcttgcttggaagctgtggagttactgtagccttgactagtgacgcctgccataaaggacttccaaaaagcccaacgggagagatcccacagtttaaaggttggccaaagctgctgtggtttgtcacagagtctaaacatctctccaaaccgccccgagactggttcccacacattaaagatgccaataacgacactgcgtatattgagtacaagacgtgtaaggatggcagtgtgctgggtgtgacggtgacgaggactgcgctgctgacacactgccaggccctgacgcaggcgtgtggctacacggaagctgaaaccattgtgaatgtgctggatttcaagaaggacgtcgggctctggcatggcatcctgacaagcgtcatgaacatgatgcatgtgatcagcatcccgtactcgctgatgaaggtgaaccctctctcctggatccagaaggtctgccagtacaaagcaaaagtggcgtgtgtgaaatcgagggatatgcattgggcattagtagcacacagagatcagagagacatcaacctctcctctctgcgaatgctgatagtggcggacggcgcgaacccctggtctatttcttcttgcgatgcatttctcaatgtcttccaaagtaaaggccttcgacaggaggtcatctgtccttgtgccagctcgccagaggccctcactgtggccatccggaggcccacggatgacagtaaccagcccccgggccggggtgtcctctccatgcatggactgacctatggggtcattcgtgtggactcggaagagaagctgtccgtgctcaccgtgcaggatgtcggcctcgtgatgcctggagccatcatgtgttcagtgaagccagacggggttcctcagctgtgcagaacggatgagatcggggagctgtgtgtgtgtgcagttgcgacgggcacgtcctactatggcctctctggcatgaccaagaacacctttgaggtgtttcccatgacaagctccggggctccgatcagtgaatacccattcataaggacaggcttgctggggttcgtgggtcccggaggcctcgtcttcgtggtgggcaagatggatggcctcatggtggtcagcgggcgcaggcacaacgccgacgacatcgtggccactgcgctggccgtagaacccatgaagtttgtctaccggggaaggatagccgtgttctcggtgaccgtgctgcacgacgagaggatcgtgatcgtggctgagcagaggcctgactccacggaagaggacagtttccagtggatgagccgtgtgctgcaggcgattgacagtatacatcaagttggagtttattgcctggccttggtgccagcaaacaccctccccaaaaccccgcttggtgggatccatttatcagaaacaaaacagctttttctggagggctctctgcacccctgcaatgtcctaatgtgcccccacacctgcgtcacaaacttgcctaagcctcgacagaagcagccagaaatcggccctgcctctgtgatggtggggaacctggtctctgggaagagaatcgcccaggccagtggcagagacctgggtcagatcgaagataacgaccaggcacgcaagttcctgttcctctcagaggtcttgcagtggagagcacagaccaccccggaccacatcctctacacgctgctcaactgtcggggtgcgatagcgaactcgctgacctgcgtgcagctgcacaagagagctgagaagatcgccgtgatgctgatggagaggggccaccttcaggacggcgaccacgtggccttggtctaccccccaggaatagacctgatagcagcgttttatggttgcctgtacgcaggctgtgtgccaataaccgtccgtcccccgcacccacagaacatcgcgacgacgttgcctaccgtcaagatgattgtggaggtgagtcgctctgcctgtctgatgacgacacagctgatctgtaagttgctgcggtccagggaggcggcggcggctgtggacgtcaggacgtggcccctcatcctggacacagatgatttgccaaagaagcggcctgcccagatctgcaaaccttgcaacccagacactcttgcatatctcgacttcagcgtgtccacaactgggatgctagctggcgtaaagatgtctcacgcagccaccagtgccttctgccgttccattaagctgcagtgtgaactttacccctctagagaagtggccatctgcctggacccttactgtggactgggatttgtcctctggtgcctctgcagtgtgtattctgggcaccagtccatcctgatcccgccctctgagctggaaaccaaccccgccttgtggcttcttgccgtgagtcagtacaaagtccgagacacgttttgctcctactccgtgatggagctgtgcaccaaggggctgggctcgcaaacagagtccctcaaggcgcgagggctggacttgtcccgagtgaggacctgcgtggttgtggcggaagagaggcctcggatcgcactcacacagtcgttctcaaagctgtttaaggacctgggccttcacccgcgggccgtcagcacctcgttcggttgcagggtgaacctggcgatttgcttgcagggaacctcaggacctgacccaaccactgtctacgtggacatgagagccctgagacacgacagagtccgcttagtggaaagaggatcccctcatagtctgcccctgatggaatcgggaaagatacttccaggggttcggattataattgccaacccagaaacaaaaggaccgctgggggactcacaccttggagagatttgggttcacagtgcccacaatgccagcggttatttcactatttacggagacgaatccctccagtcagatcacttcaactcaagactaagttttggagacacccagaccatctgggcacgcacaggctacttggggttcctgcggagaactgagctcacagatgcaaatggagagcgccatgatgccctctacgtggtaggggcactggacgaagccatggagctgcggggcatgcggtaccacccaatcgacattgagacctcggtcatcagagcccataaaagcgttacggaatgtgctgtgtttacctggacaaatttgttggtggttgtggttgagctggatgggtcggaacaagaagccttggacctggttcccttggtgaccaacgtggtcctggaggagcactacctgatcgtcggagtggtggtcgtggtggacatcggcgtcatccccatcaactcccgtggggagaagcagcgcatgcacctgcgagacgggtttttggcagaccagctagaccccatctatgtggcctacaacatgtagtctcgtctcttggcttccatggacttttctagagatgtagacattgttctccgtgtccactgaagcgtgcagacacagggcaacactcaccagaatacagccatttgtggtgagagtggaggaggaagaggaggaggaagaggacttctcacagcagccacgattggcatgggggtgaaatgtgaatttaccactgaatttcgctcagaaggactttggattactgccttcagtttgttggaaaagcccatttcaaaactttcttttcttttctttcttttttaattattggataataagtgctttcttcgtaaatgtggtattttgttaagccgaaatagcaattaaaaaaatatcctgccctccagatgggttcttttaaacaatttatgtagtgtgacaaagaattgttttctctgttttaatgtgtcatgaaatcttaatgacatggatctgttactaatttaagccattgctagatctcatccttttaggaaagtttgaggtacgagaaaaccttccaaatagcaccttccaattagataatagcagctttctttgtcagaaatgtgctgaagaaacaaaggctggtatacggccttcgaagttagtatagaatgagaagaaattataaataaggtgtatttcggcaattatcttgcaaatatctttgtactaaactaaaaagataaaataagttaacttcctcaatatgtaattatgtacaaaacgtttaatttattttgatctctttagaactataaaagagaaaaacattcaagaatattaaagtcttgtaatgtttgctaatataaaaaagtgttgtattatcttgcgtggatagtatcacaacaaatatatatatatgaaatataaattcactaatgaacaaaggagattttaaagtttaagatgcagaacttgtcacttgcatggtgtgccccccgtactcacatacactctgctgttgccagcagtcgcagaccgcaggagccctgtctaaaagtttcttctagaaccagagaccagcaagtgaaattattgccatctcaaggatggcaaaagaattcaaagctcaatgtgcactatttttttctttgctgtgggacaacagtgaatgtgtttatgccagcgtgtgctgatgatactgaggggctttaggttggcaaatagcactgttttcttagctgcaagaattcattgcacaatgtttttcatcatttttgttaatgtcatctttttttggtccttgctacgaaaaggaatgcgattctgtggtcattcgcactgggttgcattgattccccctctgatggccaatgtggagtggacaaagtgtccggaactcacatcggtgatcgtcccctcgtcttaagacccagcccgctctgtgtgagcctctggggctccctcgctcagtgagcacagttccccgggggttcatgccagagctccggctgaagcaagaagtcctccagctgcgtcgtttgccgcctgtggacgagtgcgccccagtttctgccctggcagctcctggccacaccttctcagagctcacctgtgcacttctaaattgaattggcccacggtgtccaaccaagaaggagcatctgcactccgagaaagatgtgttctgtaactgccccagtgtgaccccgcagtggctctcggtgctagatatgcatgactaagattgatgctgggcaaaatgtagatgatctttcattatgttgtgggcagcgtctttctctgcctttgctatatgcagtcagcagtaagccttttgctaaaagagttttgtttgacttctgagatccaaggctgattgttgttaaaaaaaaaaaaaaaaaaaaagtggcacatttaaaaaaatgtgtctgcatatgtggtgcatccttccatctccacaaaccatttgattcttgaaatattgtttgacctcattgctgtgtgtgaatatttctccacatgcttcagatgcacattcctagtctctgcttcctaaggggggaaccaccacacattggggggaaaaaagacattttcctacacccacccaccttgttgaaagggaggtaggtttggggcttcaggccaggcactgactatgaaacattagctgcagtgtgcaggacagctttgaggtccagctgaagtcaggaagcaaaacaaatgtagatgtcacttcaaacataatttcaactgtcaccagatcaactctacattcaaggagtgtggacgctgcagtgcagttgtgagggcagttagcagccgcctcttctgcatcctgtcaactctgattagttagagtttaggctcaaaagagttggtggactgagattgaaatttggttgtgcaagagaaaggaaaggagacacttagtaccaccagtttcagcaataaagaagggtcattctgtattcaaaattgtactgtagataaatcattcatgagattgtaaaaaatgtttgtcttgtgaccttgtgcttttgaagtcagacaaaaccgtgtaatcaacttgcacaaaaagagggtacacagtgaacatataaacacagacctaatcaaacaggagcagattcctcatggtgcttgtttattatatatatttaatcctgcttgacactttacccaagggagatggtcccttttatcagttgaatgttagcagcgttatttcagagtgtggtgactggttagagaaactcatgtactcaaccagccacagtttcaaacaaaatttttatgtgcaaaggacagcaaccttcttgtatgttaaaccaccagtacgctttgtacatctgtgataacgcctgttttatattcaaatgaacaaataaaagcttttatttttgttgctctgaaaatagcagtttcttaattggtcccctggaaagatgtctgggacagctttaatcccgggaaggaagtgactcctacagggaaatgtatctgactctgtttacataatttgttgcattacttagtacagataatcatactttgaaaaatgtttaaattttgatgtgggcatttattgctaaaaataattcctatggcaacaaatgttttgtgaaatgttttttttaattcttttaaatatatctaaatatatttgttcacattttgctgcaa

SEQ ID NO: 292 - DNA, 1045 bp, Homo Sapiens
actatccggcgccgagccggaggggggaaacggcgcccgccgcccgcccggagcccgcgagcaaccccagtcccccccacccgcgcgtggcggcgccggctccctagccaccgcggccccaccctcttccggcctcagctgtccgggctgctttcgcctccgcctgtggatgctgcgcctctccgaacgcaacatgaaggtgctccttgccgccgccctcatcgcggggtccgtcttcttcctgctgctgccgggaccttctgcggccgatgagaagaagaaggggcccaaagtcaccgtcaaggtgtattttgacctacgaattggagatgaagatgtaggccgggtgatctttggtctcttcggaaagactgttccaaaaacagtggataattttgtggccttagctacaggagagaaaggatttggctacaaaaacagcaaattccatcgtgtaatcaaggacttcatgatccagggcggagacttcaccaggggagatggcacaggaggaaagagcatctacggtgagcgcttccccgatgagaacttcaaactgaagcactacgggcctggctgggtgagcatggccaacgcaggcaaagacaccaacggctcccagttcttcatcacgacagtcaagacagcctggctagatggcaagcatgtggtgtttggcaaagttctagagggcatggaggtggtgcggaaggtggagagcaccaagacagacagccgggataaacccctgaaggatgtgatcatcgcagactgcggcaagatcgaggtggagaagccctttgccatcgccaaggagtagggcacagggacatctttctttgagtgaccgtctgtgcaggccctgtagtccgccacagggctctgagctgcactggccccggtgctggcatctggtggagcggacccactcccctcacattccacaggcccatggactcacttttgtaacaaactcctaccaacactgaccaataaaaaaaaatgtgggtttttttttttttaatataaaaaaaaaaaaaaaaaa

SEQ ID NO: 293 - DNA, 1803 bp, Homo Sapiens
ctcccgcgccctctcagcaacccgcacagggcgcacccggacgctctaccgctcccgccgcagtcgccgggccatgggcctcgagcccgccccgaacccccgcgagcccgccttgtctgcggcgtgactggaggcccagatggtcatcatgggccagtgctactacaacgagaccatcggcttcttctataacaacagtggcaaagagctcagctcccactggcggcccaaggatgtggtcgtggtggcactggggctgaccgtcagcgtgctggtgctgctgaccaatctgctggtcatagcagccatcgcctccaaccgccgcttccaccagcccatctactacctgctcggcaatctggccgcggctgacctcttcgcgggcgtggcctacctcttcctcatgttccacactggtccccgcacagcccgactttcacttgagggctggttcctgcggcagggcttgctggacacaagcctcactgcgtcggtggccacactgctggccatcgccgtggagcggcaccgcagtgtgatggccgtgcagctgcacagccgcctgccccgtggccgcgtggtcatgctcattgtgggcgtgtgggtggctgccctgggcctggggctgctgcctgcccactcctggcactgcctctgtgccctggaccgctgctcacgcatggcacccctgctcagccgctcctatttggccgtctgggctctgtcgagcctgcttgtcttcctgctcatggtggctgtgtacacccgcattttcttctacgtgcggcggcgagtgcagcgcatggcagagcatgtcagctgccacccccgctaccgagagaccacgctcagcctggtcaagactgttgtcatcatcctgggggcgttcgtggtctgctggacaccaggccaggtggtactgctcctggatggtttaggctgtgagtcctgcaatgtcctggctgtagaaaagtacttcctactgttggccgaggccaactcactggtcaatgctgctgtgtactcttgccgagatgctgagatgcgccgcaccttccgccgccttctctgctgcgcgtgcctccgccagtccacccgcgagtctgtccactatacatcctctgcccagggaggtgccagcactcgcatcatgcttcccgagaacggccacccactgatggactccaccctttagctaccttgaacttcagcggtacgcggcaagcaacaaatccacagcccctgatgacttgtgggtgctcctggctcaacccaaccaacaggactgactgactggcaggacaaggtctggcatggcacagcaccactgccaggcctccccaggcacaccactctgcccagggaatgggggctttgggtcatctcccactgcctgggggagtcagatggggtgcaggaatctggctcttcagccatctcaggtttagggggtttgtaacagacattattctgttttcactgcgtatccttggtaagccctgtggactggttcctgctgtgtgatgctgagggttttaaggtggggagagataagggctctctcgggccatgctacccggtatgactgggtaatgaggacagactgtggacaccccatctacctgagtctgattctttagcagcagagactgaggggtgcagagtgtgagctgggaaaggtttgtggctccttgcagcctccagggactggcctgtccccgatagaattgaagcagtccacggggaggggatgatacaaggagtaaacctttctttacactctgaggtctccaaaaaaaaaaa

SEQ ID NO: 294 - DNA, 1901 bp, Homo Sapiens
aagaagtgaactgcttgttcacttgctgctgttgccactgctggtacagaaatagaaggtaagacagcacaaaaaaacaaagacaaaaaacctccaagctcccttcagtagttgctacaccttcagattgagacatccttcctcatttacaaacctcagctgtgtctgggggcagggccacagtgaaactgccaggagcaaaaaggcttccaagaaaaagtaccacatcagattggaaactggggacagatcattcctgggatgtgacgggcaccagaatgctccctctccaaaggatctaaggaccaaagctgacagtttctttacttgcaggtagctgacagcatctactcctgaagaccggaaacatggcttgtaccatccaaaaggcagaagcacttgacggggctcatttgatgcagatcctctggtatgatgaggaagagtctctctacccagctgtatggttgagagacaactgtccgtgctctgattgctacctggattctgcaaaagcacggaaacttctagtggaagctcttgatgtgaacattggaattaaaggcttgatatttgacagaaaaaaggtgtacatcacatggcccgatgagcattacagtgaattccaggctgattggctgaagaaaagatgcttttccaagcaggccagagcaaagctccaaagagaattgttttttccagaatgccaatactggggctcagagctccagctacccactttggattttgaagatgttttaagatatgatgaacacgcatacaagtggctctccaccctcaagaaagtaggcatagtaagactcaccggagcatctgacaaaccaggagaagtttcaaaacttgggaaaaggatgggtttcctctatctcacattttatggacatacttggcaagtgcaagacaaaatcgatgcaaacaatgtggcttacacaactgggaagctaagctttcacactgattatccagccctccatcatccacctggggttcagcttcttcactgcataaagcaaacagtcacagggggtgattcagaaattgtagatgggtttaatgtgtgccaaaaactaaagaaaaataatcctcaggcattccagattttgtcctctacctttgtggactttacagacattggagtggattactgtgatttttctgtacaatcaaaacataaaattatagagttagatgataaaggccaagtggttcgcatcaacttcaataacgcaactagggacacaatatttgatgtgcctgttgaaagagttcagcctttttatgctgctctgaaggagtttgttgacctcatgaacagcaaagaatccaagtttaccttcaagatgaatccaggtgatgtgattacttttgataactggcgcttacttcatggccgacgtagctatgaagcaggaactgagatatcccgccatctagaaggagcttatgctgactgggatgtggtcatgtcaaggcttcgtatcttaaggcagagggtggagaatggaaactgaagtcacctgtagataattttaataagattccaatgaccatattttgtgagatatggcacattattcacagaccatgatctttgtgatttacatataatttccttaacaatgaacatgtaacttctctcacaagagtactctttactttgtaatcatatacaatgtcaactttttagatgtttcaccactcttttgcaaataaagcatcctttctgctctgttgcatgcctgctctaatttcttttgcccatatatgagtatctccagaatgtctacaaatagtttttgtagcaaatgaaaatttcttcaaataagccttttgtttcaaataaaacttgtctcaaaacatgcttcaaaaaaaaaaaaaaa

SEQ ID NO: 295 - DNA, 2713 bp, Homo Sapiens
agttttctcatctggaaagtggggcctcgtaatcctgtccgacccggcgcgggacagtaggtgtcagggattttggtgaccccacgctcgaggcctctgcaaaagggggctgtccagtggcccagagacgcagccggcggggcttttgtctagcgggggagtcttaactgagaggccacgcaggccggcaggaagccgctccacaggagggggctcaaggagaggggatctcctccctccagactccggccccgccagagtagctctagggtatcttcccagaaactgccccgcacgcactggcgagctgggagcgccaccacggctttcaaaaaacccgcacacaccaagataataatgtgtcgttcgctcgtttcgcgcaagcggagtcgcgtccgccttcccgagctccggcacacagacctcaggccgctctcgcgctctccggggccccgagaacaatgcccgtcctctccgcgcgcaggagggagttggcggaccacgcggggtcggggcgacggagcgggcccagccccacggccaggtcggggccccacctctcggctctgagagcccagccggcccgggccgcgcacctgtcaggtcgggggacctacgtgcgccgcgacacggcgggaggcgggccgggccaggctcgtcccctcggccctcccggaactagtctcctaggccgcggcgcccgccggagcggagagggctggtgccccggagccttcgagtcgggggctagagcggccaggcctccgagccgggtcgagccgaggctggcgacggctgcgtcacgcgagggggcggggctgccacgggcggaggtcgcagccggaagcggaagaggcgctcggagcggggagtggggcctagctgcagccggagcctgggagacgatgcatcactgtaagcgataccgctcccctgaaccagacccgtacctgagctaccgatggaagaggaggaggtcctacagtcgggaacatgaagggagactgcgatacccgtcccgaagggagcctcccccacgaagatctcggtccagaagccatgaccgcctgccctaccagaggaggtaccgggagcgccgtgacagcgatacataccggtgtgaagagcggagcccatcctttggagaggactactatggaccttcacgttctcgtcatcgtcggcgatcgcgggagagggggccataccggacccgcaagcatgcccaccactgccacaaacgccgcaccaggtcttgtagcagcgcctcctcgagaagccaacagagcagtaagcgcagcagccggagtgtggaagatgacaaggagggtcacctggtgtgccggatcggcgattggctccaagagcgatatgagattgtggggaacctgggtgaaggcacctttggcaaggtggtggagtgcttggaccatgccagagggaagtctcaggttgccctgaagatcatccgcaacgtgggcaagtaccgggaggctgcccggctagaaatcaacgtgctcaaaaaaatcaaggagaaggacaaagaaaacaagttcctgtgtgtcttgatgtctgactggttcaacttccacggtcacatgtgcatcgcctttgagctcctgggcaagaacacctttgagttcctgaaggagaataacttccagccttaccccctaccacatgtccggcacatggcctaccagctctgccacgcccttagatttctgcatgagaatcagctgacccatacagacttgaaaccagagaacatcctgtttgtgaattctgagtttgaaaccctctacaatgagcacaagagctgtgaggagaagtcagtgaagaacaccagcatccgagtggctgactttggcagtgccacatttgaccatgagcaccacaccaccattgtggccacccgtcactatcgcccgcctgaggtgatccttgagctgggctgggcacagccctgtgacgtctggagcattggctgcattctctttgagtactaccggggcttcacactcttccagacccacgaaaaccgagagcacctggtgatgatggagaagatcctagggcccatcccatcacacatgatccaccgtaccaggaagcagaaatatttctacaaagggggcctagtttgggatgagaacagctctgacggccggtatgtgaaggagaactgcaaacctctgaagagttacatgctccaagactccctggagcacgtgcagctgtttgacctgatgaggaggatgttagaatttgaccctgcccagcgcatcacactggccgaggccctgctgcaccccttctttgctggcctgacccctgaggagcggtccttccacaccagccgcaacccaagcagatgacaggcacaggccaccgcatgaggagatggagggcgggactgggccgcccagccccttgactccagcctcgaccgccaggccccaggccagagccacccaatgaacagtgcaatgtgaaggaaggcaggagcctgcaggggagcagacttggtgcccagctgccagaaagcacagatttgacccaagctatttatatgttataaagttataataaagtgtttcttactgtttgtaacccctggtaccagtgtgtccatctccaggctccttgccttccccttacctgaccttattaataaagtctttcttagcagttcaaaaaaaaaaaaaaaaaa

SEQ ID NO: 296 - DNA, 2505 bp, Homo Sapiens
attcttcctgggccgcagcaccggccgccggcccgccccgcccgccccgccccgcgcctctctagactctcggcgagcagcgtcgcccgcggagccgcgctggtgctgtggcccgggccctggcagccctcccgggaggcgagccggggaggcggtggcccctgccggttgcggcggggcgcgggaagaggcgggactctttgacgcggcggaggggtcgggcgacggccgacgcgccgccatctttggtccagtgcggtggcggcggcggcggtggcggcggcgactgctgcggtgaaggaggaggaggagccgagcgggcgctggcaccgaggcctgaccatggacgaggaatacgatgtgatcgtgctggggaccggtctcaccgaatgcatcctgtcgggcatcatgtctgtgaacgggaagaaggtgctgcacatggaccggaacccctactacgggggcgagagctcctccatcacacccctggaggagctgtataagcgttttcagttgctggaggggccccctgagtcgatgggccgaggccgagactggaatgttgacctgattcccaaattcctcatggctaacgggcagctggtaaagatgctactgtatacagaggtgactcgctacctggacttcaaggtggtggagggcagctttgtctacaaggggggcaagatctacaaagtgccgtccactgagactgaggccttggcttccaatctgatgggcatgtttgagaaacggcgcttccgcaagttcctggtgtttgtggcaaacttcgatgagaatgaccccaagacctttgagggcgttgacccccagactaccagcatgcgtgacgtctaccggaagtttgatctgggccaggatgtcatcgatttcactggccatgccctggcgctctaccgcactgatgactacctggaccagccctgccttgagaccgtcaaccgcatcaagttgtacagtgagtccctggcccggtatggcaagagcccatatttatacccgctctacggcttgggcgagctgccccagggttttgcaagattgagtgccatctatggggggacatatatgctgaacaaacctgtggatgacatcatcatggagaacggcaaggtggtgggcgtgaagtctgagggagaggtggcccgctgcaagcagctgatctgtgaccccagctacatcccggaccgtgtgcggaaggctggccaggttatccgcatcatctgtatccttagccaccccatcaagaacaccaacgacgccaactcctgccaaataatcatcccccagaaccaggtcaacaggaagtcagacatctacgtgtgcatgatctcctatgcacacaacgtggcggcccagggcaagtacatagctattgccagcactactgtggagaccacggaccctgaaaaggaggtggagccggctctggagctgttggagcccattgaccagaagtttgtggctatcagtgacttgtatgagcccattgatgatggttgtgagagccaggtgttctgttcctgctcctacgatgccaccacacactttgagacaacctgcaacgacatcaaagacatctacaaacgcatggctggcacggcctttgactttgagaacatgaagcgcaaacagaacgacgtctttggagaagctgagcagtgattgtggccgcccccagcccctgctgccccagcctgtgtctgttctcctcgagggctccagcatcctctgcttcccccaccacgttcccatcacccacctcattgatccactgaccaaatccttaaccctagcgatggcttgggagatggggggttggatagcatcctctttcttggcccttccttatcctaggaaaagagggttcctctccttgtgtgtgtctcttccccccacccctaattcttctgctctgtttgggaagacgtggaggaaaaggtgacttctgcccccaccgctcttacccccactgtagtggcctttggagatgcccccacctcccccccaccaactctcgcgtgttggagagaaggggccctcccagcacaaagttgcattcctcccccctaatttattctaatttattaactttgacccaccctttctgagcctgcagccttcccgtgtggcctgagggctgtcgagtgagctgccccagcccctcccagcccttgcccagcctgggggagtggggaaggcttgggcatggccccgttggaggttgatttgctgttttgtttcttgtctttgtgttctgtggtacttgctgagagaaaagaaaagtgagccaagcagaaggaggtgggaaaacggacccaaaccccagtgtgccctgccccatgcctttcctttagtggtgggaaacccttatcttgcaaagtgaatgtgtccccttccccaccctctagtgtatttcacagaaaacaaaacctcccaataaaacggttgaaacctgaaaaaaaaaaaaaaaaaaaaaaaaaa

SEQ ID NO: 297 - DNA, 1850 bp, Homo Sapiens
gcgggcggcggcgttcggagtcgccgggagctgccaggctgtccgcgccgccgctgcggggccatgatccggaacgggcgcggggctgcaggcggcgcagagcagccgggcccggggggcaggcgcgccgtgagggtgtggtgcgatggctgctatgacatggtgcattacggccactccaaccagctgcgccaggcacgggccatgggtgactacctcatcgtaggcgtgcacaccgatgaggagatcgccaagcacaaggggcccccggtgttcactcaggaggagagatacaagatggtgcaggccatcaaatgggtggacgaggtggtgccagcggctccctacgtcactacactagagaccctggacaaatacaactgtgacttctgtgttcacggcaatgacatcaccctgactgtagatggccgggacacctatgaggaagtaaagcaggctgggaggtacagagaatgcaagcgcacgcaaggggtgtccaccacagacctcgtgggccgcatgctgctggtaaccaaagcccatcacagcagccaggagatgtcctctgagtaccgggagtatgcagacagttttggcaagtgccctggtgggcggaacccctggaccggggtatcccagttcctgcagacatctcagaagatcatccagtttgcttctgggaaggagccccagccaggggagacagtcatctatgtggctggtgccttcgacctgttccacatcgggcatgtggacttcctggagaaggtgcacaggctggcagagaggccctacatcatcgcgggcttacactttgaccaggaggtcaatcactacaaggggaagaactaccccatcatgaatctgcatgaacggactctgagcgtgctggcctgccggtacgtgtcagaagtggtgattggagccccgtacgcggtcacagcagagctcctaagtcacttcaaggtggacctggtgtgtcacggcaagacagaaattatccctgacagggatggctccgacccataccaggagcccaagagaaggggcatcttccgtcagattgacagtggcagcaacctcaccacagacctcatcgtccagcggatcatcaccaacaggttggagtatgaggcgcgaaaccagaagaaggaagccaaggagctggccttcctggaggctgccaggcagcaggcggcacagcccctgggggagcgcgatggtgacttctaacctggcagaggccctggccggccctccccctgctctgcttctgcgccttctgcgtttggacataggactctgcagggccgccctctctaactggcctggctctggaagggctggtgaggactctgcctccttgcctgcctacaaggtgcctggtttgcagcaggctctccgctctttccagcaaagctgctcagagagggtgtccagcacagtggagaggccggaagtgagacgggcagacggcacctgcagcctgaaacgcaccgctcctgcgtgcgcccccacctggtccccggatgcccccaccacctggacagaggccacactgactgcccacccagctgtggcgggaggtgcagagcagggggctttagggagcagtgactgcggtcacccctttagttctctgggtgtagaccacaccacctcccactgggcaccccccaacacggtgtcctgccacccagcgcctggctccaggaaaacacgcttgccttccttcccggcagcttcgccactctccttatggactctgttctgtttgtacatggctgacggaaatctctttggtacaaccgaataaagcctggtggcagtgctgcgcggggctcccagcc

SEQ ID NO: 298 - DNA, 3748 bp, Homo Sapiens
cttttgatttcaagagttaggagctcgagaaccgtttggcaatatgtacgacgcggatgaggatatgcaatatgatgaggatgatgatgaaatcaccccggatttgtggcaagaagcatgctggattgtaatcagttcctattttgacgagaaaggcttggttagacaacagctggattcttttgatgagtttattcagatgtctgttcaaagaattgtggaagacgctcctcctatagacctacaggctgaagctcagcatgctagtggagaagttgaagaaccgccacgatatttgctgaagtttgaacaaatttatctttccaagcctacccattgggaaagagatggtgctccttcaccaatgatgcccaatgaagctagattaaggaatctcacgtattctgctccgctttatgttgatataacaaaaacagtcattaaagaaggtgaagaacaacttcagactcagcatcagaaaacttttataggaaaaattccaattatgttgcggtcaacttactgccttttgaatggcttgacagatcgtgatctttgtgagttaaatgaatgccctttggatcctggtggctatttcattattaatggatcagaaaaggttctgattgcccaagagaaaatggcaacaaacacagtttatgtgtttgccaaaaaggattctaaatatgcctacacaggagagtgtagatcatgtcttgagaattcttcccgacccaccagtactatatgggttagcatgctggcaagaggaggacagggtgccaagaagagtgctattggtcagcgcattgtggcaactctaccatatatcaagcaagaagttcccatcattattgtgttcagagcattaggttttgtgtccgacagagatattttagaacatattatttatgattttgaagatccagagatgatggaaatggttaaaccttctctcgatgaagcttttgtcatccaagaacagaatgttgcactaaatttcattggttcacgaggagcaaagcctggtgttactaaagagaaaagaattaaatatgcaaaggaagttttacaaaaagaaatgctccctcatgttggtgtcagtgatttttgtgagaccaaaaaagcctatttcttgggatacatggttcataggttacttctggcagctttgggtagaagagaactagatgacagagatcactatggaaacaagagattggatcttgctgggccgctgcttgcattcttatttagaggtatgtttaagaatttgcttaaagaagtgcggatctatgcacagaaatttattgatcgaggaaaggattttaacttggagttggcaattaaaacacggatcatatctgatggcctaaaatactctttagctactggaaactggggtgatcaaaagaaagctcatcaagccagagctggagtatctcaggtgttaaaccgcctgacttttgcgtctactctttctcacctgcgtcgtttaaattctcctattggtagagacggcaagctagcaaaaccaagacagttgcataatacgttgtggggaatggtgtgtcctgccgagaccccagagggccatgctgtaggacttgtgaagaatttagccttgatggcgtatatttcagttggatctcaaccatctccaattctggaatttttagaagaatggagtatggaaaatttagaagaaatttctcctgcagctattgctgatgcaaccaagatttttgttaatggctgctgggttggaatacataaagatcccgaacaacttatgaacaccctaaggaaattgagacgtcagatggacatcattgtgtctgaagtttctatgatcagagatattcgagagagggagattcggatctatacggatgcaggccgtatttgtagaccacttctgattgtggaaaaacaaaagctacttttgaagaagaggcatattgaccaattgaaagagagagaatataacaactatagttggcaggatcttgtggccagtggggtagtggagtatattgataccctggaagaagaaacagtgatgcttgcaatgactccagatgatttacaggagaaagaagtagcttattgttccacatatacacactgtgagattcatccctcaatgatccttggtgtctgtgcatctattattccctttcctgatcataaccagtcccctagaaacacataccagtctgctatgggtaagcaggctatgggagtttacatcaccaacttccatgttcgcatggacacattggcccatgttctctattatcctcaaaagccacttgtgactacacggtctatggaatatctacgatttagagagctgccagcaggcatcaactcaattgtggccattgcatcatacactggatataatcaggaagactctgttatcatgaatcgttcagctgtagaccgcggcttcttcaggtctgttttctatcgctcatacaaagaacaggagtctaaaaaaggatttgatcaagaagaagtttttgagaagcctacacgtgaaacatgccagggcatgaggcatgccatttacgacaagctggatgatgatggtttgatagctccaggggttcgtgtatcaggagatgatgttattataggcaaaacagtcaccttgcctgaaaatgaagatgaattggagagcaccaatagacgctataccaagagagactgtagcacttttctcagaactagtgagacgggcattgtggatcaggttatggtaactctcaatcaggaaggatataaattttgtaaaataagggtacgctctgttaggattccacagattggagacaaatttgctagtcgacatggtcaaaagggtacttgtggtattcagtatagacaagaggatatgcctttcacctgtgaaggtatcacccctgatatcatcatcaatccccatgccatcccctctcgtatgactattggtcacttaattgaatgccttcaagggaaggtatcggctaacaagggtgaaattggtgatgccactccatttaatgatgctgttaacgtgcagaagatttctaatcttttatctgattatggctatcatctcagaggaaatgaggtcctgtacaatgggttcactggtcgaaaaatcacatcacaaatatttattggccccacttattaccagcgtttgaagcatatggtggatgataagattcactctcgtgctaggggacctattcagatcctcaatagacagcccatggagggtagatctcgtgatggtggcctgcgttttggagaaatggaacgagattgtcagattgcccatggagcagcccagtttttaagggaaagattgtttgaggcatcagatccatatcaggttcatgtttgcaatctttgtggaataatggcgattgccaacaccaggacccatacatatgaatgcaggggctgccgcaataaaacccagatttctttggtgcgaatgccttacgcatgcaaactattgtttcaggaacttatgtctatgagtattgcaccgcgaatgatgagtgtttagctattttacaggagtcaacaagataattaaatatcttggtgtcttgtttctattgtgtggctttataaaaatgacaaatatgtactgtgttgtgataaaaagtattttatttgtttaatgatatgcatgcttttcttctgtaaatatataataaatttttgtagatagtcttgatgtgtg

SEQ ID NO: 299 - DNA, 2373 bp, Homo Sapiens
ccggaagtggggcggcgaccccggaagtccccgccgggtgcagcttggtcggttcgatcgccgccgggacctgacaccgcccggagttggcgtcccttctccctctccgagtgctgctcctgtcattgtggccatggacgataccctgttccagttgaagttcacggcgaagcagctggagaagctggccaagaaggcggagaaggactccaaggcggagcaggccaaagtgaagaaggcccttctgcagaaaaatgtagagtgtgcccgtgtgtatgccgagaacgccatccgcaagaagaacgaaggtgtgaactggcttcggatggcgtcccgcgtagacgcagtggcctccaaggtgcagacagctgtgactatgaagggggtgaccaagaatatggcccaggtgaccaaagccctggacaaggccctgagcaccatggacctgcagaaggtctcctcagtgatggacaggttcgagcagcaggtgcagaacctggacgtccatacatcggtgatggaggactccatgagctcggccaccaccctgaccacgccgcaggagcaggtggacagcctcatcatgcagatcgccgaggagaatggcctggaggtgctggaccagctcagccagctgcccgagggcgcctctgccgtgggcgagagctctgtgcgcagccaggaggaccagctgtcacggaggttggccgccttgaggaactagccgtgccccgccggtgtgcaccgcctctgccccgtgatgtgctggaaggctcctgtcctctccccaccgcgtcttgcctttgtgctgaccccgcggggctgcggccggcagccactctgcgtctctcacctgccaggcctgcgtggccttagggttgttcctgttcttttaggttgggcggtgggtctgtgtcctggtgttgagtttctgcaaatttctgggggtgatttctgtgactctgggcccacagcggggaggccaagaggggccctgtggactttcacccagcactgtgggggccttcagactctggggcagcagacatgctgcttcccatcagccagagggggtcagggctgccctgttgccaaacaactccctgaggcctctccgcaccacctcagcgggcaggaggtcccaccatgtggacagacatagcccaaggaggcaccacaggtctatgtgtgctgggggatgtcaggtgccacccaacgctgtcctggtggtatttacaatgacatcctcctcctccatcactccaggggtggtgtctcggccgcccctaccagctggctgagccccctggcctcctgcgctccctcacttccctcagttcccaaagctgcccagtccatggggacagaaccgtcactcagatccacattcaagtgtgcccaccctgcagtcttcatcctcactcagctgctgcctctggaggtgcctttggccacatgtgctgtgctgtttgtctcctcgacagggagcctgtccaccagcaggctgcggtcccagcgggtgcgtctgcagctcctccccttgggcagcctggttctcccggaggacctttccttggggccctgcttcatgacgatgctgcctgtgtcaccctctaccatctgtaaacaactgggtgccttccccgaccacaccccaatgccttcccagcttggaagccaaggcagctgatgaagggagctcaggagagccgtcttcagctgggctggggttggggctgctgtgaggaaaacctgccattgtggccctggagagtcaccagcagctcttgggaaggacttgctgggaggctgagagaggctttgggcacagcctgctgtcttttccatttcctaaagtttacttcattgtcttgaggcttccaggttttgtttttgtttttgccaaagtagaaaaggcaggtggtgggcggctggcagggagtgcgggtccccgcccctcttcagtcctgccctcccctcctcagtcctgcccaccccgtgcagcccatgctgaggctgcagtggtgtcgtgggtgttacgtgcaggaacgtggagaccctgacgtgggctcactgcgtttggttttcttttcagaacttgggagcccccagggaggggctagtgttggtaggtcctagacgtggttccctccagcctccccaaaatcaaccctggtgttgagagaacgtccttctgtccatcgtgggtaacagccttggggagggtgcagagctctgcagagccatgggccaggtggggctgcctcagtcctgtccccttgggcactgaggagaggggcccattcacctttctcctagaatgctgttgtaaataaacaaatggatccctggaaaaaaaaaaaaaaaaaaaaa

SEQ ID NO: 300 - DNA, 16365 bp, Homo Sapiens
gcgcggccccctccagcccccggctcccggcagcagaagcagaaggcagcgccaggggccgccgccgccgccgagctccgcggggctcgggagccggccccggcgaggaggcgcggaaccatggccgatgggggcgagggcgaagacgagatccagttcctgcgaactgatgatgaagtggttctgcagtgcaccgcaaccatccacaaagaacaacagaagctatgcttggcagcagaaggatttggcaacagactttgtttcttggagtccacttccaattccaagaatgtgcccccagacctctccatctgcacctttgtgctggagcagtccctctctgtccgggcgctgcaggagatgctggctaacaccgtggagaaatcagaagggcaagttgatgtggaaaaatggaaattcatgatgaagactgctcaaggtggtggtcatcgaacactcctctacggacatgccatattgctgcgccattcctatagtggcatgtatctgtgctgcctgtccacctcccggtcttcaactgataagctggcttttgatgttggcttgcaagaggacaccacaggggaggcttgttggtggaccatacaccctgcctctaagcagcgatcagaaggagaaaaagtacgagttggagatgacctcatcttagttagcgtgtcctctgaaaggtacttgcacttgtcttatggcaacggcagcttacacgtggatgccgctttccagcagactctctggagcgtggccccaatcagctcaggaagtgaggcagcccaagggtatctcattggtggtgatgtcctcaggttgctgcatggacacatggacgagtgtctcactgtcccttcaggagaacatggtgaagagcagcggagaactgttcattatgaaggtggcgctgtgtctgttcatgcacgttccctttggagactagagacgctaagagttgcgtggagtggaagccacataagatggggacagccattccgactacgccatgtcacaacaggaaaatacttgagtctcatggaagacaaaaaccttctactcatggacaaagagaaagctgatgtaaaatcaacagcatttaccttccggtcttccaaggaaaaattggatgtaggggtgagaaaagaagtagatggcatgggaacatctgaaataaaatacggtgactcagtatgctatatacaacatgtagacacaggcctatggcttacttaccagtctgtggacgtgaaatccgtgagaatgggatctatacaacgtaaggctattatgcatcatgaaggccacatggatgatggcataagtttgtcgagatcccagcatgaagaatcacgcacagcccgagttatccggagcacagtcttccttttcaatagatttataaggggccttgatgctctcagcaagaaagcgaaggcttccacagtcgatttgcctatagagtccgtaagcctaagtctgcaggatctcattggctacttccaccccccagatgagcatttagagcatgaagacaaacagaacagactacgagccctgaagaatcggcaaaatctcttccaggaagagggaatgatcaacctcgtgcttgagtgcatagaccgtttgcacgtctacagcagtgcagcacactttgctgatgttgctgggcgagaagcaggagagtcttggaaatccattctgaattctctgtatgagttgctggcggctctaattagaggaaatcgtaaaaactgtgctcaattttctggctccctcgactggttgatcagcagattggaaagactggaagcttcttcaggcattctggaagttttacactgtgttttagtagaaagtccagaagctctaaatattattaaagaaggacatattaaatctattatctcacttttagacaaacatggaagaaatcacaaggttctggatgtcttgtgctcactctgtgtttgccacggggttgcagtccgttctaaccagcatctcatctgtgacaatctcctaccaggaagagacttgttattgcagacacgtcttgtgaaccatgtcagcagcatgagacccaatatttttctgggcgtcagtgaaggttctgctcagtataagaaatggtactatgaattgatggtggaccacacagagccctttgtgacagctgaagcaactcacctgcgagtgggctgggcttccactgaaggatattctccctaccctggagggggcgaagagtggggtggaaatggtgttggagatgatctcttctcctatggatttgatggccttcatctctggtcaggttgtattgctcgtactgtaagctcaccaaaccaacatctgttaagaactgatgatgtcatcagttgctgtttagatctgagtgccccaagcatctcgttccgaattaatggacaacctgttcaaggaatgtttgagaatttcaacatcgatggcctcttctttccagtcgttagtttctctgcaggaataaaagtacgctttctgcttggagggcgacatggagaattcaaatttcttcctccacctgggtatgctccttgttatgaagctgttctgccaaaagaaaagttgaaagtggaacacagccgagagtacaagcaagaaagaacttacacacgcgacctgctgggccccacagtttccctgacgcaagctgccttcacacccatccctgtggataccagccagatcgtgttgcctcctcatctagaaagaataagagaaaaactggcagagaatatccatgaactctgggttatgaataaaattgagcttggctggcagtatggtccggttagagatgacaacaagagacaacacccatgcctggtggagttctccaagctgcctgaacaggagcgcaattacaacttacaaatgtcgcttgagaccctgaagactttgttggcattaggatgtcatgtgggtatatcagatgaacatgctgaagacaaggtgaaaaaaatgaagctacccaagaattaccagctgacaagtggatacaagcctgcccctatggacctgagctttatcaaactcaccccatcacaagaagcaatggtggacaagttggcagaaaatgcacataatgtgtgggcgcgggatcgaatccggcagggctggacttatggcatccaacaggacgtaaagaacagaagaaatcctcgccttgttccctacactcttctggatgaccgaaccaagaaatccaacaaggacagcctccgcgaggctgtgcgcacgctgctggggtacggctacaacttggaagcaccagatcaagatcatgcagccagagccgaagtgtgcagcggcaccggggaaaggttccgaatcttccgtgccgagaagacctatgcagtgaaggccggacggtggtattttgaatttgagacggtcactgctggagacatgagggttggttggagtcgtcctggttgtcaaccggatcaggagcttggctcagatgaacgtgcctttgcctttgatggcttcaaggcccagcggtggcatcagggcaatgaacactatgggcgctcttggcaagcaggcgatgtcgtggggtgtatggttgacatgaacgaacacaccatgatgttcacactgaatggtgaaatccttcttgatgattcaggctcagaactggctttcaaggactttgatgttggcgatggattcatacctgtgtgtagccttggagtggctcaagtgggtaggatgaactttggaaaggatgtcagcaccttgaaatatttcaccatctgtggcttacaagagggctatgaaccatttgccgttaatacaaacagggatattaccatgtggctgagcaagaggcttcctcagtttcttcaagttccatcaaaccatgaacatatagaggtgaccagaatagacggcaccatagacagttccccatgtttaaaggtcactcagaagtcttttggttctcagaacagcaacactgatatcatgttttatcgcctgagcatgccgatcgagtgcgcggaggtcttctccaagacggtggctggagggctccctggggctggcctttttgggcccaagaatgacttggaagattatgatgctgattctgactttgaggttctgatgaagacagctcatggccatctagtgcccgatcgtgttgacaaagacaaagaagctactaaaccagagtttaacaaccacaaagattatgcccaggaaaagccctctcgtctgaaacaaagatttttgcttagaagaacaaagccagattacagcacaagccattctgcaagactcaccgaagatgtccttgctgatgatcgggatgactatgatttcttgatgcaaacgtccacgtactattactcagtgagaatctttcctggacaagaacctgctaatgtctgggtgggctggattacatcagatttccatcagtatgacacaggctttgacttggacagagttcgcacagtaacagttactctaggagatgaaaaaggaaaagtgcatgaaagcatcaaacgcagcaactgctatatggtatgtgcgggtgagagcatgagccccgggcaaggacgcaacaataatggactggagattggctgtgtggtggatgctgccagcgggctgctcacattcattgccaatggcaaggaactgagcacatactatcaggtggaaccgagtacaaaattatttcctgcggtttttgcacaagctacaagtcccaatgttttccagtttgagttgggaagaataaagaatgtgatgcctctctcggcgggattattcaagagtgagcacaagaaccccgtgccgcagtgccccccgcgcctccacgtgcagttcctgtcacacgtcctgtggagcagaatgcccaaccagtttttgaaggtagatgtgtctcgaataagtgaacgccaaggctggttggtgcagtgtttggatcctctgcagttcatgtctcttcatatccctgaggaaaacagatctgttgacatcttagagttgacagagcaggaggaattgctgaaatttcactatcacactctccggctctactcagccgtctgtgctcttgggaaccaccgggtggcccatgccctgtgcagccatgtggatgaacctcagctcctctatgccattgagaacaagtacatgcctggtttgctgcgtgctggctactatgacctgctgattgacatccacctgagctcctatgccactgccaggctcatgatgaacaacgagtacattgtccccatgacggaggagacgaagagcatcaccctgttccctgatgagaacaaaaaacacggccttccagggatcggcctcagcacctccctcaggccacggatgcagttttcctcccccagttttgtaagcattagtaatgaatgttaccagtacagtccagagttcccactggacatcctcaagtccaaaaccatacagatgctgacagaagctgttaaagagggcagtcttcatgcccgggacccagttggagggactactgaattcctctttgtacctctcatcaagcttttctataccctgctgatcatgggcatctttcacaacgaggacttgaagcacatcttgcagttgattgagcccagtgtgtttaaagaagctgccactccggaggaggagagtgacacgctggagaaagagctcagtgtggacgatgcaaagctgcaaggagctggtgaggaagaagccaaggggggcaagcggcccaaggaaggcctgctccaaatgaaactgccagagccagttaaattgcagatgtgcctactgcttcagtacctctgtgactgccaggtccggcaccggatagaagccattgtagccttttcagatgattttgtggctaagctccaagacaatcaacgtttccgatacaacgaagtcatgcaagccttaaacatgtcagctgcactcacagccaggaagacaaaggaatttagatcaccacctcaagaacagatcaatatgcttctcaattttaaggatgacaaaagtgaatgtccatgtccagaagaaattcgtgaccaactattggatttccatgaagatttgatgacacattgtggaattgagctggatgaagatgggtctctggatggaaacagtgatttaacaattagagggcgtctgctatccctggtagaaaaggtgacatatctgaagaagaagcaagcagaaaaaccagttgagagtgactccaaaaagtcctccactctgcagcagctgatttctgagaccatggtccgatgggctcaggagtctgtcattgaagaccccgagctggtgagggccatgtttgtgttgctccatcggcagtatgacggcattgggggtcttgttcgggccctgccaaagacctacacgataaatggtgtgtccgtggaggacaccatcaacctgctggcatcccttggtcagattcggtccctgctgagtgtgagaatgggcaaagaagaagagaagctcatgattcgtggattaggggatattatgaataacaaagtgttttaccagcaccctaatctcatgagggcactggggatgcacgagactgtgatggaggtcatggtgaacgtccttggaggtggagagtccaaggaaatcacctttcccaagatggtggccaactgttgccgttttctctgttacttctgtcgtataagtaggcagaatcaaaaagctatgtttgatcatctcagttatttactggaaaacagcagtgttggtcttgcctccccagctatgagaggttcaacaccactggatgtggctgcagcttcggtgatggataataatgaactagcattagctctgcgtgagccggatctagaaaaggtagttcgttatttggctggttgtggactgcaaagttgccagatgctggtgtctaagggctatccagacattgggtggaacccagttgaaggagagagatatcttgactttcttagatttgctgtcttctgtaatggggagagtgtggaggaaaatgcaaatgtcgtggtgagattgctcattcggaggcctgagtgttttggtcctgctttgagaggagaaggtgggaatgggcttcttgcagcaatggaagaagccatcaaaatcgccgaggatccttcccgagatggtccctcaccaaatagcggatccagtaaaacacttgacacagaggaggaggaagatgacactatccacatggggaacgcgatcatgaccttctattcagctttgattgacctcttgggacgctgtgctcctgagatgcatttgattcatgccgggaagggagaagccatcagaattaggtccattttgagatccctcattcccctgggagatttggtgggcgttatcagcatcgcttttcagatgccaacaatagccaaagatgggaatgtggtggaacctgacatgtctgcggggttttgcccagatcacaaggcagccatggttttattccttgacagggtctatgggattgaggttcaagacttcctcctccatcttcttgaggttggctttctgccagatctccgggcggctgcttctttagatacggcagctttgagtgctacagacatggccttggccctcaatcggtacctttgcacagccgtcttgccattgttaacaagatgtgctcctctctttgctggcacagagcaccacgcttctctcattgactcattacttcatactgtgtatagactttctaagggctgttcacttaccaaagctcagcgggattccatagaagtttgtttactctctatttgtggacaactgagaccttctatgatgcagcacttactcagaagattagtatttgatgttccattattaaatgaacacgcaaagatgcctcttaaactgctgacaaatcattatgaaagatgctggaaatattactgcctgcctggagggtggggaaactttggtgctgcctcagaagaagaacttcatttatcaagaaagttgttctggggcatttttgatgccctgtctcaaaagaaatatgaacaagaacttttcaaactggcactgccttgcctgagtgcagttgcgggagctttgcctccagactacatggagtcaaattatgtcagtatgatggaaaaacagtcatcaatggattctgaagggaactttaacccacaacctgttgatacctcaaatattacaattcctgagaaattggaatacttcattaacaaatatgcagaacactcccatgacaaatggtcaatggacaagttggcaaatggatggatttatggagaaatatattcagactcttctaaggttcagccattaatgaagccatataagctattgtctgaaaaggaaaaagaaatttatcgctggccaatcaaagaatctttaaaaactatgctggcttggggctggagaattgaaagaactcgggagggagacagcatggccctttacaaccggactcgtcgtatttctcagacaagccaggtttctgtggacgctgcccatggttacagtccccgggccattgacatgagcaatgttacactatctagagacctgcatgctatggcagaaatgatggctgaaaactaccataatatatgggcaaagaaaaagaaaatggagttggagtccaaaggaggaggaaaccatcctctgctggtgccctatgatacactgacagccaaagagaaagccaaggatagagaaaaagcacaggacatcctcaagttcttgcagatcaatggatatgctgtatccagaggatttaaggacctggaactggacacgccttctattgagaaacgatttgcctatagtttcctccaacaactcattcgctatgtggatgaagcccatcagtatatcctggagtttgatggtggcagcagaggcaaaggagaacatttcccttatgaacaagaaatcaagttctttgcaaaagtcgttcttcctttaattgatcagtatttcaaaaaccatcgtttatacttcttatctgcagcaagcagacctctctgctctggaggacatgcttccaacaaagagaaagaaatggtgactagcctattctgcaaacttggagttcttgtcaggcataggatttcactatttggcaatgatgcaacatcaattgtcaactgtcttcatattttgggtcagactttggatgcaaggacagtgatgaagactggcctggagagtgttaaaagtgcactcagagcttttctggacaacgctgcagaggatctggagaagaccatggaaaacctcaagcagggccagttcactcacacccgaaaccagcccaaaggggttactcagattatcaattacaccacagtggccctgctgccaatgctgtcttcattatttgaacatattggccagcatcagttcggagaagacctaatattggaagatgtccaggtgtcttgttatagaattctgactagcttatatgctttgggaaccagcaagagtatttacgtggagaggcaacgttctgcattaggagaatgtctagctgcctttgctggtgcttttcctgtagcatttttggaaactcatctggacaaacataatatttactccatctacaataccaagtcttcacgagaaagagcagctctcagtttgccaactaatgtggaagatgtttgtccaaacataccgtctttggagaaactcatggaagaaatcgtggaattagccgagtccggcattcgctacactcaaatgccacatgtcatggaagtcatactgcccatgctttgcagctacatgtctcgttggtgggagcatggacctgagaacaatccagaacgggccgagatgtgctgcacagccctgaactcagagcacatgaacacacttctagggaacatattgaaaatcatatataataacttggggattgatgagggagcctggatgaagaggctagcagtgttttcccagcctataataaataaagtgaaacctcagctcttgaaaactcatttcttgccgttaatggagaaactcaagaaaaaggcagctacggtggtgtctgaggaagaccacctgaaagctgaggccaggggggacatgtcggaggcagaactcctcatcctagatgagttcaccacactggccagagatctctatgccttctaccctctcttgattagatttgtggactataacagggcaaagtggctaaaggagcctaacccagaagcagaggagctcttccgcatggtggctgaagtgtttatctactggtcgaagtcccataatttcaaaagagaagagcagaacttcgttgtacagaatgaaatcaacaatatgtctttccttattactgataccaagtcaaagatgtcaaaggcagctgtttctgatcaggaaaggaagaaaatgaagcgcaaaggagatcggtattccatgcagacctctctgattgtagcagctctgaagcggttactgcccattgggttgaacatctgtgcccctggggaccaggagctcattgctctggccaaaaatcgatttagcctgaaagataccgaggatgaagtacgagatataatccgcagcaatattcatttacaaggcaagttggaggatcctgctattagatggcaaatggctctttacaaagacttaccaaacaggactgatgatacctcagatccagagaagacggtagaaagagtattggatatagcaaatgtgctttttcatcttgaacagaagtctaaacgtgtgggtcggagacattactgtctggtggaacatcctcagagatctaaaaaggctgtatggcataaactactgtccaagcagaggaaaagggctgttgtagcctgcttccggatggcccccttatataatctgccaaggcatcgggctgtcaatctctttcttcagggatatgaaaagtcttggattgaaacagaagaacattactttgaagataaactgatagaagatttagcaaaacctggggctgaacctccagaagaagatgaaggcactaagagagttgatcctctacatcagctgatccttctgtttagtcggacagctttaacagagaaatgcaaactggaggaagattttttatatatggcctatgcagatattatggcaaagagttgtcatgatgaggaagatgacgatggtgaagaggaagtgaagagttttgaagaaaaagaaatggaaaagcaaaagcttctataccagcaagcccgactccacgatcgtggcgcggctgagatggtgctacagacaatcagtgccagcaaaggtgaaactggaccaatggtagcagctactctgaaacttggaattgctattttaaatggtgggaactccacagtacagcagaaaatgcttgactacctcaaggagaaaaaggatgtgggcttctttcagagcctggccggcctgatgcagtcatgtagtgtccttgacctaaatgcatttgagcgacaaaacaaagctgaaggtcttgggatggtgacagaggaaggatcaggagaaaaggttctgcaggacgatgagttcacctgtgacctcttccgattcctgcaactactctgtgagggacacaactcagattttcagaattatctgagaactcagactggcaataatacaactgtcaacataattatctccactgtagactacctactgagagttcaggaatcaattagtgacttttattggtattactctgggaaagatgttattgatgaacaaggacaacggaatttctccaaagctatccaagtggcaaaacaagtctttaacactcttacagagtatattcagggtccttgcactgggaatcaacagagtttggcacacagcaggctgtgggatgctgtggtcggctttcttcatgtgtttgcccatatgcagatgaagctgtcgcaggattccagtcaaattgagctattaaaagaattaatggatctgcagaaggatatggtggtcatgttgctgtccatgttagaaggtaatgttgttaatggaacgattggcaaacagatggtggatatgcttgtggaatcttccaacaacgtggagatgattctcaaattttttgacatgttcttaaaactaaaggatttgacgtcgtctgatacttttaaagaatatgaccccgatggcaagggagtcatttccaagagggacttccacaaagcgatggagagccataagcactacacgcagtcagaaacggaatttcttttgtcttgtgcggagacggatgagaatgaaaccctcgactacgaagagttcgtcaaacgcttccacgaacctgcgaaggacatcggcttcaacgtcgccgtccttctgacaaacctctctgagcacatgcccaacgatacccgacttcagacttttctggaattagcagagagcgtcctgaattatttccagccctttctgggccgcatcgaaatcatgggaagcgccaaacgcatcgagagggtctattttgaaatcagtgagtccagccgaacccagtgggagaagccccaggtcaaggagtccaaaagacagttcatatttgacgtggtcaacgaaggcggagagaaagagaagatggaactctttgtgaacttctgcgaggacaccatctttgaaatgcagctggcggctcagatctcggagtcggacttgaacgagaggtcagcgaataaggaagaaagcgagaaggagaggccggaagagcaggggccgaggatggctttcttctccattctgacggtcaggtcggccctgtttgcgctcaggtacaatatcttgacccttatgcgaatgctcagtctgaagagcctgaagaagcagatgaaaaaagtaaaaaagatgaccgtgaaggacatggtcacggccttcttttcatcctactggagtattttcatgaccctcttgcacttcgtggccagcgttttcagaggctttttccgcatcatttgcagcctgctgcttgggggaagcctcgtcgaaggtgctaaaaagatcaaagttgcagaactgttagccaacatgccagaccccactcaggatgaggttagaggagatggggaggagggagagaggaaacccctggaagccgccctgccctccgaggatctgaccgacttaaaggagctgacagaggaaagtgaccttctttcggacatctttggcctggatctgaagagagaaggaggacagtacaaactgattcctcataatccaaatgctgggctcagtgacctcatgagcaacccagtccccatgcctgaggtgcaggaaaaatttcaggaacagaaggcaaaagaagaagaaaaggaagaaaaagaagaaaccaaatctgaacctgaaaaagccgagggagaagatggagaaaaagaagagaaagccaaggaagacaagggcaaacaaaagttgaggcagcttcacacacacagatacggagaaccagaagtgccagagtcagcattctggaagaaaatcatagcatatcaacagaaacttctaaactattttgctcgcaacttttacaacatgagaatgttagccttatttgtcgcatttgctatcaatttcatcttgctcttttataaggtctccacttcttctgtggttgaaggaaaggagctccccacgagaagttcaagtgaaaatgccaaagtgacaagcctggacagcagctcccatagaatcatcgcagttcactatgtactagaggagagcagcggctacatggagcccacgttgcgtatcttagctattctgcacacggtcatttctttcttctgcatcattggatactactgcttgaaagtcccattggttatttttaagcgagaaaaggaagtggcacggaaattggaatttgatgggctttatattacagaacagccttcagaagatgatattaaaggccagtgggatagactcgtaatcaacacacagtcatttcccaacaactactgggacaaatttgttaaaagaaaggttatggataaatatggagagttctacggccgagacagaatcagtgaattacttggcatggacaaggcagctctggacttcagtgatgccagagaaaagaagaagccaaagaaagacagctccttatcagctgtactgaactccattgatgtgaagtatcagatgtggaaactaggagtcgttttcactgacaactccttcctctacctagcctggtatatgactatgtctgttcttggacactataacaactttttttttgccgctcaccttctcgacattgctatgggattcaagacattaagaaccatcttgtcctcagtaactcacaatggcaaacagctcgtattaaccgttggcttattagctgttgttgtatacctatacactgtggtggcattcaattttttccgaaaattctacaataaaagtgaagatggtgatacaccagatatgaaatgtgacgatatgctaacatgctatatgttccacatgtatgttggagttcgtgctggaggagggatcggggatgaaatcgaagacccagcaggagatgaatatgagatctatcgaatcatctttgacatcactttcttcttctttgttattgtcattctcttggccataatacaaggtctaattattgatgcttttggagaactaagagaccaacaggaacaagtcaaagaagacatggagaccaaatgcttcatctgtgggataggcaatgattacttcgacacagtgccacatggctttgaaacccacactttacaggagcacaacttggctaattacttgttttttctgatgtatcttataaacaaagatgaaacagaacacacaggacaggaatcttatgtctggaagatgtatcaagaaaggtgttgggaatttttcccagcaggggattgcttccggaaacagtatgaagaccagctaaattaaactcagacccaatcacctctaaaaaccaaaaccctacccctctctctccctctctcaatttctctgctctcttggaaacattttgctgattttgtgaattgccagcgttgtgtgttttctgggagcatcgaagctctgtttcggaagagctgtttcctccccccaccttttgtatttactttgagactaaagactgaagaataatctaaattcatactcagacaaaaaaaggaattctggaaagaaaaccattctggacactgtcataacacacatagatagattttcttctgagactcccggagtcttctcgagctacgagaccttcacagagacacgtggcagccacactcacccagcctctttatttcaccatcctggaaggaaactgtctgtctaatggtcacagagcactgtagcacttaacagattgccatggacaccagttgcgaagggaaatagtgccttactatatgtgggttgagctatgcagaagatacgtgcatgaaaaaacatctttattttctttatgtcgacctttcttttcttagattgattttgtgaggttttttttttttcctttagtcttttctttagtgggggagggtaagaaaagcagtttgcacttaaaaagaaaaaaaaaaaacgggtggtgtgtctcaggacaaaaggaggctcttctcattcagctaaattcacatttgccccccccccccgcccccgcccccatatgctcctgctattattttggtaatgctctgatgcaacattgcaactttatgaaatctttgtatgaaaacaaaaagactgcaaaaaatacactttcaaaagaaaccattcattgcatgtttattatgcaagtttaaatgaacaaagaaaaccttcagaaacaagttgatcaacgtgagagaaatttcatgataattattcatagtaataaagtgtcgtgggcttaattgtatatctggagccagtgtcatccaccaacaatgtgatacaatatgaacttgacagtagttttgggttttgctcattctttcagccacctgtgatcagttttgttgattaaggacttcttgtcaggccattttttaatatcaaagctgaagcaatatccattcagggatttcatcagttgcatcacaaaacacggatgataatatacatcactccattttttccattttgagtccttttaaatgtaatgctaacctttacaattaaaaagtcagattcagaatggaaacaaggtcattttgcaaacattggagctcttttattacaagtctgcttgttaattttagaactgtaaaaccgctctgattaaactatttaactaac

SEQ ID NO: 301 - DNA, 2936 bp, Homo Sapiens
gtaggaggaggtggaggaggaggcggctcgggagagcgagcagcgagctggctggatcgccgagcgcgagtgagggagccgagccgcccgccgccgccgcctccgcctcccctccgcgaacaggagcccgggccggggcccggcacgccgccccagcccgtccctcggcgtcaggccgcgagggtagcgcgcgcgagcgagcgagggggagggagagcgagcgagcgccgggaggaggcggccggaccgagcgggcgcccgcgcgtgtggcgtgaggggaagccgcttgcccgcccccttcgccttcccttctctccccctccccgctccccccccgaccgcggagcagcaccatgtcggcgccggcggccaaagtcagtaaaaaggagctcaactccaaccacgacggggccgacgagacctcagaaaaagaacagcaagaagcgattgaacacattgatgaagtacaaaatgaaatagacagacttaatgaacaagccagtgaggagattttgaaagtagaacagaaatataacaaactccgccaaccattttttcagaagaggtcagaattgatcgccaaaatcccaaatttttgggtaacaacatttgtcaaccatccacaagtgtctgcactgcttggggaggaagatgaagaggcactgcattatttgaccagagttgaagtgacagaatttgaagatattaaatcaggttacagaatagatttttattttgatgaaaatccttactttgaaaataaagttctctccaaagaatttcatctgaatgagagtggtgatccatcttcgaagtccaccgaaatcaaatggaaatctggaaaggatttgacgaaacgttcgagtcaaacgcagaataaagccagcaggaagaggcagcatgaggaaccagagagcttctttacctggtttactgaccattctgatgcaggtgctgatgagttaggagaggtcatcaaagatgatatttggccaaacccattacagtactacttggttcccgatatggatgatgaagaaggagaaggagaagaagatgatgatgatgatgaagaggaggaaggattagaagatattgacgaagaaggggatgaggatgaaggtgaagaagatgaagatgatgatgaaggggaggaaggagaggaggatgaaggagaagatgactaaatagaacactgatggattccaaccttcctttttttaaattttctccagtccctgggagcaagttgcagtcttttttttttttttttttttttttccctcttgtgctcagtcgccctgttcttgaggtctcttttctctactccatggttctcaatttatttggggggaaataccttgagcagaatacaatgggaaaagagtctctacccctttctgttcgaagttcatttttatcccttcctgtctgaacaaaaactgtatggaatcaacaccaccgagctctgtgggaaaaaagaaaaacctgctcccttcgctctgctggaagctggagggtgctaggcccctgtgtagtagtgcatagaattctagcttttttcctcctttctctgtatattgggctcagagagtacactgtgtctctatgtgaatatggacagttagcatttaccaacatgtatctgtctactttctcttgtttaaaaaaagaaaaaaaaacttaaaaaaatggggttatagaaggtcagcaaagggtgggtttgagatgtttgggtgggttaagtgggcattttgacaacatggcttctcctttggcatgtttaattgtgatatttgacagacatccttgcagtttaagatgacacttttaaaataaattctctcctaatgatgacttgagccctgccactcaatgggagaatcagcagaacctgtaggatcttatttggaattgacattctctattgtaattttgttcctgtttatttttaaattttctttttgtttcactggaaaggaaagatgatgctcagttttaaacgttaaaagtgtacaagttgctttgttacaataaaactaaatgtgtacacaaaggatttgatgcttttctctcagcataggtatgcttactatgaccttccaagtttgacttgtataacatcactgtcaaactttgtcaccctaacttcgtattttttgatacgcactttgcaggatgacctcagggctatgtggattgagtaatgggatttgaatcaatgtattaatatctccatagctgggaaacgtgggttcaatttgccattggtttctgaaagtattcacatcatttgggataccagatagctcaatactctctgagtacattgtgcccttgatttttatctccaagtggcagtttttaaaattggccttttacctggatataaattaattgtgcctgccaccaccatccaacagacctggtgctctaatgccaagttatacacgggacagttgctggcatgtcttcattggctatataaaatgtggccaagaagataggctctcagtaagaagtctgatggtgagcagtaactgtccctgctttctggtataaagctctcaaatgtgaccatgtgaatctgggtgggataatggactcagctctgtctgctcaatgccattgtgcagagaagcaccctaatgcataagctttttaatgctgtaaaatatagtcgctgaaattaaatgccactttttcagaggtgaattaatggacagtctggtgaacttcaaaagctttttgatgtataaaacttgataaatggaactattccatcaataggcaaaagtgtaacaacctatctagatggatagtatgtaatttctgcacaggtctctgtttagtaaatacatcactgtataccgatcaggaatcttgctccaataaaggaacataaagattttttttggaaaaaaaaaaaaaaaaaa

SEQ ID NO: 302 - DNA, 2895 bp, Homo Sapiens
gacttaacgcgcccccgccccgcgcccggcctcggcagccgcctgtcgccgcgggagcagccgctatctctgtgtgtccgcgtgtgcgcccggtccccgcctgccgcaccatggagagctaccacaagcctgaccagcagaagctgcaggccttgaaggacacggccaaccgcctacgtatcagctccatccaggccaccactgcggcgggctctggccaccccacgtcatgctgcagcgccgcagagatcatggctgtcctctttttccacaccatgcgctacaagtcccaggacccccggaatccgcacaatgaccgctttgtgctctccaagggccatgcagctcccatcctctacgcggtctgggctgaagctggtttcctggccgaggcggagctgctgaacctgaggaagatcagctccgacttggacgggcacccggtcccgaaacaagctttcaccgacgtggccactggctccctgggccagggcctcggggccgcttgtgggatggcctacaccggcaaatacttcgacaaggccagctaccgagtctattgcttgctgggagacggggagctgtcagagggctctgtatgggaggccatggccttcgccagcatctataagctggacaaccttgtggccattctagacatcaatcgcctgggccagagtgacccggccccactgcagcaccagatggacatctaccagaagcggtgcgaggccttcggttggcatgccatcatcgtggatggacacagcgtggaggagctgtgcaaggcctttggccaggccaagcaccagccaacagccatcattgccaagaccttcaagggccgagggatcacgggggtagaagataaggagtcttggcatgggaagcccctccccaaaaacatggctgagcagatcatccaggagatctacagccagatccagagcaaaaagaagatcctggcaacccctccacaggaggacgcaccctcagtggacattgccaacatccgcatgcccagcctgcccagctacaaagttggggacaagatagccacccgcaaggcctacgggcaggcactggccaagctgggccatgccagtgaccgcatcatcgccctggatggggacaccaaaaattccaccttctcggagatcttcaaaaaggagcacccggaccgcttcatcgagtgctacattgctgagcagaacatggtgagcatcgcggtgggctgtgccacccgcaacaggacggtgcccttctgcagcacttttgcagccttcttcacgcgggcctttgaccagattcgcatggccgccatctccgagagcaacatcaacctctgcggctcccactgcggcgtttccatcggggaagacgggccctcccagatggccctagaagatctggctatgtttcggtcagtccccacatcaactgtcttttacccaagtgatggcgttgctacagagaaggcagtggaactagccgccaatacaaagggtatctgcttcatccggaccagccgcccagaaaatgccatcatctataacaacaatgaggacttccaggtcggacaagccaaggtggtcctgaagagcaaggatgaccaggtgaccgttatcggggctggggtgaccctgcacgaggccttggccgctgccgaactgctgaagaaagaaaagatcaacatccgcgtgctggaccccttcaccatcaagcccctggacagaaaactcattctcgacagcgctcgtgccaccaagggcaggatcctcaccgtggaggaccattattatgaaggtggcattggtgaggctgtgtccagtgcagtagtgggcgagcctggcatcactgtcacccacctggcagttaaccgggtaccaagaagtgggaagccggctgagctgctgaagatgtttggtatcgacagggatgccattgcacaagctgtgaggggcctcatcaccaaggcctagggcggccagtgcaggttctggggaagaagcgtggagggtgcgctagggaggctggtgtccttggtcctgggccaggacctgggtgtcccaagtccccttggaatcacctgcaactgccctcaacctccagaactatcgctgcctcccattcatcaccaggtgacatttgactgcaacctgccttctagctgagaggctgagacctacatccctcattgtgacctcagtccacctggccctgagcgggctggggaactgcctcagtctggaagctgaccaggcactctcagggccgccccacctcccccaagtccccacagccttgcagtcaggtctcctgggatagggaggttcacttgcttgttgtccctcgtccttgtcatatccttttaactaggcatctcagagaagcagagacagggcagccttcgtcctgggggaaaagggaccctcaggatggcatgagaggtcctcaatcccaagtgtggaactgtccccctcaacttgttaaaatgcagatttctgggtcttgccaatggggcctgggactccatgtgacaactggcccaggagcttctgatgtcacacagaattctgcagtcccaagctccagccccgacctgctctgctgttcctaggtgactgccctcacactgctgaccacagtggatttctccccctgctgctcgggctcagctggggtcagccctgcttataaggtcaactgtgcaaaaccttatactggccaagaacaaactagtgctgggggaggagggctgggtgccccggccactggtggagtccccaggaaatcctcagagctgttgcgaggatgagacacatttgtggacacgtccacctgtcctcctgaccgtctggagagaataaacctgtcaaagccaaggtcaaaaaa

SEQ ID NO: 303 - DNA, 829 bp, Homo Sapiens
ccccccgagcgccgctccggctgcaccgcgctcgctccgagtttcaggctcgtgctaagctagcgccgtcgtcgtctcccttcagtcgccatcatgattatctaccgggacctcatcagccacgatgagatgttctccgacatctacaagatccgggagatcgcggacgggttgtgcctggaggtggaggggaagatggtcagtaggacagaaggtaacattgatgactcgctcattggtggaaatgcctccgctgaaggccccgagggcgaaggtaccgaaagcacagtaatcactggtgtcgatattgtcatgaaccatcacctgcaggaaacaagtttcacaaaagaagcctacaagaagtacatcaaagattacatgaaatcaatcaaagggaaacttgaagaacagagaccagaaagagtaaaaccttttatgacaggggctgcagaacaaatcaagcacatccttgctaatttcaaaaactaccagttctttattggtgaaaacatgaatccagatggcatggttgctctattggactaccgtgaggatggtgtgaccccatatatgattttctttaaggatggtttagaaatggaaaaatgttaacaaatgtggcaattattttggatctatcacctgtcatcataactggcttctgcttgtcatccacacaacaccaggacttaagacaaatgggactgatgtcatcttgagctcttcatttattttgactgtgatttatttggagtggaggcattgtttttaagaaaaacatgtcatgtaggttgtctaaaaataaaatgcatttaaactcatttgagag

SEQ ID NO: 304 - DNA, 5005 bp, Homo Sapiens
gggaggggcgggatttcctgcgggaggcgccgagccggccttggaaaaggagaaggagaaaggggggcaggggggagtgggagccaccgtcctgagtgccagggaccgagcagggccagccggaccccggcgggcggccgggagagagccctgagaccagtgcaccgctgctgcctgaggcccaagggaatgctggctgctctctgggtgggcactggtgttccacagccaagccgggaagattggtgtgcccagtcccagcccatcctggagctgtcggaagccacaagctgatatccatccagatttccatgtagccttcaccccctcaaagattagctttccttcgtgtggtggcagttcacggagcacctttgggagtatccctcagtacctgacgaggagcccactgcctgggacacctgacttgctcccccggaaccgggagccctccaaggggctgtggcatggcgccctgacgccccagcttggacccgttgcctgcctttgccctggactcctgagtgtagagctcagcccaggagccagtatgggtcgtgaacaggacctgatcctcgccgtcaagaatggagatgtgaccggtgtgcagaaactggtggcgaaggtcaaggccacaaagacaaagctcctgggctccacaaagaggctcaacgtgaactaccaggatgctgatggattctctgccctccaccacgctgctttggggggcagcctggagctcatagccttgctgctagaggctcaggccactgttgacatcaaggacagcaatggcatgcgcccgctgcactacgcagcctggcagggccggctggagcctgtgaggctgctgctgcgcgcctctgcggctgtcaatgccgcctcgctggacggacagatccccctgcacctggctgcacagtatggacattatgaggtgtcagaaatgctcctccagcatcagtccaacccatgcctggtcaacaaggccaagaagacgcccctggacctggcctgtgaatttggccgactcaaggtggcccagctgcttctgaacagccacttatgtgtggcactgctggagggtgaggccaaagacccgtgtgaccccaactacaccacgcccctgcacttggctgccaagaatggccacagagaagtcatcaggcagctcctgagagctgggatcgagatcaaccgccagaccaagacgggtacggcgctccacgaggccgcactgtatggcaagaccgaggtggtgcggctgcttctggagggaggtgtggacgtgaacatccggaatacgtataaccagacggcgctggacatagtgaatcagttcaccacctcccaggccagccgggaaatcaagcagctactgcgggaggcctcagggatcctgaaggtccgagcgctcaaggatttctggaacctccacgatcccactgctctcaatgtccgggcaggggatgtcatcacggtgctagaacagcatcccgacggccgctggaagggccacatccacgagagccagaggggcacagaccgcataggctacttccccccgggcattgtcgaggtggtcagcaagcgggtgggcatccctgcagcccgcctcccctccgcacccacccccctgcgcccaggcttctcccggacaccgcagcctcctgccgaagaacccccgcaccctcttacctacagccagcttcctcgggtgggcctcagcccagacagcccagcaggtgacaggaatagtgtgggcagtgagggcagcgtgggcagcatccgcagtgccggcagcgggcagagctctgagggcactaatggccatggccctggcctcctgattgagaacgcccagccactgccctctgctggagaggaccaggtgctgccaggactccacccgccgtccctggcagacaacctgagccaccgccctctggccaactgccgctctggggagcagatcttcacccaggacgtgcggccagaacagctgctggaggggaaggacgcgcaggccattcataactggctaagcgagttccagctggagggctacactgcccactttctgcaggccggctatgatgtgcctaccatcagccgcatgacacctgaggacctgacggccatcggggtgaccaagcctgggcacaggaagaagatcgcctcagagatcgctcagctcagcatcgccgagtggctgcccagctacatcccaacggacctgctggagtggctgtgtgcactggggctgccacagtaccacaagcagctggtgagcagcggctacgactccatggggctggtggccgacctcacctgggaggagctgcaggagattggggtcaacaagctcgggcatcagaagaagctcatgctgggggtgaagcggctggcggagcttcggcggggcctgctgcagggggaggccctcagcgaaggcgggcgccggctggccaagggtccggagctgatggccatcgagggactggagaacggagaaggcccagctacagctggcccacggctcctcaccttccagggcagcgaactaagcccagagctacaggcggccatggcagggggtggccctgaaccactccccctcccacctgcccgctctcccagccaggagagcatcggggcacgctcacgggggtctggccactcacaggaacagcctgccccacagcccagcggtggagatcccagccccccccaggagaggaacctcccagagggcacagagcggccccctaagctttgttcttcacttcctggccaaggacccccaccctatgtttttatgtacccccagggctcaccctctagcccggccccagggccacctcctggcgcaccctgggccttctcctacttggccgggccccctgccactcccccagacccgcctcgacctaagcgccggtcccacagcctaagccgccctggccccacagagggggatgctgagggggaggccgaagggccagtgggcagcaccctaggcagttatgctacccttacccggcggccaggacgcagtgcccttgtccggaccagtcctagtgtgaccccaaccccagctcgggggactcctcgcagccagtcctttgccctgcgggcccggcgcaaaggccccccgcccccgccccccaagcgcctcagctccgtctctggccccagcccggagccacctccactagatgagagcccagggcccaaggaaggggccacagggccccgaaggcgaacactgagtgaacctgctggcccctcagagccccctggcccacctgccccggctgggcccgcgtcagacacggaggaggaggagccaggccctgaggggacgcccccatctcggggcagctctggggaagggctgccgtttgcagaggaagggaacctgaccatcaaacagcgcccgaagcccgctggccccccgccccgagagacacccgtgccccccggcctcgatttcaacctcacggaatcagacactgttaagcggaggcccaagtgccgggagagagagccactgcagaccgcactgctggccttcggagtggccagtgccacgcctggccccgctgccccactgccttccccaactcctggcgagtctcctccagcttctagccttccccagcccgagcccagcagccttccagcccaaggagttccaaccccccttgctcccagccccgccatgcagcctccagtgccgccctgcccagggccaggtctggaaagctcagcagctagtcggtggaatggggagacagaacccccggccgcccctgctgccctcctcaaggtgcccggagcaggaacagcccccaagcctgtgtcggtggcctgcacccagctggcattttctggccctaagctagcgccccggctcggcccccgcccagtgcctcctccacggcctgagagcactgggactgtgggcccaggccaggcccagcagagactggagcagaccagctcgtccctggcagctgcactgagagccgcagagaagagcattggcaccaaggagcaagagggcacccccagcgcctccaccaagcacattctggatgacatcagcaccatgttcgacgccctggctgaccagctggacgccatgctggactgagccctccagcagtgcccactgtgacctgccgaagtccactgcctttgccccagcacagaagaggcccctgccaccctagggacgggccaagggctggtcaggctgaagtgcccctcctagcagggccccttcccactcagcccgcggctgtgggcaccacagctcttgtggggcagcccaccttagaacctgactagcgagggacctccgctgcatctcagcaaagcccctcccagggtttgatcgattgagcaggacagccctgctcctggacagggaccctggtaagagctctctcctcagggaggaagtaggggtggggctttgggggtgctttctctgtaccccccagcccatgtcccaagttgtgccaagggaatgcctcttgccacccaccatcctgcccaggccctgagaggctggaggaggcgtgtgtctggccgggccccctctccgtaggtgtacagaggacatgtaaatacacagcggtggtgcccaggcagctcctgcccccgccttccctcactgaggcagggctagcaggggtgggaggcagtggggttaacagatcccacaagtcctaacttttcaattgtaaatgttattttctaagcagagagaaatgcatatattttaaatggaatttattctatcaactgcctgagaggacacaatgggggaggggcttcggaccacagcaggagccccgactgcccacctgagggcagggagagcctgaccccattggcccaggccctggctctgtaaccattaacctcttcccccaactaacaccaatgaaaacaccattccacgtgaaaaaaaaaaaaaaaaaaaaaaaaaaaa

SEQ ID NO: 305 - DNA, 1851 bp, Homo Sapiens
ggccggtcagcgtcgctgccggtctccggcggagacggactctggagtttgggcggcccgggcggccactaggtactctgatattccgtactaaacacgtctgcaagtcaagatgtcgcacccgtccccccaagccaagccctccaaccccagtaaccctcgagtcttctttgacgtggacatcggaggggagcgagttggtcgaattgtcttagaattgtttgcagatatcgtacccaaaactgcggaaaattttcgtgcactgtgtacaggagaaaaaggcattggacacacgactgggaaacctctccatttcaaaggatgcccttttcatcgaattattaagaaatttatgattcagggtggagacttctcaaatcagaatgggacaggtggagaaagtatttatggtgaaaaatttgaagatgaaaatttccattacaagcatgatcgggagggtttactgagcatggcaaatgcaggccgcaacacaaacggttctcagttttttatcacaacagttccaactcctcatttggatgggaaacatgtggtgtttggccaagtaattaaaggaataggagtggcaaggatattggaaaatgtggaagtgaaaggtgaaaaacctgctaaattgtgcgttattgcagaatgtggagaattgaaggaaggagatgacgggggaatattcccaaaagatggctctggcgacagtcatccagatttccctgaggatgcggatatagatttaaaagatgtagataaaattttattaataacagaagacttaaaaaacattggaaatacttttttcaaatcccagaactgggagatggctattaaaaaatatgcagaagttttaagatacgtggacagttcaaaggctgttattgagacagcagatagagccaagctgcaacctatagctttaagctgtgtactgaatattggtgcttgtaaactgaagatgtcaaattggcagggagcaattgacagttgtttagaggctcttgaactagacccatcaaataccaaagcattgtaccgcagagctcaaggatggcaaggattaaaagaatatgatcaagcattggctgatcttaagaaagctcaggggatagcaccagaagataaagctatccaggcagaattgctgaaagtcaaacaaaagataaaggcacagaaagataaagagaaggcagtatatgcaaaaatgtttgcttagaaaggattcagttttgcttattgtgtgttgattgtataaatgcaataagaaaatgtaaaggtttttgtctatgaatatgatccctaatgtgtttcttttgacaccttagttccttactgtttacagtttaggagtactgataggggttcatgcttaataaacatgtcacaatacagtaagtaaagtggttttgtttgtttctttgagatggagtcttgctctgtcacccaggctggagtgcggtggcgcaatctcggctcactgcatcctctgcctcccgggttcaagcaattctcctgcctcagcttcccaagtagctgggattacaggcacgtgccaccacgcccagctaatttttgtatttttagtagagatggggtttcaccatattggtcacgtcacgttggtcttgaactcctgaccttgtgatccaccccgccttggcctcccaaagtgctgggattacaggtgtgagccaccgtgcccggccaagtaaaatgttttttaaaatggttatgtgcattattcataaaaaataatggtgtccagtctttttaaacttgtaaagacacatcttattgaataaagagatgagagcttaagtttgtaaaaaaaaaaaaaaaaaa

SEQ ID NO: 306 - DNA, 3118 bp, Homo Sapiens
gtgagtgggcggagaggcctcggtgcctcctacccgctccggacgtgcgtcccggcatcaccccgggatccgctcctccccgctggcggggggagaaagggcaggaggccttccgtcccggctataaagggccccggaccgccgcggctcgcctcggcttgcctcgacacgcctaggcgccctccggctccgccctagccgccgcgtcccagctagagctccagcgcccgctcaggccccactcgaccctctcgggcctcggctacttggactgcggcggaatatggcggctccgatgactcccgcggctcggcccgaggactacgaggcggcgctcaatgccgccctggctgacgtgcccgaactggccagactcctggagatcgacccgtacttgaagccctacgccgtggacttccagcgcaggtataagcagtttagccaaattttgaagaacattggagaaaatgaaggtggtattgataagttttccagaggctatgaatcatttggcgtccacagatgtgctgatggtggtttatactgcaaagaatgggccccgggagcagaaggagtttttcttactggagattttaatggttggaatccattttcgtacccatacaaaaaactggattatggaaaatgggagctgtatatcccaccaaagcagaataaatctgtactcgtgcctcatggatccaaattaaaggtagttattactagtaaaagcggagagatcttgtatcgtatttcaccgtgggcaaagtatgtggttcgtgaaggtgataatgtgaattatgattggatacactgggatccagaacactcatatgagtttaagcattccagaccaaagaagccacggagtctaagaatttatgaatctcatgtgggaatttcttcccatgaaggaaaagtagcttcttataaacattttacatgcaatgtactaccaagaatcaaaggccttggatacaactgcattcagttgatggcaatcatggagcatgcttactatgccagctttggttaccaaatcacaagcttctttgcagcttccagccgttatggaacacctgaagagctacaagaactggtagacacagctcattccatgggtatcatagtcctcttagatgtggtacacagccatgcttcaaaaaattcagcagatggattgaatatgtttgatgggacagattcctgttattttcattctggacctagagggactcatgatctttgggatagcagattgtttgcctactccagctgggaagttttaagattccttctgtcaaacataagatggtggttggaagaatatcgctttgatggatttcgttttgatggtgttacgtccatgctttatcatcaccatggagtgggtcaaggtttctcaggtgattacagtgaatatttcggactacaagtagatgaagatgccttgacttacctcatgttggcaaatcatttggttcacacgctgtgtcccgattctataacaatagctgaggatgtatcaggaatgccagctctgtgctctccaatttcccagggagggggtggttttgactatcgactagccatggcaattccagataagtggattcagctacttaaagagtttaaagatgaagactggaacatgggcgatatagtatacacgctcacaaacaggcgctaccttgaaaagtgcattgcttatgcagagagccatgatcaggcattggttggggataagtcgctggcattttggttgatggatgccgaaatgtatacaaacatgagtgtcctgactccttttactccagttattgatcgtggaatacagcttcataaaatgattcgactcattacgcatgggcttggtggagaaggctatctcaatttcatgggtaatgaatttgggcatcctgaatggttagacttcccaagaaaaggaaataatgagagttaccattatgccaggcggcagtttcatttaactgacgacgaccttcttcgctacaagttcctaaataattttgacagggatatgaatagattggaagaaagatatggttggcttgcagctccacaggcctacgtgagtgaaaaacatgaaggcaataagatcattgcttttgaaagagcaggtcttcttttcattttcaacttccatccaagcaagagctacactgactaccgagttggaacagcattgccagggaaattcaaaattgtgctagattcagatgcagcggaatatggagggcatcagagactggaccacagcactgactttttttctgaggcttttgaacataatgggcgtccctattctcttttggtgtacattccaagcagagtggccctcatccttcagaatgtggatctgccgaattgaagaggcctgatttcagctccaccagatgcagatttgtgttttgttttcttgttatcactgtcacacagcttataacatgtatgcttttcagaatacagttgtctagccaagccatcaagtgtctgaaattcaatattggtttatgcaaatacagcaaacttttatttaagtagatgggagaatatgtttaaaatattaggaatcctagaccatattttcaagtcatcttagcagctaggattctcaaatggaagtgttatatataatatgttaaaaacattttgctttcctggctaattatttgatccttttaaattcaaatttgaatcatttgtcatgtatgattatttctgttaaatgtacacagtatttaagatggatatttggtggctctatttgttctgatatcttttggtctaaattatgaggtaccaagattgtttctttgtttctttttttcaaattgtgtttagaaatactgtaataaatatgcagtagtgatataaagaattatatccaaggtaatataaaagccattacgtatgaactcatccgtgtctcattttgtgttttattttgtgatctcttgtccactaagtatcttgttaaatgccagtatctcagtctttctgaagccctgaaatggtaattgtagcatttcagaaaatgtctttcatttcaatcaataaaaagcttttgtaaaattgcaaaaaaaaaaaaaaaaaa

SEQ ID NO: 307 - DNA, 2433 bp, Homo Sapiens
ggggcggggccgccgcgaccgcgggcttcaggcagggctgcagatgcgaggcccagctgtacctcgcgtgtcccgggtcgggagtcggagacgcaggtgcaggagagtgcggggcaagtagcgcattttctctttgcattctcgagatcgcttagccgcgctttaaaaaggtttgcatcagctgtgagtccatctgacaagcgaggaaactaaggctgagaagtgggaggcgttgccatctgcaggcccaggcaacctgctacgggaagaccggggaccaagacctctgggttggctttcctagacccgctcgggtcttcgggtgtcgcgaggaagggccctgctcctttcgttccctgcacccctggccgctgcaggtggctccctggaggaggagctcccacgcggaggaggagccagggcagctgggagcggggacaccatcctcctggataagaggcagaggccgggaggaaccccgtcagccgggcgggcaggaagctctgggagtagcctcatggaagagaagcagatcctgtgcgtggggctagtggtgctggacgtcatcagcctggtggacaagtaccctaaggaggactcggagataaggtgtttgtcccagagatggcagcgcggaggcaacgcgtccaactcctgcaccgttctctccctgctcggagccccctgtgccttcatgggctcaatggctcctggccatgttgctgacttcctggtggccgacttcaggcggcggggcgtggacgtgtctcaggtggcctggcagagcaagggggacacccccagctcctgctgcatcatcaacaactccaatggcaaccgtaccattgtgctccatgacacgagcctgccagatgtgtctgctacagactttgagaaggttgatctgacccagttcaagtggatccacattgagggccggaacgcatcggagcaggtgaagatgctgcagcggatagacgcacacaacaccaggcagcctccagagcagaagatccgggtgtccgtggaggtggagaagccacgagaggagctcttccagctgtttggctacggagacgtggtgtttgtcagcaaagatgtggccaagcacttggggttccagtcagcagaggaagccttgaggggcttgtatggtcgtgtgaggaaaggggctgtgcttgtctgtgcctgggctgaggagggcgccgacgccctgggccctgatggcaaattgctccactcggatgctttcccgccaccccgcgtggtggatacactgggagctggagacaccttcaatgcctccgtcatcttcagcctctcccaggggaggagcgtgcaggaagcactgagattcgggtgccaggtggccggcaagaagtgtggcctgcagggctttgatggcatcgtgtgagagcaggtgccggctcctcacacaccatggagactaccattgcggctgcatcgccttctcccctccatccagcctggcgtccaggttgccctgttcaggggacagatgcaagctgtggggaggactctgcctgtgtcctgtgttccccacagggagaggctctggggggatggctgggggatgcagagcctcagagcaaataaatcttcctcagagccagcttctcctctcaatgtctgaactgctctggctgggcattcctgaggctctgactcttcgatcctccctctttgtgtccattccccaaattaacctctccgcccaggcccagaggaggggctgcctgggctagagcagcgagaagtgccctgggcttgccaccagctctgccctggctggggaggacactcggtgccccacacccagtgaacctgccaaagaaaccgtgagagctcttcggggccctgcgttgtgcagactctattcccacagctcagaagctgggagtccacaccgctgagctgaactgacaggccagtggggggcaggggtgcgcctcctctgccctgcccaccagcctgtgatttgatggggtcttcattgtccagaaatacctcctcccgctgactgccccagagcctgaaagtctcacccttggagcccaccttggaattaagggcgtgcctcagccacaaatgtgacccaggatacagagtgttgctgtcctcagggaggtccgatctggaacacatattggaattggggccaactccaatatagggtgggtaaggccttataatgtaaagagcatataatgtaaagggctttagagtgagacagacctggattcaaatctgccatttaattagctgcatatcaccttagggtacagcacttaacgcaatctgcctcaatttcttcatctgtcaaatggaaccaattctgcttggctacagaattattgtgaggataaaatcatatataaaatgcccagcatgatgaaaaaaaaaaaaaaaaaa

SEQ ID NO: 308 - DNA, 2066 bp, Homo Sapiens
aagttgcagtgactctccggcgtcactgttgcgcttcatagacgccgcgtgtacccggttgtcctcaggcgctgtcagatctgtggtttttctacttgaaggacacaatgttttccaaactagcacatttgcagaggtttgctgtacttagtcgcggagttcattcttcagtggcttctgctacatctgttgcaactaaaaaaacagtccaaggccctccaacctctgatgacatttttgaaagggaatataagtatggtgcacacaactaccatcctttacctgtagccctggagagaggaaaaggtatttacttatgggatgtagaaggcagaaaatattttgacttcctgagttcttacagtgctgtcaaccaagggcattgtcaccccaagattgtgaatgctctgaagagtcaagtggacaaattgaccttaacatctagagctttctataataacgtacttggtgaatatgaggagtatattactaaacttttcaactaccacaaagttcttcctatgaatacaggagtggaggctggagagactgcctgtaaactagctcgtaagtggggctataccgtgaagggcattcagaaatacaaagcaaagattgtttttgcagctgggaacttctggggtaggacgttgtctgctatctccagttccacagacccaaccagttacgatggttttggaccatttatgccgggattcgacatcattccctataatgatctgcccgcactggagcgtgctcttcaggatccaaatgtggctgcgttcatggtagaaccaattcagggtgaagcaggcgttgttgttccggatccaggttacctaatgggagtgcgagagctctgcaccaggcaccaggttctctttattgctgatgaaatacagacaggattggccagaactggtagatggctggctgttgattatgaaaatgtcagacctgatatagtcctccttggaaaggccctttctgggggcttataccctgtgtctgcagtgctgtgtgatgatgacatcatgctgaccattaagccaggggagcatgggtccacatacggtggcaatccactaggctgccgagtggccatcgcagcccttgaggttttagaagaagaaaaccttgctgaaaatgcagacaaattgggcattatcttgagaaatgaactcatgaagctaccttctgatgttgtaactgccgtaagaggaaaaggattattaaacgctattgtcattaaagaaaccaaagattgggatgcttggaaggtgtgtctacgacttcgagataatggacttctggccaagccaacccatggcgacattatcaggtttgcgcctccgctggtgatcaaggaggatgagcttcgagagtccattgaaattattaacaagaccatcttgtctttctgagggtagccagctgttttcagtggtccctgggagccagctggagacaggtggtcctgtaaaagctttattcctaatgtgggcacattccactcccatgagtcttcaaaaactttttttttgaatatatttttttcagttgatacataatagaacaacgtttatgaacctgccgtttgctttgtaacgtaactaaataatgtaatggcatctatattcagttgaagtgttttgatgtgcatgtgtacttcctaaggtgaaatgcatctatatacagacagcctctaaatcaagtccttcagtataattgatatatgtttttataatttcctcactggtataagtgtttcatatttgaaaaagttatctctgggtattgcataaaaggcttcatcttataaagtgaaatcattgttattgaattttaggaaggattaatggttaagtgtatataaaatactaatattaagtaaacttcatattggccaacaccagggttgtattctatggatgtcattattttgaattaagaattagtgtttaacattcctaaattgttttgagtgcttgattataatttgtaaaaaatgtttattttcaatacttctttaaatttaaaataaagcttatatttcaaatgtc

SEQ ID NO: 309 - DNA, 2996 bp, Homo Sapiens
ggggaggggccgggcggggggctggcggcagcggcggatggactcgcgggtatcggagctgttcggcggctgctgccggcccggagggggcccggccgtgggcggaaccctcaaggctaggggggccggcagcagcagcggctgcggggggccaaagggaaagaagaagaacggaaggaacagagggggcaaagccaacaaccccccgtatttgccccccgaggctgaagatggaaacattgaatataaattgaagctggtgaatccatcccagtaccgctttgagcacctggtgacacaaatgaagtggcggctccaggagggacgtggtgaggccgtctaccagattggggtagaggacaatgggctgctggtggggctggctgaggaggaaatgcgagcttcgctcaagaccctgcaccggatggcagagaaggttggggcagacataaccgttcttcgagagcgagaagtggattatgatagcgacatgccccggaagatcaccgaggtgctagtacgaaaggtccctgacaaccaacagttcctagacctccgtgtggccgtcctggggaatgtggactctgggaagtcaactctgcttggagtcctgacccagggagagctggacaatgggcggggccgggctcggctcaaccttttccgccacctgcatgagattcagtctggccgaacctccagcatcagcttcgagatcctgggctttaacagcaagggagaggtggtgaattacagcgactcacggacagcagaagagatctgtgagagcagctccaagatgatcaccttcatcgacctggcaggccaccataagtacctacacaccaccatctttggcctcacatcatactgccccgactgcgccctgctcctcgtcagtgccaacactgggattgctggcaccacaagggaacatctggggctggccctggccctgaaagtgcccttcttcatcgtggtcagcaagatcgacctatgtgccaagaccacagtggagaggacagtacgccagctggagcgggtcctcaagcagcctggctgccacaaggtccccatgctggtcacctctgaggatgatgccgtcactgctgcccagcagtttgctcagtcacccaatgtcacccccatcttcacattgtccagtgtgtctggagagagtctggacctcctcaaagtctttctgaatattctgccgccactcaccaacagcaaagagcaggaggaactcatgcagcagctgacggagttccaggtggatgaaatctacacagtaccagaggtggggactgttgttggaggaacactttccagtgggatttgccgtgagggggaccagctggtggtgggccccacggatgatggctgcttcctggagctgagagtatgcagcatccagcgcaaccgctctgcctgtcgtgtgctgcgagctggtcaggctgctacactggcgcttggggactttgaccgtgcactgcttcgcaagggcatggtgatggtgagcccggagatgaatcctaccatctgctcggtgtttgaggcagagatagtcttactgttccatgccaccaccttccgacgaggattccaggtgacagtacacgtgggcaacgtacgtcagacggcagtggtggaaaagatccatgccaaggacaaactgcggacaggcgagaaggcagtggtacgtttccgcttcctgaaacacccagagtacctgaaggtgggcgccaaactgctgttccgggagggtgtcaccaagggcatcggccatgtcactgatgtacaagccattacagcaggagaagcccaggccaacatgggcttctgaacccttcaggcagggacagttctattgctgtccctacaatatataaggtgacttctggccatgctgccctgccattggcggctctgtgtgttaataggctagggagagaggggtgctgtctgccacttgctccctgccaactttctggagaggtgccaaacttggtgtggccaggaaagggcagtcctgagggagaagacaggattcagggcagtgctccgaagctgtgtgctcacctggttggctcatcaaacctggcaaccctgtggcctgtctgccggagctgactggatccactcatcaattcttcgtccccactactaagactgggcatgttttgctggtgtggtctctgcacttcaggaatggtcacaacagggggtagccctcaaaagcactcctttttctatacctcttctcaaggccatgtaagttgcccatctctacctggctgtggacaaaaggttatctgctcttggccatctggtggtggtggcggcccagagtctgaagaaatggcacagggacagtgaatggtagtgttgccaccctgtgctgaggcctgaggcctcttcctcagctttatctccctttccttcactcaagggccatttccccagtccctatctcccccatcccctcccggcttataggccccacaggtgctatttgttgtgctggcccaggcgtggggctaccaagcaaaggcttggcatataccaaaggccagctgcatgcccatcagtctggtctttttcctctgcggtcatgttggctttcatgctggatcaaatgttttactttcccagactggtggcatctgagttccccatcctaccactctcaccccactttcctgccccacctaaaccctcgttttagtaatttgtagtgactgttcccttccctctgttgcagggaaccaggaggaaagggaaagatgttgccatatttcctactctttaggcatggactctcctttccctttgttagtgtcctgggttcccatggactcagggatttgttggctaaggtttctctgtgcatatatatatatatacatatgtatatatatttaaatacacatatatattgtacagaataaaaatgttttattgaatacactgtgcttaaaaaaaaaaaaaaaaaa

SEQ ID NO: 310 - DNA, 980 bp, Homo Sapiens
ggctgtgcgctctggggcacctcatgcagacgggagtagggaggctgttttttgcgcgtgcatatggcggtggcgggtggggggaagggggagatcctgctgcactggccgcccaagttggggggcgagctcggtggtgacgcgcggccctcacgtgacccagagctgcagagcgacgcagccttcggtgcagtcgtcactcgcgtctggctaccagctccccgctgccctgagctcggcgggctggcattcggcccggggaaaagcggagcaggtctgcgaggctaagtgtctccgcggcgcacctcgcggcgagaatccggaggagaaggagactgcaaggataggcccagaaaaacaaccagaaaaaaaaaatctcatcatggcaaatattcaccaggaaaacgaagagatggagcagcctatgcagaatggagaggaagaccgccctttgggaggaggtgaaggccaccagcctgcaggaaatcgacggggacaggctcgccgacttgcccctaattttcgatgggccatacccaataggcagatcaatgatgggatgggtggagatggagatgatatggaaatattcatggaggagatgagagaaatcagaagaaaacttagggagctgcagttgaggaattgtctgcgtatccttatgggggagctctctaatcaccatgaccatcatgatgaattttgccttatgccttgactcctgccatttatcatgagattaatactgtgattcccgctgttttctttttccttgcattttcctaatatgcctttactgatccgtttgctgtgaaccctatgttatttccatgtgtcaagtgggtcttgtgttgccagcttctatttgaagattgcctttgcactcagtgtaagtttctgtcagcagtagtttcacccatttgcatggaaaaatttaaagctaataaagcaatttaaaaagcaaaaaaaaaaaaaaaaaa

SEQ ID NO: 311 - DNA, 4349 bp, Homo Sapiens
ctggcgcgggacgccggacgcggtgcggggcggagcggggcgccaaggggcgcgccaggagctgcgcgggcgctgggagggagaccagggcgcagttccgggcgcgtctgagcggttctcgaggcgttctcgcctcggtctctggcgagtgcacggatcaaaagcagcatggatctgcctgtggatgaatggaaatcatatctgcttcaaaagtgggcttcactcccgacgtctgttcaggtcacaatttctacagcagagaccttgagggatatctttcttcactcctcttcacttcttcaacctgaggatgagctgtttctaaaaagactttctaaaggttacttggtgggaaaggactcggacgctcctcttttctacagagaagaaggaaacaaaaaatttcaggagaaagattacacaggagctgcagtgctgtactctaagggagtgtcacattcaaggcctaacactgaggacatgtcactgtgtcatgctaaccgctcggcagccctcttccacctgggtcagtatgagacgtgtcttaaagacattaacagagcacagacacatgggtatccagaaaggttgcaacccaagattatgttacgtaaagcagaatgtctggtggccctggggagactgcaggaggcaagccagaccatcagtgatcttgaaaggaacttcacagccacaccagccctagcagatgtcctccctcagactctgcagagaaacctccatcgtctgaaaatgaagatgcaagaaaaggacagtctcacagaaagcttcccagcagctctggccaaaacccttgaggatgcagcgctgagggaggagaatgaacaactttccaatgcctcatcatccatcggcttatgcgtagatcctttaaaaggtcgctgtctcgttgccacaaaagatattctcccaggagagctcctggtgcaggaggatgcttttgtgagtgttctcaacccaggagaactgccaccaccgcatcacggcctagacagcaaatgggacaccagagtcaccaatggggacctctattgtcaccgatgtttgaagcacactttggccacagttccgtgtgacggatgcagttatgccaagtattgcagccaggagtgtttgcagcaggcctgggagctctaccacaggacagaatgtcctctgggagggctgcttctcacactgggtgtcttttgccacattgccctgaggttgactcttttggtgggatttgaggatgttcgcaaaatcataacgaagctttgtgataagattagtaacaaggacatctgtttacctgaaagcaacaatcaggtcaagacacttaattatggcctaggggagagtgagaaaaatggcaacatcgttgagaccccaattcctggatgcgatattaatgggaagtatgaaaataattataatgctgtcttcaaccttttgccccacactgaaaaccatagcccagagcacaaattcctctgtgctctctgtgtttctgcactgtgcagacagctagaagcagccagtttacaggccatcccaactgagaggattgtgaactcctctcagcttaaagcagcagtgacacctgaattgtgtcctgacgtgactatttggggagtggcgatgctgagacacatgttacagcttcagtgtaacgctcaggcgatgaccaccatacaacacacaggacctaaagggagcatcgttaccgacagcaggcaggtgcgccttgccacaggcatcttccctgttatcagcctcctgaaccactcctgtagccccaacaccagcgtgtccttcattagcactgtcgccaccatccgggcgtcacagcggattagaaaggggcaagagattctccactgctatgggcctcacaagagccggatgggggttgccgaaaggcagcagaagctgaggtctcagtatttctttgactgcgcctgtccagcttgtcaaactgaggcacacaggatggctgcagggcccaggtgggaagcattctgttgcaacagttgcggagcgcccatgcagggagatgacgtgctgcgctgtggcagcagatcttgtgcagaatccgccgtcagcagggaccacctggtctctcggttacaggacctacagcagcaggtcagagtggcccagaagcttctcagagatggtgaactagagcgagctgttcagcggctgtcggggtgccagcgtgacgccgagagcttcctgtgggcagagcacgccgtggtgggagagatcgcggatggcctggcccgggcctgtgctgccttaggagactggcaaaagtcagccacccatctacagaggagtctctacgtggtggaggttcgccacgggccgtccagtgttgaaatgggccatgagctcttcaaattggcccagatctttttcaacgggtttgcagtacccgaagccctgagcacaatacagaaagctgaggaggttctgtcgctgcactgtggcccatgggacgatgaaatccaggagctccagaagatgaaatcctgtttgttggacttaccacccacccctgtagggcctgcattgtagggttccaggaggattttgacccacagaaaaggagcccatggaacacaagttaaagaggttttgctggccaggtatggtggctcacgcctgtaatcccagcactttgggaggctaaggtgggcggatcacctgatgtcaggagttcaagaccagcctggccaacatggtgaaaccccatctttactaaaaatacaaaaaactagccaggcgtggtggtgggcacctgtaatcccagctacttgggaggctgaggcaggagaatctcttgaacccaggaggcggaggttgcagtgagccgagatcgctccactgcactccagcccaggtgacagtgtgagactccatctcaaaaaaaaaaataagaggccgggtgcggtggctcaagcctgtaatcccagcactttgggaggccgaggcaggcagatcacgaggtcaggagatccagaccatcctggctaacacggtgaaaccccgtctctactaaaaatacaaaaaaattagtcgggcgtggtggcggacgcctgtattcacagctactcgggaggttgaggcaggagaatggggtgaacccgggaggaagagcttgcagtgagccgagatcgcgccactgcactccagcctgggtgacagagccagactccatctcaaagaaaaaaaaaaaatattaagaggttctgctgccagatgtgggttctgtgggtcgggtgtgggttctgtgggtcgggtgtgggttctgcagaccaggtgcggattctgtgtaggttctgcaggcccagtgtagaggctcacacctgtaatcccagtactttgagacgctgaggtgggaggatcacttgagcccaggagttcaaaaccagcctgggcaatatagtgagaccgtatcactacaaaaaagtttttttagttcaccgagcatggtggcacatgcctgtagtcccacctactcgagaagctgagatagggtcacctgagcctggtaggctgaggctgcagtgagccaagatcgcactactgcactccagcctgggtgacagagtaagaccctgtctcaacaaaaaaataacaggttctgttgctgctgagctttcgtcaggaagataagactttcccaacagtccgaagcctaggatatgagggctgaggaggactcaaaccgttgcagtcagagagacacctattttggtgaatattttttgaaatagttaagtggcctccagtacaaactcccagttcccagaaaagacttaaaactagtatctggagattccaagtcctttaaaaggattttagctgatctgcaggcatctggatgttagcctggggttttggctggattccacctcgctcagtgatgatagtctgtttccctggaacattcctgtggttttagtagtaatgagatgtgtgcaccactccagtgggaactgaagctcttagtagttacattgtaattaaaaaagaattataaaacaagaaatcagcaagcctgcttacctccagagacacaccgttccacttacagtatctagcttcctcgactcctttgttaaaatcgtggagtatgaaccgtgaccagagaagtaaatatggagccgttttattgagcagtttcctccagggatgacggctgtcagtgtgtttcctgccagttttccagtccttactctctgcccttcattctgtactcttggcagagtcagtaaccaaccactaataaaatcaaagttgtagtaaagactttataacacataaaaaaaaaaaaaaaa

SEQ ID NO: 312 - DNA, 2249 bp, Homo Sapiens
cgggccctgggcggggccttcccggctgacggcctgcgtgcactgcgcttgcgcgggttgagggcggtggctcaggctcctggaaaggaccgtccacccctccgcgctggcggtgtggacgcggaactcagcggagaaacgcgattgagagcagtgtgtggattacactatcactggaaaaatacgaattgagaagaaggaaaagactggaagatgcagaccttggttcctgttagtggaaacactgtaaggtcccagaaatggaaaagaaaatgaaataaatcagcagttatgaggcagagcctaagagaactatggcaacatcaggtgactgtcccagaagtgaatcgcagggagaagagcctgctgagtgcagtgaggccggtctcctgcaggagggagtacagccagaggagtttgtggccatcgcggactacgctgccaccgatgagacccagctcagttttttgagaggagaaaaaattcttatcctgagacaaaccactgcagattggtggtggggtgagcgtgcgggctgctgtgggtacattccggcaaaccatgtggggaagcacgtggatgagtacgaccccgaggacacgtggcaggatgaagagtacttcggcagctatggaactctgaaactccacttggagatgttggcagaccagccacgaacaactaaataccacagtgtcatcctgcagaataaagaatccctgacggataaagtcatcctggacgtgggctgtgggactgggatcatcagtctcttctgtgcacactatgcgcggcctagagcggtgtacgcggtggaggccagtgagatggcacagcacacggggcagctggtcctgcagaacggctttgctgacatcatcaccgtgtaccagcagaaggtggaggatgtggtgctgcccgagaaggtggacgtgctggtgtctgagtggatggggacctgcctgctgtttgagttcatgatcgagtccatcctgtatgcccgggatgcctggctgaaggaggacggggtcatttggcccaccatggctgcgttgcaccttgtgccctgcagtgctgataaggattatcgtagcaaggtgctcttctgggacaacgcgtacgagttcaacctcagcgctctgaaatctttagcagttaaggagtttttttcaaagcccaagtataaccacattttgaaaccagaagactgtctctctgaaccgtgcactatattgcagttggacatgagaaccgtgcaaatttctgatctagagaccctgaggggcgagctgcgcttcgacatcaggaaggcggggaccctgcacggcttcacggcctggtttagcgtccacttccagagcctgcaggaggggcagccgccgcaggtgctcagcaccgggcccttccaccccaccacacactggaagcagacgctgttcatgatggacgacccagtccctgtccatacaggagacgtggtcacgggttcagttgtgttgcagagaaacccagtgtggagaaggcacatgtctgtggctctgagctgggctgtcacttccagacaagaccccacatctcaaaaagttggagaaaaagtcttccccatctggagatgacagttgatgctttatttggaaagcagtgtgcatatcttgaggggtgatgaacacaagcaaaccaagttgcacctggcttctgcacactcctgcgaaagtcggtgaacattcactccacattgacccctccctagcctggcaggtgacgtcagggtccttcacagacaaacacgcttgggctcggcaggagctgccgtggccacccccgctgcccagtgtctgccctctagaagtaggctgtgtttccaggtgttcacccgtggtgcccacagtgccgacccgtggctgggtcggagctccatgttcctaagctaggtctaggtctacactcctaggacgcacgcatatcagcccgtgtaccctgtgacagtgactgtccccacctcctatgttagtggtgcccttactgccgtcgctcatccactcgtgtgggacgtaggattgcacagggctgtgccagtggcgtgtagggaacactgccctggctcagcgtgcgagctaaggtggtgatgtatgcgatgggactctgcatgggatagtacagttgtgtagacgtcttccaaataaattatgtgttggtccatcgcacatgctcaataaatatttttaaatgagtgaatgtcaaaaaaaaaa

SEQ ID NO: 313 - DNA, 4846 bp, Homo Sapiens
gaaaatcaaaccctccggaatgtccccctgaagaggaccactgttgcagcggggaccctcctttcaggcatcctcattttatcatgtccctttgctttcttccccagtggccttttcaaaggtcagagagaaatgcttagtcaaacccctacttgagtatcacaggtgactaattttgggatcgaagattaaggaggttttgttgcgtccttaaagaacttggaattggagtccaggtagttttggaaaacttcctggagaaggatggattttaccctgtaaaagaagaaagacatggatgcataagaagagggttgaagagggggaggcctcagacttctcgctggcctgggattcctccgtgacagcagcaggaggcctagaaggagagccagagtgcgatcagaaaaccagccgtgcgctggaagacaggaacagcgtgacaagtcaagaggagagaaatgaggatgatgaagacatggaggatgaatcaatttacacctgcgatcactgtcagcaggacttcgagtctctggcagacctgacggaccaccgggcccaccgctgtcctggagatggtgatgacgacccacaactctcctgggtggcctcgtctccctccagcaaggatgttgcgtcacccacgcagatgatcggagatggttgtgacctcggcctcggcgaggaggaagggggcacgggcctgccatacccttgccagttctgcgacaagtccttcatccgcttgagctacttgaagaggcacgagcagatccacagcgacaagctgccgttcaagtgcacctactgcagccgcctcttcaagcacaagaggagccgcgaccggcacatcaagctgcatacgggcgacaagaagtatcactgccacgagtgcgaggcagccttctcccgcagcgaccacctcaagatccacctgaagacccacagctccagcaagcccttcaagtgcactgtgtgcaagcgcggcttctcctccaccagctcgctgcagagccacatgcaggcccacaaaaagaacaaggagcatctggccaagtcggagaaggaagccaagaaggacgacttcatgtgcgactactgcgaggacaccttcagccagacggaggagctggagaagcacgtgctcacccgccacccgcagctgtccgagaaggcggacctgcagtgcattcactgccctgaggtcttcgtcgacgagaacacactgctcgcccatatccaccaagcccacgccaaccagaaacacaagtgccccatgtgccctgagcagttctcctcagtggaaggtgtctactgccacctggacagccaccggcagcccgactccagcaaccacagtgtcagtcccgaccctgtactgggcagcgtggcctccatgagcagcgccacacccgactccagcgcctctgtggagcgtggctccaccccggactccaccttgaagccgctgcgggggcagaagaagatgcgggatgacgggcagggctggaccaaggtggtctatagctgcccctattgttccaagcgggactttaacagcctggccgtgctggagatccacctgaagaccatccacgcggacaagccccagcagagccacacatgtcagatctgcctggactccatgcccaccctctacaacctcaacgagcacgttcgcaagctgcacaagaaccatgcctaccctgtgatgcagtttggcaacatctctgccttccactgcaactactgccccgagatgttcgccgacatcaatagcctgcaggagcacatccgcgtctcccactgcggccccaacgccaacccctctgacggtaataatgctttcttctgcaaccagtgctccatgggtttccttactgagtcctccctcaccgagcacatccagcaggcccactgcagtgtgggcagtgccaaactagagtctccggtggtgcagcccacgcagtccttcatggaggtctattcctgcccctactgcaccaactcccccatctttggctccatcctgaaactcaccaagcacatcaaggagaaccacaagaacattccactggcccacagcaagaagtccaaggccgagcagagcccagtctcgtccgatgtggaggtgtcttccccgaagcggcagcggctctcagcaagcgccaactccatctccaatggggagtatccttgcaatcaatgcgacctcaagttctccaactttgagagcttccagacccacctgaagctgcacctggagctgctgctgcggaagcaagcgtgcccccagtgcaaagaggactttgactcccaggagtccctcctgcagcacctgacagtgcattacatgaccacgtcgacccactatgtgtgcgagagctgcgacaagcaattttcctcggtggatgacctgcagaagcacctgctggacatgcacacctttgtgttgtaccactgcaccctgtgtcaggaggtcttcgactccaaggtgtccatccaggtgcacctggcggtgaagcacagcaatgagaagaagatgtaccgctgcacggcctgcaactgggacttccgcaaggaggctgacctgcaggtgcacgtcaaacacagccacctgggcaacccggccaaggctcacaagtgcatcttctgtggggagaccttcagcaccgaggtggagctgcagtgccacatcaccacacacagcaagaagtataactgtaagttctgcagcaaggccttccacgccatcatcctgctggagaagcacctgcgggagaagcactgtgtgtttgatgctgcgaccgagaacggcacggccaatggggtacccccaatggccaccaagaaagctgagcctgctgacctgcagggcatgctgcttaagaaccctgaggcacctaacagccatgaggccagcgaggatgacgtggacgcgtcggagcccatgtacggctgtgacatctgtggggcggcctacaccatggaggtgctgctgcagaatcaccggctgcgggaccacaatatccggccgggcgaggatgatggctcacgcaagaaggctgagtttatcaagggcagtcacaagtgcaacgtttgttcacggactttcttctcggagaacgggctacgggagcacctgcagacgcaccggggccctgccaagcactacatgtgtcccatctgtggtgagcgcttcccttcgctgctgacgctcaccgaacacaaggtgacccacagcaagagcctggacacgggcacctgtcgcatctgcaagatgcccctgcagagcgaggaggagtttattgagcactgccagatgcaccctgacctgcgcaactcactcacgggcttccgctgtgtggtctgcatgcagacagtcacttccacgcttgagctcaagatccatggcaccttccacatgcagaagctggcgggcagctcagcggcgtcctcccccaatggccaggggctgcagaagctctacaagtgcgccctgtgcctcaaggagttccgcagcaagcaggacctggtgaagcttgacgtcaatgggctgccctacggcctctgcgccggctgcatggcccgcagcgccaacggacaggtgggtggcctggccccgcccgagcccgccgaccggccctgtgccggcctccgttgccccgagtgcagtgtcaagtttgagagtgccgaagacctggagagccacatgcaggtggaccaccgtgacctcacgccggagaccagtgggccccggaaaggcacccagacatcgccagtgccccggaaaaagacataccagtgcatcaagtgccagatgaccttcgagaacgagagagagatccaaatccacgttgccaaccacatgattgaggaaggcatcaaccacgagtgtaagctgtgcaaccagatgttcgactccccggccaagctcctctgtcacctcattgagcacagcttcgagggcatgggcggcaccttcaaatgccccgtgtgtttcacagtcttcgtccaggccaacaagttgcagcagcacatctttgccgtgcacgggcaggaggacaagatctacgactgctcacagtgccctcagaagttcttcttccagaccgagctgcagaaccacacgatgagccagcacgcacagtgagggatcgctcaacaggacacctctccgcagaaggcttgccggagacgccgtggggagggccatttgaacattacatccaatcaaagtgtcatttgcaacccagatgtaaaactctaatgatttggccatgaggcgctgctattataagcagctggaaatgaatattaatggcagagattaaaagtattccatgctcagtattttttattgtcctgctacagctagtgtgcttttagactttccgccgcagactacatttctagagttagagaaacctgctttttaaggctattgtcctttgttccttcatgtattatattgatagtttttaaaaaagaattagtgtgattttttttctttgcttcttttttttctttcttgtttttcttcccccccaccccccacccccttcggttaactactttttaattgcaattctaggtaattgtgcatcgtgatgtgattgcttggctattgtctgaatatttccttttaattttttaattaaagactaatgctttgattggatttgccagttcaccggacagtgattaaaactatgtaatgaatataatcggtttcagtgcaactggatggtctgcttttaaatgtgacttaatctgactgcagtaactagtacagttcaataaagggaatccatgcgaaaaaaaaaaaaaaaaaaaaaaaaaaaaa

SEQ ID NO: 314 - DNA, 4768 bp, Homo Sapiens
ggttcgcttcggcgtccgccgtctccgcagctgcctcctcttcctccttcgccaccgccgccaccgccgccgccgcccgcagcaccgcagcccctcccgccatggccgccgccggcgcccggctcagccccggccccggctcggggctccgggggcggccgaggctctgcttccacccggggccgccgccactgctgccgctgctgctgctgttcctgctcctgctgccgccgccgccgctgctggccggcgccaccgccgctgcctcgcgggagcccgacagcccgtgccggctgaagaccgtcacggtgtccacactgcccgccctgcgggagagcgacatcggctggagcggcgcccgcgccggggccggggctgggaccggggccggagccgccgccgccgccgcgtccccgggctctcctggctctgccggcaccgccgccgagtcgcgcctcctgctctttgtgcgtaacgagctgccggggcgcatcgcggtgcaggacgacctggacaacaccgagctgcccttcttcaccctggagatgtctggcacagcggcggacatctcgctggtgcactggagacagcagtggctggagaatggcaccttgtacttccacgtctccatgagcagctccgggcagctggcccaagccaccgcccccactctccaggagccctcggagattgttgaggagcagatgcacatcctccacatttctgtgatgggtggcctcatcgcgctgctgctgctgctgctggtgttcaccgtggcgctgtacgcccagcgacgttggcagaagcgtcgccgcatcccccagaagagcgcaagcacagaagccactcatgagatccactacatcccatctgtgctgctgggtccccaggcgcgggagagcttccgttcatcccggctgcaaacccacaattccgtcattggcgtgcccatccgggagactcccatcctggatgactatgactgtgaggaggatgaggagccacctaggcgggccaaccatgtctcccgcgaggacgagtttggcagccaggtgacccacactctggacagtctgggacatccaggggaagagaaggtggactttgagaagaaagcagcagctgaggcgactcaggagacagtggagtccctgatgcagaagttcaaggagagtttccgcgctaacacgcccatcgagatcggtcagctgcaaccacccctgcgcagcacatcggcagggaagaggaagcggaggagcaagtctcgaggaggaatcagctttgggagagccaaggggacgtcgggctcagaggcagacgatgaaactcagctgacattctacacggagcagtaccgcagtcgccgccgcagcaaaggtttgctgaaaagcccagtgaacaagacagccctgacactgattgctgtgagttcctgcatcctggccatggtgtgtggcagccagatgtcttgtccactcactgtgaaggtgactctgcatgtgcccgagcacttcatagcagatggaagcagcttcgtggtgagtgaagggagctacctggacatctccgactggttaaacccggccaagctttccctgtattaccagatcaatgccacctccccatgggtgagggacctctgtggacaaaggacgacagatgcctgtgagcagctctgcgacccagaaaccggagagtgcagctgtcatgaaggctatgcccctgaccctgttcacagacacctgtgtgtgcgcagtgactggggacagagtgaaggaccttggccctacacgacacttgagaggggctatgatctggtgacaggggagcaagcccctgaaaagattctcaggtctactttcagcttgggccaaggcctctggcttcctgtcagcaaaagctttgtggttccgcctgtggagctgtccatcaaccccctggccagctgcaagaccgatgtgctcgtcacggaagaccctgcagatgtcagggaagaagcgatgctgtccacatactttgaaaccatcaatgacctgctgtcttccttcgggccagttcgtgactgctctcggaacaatgggggctgcactcgcaacttcaagtgtgtgtctgaccggcaggtggattcctcgggatgtgtgtgccctgaggagctgaaacccatgaaggatggctctggctgctacgaccactccaaaggcattgactgctctgatggctttaatggcggctgtgagcagctgtgcctgcagcagacgctgcccctgccctacgatgccacttcgagcaccatcttcatgttctgcggttgcgtggaggagtacaaactggctcctgatggaaaatcctgcttaatgctctcagatgtctgcgagggccccaagtgcctcaaacctgactccaaattcaatgataccctctttggagagatgctacatggttacaacaaccggacccagcatgtgaaccaaggccaagtcttccagatgacctttagggagaacaacttcatcaaggactttccccagctggccgatgggctgttggtgatcccgctgccggtggaggagcagtgccggggggtcctctccgagccccttccggacctccaactgctcactggagatatcaggtatgatgaggccatgggttaccccatggtgcagcagtggcgggtccggagcaacctctaccgtgtgaagctcagcaccatcaccctcgcagcaggcttcactaatgttctcaagatcctgaccaaggagagcagtcgggaggagctgctgtccttcatccagcactatggctcccactacatcgcagaggccctctatggctcagagctcacctgcatcatccactttcccagcaagaaggtccagcagcagctgtggctccagtatcagaaagagaccacagagctgggcagcaagaaggagctcaagtccatgcccttcatcacctacctctcaggtttgctgacagcccagatgctgtcagatgaccagctcatttcaggtgtggagattcgctgtgaggagaaggggcgctgtccatctacctgtcacctttgccgccggccaggcaaggagcagctgagccccacaccagtgctgctggaaatcaaccgtgtggtgccactttataccctcatccaagacaatggcacaaaggaggccttcaagagtgcactgatgagttcctactggtgctcagggaaaggggatgtgatcgatgactggtgcaggtgtgacctcagcgcctttgatgccaatgggctccccaactgcagcccccttctgcagccggtgctgcggctgtccccaacagtggagccctccagtactgtggtctccttggagtgggtggatgttcagccagctattgggaccaaggtctccgactatattctgcagcataagaaagtggatgaatacacagacactgacctgtacacaggagaattcctgagttttgctgatgacttactctctggcctgggcacatcttgtgtagcagctggtcgaagccatggagaggtccctgaagtcagtatctactcagtcatcttcaagtgtctggagcccgacggtctctacaagttcactctgtatgctgtggatacacgagggaggcactcagagctaagcacggtgaccctgaggacggcctgtccactggtagatgacaacaaggcagaagaaatagctgacaagatctacaatctgtacaatgggtacacaagtggaaaggagcagcagatggcctacaacacactgatggaggtctcagcctcgatgctgttccgagtccagcaccactacaactctcactatgaaaagtttggcgacttcgtctggagaagtgaggatgagctggggcccaggaaggcccacctgattctacggcgactggagagggtgagtagccactgctccagcctcctgcggagtgcctacatccagagccgcgtggaaacagtgccctatcttttctgccgcagcgaggaggtccggcctgcaggcatggtgtggtatagcatcctcaaggacaccaaaatcacgtgtgaggagaagatggtgtcaatggcccgaaacacgtacggggagtccaagggccggtgagggagggtattgccctccgtgagcacagagactctccatgggagggggagcagtattctcctggatcctggggcctgggtgggctgggggacagctgaggatgggcctagcagatgaagcttgccagcaaggccaaagcaaacggtttctcctgtggatagtggacagagacctttgtaaccaatggaattattcatttttctctatcttttattttttcaaagatattatttgactctatcaaaagtctctcctttttaaaccttttcttatggatggctgtcaatcccgaggcagaagttttcaggtggagaccaagcggcctttgctcttcttccttcttcctgccacactctgctttcttcctgccatggacccctggaggagacctatggagggacagttttgacctgacccctagaggagacagttttgacctcttcagcaccaggaaggaagctctgaggatggttgcagtgaggaagcatgggtctttaaggacttctctctcttttttgctggacattattgagtttgtgggaccctgcctcttcctgctacctgtgggtctgcccagagtccctgcaggcctgtccatgcattaaaaattcctattgtctctcaaaaaaaaaaaaaaaaaaaaaaaa

SEQ ID NO: 315 - DNA, 3260 bp, Homo Sapiens
gcgcagaaagctggcgggggggtggggggaggaacatggcgcaagctctgtctgaggaggagtttcagcggatgcaggctcagctcctggaactccggacaaacaactaccagctttcagatgaactacgcaagaatggtgttgaactcaccagtcttcgacagaaggtcgcctacttggataaggagttcagcaaagctcagaaggcactgagcaagagcaagaaagctcaggaagtcgaggtattgctgagtgaaaatgagatgctgcaggcaaagctgcacagccaggaggaggacttccgtttgcagaacagcacactaatggccgagttcagcaaggaacgctatgggaaagaagccgggaagttctcagctgtcagtgagggccagggggatcccccagggggcccggcccccaccgtcctggcccccatgccgttggcagaggtggagctgaaatgggaaatggagaaagaggagaagagattgctctgggaacagctgcaaggcttagagagctcaaagcaggccgaaacatccaggctgcaggaggaacttgctaagctctccgagaaactgaaaaagaaacaagaaagtttttgccgtctgcagacagaaaaggagactctgtttaatgacagcaggaacaagattgaggaattacaacaacggaaggaagctgatcacaaagcccagttggctcgaacccagaagctgcagcaggaacttgaggctgccaatcagagcttggcagagctgagagatcagcggcagggggagcgcctggaacatgcagcagctttgcgggccctacaagatcaggtatccatccagagtgcagatgcacaggaacaagtggaagggcttttggctgagaacaatgccttgaggactagcctggctgccctggagcagatccaaacagcaaagacccaagaactgaatatgctccgggaacagaccactgggctggcagctgagttgcagcagcagcaggctgagtacgaggaccttatgggacagaaagatgacctcaactcccagctccaggagtcattacgggccaatagtcgactgctggaacaacttcaagaaatagggcaggagaaggagcagttgacccaggaattacaggaggctcggaagagtgcggagaagcggaaggccatgctggatgagctagcaatggaaacgctgcaagagaagtcccagcacaaggaagagctgggagcagttcgtctacggcatgagaaggaggtgctgggggtgcgtgcccgctatgagcgtgagctccgagagctgcatgaagacaagaagcgtcaggaggaggagctccgtgggcagatccgggaggagaaggcccggacacgggagctggagactctccagcagacagtggaagaacttcaagctcaggtacattccatggatggagccaagggctggtttgaacggcgcttgaaggaagccgagggcaaggaggaggagctacaggatgtacgggatcagctcgagcaggcccaggaggagcgggactgccacctgaagaccattagcagcctgaagcaggaggtgaaggacacagtggatgggcagaggatcctggagaagaagggcagtgctgcgctcaaggacctcaagcggcagctgcatttggagcggaaacgggcagataagctgcaggagcgactgcaggacatcctcactaacagcaagagccgctcaggccttgaggagctggttctctcagagatgaactcaccaagccggacccagacaggggacagcagtagcatctcctccttcagctaccgggagatcttgcgggaaaaggagagctcggctgttccagccagggtaaggggaaaggaagaacctacagctccagcttctctcaacccaaaaatctgagaacccctccccttttctcctcacctaaacccatctcctactttgggcgcagcacacatattttcttgtcaacttttccccaagcccaccaacttggattcagattgcgacatgcaggacaggccagtcattctctctctctgactttctgtttaatcatctgtgggctaattcccccttctctggtgccataaattatgtggctcatagtaggtgcaccatccaaggagaaggtccctttttccaacttgtaatgatcactaattattattgccggctgtcatgtcagcctccttaccagccactttcctttggaaataacttttttattgttccacaaatagtatgtgctcattgtagtacattttttaaaaaccacaaatgagcaaagatttttttaaaaccttaaatgtctggccgggtgtggtggctcatccctataatcctacactttgggaggccaaggtgggcggatcacttgagctcaggagtttaagaccagcctgggaaatgtggtaaaactccgactctatttaaaaaaaaaacaaaaacaaaaaaaccttaaatgtcaaaaaaaaataatattttcaccatccagacgtcaccattataaattcttagttcagggctgggcgcggtggctcatgcctgtaaccctagcactttgggaggctgaggcgggcagatcacttgaggttaggagtttgagaactggcctggccaacatagcaaaacctcatctctactaaaatacaaaaattagccgggcgtggtggtgcgtgcctgtagtcccagctactcgaaaggttgaggcaagagaatcgcttgaacctgggaggtggaggttgcaatgagccgagatcacaccactgcactccagcctgggcaacagtgaaactccatctcaaaaaataaataaataaaataaattcttagttcatacccttccagaattctctctctttttaaaacctagatgagattaacctgttttttattcaactgttgtctctaccttcccaatttgatcaattttcatgtcattggctgggtgcggtggctcctgcctataatcccagtactttgggaggccgaggcgggcagatcacttgaggtcaggagttcaagaccagcctggccaacatggtgaaaccccatctctactaaaaatacaaaaattagctgggcgtagtggcgcgtgcctgtaattccatctactcgggaggctgaggcaggagaatcgcttgatcctgggagttggaggttgcagtgagccaagatcttgccattgcactccagcctgggcaacaagagtgaaattctgtctcaaaaaaaaaaaaaaaaaaa

SEQ ID NO: 316 - DNA, 2970 bp, Homo Sapiens
gcgcggcgctgctgggttctccgaggcgacctggccgccggccgctcctccgcgcgctgttccgcacttgctgccctcgcccggcccggagcgccgctgccatgcggctggcgctgctctgggccctggggctcctgggcgcgggcagccctctgccttcctggccgctcccaaatataggtggcactgaggagcagcaggcagagtcagagaaggccccgagggagcccttggagccccaggtccttcaggacgatctcccaattagcctcaaaaaggtgcttcagaccagtctgcctgagcccctgaggatcaagttggagctggacggtgacagtcatatcctggagctgctacagaatagggagttggtcccaggccgcccaaccctggtgtggtaccagcccgatggcactcgggtggtcagtgagggacacactttggagaactgctgctaccagggaagagtgcggggatatgcaggctcctgggtgtccatctgcacctgctctgggctcagaggcttggtggtcctgaccccagagagaagctataccctggagcaggggcctggggaccttcagggtcctcccattatttcgcgaatccaagatctccacctgccaggccacacctgtgccctgagctggcgggaatctgtacacactcagaagccaccagagcaccccctgggacagcgccacattcgccggaggcgggatgtggtaacagagaccaagactgtggagttggtgattgtggctgatcactcggaggcccagaaataccgggacttccagcacctgctaaaccgcacactggaagtggccctcttgctggacacattcttccggcccctgaatgtacgagtggcactagtgggcctggaggcctggacccagcgtgacctggtggagatcagcccaaacccagctgtcaccctcgaaaacttcctccactggcgcagggcacatttgctgcctcgattgccccatgacagtgcccagctggtgactggtacttcattctctgggcctacggtgggcatggccattcagaactccatctgttctcctgacttctcaggaggtgtgaacatggaccactccaccagcatcctgggagtcgcctcctccatagcccatgagttgggccacagcctgggcctggaccatgatttgcctgggaatagctgcccctgtccaggtccagccccagccaagacctgcatcatggaggcctccacagacttcctaccaggcctgaacttcagcaactgcagccgacgggccctggagaaagccctcctggatggaatgggcagctgcctcttcgaacggctgcctagcctaccccctatggctgctttctgcggaaatatgtttgtggagccgggcgagcagtgtgactgtggcttcctggatgactgcgtcgatccctgctgtgattctttgacctgccagctgaggccaggtgcacagtgtgcatctgacggaccctgttgtcaaaattgccagctgcgcccgtctggctggcagtgtcgtcctaccagaggggattgtgacttgcctgaattctgcccaggagacagctcccagtgtccccctgatgtcagcctaggggatggcgagccctgcgctggcgggcaagctgtgtgcatgcacgggcgttgtgcctcctatgcccagcagtgccagtcactttggggacctggagcccagcccgctgcgccactttgcctccagacagctaatactcggggaaatgcttttgggagctgtgggcgcaaccccagtggcagttatgtgtcctgcacccctagagatgccatttgtgggcagctccagtgccagacaggtaggacccagcctctgctgggctccatccgggatctactctgggagacaatagatgtgaatgggactgagctgaactgcagctgggtgcacctggacctgggcagtgatgtggcccagcccctcctgactctgcctggcacagcctgtggccctggcctggtgtgtatagaccatcgatgccagcgtgtggatctcctgggggcacaggaatgtcgaagcaaatgccatggacatggggtctgtgacagcaacaggcactgctactgtgaggagggctgggcaccccctgactgcaccactcagctcaaagcaaccagctccctgaccacagggctgctcctcagcctcctggtcttattggtcctggtgatgcttggtgccagctactggtaccgtgcccgcctgcaccagcgactctgccagctcaagggacccacctgccagtacagggcagcccaatctggtccctctgaacggccaggacctccgcagagggccctgctggcacgaggcactaagcaggctagtgctctcagcttcccggcccccccttccaggccgctgccgcctgaccctgtgtccaagagactccaggctgagctggctgaccgacccaatccccctacccgccctctgcccgctgacccggtggtgagaagcccgaagtctcaggggccagccaagcccccacccccaaggaagccactgcctgccgacccccagggccggtgcccatcgggtgacctgcccggcccaggggctggaatcccgcccctagtggtaccctccagaccagcgccaccgcctccgacagtgtcctcgctctacctctgacctctccggaggttccgctgcctccaagccggacttagggcttcaagaggcgggcgtgccctctggagtcccctaccatgactgaaggcgccagagactggcggtgtcttaagactccgggcaccgccacgcgctgtcaagcaacactctgcggacctgccggcgtagttgcagcgggggcttggggaggggctgggggttggacgggattgaggaaggtccgcacagcctgtctctgctcagttgcaataaacgtgacatcttgggagcgttcaaa

SEQ ID NO: 317 - DNA, 8171 bp, Homo Sapiens
ggggcggagccagcgcggatcgggtcccggacgcccgagcgccccgcccccgcgcgggcgatgcccagcggcgcggcgggctgcggggcccggcggggcgcgcagaggagcgggccgcggcgctgaggcggcggagcgtggccccgccatgggcttcctgcaccagctgcagctgctgctctggaagaacgtgacgctcaaacgccggagcccgtgggtcctggccttcgagatcttcatccccctggtgctgttctttatcctgctggggctgcgacagaagaagcccaccatctccgtgaaggaagtctccttctacacagcggcgcccctgacgtctgccggcatcctgcctgtcatgcaatcgctgtgcccggacggccagcgagacgagttcggcttcctgcagtacgccaactccacggtcacgcagctgcttgagcgcctggaccgcgtggtggaggaaggcaacctgtttgacccagcgcggcccagcctgggctcagagctcgaggccctacgccagcatctggaggccctcagtgcgggcccgggcacctcggggagccacctggacagatccacagtgtcttccttctctctggactcggtggccagaaacccgcaggagctctggcgtttcctgacgcaaaacttgtcgctgcccaatagcacggcccaagcactcttggccgcccgtgtggacccgcccgaggtctaccacctgctctttggtccctcatctgccctggattcacagtctggcctccacaagggtcaggagccctggagccgcctagggggcaatcccctgttccggatggaggagctgctgctggctcctgccctcctggagcagctcacctgcacgccgggctcgggggagctgggccggatcctcactgtgcctgagagtcagaagggagccctgcagggctaccgggatgctgtctgcagtgggcaggctgctgcgcgtgccaggcgcttctctgggctgtctgctgagctccggaaccagctggacgtggccaaggtctcccagcagctgggcctggatgcccccaacggctcggactcctcgccacaggcgccacccccacggaggctgcaggcgcttctgggggacctgctggatgcccagaaggttctgcaggatgtggatgtcctgtcggccctggccctgctactgccccagggtgcctgcactggccggacccccggacccccagccagtggtgcgggtggggcggccaatggcactggggcaggggcagtcatgggccccaacgccaccgctgaggagggcgcaccctctgctgcagcactggccaccccggacacgctgcagggccagtgctcagccttcgtacagctctgggccggcctgcagcccatcttgtgtggcaacaaccgcaccattgaacccgaggcgctgcggcggggcaacatgagctccctgggcttcacgagcaaggagcagcggaacctgggcctcctcgtgcacctcatgaccagcaaccccaaaatcctgtacgcgcctgcgggctctgaggtcgaccgcgtcatcctcaaggccaacgagacttttgcttttgtgggcaacgtgactcactatgcccaggtctggctcaacatctcggcggagatccgcagcttcctggagcagggcaggctgcagcaacacctgcgctggctgcagcagtatgtagcagagctgcggctgcaccccgaggcactgaacctgtcactggatgagctgccgccggccctgagacaggacaacttctcgctgcccagtggcatggccctcctgcagcagctggataccattgacaacgcggcctgcggctggatccagttcatgtccaaggtgagcgtggacatcttcaagggcttccccgacgaggagagcattgtcaactacaccctcaaccaggcctaccaggacaacgtcactgtttttgccagtgtgatcttccagacccggaaggacggctcgctcccgcctcacgtgcactacaagatccgccagaactccagcttcaccgagaaaaccaacgagatccgccgcgcctactggcggcctgggcccaatactggcggccgcttctacttcctctacggcttcgtctggatccaggacatgatggagcgcgccatcatcgacacttttgtggggcacgatgtggtggagccaggcagctacgtgcagatgttcccctacccctgctacacacgcgatgacttcctgtttgtcattgagcacatgatgccgctgtgcatggtgatctcctgggtctactccgtggccatgaccatccagcacatcgtggcggagaaggagcaccggctcaaggaggtgatgaagaccatgggcctgaacaacgcggtgcactgggtggcctggttcatcaccggctttgtgcagctgtccatctccgtgacagcactcaccgccatcctgaagtacggccaggtgcttatgcacagccacgtggtcatcatctggctcttcctggcagtctacgcggtggccaccatcatgttctgcttcctggtgtctgtgctgtactccaaggccaagctggcctcggcctgcggtggcatcatctacttcctgagctacgtgccctacatgtacgtggcgatccgagaggaggtggcgcatgataagatcacggccttcgagaagtgcatcgcgtccctcatgtccacgacggcctttggtctgggctctaagtacttcgcgctgtatgaggtggccggcgtgggcatccagtggcacaccttcagccagtccccggtggagggggacgacttcaacttgctcctggctgtcaccatgctgatggtggacgccgtggtctatggcatcctcacgtggtacattgaggctgtgcacccaggcatgtacgggctgccccggccctggtacttcccactgcagaagtcctactggctgggcagtgggcggacagaagcctgggagtggagctggccgtgggcacgcaccccccgcctcagtgtcatggaggaggaccaggcctgtgccatggagagccggcgctttgaggagacccgtggcatggaggaggagcccacccacctgcctctggttgtctgcgtggacaaactcaccaaggtctacaaggacgacaagaagctggccctgaacaagctgagcctgaacctctacgagaaccaggtggtctccttcttgggccacaacggggcgggcaagaccaccaccatgtccatcctgaccggcctgttccctccaacgtcgggttccgccaccatctacgggcacgacatccgcacggagatggatgagatccgcaagaacctgggcatgtgcccgcagcacaatgtgctctttgaccggctcacggtggaggaacacctctggttctactcacggctcaagagcatggctcaggaggagatccgcagagagatggacaagatgatcgaggacctggagctctccaacaaacggcactcactggtgcagacattgtcgggtggcatgaagcgcaagctgtccgtggccatcgccttcgtgggcggctctcgcgccatcatcctggacgagcccacggcgggcgtggacccctacgcgcgccgcgccatctgggacctcatcctgaagtacaagccaggccgcaccatccttctgtccacccaccacatggatgaggctgacctgcttggggaccgcattgccatcatctcccatgggaagctcaagtgctgcggctccccgctcttcctcaagggcacctatggcgacgggtaccgcctcacgctggtcaagcggcccgccgagccggggggcccccaagagccagggctggcatccagccccccaggtcgggccccgctgagcagctgctccgagctccaggtgtcccagttcatccgcaagcatgtggcctcctgcctgctggtctcagacacaagcacggagctctcctacatcctgcccagcgaggccgccaagaagggggctttcgagcgcctcttccagcacctggagcgcagcctggatgcactgcacctcagcagcttcgggctgatggacacgaccctggaggaagtgttcctcaaggtgtcggaggaggatcagtcgctggagaacagtgaggccgatgtgaaggagtccaggaaggatgtgctccctggggcggagggcccggcgtctggggagggtcacgctggcaatctggcccggtgctcggagctgacccagtcgcaggcatcgctgcagtcggcgtcatctgtgggctctgcccgtggcgacgagggagctggctacaccgacgtctatggcgactaccgccccctctttgataacccacaggacccagacaatgtcagcctgcaagaggtggaggcagaggccctgtcgagggtcggccagggcagccgcaagctggacggcgggtggctgaaggtgcgccagttccacgggctgctggtcaaacgcttccactgcgcccgccgcaactccaaggcactcttctcccagatcttgctgccagccttcttcgtctgcgtggccatgaccgtggccctgtccgtcccggagattggtgatctgcccccgctggtcctgtcaccttcccagtaccacaactacacccagccccgtggcaatttcatcccctacgccaacgaggagcgccgcgagtaccggctgcggctatcgcccgacgccagcccccagcagctcgtgagcacgttccggctgccgtcgggggtgggtgccacctgcgtgctcaagtctcccgccaacggctcgctggggcccacgttgaacctgagcagcggggagtcgcgcctgctggcggctcggttcttcgacagcatgtgtctggagtccttcacacaggggctgccactgtccaatttcgtgccacccccaccctcgcccgccccatctgactcgccagcgtccccggatgaggacctgcaggcctggaacgtctccctgccgcccaccgctgggccagaaatgtggacgtcggcaccctccctgccgcgcctggtacgggagcccgtccgctgcacctgctctgcgcagggcaccggcttctcctgccccagcagtgtgggcgggcacccgccccagatgcgggtggtcacaggcgacatcctgaccgacatcaccggccacaatgtctctgagtacctgctcttcacctccgaccgcttccgactgcaccggtatggggccatcacctttggaaacgtcctgaagtccatcccagcctcatttggcaccagggccccacccatggtgcggaagatcgcggtgcgcagggctgcccaggttttctacaacaacaagggctatcacagcatgcccacctacctcaacagcctcaacaacgccatcctgcgtgccaacctgcccaagagcaagggcaacccggcggcttacggcatcaccgtcaccaaccaccccatgaataagaccagcgccagcctctccctggattacctgctgcagggcacggatgtcgtcatcgccatcttcatcatcgtggccatgtccttcgtgccggccagcttcgttgtcttcctcgtggccgagaagtccaccaaggccaagcacctgcagtttgtcagcggctgcaaccccatcatctactggctggcgaactacgtgtgggacatgctcaactacctggtccccgctacctgctgtgtcatcatcctgtttgtgttcgacctgccggcctacacgtcgcccaccaacttccctgccgtcctctccctcttcctgctctatgggtggtccatcacgcccatcatgtacccggcctccttctggttcgaggtccccagctccgcctacgtgttcctcattgtcatcaatctcttcatcggcatcaccgccaccgtggccaccttcctgctacagctcttcgagcacgacaaggacctgaaggttgtcaacagttacctgaaaagctgcttcctcattttccccaactacaacctgggccacgggctcatggagatggcctacaacgagtacatcaacgagtactacgccaagattggccagtttgacaagatgaagtccccgttcgagtgggacattgtcacccgcggactggtggccatggcggttgagggcgtcgtgggcttcctcctgaccatcatgtgccagtacaacttcctgcggcggccacagcgcatgcctgtgtctaccaagcctgtggaggatgatgtggacgtggccagtgagcggcagcgagtgctccggggagacgccgacaatgacatggtcaagattgagaacctgaccaaggtctacaagtcccggaagattggccgtatcctggccgttgaccgcctgtgcctgggtgtgcgtcctggcgagtgcttcgggctcctgggcgtcaacggtgcgggcaagaccagcaccttcaagatgctgaccggcgacgagagcacgacggggggcgaggccttcgtcaatggacacagcgtgctgaaggagctgctccaggtgcagcagagcctcggctactgcccgcagtgtgacgcgctgttcgacgagctcacggcccgggagcacctgcagctgtacacgcggctgcgtgggatctcctggaaggacgaggcccgggtggtgaagtgggctctggagaagctggagctgaccaagtacgcagacaagccggctggcacctacagcggcggcaacaagcggaagctctccacggccatcgccctcattgggtacccagccttcatcttcctggacgagcccaccacaggcatggaccccaaggcccggcgcttcctctggaacctcatccttgacctcatcaagacagggcgttcagtggtgctgacatcacacagcatggaggagtgcgaggcgctgtgcacgcggctggccatcatggtgaacggtcgcctgcggtgcctgggcagcatccagcacctgaagaaccggtttggagatggctacatgatcacggtgcggaccaagagcagccagagtgtgaaggacgtggtgcggttcttcaaccgcaacttcccggaagccatgctcaaggagcggcaccacacaaaggtgcagtaccagctcaagtcggagcacatctcgctggcccaggtgttcagcaagatggagcaggtgtctggcgtgctgggcatcgaggactactcggtcagccagaccacactggacaatgtgttcgtgaactttgccaagaagcagagtgacaacctggagcagcaggagacggagccgccatccgcactgcagtcccctctcggctgcttgctcagcctgctccggccccggtctgcccccacggagctccgggcacttgtggcagacgagcccgaggacctggacacggaggacgagggcctcatcagcttcgaggaggagcgggcccagctgtccttcaacacggacacgctctgctgaccacccagagctgggccagggaggacacgctccactgaccacccagagctgggccagggactcaacaatggggacagaagtcccccagtgcctgccagggcctggagtggaggttcaggaccaaggggcttctggtcctccagcccctgtactcggccatgccctgtggtcactgcggttgccgcccctaattgtgccaaaggctgacccggcccgggctgcgtacacccttgccctgctttgccttaaagcctcggggtctgcccggcccctcgcccctgcctggcactgctcaccgcccaaggcgacgccggctggaccaggcactgctggcctttctcctgcccggcctcggaaccagcttttctctcttacgatgaaggctgatgccgagagcgggctgtgggcggagctgggtcagtcccgtatttattttgctttgagaagaggctcctctggccctgctctcctgcagggaggtggctgtcctgcgggaagccatcagcttgggccagctggcaggtggcaggaatggagaagctgaccctgctggccaggcaaggggccagaccccccccaacccccagctgccatcgctctcccacccagcttggccccctgcccgcccacctccctgggagccgggcctgtacatagcgcacagatgtttgttttaaataaataaacaaaatgtcaaaaaaaaaaaaaaaaa

SEQ ID NO: 318 - DNA, 2366 bp, Homo Sapiens
tttccgcgttctcccctctccgcgggcagtgctagctcgccgcggccgcctccggggaccacctggcttcatgtgtggatttccacggctcttgcccagaggcgggtacactgtgttccaatgtgccacggaactcacgcagtggcactttgtggcttcatgaaggaagaggcaggccacgcaacacttcctccccaagccaaggagaagtatcacttttagaggcagaggagcggaaggcagtgggtgtgaccaaaagtgccatttgttaaagcttatcttccttgccagattttaaaaactattatggaaaatctcaagcattcacaaaagtagagagaaagaaaggactctcagactgttggagcagaactactgagaaaaaccaggcattgtatcttcagttgtcatcaagttcgcaatcagattggaaaagctcaacttgaagctttcttgcctgcagtgaagcagagagatagatattattcacgtaataaaaaacatgggcttcaacctgactttccacctttcctacaaattccgattactgttgctgttgactttgtgcctgacagtggttgggtgggccaccagtaactacttcgtgggtgccattcaagagattcctaaagcaaaggagttcatggctaatttccataagaccctcattttggggaagggaaaaactctgactaatgaagcatccacgaagaaggtagaacttgacaactgcccttctgtgtctccttacctcagaggccagagcaagctcattttcaaaccagatctcactttggaagaggtacaggcagaaaatcccaaagtgtccagaggccggtatcgccctcaggaatgtaaagctttacagagggtcgccatcctcgttccccaccggaacagagagaaacacctgatgtacctgctggaacatctgcatcccttcctgcagaggcagcagctggattatggcatctacgtcatccaccaggctgaaggtaaaaagtttaatcgagccaaactcttgaatgtgggctatctagaagccctcaaggaagaaaattgggactgctttatattccacgatgtggacctggtacccgagaatgactttaacctttacaagtgtgaggagcatcccaagcatctggtggttggcaggaacagcactgggtacaggttacgttacagtggatattttgggggtgttactgccctaagcagagagcagtttttcaaggtgaatggattctctaacaactactggggatggggaggcgaagacgatgacctcagactcagggttgagctccaaagaatgaaaatttcccggcccctgcctgaagtgggtaaatatacaatggtcttccacactagagacaaaggcaatgaggtgaacgcagaacggatgaagctcttacaccaagtgtcacgagtctggagaacagatgggttgagtagttgttcttataaattagtatctgtggaacacaatcctttatatatcaacatcacagtggatttctggtttggtgcatgaccctgggtcttttggtgatgtttggaagaactgattctttgtttgcaataattttggcctagagacttcaaatagtagcacacattaagaacctgttacagctcattgttgagctgaatttttcctttttgtattttcttagcagagctcctggtgatgtagagtataaaacagttgtaacaagacagctttcttagtcattttgatcatgagggttaaatattgtaatatggatacttgaaggactttatataaaaggatgactcaaaggataaaatgaacgctatttgaggactctggttgaaggagatttatttaaatttgaagtaatatattatgggataaaaggccacaggaaataagactgctgaatgtctgagagaaccagagttgttctcgtccaaggtagaaaggtacgaagatacaatactgttattcatttatcctgtacaatcatctgtgaagtggtggtgtcaggtgagaaggcgtccacaaaagaggggagaaaaggcgacgaatcaggacacagtgaacttgggaatgaagaggtagcaggagggtggagtgtcggctgcaaaggcagcagtagctgagctggttgcagctgctgatagccttcaggggaggacctgcccaggtatgccttccagtgatgcccaccagagaatacattctctattagtttttaaagagtttttgtaaaatgattttgtacaagtaggatatgaattagcagtttacaagtttacatattaactaataataaatatgtctatcaaatacctctgtagtaaaatgtgaaaaagcaaaaaaaaaaaaaaaaaaaaaa

SEQ ID NO: 319 - DNA, 2733 bp, Homo Sapiens
ggcagaggagcgagtgcagcggccagcagcacatccccgctccacagtcgccgcagtcgccgcagccgccgccgccgccccgcgcgcccaaccgccgcggccccctgccccgccggcctgccagtgagagagcggcgagggggcgcccggccggactctgagcctagtcctctcgcgctgcggccgcccgcgcctcctcggccgcctgtcgggcatgaaaaccaaattctgcaccgggggcgaggcggagccctcgccgctcgggctgctgctgagctgcggtagcggcagcgcggccccggcgcccggcgtggggcagcagcgcgacgccgccagcgacctcgagtccaagcagctgggcggccaacagccgccgctcgcgctgccccctccgccgccgctgccgctgccgctgccgctgccccagcccccgccgccgcagccgcccgcagacgagcagccggagccccggacgcggcgcagggcctatctgtggtgcaaggagttcctgcccggcgcctggcggggcctccgcgaggacgagttccacatcagtgtcatcagaggcggccttagcaacatgctgttccagtgctccctacctgacaccacagccacccttggtgatgagcctcggaaagtgctcctgcggctgtatggagcgattttgcagatgaggtcctgtaataaagagggatccgaacaagctcagaaagaaaatgaatttcaaggggctgaggccatggttctggagagcgttatgtttgccattctcgcagagaggtcacttgggccaaaactctatggcatctttccccaaggccgactggagcagttcatcccgagccggcgattagatactgaagaattaagtttgccagatatttctgcagaaatcgccgagaaaatggctacatttcatggtatgaaaatgccattcaataaggaaccaaaatggctttttggcacaatggaaaagtatctaaaggaagtgctgagaattaaatttactgaggaatccagaattaaaaagctccacaaattgctcagttacaatctgcccttggaactggaaaacctgagatcattgcttgaatctactccatctccagttgtattttgtcataatgactgtcaagaaggtaatatcttgttgctggaaggccgagagaattctgaaaaacagaaactgatgctcattgatttcgaatacagcagttacaattacaggggattcgacattggaaatcacttctgtgagtggatgtatgattatagctatgaaaaatacccttttttcagagcaaacatccggaagtatcccaccaagaaacaacagctccattttatttccagttacttgcctgcattccaaaatgactttgaaaacctcagtactgaagaaaaatccattataaaagaagaaatgttgcttgaagttaataggtttgcccttgcatctcatttcctctggggactgtggtccattgtacaagccaagatttcatctattgaatttgggtacatggactacgcccaagcaaggtttgatgcctatttccaccagaagaggaagcttggggtgtgactgtggggaggactccatccacctcatcactggactgcatggggaggcagcagagcggggtcccctctgtgcttcgactactgctcctgtggcaggaggctttgggtggctcactactgaacacatgtgtatgatactaaagacggtattaaaatggagcgacgtttatttcatctcttgtttacgatttcactaggactcagaaacgagatcgggaagcagaaatatagtgcaatagtgcaacatctctgaatccttttaatctagagaaggcatttcatatttgggggctaaggtttccagtcagatgaggcaaacagcaagagtaagcagtgttacttgcaggtactttggttaatgttgatttaaattttcatgaatgtgctggtgaacactgtgaccaggcttttgtagatggcgatgtgttatagacggtgctcactcccaagggacagcaagtgagcagagatgtactgcaaagtcgccagtcactgctgcaaggtggcctctgcctggggcctccagaagctgctcctttaccctcttggtcccatggctgaagctggagcagcggattgctctggagcagccaaggccgccagcgtgtggagcagagctctcccctcctgctgggcgtgtgtgacactgatgagtttcactgtactgcatgtgacttctcccctgcccttcctcctgatggagtgtgcagacagccatgcgtggccacgggggcagtgtgaggacctccctgtctcccggctcccctcccaggggagccagctgcttgacctagctctttgggcctctcctgccctctgctctgcctggagtgtcggatcctgtgagtaggctgggcctcccctgggcagggttctccaagggcccggtttcccggcccttacctttcctgatgcccctgacatcatcattcttgtgggagacagcagcctgtatgtggtgtggggcgtggatcgagtgtagctgtgaaatccatatatatgaaatgtcctgcgggatacagtcttagctgacttttttttactctgaactcttatttgaattgttttttgtgcatatatttctgctaccacagagattgtactatacaaataaaaaaataaaaacccaaaaaaaaaaaaaaaaaa

SEQ ID NO: 320 - DNA, 2912 bp, Homo Sapiens
gcgccggcacacctattggcccccgcggcgtcccgtcgccgcgtcgcgttgctggcccgtcggagcgacgccgctcgggtcagtcggcggccggactgggaagatggacgcagctactctgacctacgacactctccggtttgctgagtttgaagattttcctgagacctcagagcccgtttggatactgggtagaaaatacagcattttcacagaaaaggacgagatcttgtctgatgtggcatctagactttggtttacatacaggaaaaactttccagccattggggggacaggccccacctcggacacaggctggggctgcatgctgcggtgtggacagatgatctttgcccaagccctggtgtgccggcacctaggccgagattggaggtggacacaaaggaagaggcagccagacagctacttcagcgtcctcaacgcattcatcgacaggaaggacagttactactccattcaccagatagcgcaaatgggagttggcgaaggcaagtccataggccagtggtacgggcccaacactgtcgcccaggtcctgaagaagcttgctgtcttcgatacgtggagctccttggcggtccacattgcaatggacaacactgttgtgatggaggaaatcagaaggttgtgcaggaccagcgttccctgtgcaggcgccactgcgtttcctgcagattccgaccggcactgcaacggattccctgccggagctgaggtcaccaacaggccgtcgccatggagacccctggtacttctcattcccctgcgcctggggctcacggacatcaacgaggcctacgtggagacgctgaagcactgcttcatgatgccccagtccctgggcgtcatcggagggaagcccaacagcgcccactacttcatcggctacgttggtgaggagctcatctacctggacccccacaccacgcagccagccgtggagcccactgatggctgcttcatcccggacgagagcttccactgccagcacccgccgtgccgcatgagcatcgcggagcttgacccgtccatcgctgtggggtttttctgtaagactgaagatgacttcaatgattggtgccagcaagtcaaaaagctgtctctgcttggaggtgccctgcccatgtttgagctggtggagctgcagccttcacatctggcctgccccgacgtcctgaacctgtccctaggtgagagctgccaagtccagattcttctgatgtagagcgactggaaagattcttcgactcagaagatgaagactttgaaatcctgtccctttgaaaatcctggggtcgggggtggcacctgtgagagcctggggctcctggtgccgctgcgtttcatccatcccgcccgctcgcctgccgagggctgcgccccgtgctgcctccccccagagggccacccgctgtgctcgtggactgaggctgcgctgcccgggaggccttactgcttggtgtcagactgcccagctcagagtgcccgtcagggcctgtgcatccgcacgcggagccgtctgttaggagcttccagagtgttctctcgacactgccagccccgtgttagcacctgggcctcagtcccacttgctcccaggcgccggttctgtggttggtttggaattaaagtcctgtttgaagttgtcagacacagacatgaatttctgggcgctccctgagtcagagtctcagaagacctgtgcaggctggcgtgagaggagcggcagccacactgcggccccacgcccaaggactgggctgctctcgaggggggcgcgcccaccgctgtgtcctctctgcccagcctggcttaccaagggctacctcagtgggagatgaggttggaggaacgaaggcgaggttcctccttgctttggggagaaaagtattcaggaagtgggtgtgtgggaaacctgaagatggcgtgcacaggacacagcgtgggcggcctgggcagaagggcggctggctgtcctggagctgctgctggagcctgccctcagagtgtccctttccagtgctgtggcattctgtggcagcttccccaggtgtggtgacggggggggggcggggcctccacctgtgacagccaggcttgagggtggacggcgtgcctctcccaggagccttccccatgtccttgccttgctgagaattgccctcccatgccgctgaggtgttaggtggtttagggccaaaaggggaaaaccacttgagtcttgtggtgtgtggtgggcagacaccacagggtggcatcacctggtggcatttccagaacctcagccccgattccagcacccaccaccgcctgaccctgtgtaacctgctgtcccgggtcccagagtgcactctgccccgctgctctgctgcctgtcctgggaaagtatctttgccccactaggaaatgtaaacaggagggcttggggagcgtgggcacttttctcatgagcagctactgcggcgttggcaggactcgctgctgctgctgctgcttgtgtaggtcggggagccagagatccccgaggacgcgcgccggacagtcggcactgaccggcccacctggtagcagaggacacccccagccccccaagcattgaagacatagtgtatttcctcgtatcctttctcccttgggtgtagttggggtggggaagcagggaaggctggtgcgatctccattccttgggctccacgtccgagttcatggtgcgccgctgtgctgggagctgcagtggtaatgtgtgggacaccttgaccaaaggggagctttgtctcgtgtgttttgaaaaaggcttaatgaagagaatgttgttcattcttagtagtatagtttgcaattcttaatggcaaataataagtttcagtagaaaacaaaaaaaaaaaaaaaaa

SEQ ID NO: 321 - DNA, 1006 bp, Homo Sapiens
cagccgcacgtgggctcggcgcgatggaggaggagacgcatactgacgccaaaatccgtgctgaaaatggaacagggtccagccctcggggtcctggctgcagcctccggcactttgcctgcgaacagaacctgctgtcgcggccagatggctctgcttccttcctgcaaggtgacacctctgtcctggcgggtgtgtacgggccggccgaggtgaaggtcagcaaagagattttcaacaaggccacactcgaagtgatcctgaggccgaagattgggctgcctggtgttgcagagaagagccgggagcggctgatcaggaacacgtgcgaggcggtggtgctgggcacgttgcacccccgcacctccatcaccgtggtgctgcaggttgtcagcgatgccggctctctcctggcctgttgtctgaatgccgcctgcatggcattggtggatgcaggtgtgcccatgcgggctctcttctgtggggtcgcctgcgccctggactctgatgggaccctcgtgctggatcctacatccaagcaagaaaaggaggcccgggcagtcctgacctttgccctggacagcgtggaacggaagctgctgatgtccagcaccaaggggctctactcagacactgagctccagcagtgcctggctgcggcccaggccgcttcgcaacacgtcttccgtttctaccgggaatcgctgcagaggcgttactccaagagctgaggcaagctggggcaaggggccgctcccattgcctccacccactcaccccctacagcctgaagcaaaccagcagcccagccttgcctctctgacccatgggctccttgagcctgcagctctgtaaccacagggctcctgtggggaggccttggcctgtgacagcccccaggcctgggggcacagatccccccagcaaggataacattcaaaggagctcacatttatggaatggatgaatcaataaattaattcactttaacaaaaaaaaaaaaaaa

SEQ ID NO: 322 - DNA, 2922 bp, Homo Sapiens
gttgttacttaggtgcgctagcctgcggagcccgtccgtgctgttctgcggcaaggcctttcccagtgtccccacgcggaaggcaactgcctgagaggcgcggcgtcgcaccgcccagagctgaggaagccggcgccagttcgcggggctccgggccgccactcagagctatgagctacggccgcccccctcccgatgtggagggtatgacctccctcaaggtggacaacctgacctaccgcacctcgcccgacacgctgaggcgcgtcttcgagaagtacgggcgcgtcggcgacgtgtacatcccgcgggatcgctacaccaaggagtcccgcggcttcgccttcgttcgctttcacgacaagcgcgacgctgaggacgctatggatgccatggacggggccgtgctggacggccgcgagctgcgggtgcaaatggcgcgctacggccgccccccggactcacaccacagccgccggggaccgccaccccgcaggtacgggggcggtggctacggacgccggagccgcagccctaggcggcgtcgccgcagccgatcccggagtcggagccgttccaggtctcgcagccgatctcgctacagccgctcgaagtctcggtcccgcactcgttctcgatctcggtcgacctccaagtccagatccgcacgaaggtccaagtccaagtcctcgtcggtctccagatctcgttcgcggtccaggtcccggtctcggtccaggagtcctcccccagtgtccaagagggaatccaaatccaggtcgcgatcgaagagtccccccaagtctcctgaagaggaaggagcggtgtcctcttaagaaaatggtaatgtctgggaatccgagacacataaccctaattcataaatgggatttggggtaggtctttttgagtcgtgttaatgtaagaatgactcctatcattaggagtgctgctcggaggttactcacctttgggagtaatactgaagagaggggtctgcagaaaggatgtgtatgaagcttagataataatggctgtttcgtaaactgtttgagacctattaatgaaaatgactatttcttgctgtttttatccaacgtctgcattttccccctttaaagctgcggtctcctgtttgataaaagaatattggccagtattgcagattttaactgatttggctgatcctccagggaccagtttctgtgggcgtgtattggagcaggtttgtctttaaatgttaaagatgcactatcctcttagagaaacaatcagttcaactattgttgtactgactgggacttcatattctaatggatgtggcaaaagaattgcaataagaagcagtgaacatttggaaccccaaaagaaagttacaggtattgcactgggtggggaaaggatagtgtgtctttaactcttaaattgtttggtcctattttttaaaaaggaaagggccctaagtagctcagatattaaagtagtattctcaattaccaaatgtttcatttgaaacaatttatcttaatgaaatatagaccaattctctgatctcgagttgtttttgtttggatacagcccttttttttttctttttttttcttccccttacctttcttcaccttggttatttggccaggaatacgtaaattcaaacttgtacatgctgatggtagcctttgtgaaattttcctaattgggccttttaaaaacatggctgggtggaacatttctgtaccctactggtttgaccagagccttagtaagtacgtgcctgaaactgaaaccatgtgcactttaatggaaggtaagctgaacttctttcttttcaaacctagatgtatcggcaagcagtgtaaacggaggacttggggaaaaaggaccacatagtccatcgaagaagagtccttggaacaagcaactggctattgaaaaggttattttgtaacatttgtctaactttttacttgtttaagctttgcctcagttggcaaacttcattttatgtgccattttgttgctgttattcaaatttcttgtaatttagtgaggtgaacgacttcagatttcattattggatttggatatttgaggtaaaatttcattttgttatatagtgctgactttttttgtttgaaattaaacagattggtaacctaatttgtggcctcctgacttttaaggaaaacgtgtgcagccattacacacagcctaaagctgtcaagagattgactcggcattgccttcattccttaaaattaaaaacctacaaaagttggtgtaaatttgtatatgttatttacattcagatctaaatggtaatctgaacccaaatttgtataaagacttttcaggtgaaaagacttgattttttgaaaggattgtttatcaaacacaattctaatctcttctcttatgtatttttgtgcactaggcgcagttgtgtagcagttgagtaatgctggttagctgttaaggtggcgtgttgcagtgcagagtgcttggctgtttcctgttttctcccgattgctcctgtgtaaagatgccttgtcgtgcagaaacaaatggctgtccagtttattaaaatgcctgacaactgcacttccagtcacccgggccttgcatataaataacggagcatacagtgagcacatctagctgatgataaatacacctttttttccctcttccccctaaaaatggtaaatctgatcatatctacatgtatgaacttaacatggaaaatgttaaggaagcaaatggttgtaactttgtaagtacttataacatggtgtatctttttgcttatgaatattctgtattataaccattgtttctgtagtttaattaaaacattttcttggtgttagcttttctcagaaaaaaaaaaaaaaaaaaaaaaaaaaaaaaaaaaaaaaaaaa

SEQ ID NO: 323 - DNA, 2767 bp, Homo Sapiens
gcggccgcgtcccttcctgcggtccgctgctcgggcggctccagcaccagcgccggctgcgttccgggcctccggtcgcccgtccagcccctcggctaccgccgccgcctcccccgctcggcgccatggccgctgcggccggggacggcacggtgaagccgctgcagagcgccatgaagcttgccaacggggccatcgagctggacaccggcaaccggccccgggaggcatacacggaatacctgaggagcatccactatatctcccaggtgttactagaagaagtggaaaccactaaagaagctggggaaactgtgccccccgacacctccaagatgctgaagctagcacagcagtgtctggagagggcccagtcgacggccgccaagcttgggaaaacacgcctgaagccaaccatgcctgcagctgctcccattccccagcctgccggccgacaccgccgtgtatactccgatgaaggaggaaagctctctccttttctgccacccgagatcttccagaagcttcagggggcagagtcacaaagctgtaagaaagagctgacgccactggaggaggcctccctgcagaatcagaagctgaaggctgcgtatgaggcccgaatggcgcggctagaccccagccaggccatgcagaagacatccctgaccctctctctacagcggcagatgatggagaacctagtgattgccaaagcccgggaggagacactccagagaaagatggaggagcgccggctgcggctccaggaggccgccaacaggaggttttgcagccaagtcgccctgaccccggaggaacgggagcagcgggccctttacgccgccatcctggagtacgaacaggaccatgactggccgaagcactggaaggccaagctcaagaggaatccgggggacctgtcactcgtgaccagcctggtctcacacctgctcagcctccccgaccacccgatcgcgcagctcctgaggcggctgcagtgctccgtgtacagcgccctgtatcccgccgtgagcagagcagccgcgccagccccaggctgctgccccccgacccccaaccccggaagccgacggctgcggccctcgcagagcctccattgcatgctgtccccgcccgagcccagcgcagccccgcggccccaggacagtccccccacgcccccactccaacccggccccgtggggtctccctcacccctgggggacaccgcatctggattgccagacaaggacagctcgttcgaggacctggagcagttcctggggacgtctgagcggcagggccggggccgtggggtacagccggagccccagctgcagcagctgaagaccgcggtggaggagatccacaatgccgtagacaggctgctctcgctgacccttctggccttcgaaggcctaaacacagctgcctccaaggaccgctgcctggcctgcattgaggaaccctttttctccccgctgtggcctctgctgctggccctgtacaggagcgtgcaccgagcccgggaggctgccctgagcaggagcatggagctctacaggaatgcaccccccaccgccattggcatccccaccaagctcctcccccagaaccctgaggccaagggggccactggctacccctactgcgcggcggcccaggagctcggactgctggtcctggagagctgcccccagaagaagctggagtgcatagtgcggaccctgcggatcatctgtgtctgtgcggaagactactgccccaccccagaggccacaccccaggccgggcccccgcccatcgctgcagctgccattggtgccgatgacctgctgcccatcctgtccttcgtggtgctgaggagcggcctccctcagctggtgtcggagtgcgcggccctggaggagttcatccacgaggggtacctgatcggagaggagggctactgcctcacatcactgcagagtgccctgagctacgtggagctgctgccccggggaggcctggccaagtagtacagctagagcccagggtccctgcagggcctggcctcgcctcccagggctgtctctcctacacctggagccatgggatctactgaggaccatcctggagcctcacgctgctctgcacatggtgggggcttgtccactgtggtgtgctctccagctcttcaccttcctcacctcacatctgaccctggagcttggggttggcacctctgccccgacagaatggggctgaatcagctccaggaggaaccaggccctgctctcctgtgtaggcctcagagaggccaagaagggaagctttgggcttcggtgggtgcaggctcagcgatgaacatctggctggggcagctcctggggagcatcagggaagagggggccatgagccggccagcagtggagacggcagtccagtttctctcccctctgacccctagaaggggagttgtagccccatgaactagtttcttgtctgggtcaggaacaagggccggctggggcctggggtgcagctggtgtcagggtatgctgtttgctgatgggcagggacacccctgcagggtctcgggctctgagcccaggacattccctgccccttactcaccttggctgtgggctgtgaacattccgggaccctgggcatcttatctaggtccgtgcagcccaagggtcagccctcttgactgtcacatgctgcccccacccagcctaaaataaagagctcactgctgtgcaaaaaaaaaaaaaaaaaa

SEQ ID NO: 324 - DNA, 3395 bp, Homo Sapiens
tgaccaagagctgacgtgtgcagaagtccttcttgtcctggtcgttgttcccgtctgagtaccagctccccactgccctgagggcgggccggcctgcggcggagggaaaaaggaagaggagaaggaaattgtcccgaatccctgcagtgggtccaagcctctcccgggtggccagtctttctgtaggttgcggcacaacgccaggcaaaagaagaggaaggaatttaatcctaatcggtggaggtcgatttgagggtctgctgtagcaggtggctccgcttgaagcgagggaggaagtttcctccgatcagtagagattggaaagattgttgggagtggcacaccactagggaaaagaagaaggggcgaactgcttgtcttgaggaggtcaacccccagaatcagctcttgtggccttgaagtggctgaagacgatcaccctccacaggcttgagcccagtcccacagccttcctcccccagcctgagtgactactctattccttggtccctgctattgtcggggacgattgcatgggctacgccaggaaagtaggctgggtgaccgcaggcctggtgattggggctggcgcctgctattgcatttatagactgactaggggaagaaaacagaacaaggaaaaaatggctgagggtggatctggggatgtggatgatgctggggactgttctggggccaggtataatgactggtctgatgatgatgatgacagcaatgagagcaagagtatagtatggtacccaccttgggctcggattgggactgaagctggaaccagagctagggccagggcaagggccagggctacccgggcacgtcgggctgtccagaaacgggcttcccccaattcagatgataccgttttgtcccctcaagagctacaaaaggttctttgcttggttgagatgtctgaaaagccttatattcttgaagcagctttaattgctctgggtaacaatgctgcttatgcatttaacagagatattattcgtgatctgggtggtctcccaattgtcgcaaagattctcaatactcgggatcccatagttaaggaaaaggctttaattgtcctgaataacttgagtgtgaatgctgaaaatcagcgcaggcttaaagtatacatgaatcaagtgtgtgatgacacaatcacttctcgcttgaactcatctgtgcagcttgctggactgagattgcttacaaatatgactgttactaatgagtatcagcacatgcttgctaattccatttctgacttttttcgtttattttcagcgggaaatgaagaaaccaaacttcaggttctgaaactccttttgaatttggctgaaaatccagccatgactagggaactgctcagggcccaagtaccatcttcactgggctccctctttaataagaaggagaacaaagaagttattcttaaacttctggtcatatttgagaacataaatgataatttcaaatgggaagaaaatgaacctactcagaatcaattcggtgaaggttcactttttttctttttaaaagaatttcaagtgtgtgctgataaggttctgggaatagaaagtcaccatgattttttggtgaaagtaaaagttggaaaattcatggccaaacttgctgaacatatgttcccaaagagccaggaataacaccttgattttgtaatttagaagcaacacacattgtaaactattcattttctccaccttgtttatatggtaaaggaatcctttcagctgccagttttgaataatgaatatcatattgtatcatcaatgctgatatttaactgagttggtctttaggtttaagatggataaatgaatatcactacttgttctgaaaacatgtttgttgctttttatctcgctgcctagattgaaatattttgctatttcttctgcataagtgacagtgaaccaattcatcatgagtaagctcccttctgtcattttcattgatttaatttgtgtatcatcaataaaattgtatgttaatgctggaaagaaaaaaagaagaaagaaagaaaccatccctgtccttcagtttataatctagttggagagataagaaacgtacaaaccaaaagataacagaatatctgaagcatgtactcattgtcagatgttccctctgagagcacagaggaggcaaaagcttctgtgggatgtgctagtcggctaaagcttcacagaggaggtggcaattgaaaatgagtcctgaatggggtagggtggttagggaattccatgagacaagacaaggggggcatggtgtgagaaaggcatggaagtaggaaccctcttcctatgacaggagatcattctgcttagagtggagagtgtggagagtgggagtagataattttggaaagctgggtgaagccagttgtggagaattgtttgaatattatcccattgaatacccagagccactaaatctttttttactagaaaataattggggtccatatgaaagtctctattactgagtagtgtcaatgagggtgtggcaaaatggagcctttcacatcctagtggtggccatttggtaatacagatataagccttaaactatgtaaacccttgtcctaaggaagtaattgaataattgcccaaagattgtatgtatgaggctgttcatcccagcactgtctaagctagtaaaaattggaaacaatttaagtatctagcacattggattggttataaagcaaggaatgttcacacagtaggatattataagtatgctgatggaaatctatattgccaggaaaagctattcattatgcgttgtgaagtcagaaagtaaaaaagggtagatagaagtattcgaagtatagttccattttttgagactaataaaacatatgtttaaaaggacactaaaaactggagttatagatatccagatagaaacagtagttatctttgggtagaagaataatgagtgatctttacttttttactttttattcatctttgtgtttttatttatctaaaatgggtattgatttttaggacggttttgaaaaagaaaagtgttgggaatgaagcaagtgattgattggaaaacatactgaatggaagaaatatttagattaaaaatgaggtaggttgaagtttcttctctgaaatgatagataaatggtgaagataaggcttattgtgaggattcagtgaggtaatatatgcaaagtacttacaatgttctggcacatagtaattaattaagaaaatcgagcacccttaattacctagaatgcagggttgttagttttttggttgacttttgttttgctggggcattctgccatgttttagtgtcatttaataaataatagtaacaataaaggttaacatttattaagt

SEQ ID NO: 325 - DNA, 2385 bp, Homo Sapiens
ctcggctgcgccacgtcggcgcgcggcggccgcgcccccttaacggcagtggcactcacccggctcgcgcggccccggcgccccacgcgcgcgcgtcgttctcccgcccgctcgctccccggcgctcacacctgagctcactcgcgcacgcccgcccggcccgagaaccgcgccgccgcctcggccccgcggaagccccgccgcgtcatgtcttcgcctcccgaagggaaactagagactaaagctggacacccgcccgccgtgaaagctggtggaatgcgaattgtgcagaaacacccacatacaggagacaccaaagaagagaaagacaaggatgaccaggaatgggaaagccccagtccacctaaacccactgtgttcatctctggggtcatcgcccggggtgacaaagatttccccccggcggctgcgcaggtggctcaccagaagccgcatgcctccatggacaagcatccttccccaagaacccagcacatccagcagccacgcaagtgagcctggagtccaccagcctgccccatggccccggctctgctgcacttggtatttccctgacagagagaaccagcagtttcgcccaaatcctactctgctgggaaatctaaggcaaaaccaagtgctctgtcctttgccttacatttccatatttaaaactagaaacagctccagcccaaaccttgtttatggggagtctggttggatgtcatttgaggatcattgtgcccctagaggtgccattagcagaatttgccaagatccgagaaaaattttagctttagttctatttcagcagtcacctgacgtccttgtctatggtcttaaaaacaagaaggcacacatttgagaagatgagattaaggttaggagaaaacctcagtcattgcatgctttttagtatgggccaataaaatctcaacacctgtgggagagtaagaactaagggaatgagtttgggcggcccctcataaaggaccttagaggcagggaacagcaatgccaaatttccctctctcgtgagatgggggatcctgtgcaggctgatgaggcacccatgagaaaagccgaaaaagcatgcatcttagaaatagcccctcaattccaggagtcaacatgccaaagaatgaggctggagacaggtagctccgagggaggacttctggcatgagatctcggcacggcaagcccagcatcgcctcagcccagacaggctccaccaggagatcaagcaagggctgcctttcaggagtcacctcctgagccacttcagagttctggaagtgaccacggaccagggtggaggaatagacttctagttcattctgggacacttgagccagagagttgaaagcttggaaagaccagataagaaacctgccctttgtctccctagggacatgagacaccacattccatttgtgctagaaaaacctatccactgatgagtctaactgttccaaacgcctcccacctggtgtgcacagctgcctgggtccattgtcacttgggtgcatcaggttgtcctccgatttttagatgagtttcctgtctagagatgtcctagtctgctcactggctggtggcagtagggtaccctgcgtcctcgaaaagccagagggttcacctagtcagacgaaactccagaacagtgcttgtggagggcctgactgtcctgctcacccacagccgatctgctgcaggtcagcaactgtgtcgtgagcagctgccaaccaccagcctttctggtgctgttctccagttcacgtctgccagctggtgagggcagaggcagacctggtcagacccagcgcccctcctccctgagggagcatggcacagcctcacacttgaaagacggtgtttggtttcccatctaatcaacttaagggaagccggcatgtacccttcaaggccctgtcaccacctatttcctgatcagttggtataaactgagggtggcttttagagacccagacttggttggcagcgctgccatggaacaccccagcaagcacctcccagcctgcctttcggagcagcacccaggaggggatgccgcgctccagcaacaccaggtcaggcctgtgcagacccctgccctgccgctgcagaaatccagaagcatccttaatgcttctcagtcttcagccagagggagggctgttatttccagaggtgcgctttttatgtacttttagctagatgtggcatgcatctgtgagctttagatcattaaatccaaaatgtttgcctaaatgagtttatcagttgttaacttcaagaatattaaatgatttataataaagctcctgcatttctctccaaaaaaaaaaaaaaaaaaaaaaaaaaaaaaaaaaaaaaaaaaaa

SEQ ID NO: 326 - DNA, 1638 bp, Homo Sapiens
agcggcagcgcggtcagtggcggcgctgaagagaccggttgccgccatgatagaacagcagaagcgtaagggcccagagttgccgctggttccagtcaagcggcagcggcatgagttgctgttgggagcggggtctggcccaggagccgggcagcagcaggcgacgccgggagccttgctgcaagcgggacctccaagatgttcctcccttcaagccccaatcatgctgctctctggacatgaaggggaagtctactgctgcaagttccaccccaacggatccaccttagcatctgcaggatttgaccgactgatattactgtggaatgtctatggtgactgtgataactatgccacactgaagggacacagtggagcagtgatggaattgcattacaacacagatggcagtatgcttttctcagcatccacagataaaaccgtggctgtgtgggatagtgaaacaggtgagagggttaaaaggctaaagggacatacttcctttgtgaattcctgttatccagccaggagaggccctcagcttgtctgcactggcagtgacgatggcacagttaagctttgggacatccggaagaaagcagccatccagacatttcagaacacgtaccaggtgttagctgtgaccttcaatgacacaagtgatcagattatttctggtggaatagacaatgatatcaaggtctgggacctgcgccagaacaagctaacctacaccatgagaggccatgcagattcagtgactggcctgagtttaagttctgaaggctcttatcttttgtccaatgcaatggacaatacagttcgtgtctgggatgtccggccatttgcccccaaagagagatgtgtaaagatatttcaaggaaatgtgcacaactttgaaaagaaccttctgagatgttcttggtcacctgatggaagcaaaatagcagctggctcagccgacaggtttgtttatgtgtgggataccacaagcaggagaatattgtataagctgcccggccatgctggctccatcaatgaagtggctttccaccctgatgagcccatcattatctcagcatcgagtgacaagagactgtatatgggagagattcagtgaagatatggactggaagactccaaggccgcttgtctttgagacctcagactgcataagtgatgccaaatgttggatgtccaggctagcaccctcccttcagatgaccattgctagcaagaaacaggaggcggtggccatattccaaaaaccacttctgtcccatttcaccaggatgactaaggcaagctccctgtggcctctaaaaaccacctgccagatttcagggactgtttttttttttctttttcttttttcctgttttctaatgcaggcccaatgtgacaaatttgttggttgggattttttttttttttttgtaactggcttgtatgatattttctttctgtatttctctatatcattttgtattaaaagccaaatagatgcctttttacaagagccatgtggattggatttattgctgtcttttttttgaggcttgattgctataaatcagaatagagcatgatgtggccacagaatacaattcatttaaacttccaaaaaaaaaaaaaaaa

SEQ ID NO: 327 - DNA, 7706 bp, Homo Sapiens
ctgaggctcagccctcctcggagcccaccatctcgaggctcctggactgtaagggacccctgcagtccccagagcagaggccagcaggggctgagactatgaggcaagcagcccatcgacccaggcctccttaggaccagcccagccacccagcaagcgaaagagcagcagcagagagcagagccggagataaaggaccacagcggaccactggggatcacccccagcagctcctgaagcctctggccgggctgaggggttgcgacagacggccagacccacagacactgacagacacacaacgacaccgatgcacacagctgcacgacactgacacactcagatacaaccagggacagcatcacatactgccacagccctgcaatacagacacccacacacacacacacaaacaactggcaactctgaaatgggcagacagtgacacacagcaccacccccctcaacacacagaagtgggggcacccatcttcccaacacatgagacagcattgacctgcacggacagacctggagacacacacacgcaccctcacccaggcgcagctgtcggtggcctctgcacatcctccctacccccacagggacaccctcgctcctccacatactcgcgcacacacacagctaccagcaaacatagctcacatacccctggctccagctccagcagccctggcgccttctgcagcctcctttgtgggtggggaagagctcagccaaccttggatggagcgtcggtgaagcaagagctcagaggggagaggggctggcctggcatgaccctcgccagtccccccacctggctgggtgatgtcccccggcccgggttctggggccccttggcagtaccatggagcaactgacaaccctcccacggcctggggaccctggagccatggagccatgggcactgcccacctggcatagctggactccaggtcgagggggtgaacctagcagtgcagccccaagcatcgctgatactcctccggcagctctgcagcttcaagaactgaggtctgaggagagttccaagcccaaaggagacgggagctccaggcccgtggggggaactgaccctgaaggagcagaggcttgtctgcccagcctgggccagcaagcatccagctctggacccgcctgccagaggccagaggatgaggaagtggaggctttcctgaaggccaagctgaatatgagctttggggacaggcccaatctggagctgctgagggccctgggggagctgcggcagcgctgtgccatccttaaggaggaaaaccagatgctgaggaagagcagcttccctgagacagaagagaaggtgcggaggctgaagaggaagaacgccgagctggcggtcattgccaagcgcctggaggagagggcccgaaagctgcaggaaacgaacctgagggtggtgagtgcccccttgccccggccggggaccagcttggagttgtgtcggaaggccctagcccgccagcgagcccgggacctcagtgagacagccagtgcactgctggccaaggacaagcagattgctgccttgcagcgggagtgcagggagctgcaggccaggctcactctggtgggcaaggagggtccccagtggctccacgtgcgggacttcgatcggctgctgcgcgagtcccagcgggaggtgctgcggctgcagaggcagatcgcgctgcgcaaccagcgggagacgctcccgctcccgccgtcctggcccccgggccctgctctccaggccagagcaggggcgcctgctcccggggccccgggagaggccacgccccaggaggatgcggacaacctacccgtgattctaggggagccagagaaagagcagagggtgcagcagctggaatcggagctcagcaagaagcggaagaaatgcgagagcctggagcaggaagcccggaaaaagcagaggcgatgtgaggagctggaactgcagctgagacaagcgcagaatgagaatgcccgcctggtggaggagaactcccggctcagtgggagagccacagagaaggagcaggtggagtgggagaatgcggagctgaggggccagctcctgggggtgacacaggagagggactcagcccttcgcaagagccagggcctgcagagcaagctggagagcctggagcaagtgctgaagcacatgcgggaggtggcccagcggcggcagcagctggaggtggagcatgaacaggctcggctcagcctacgggagaagcaggaggaggtccggagactgcagcaggcccaggctgaagcccagagggaacatgaaggagccgtgcagctgctggagtctaccttggattccatgcaggcccgggttcgagagctcgaagaacagtgccgcagccaaaccgagcagttcagcctcctggcacaggaactccaggctttccgcctgcacccgggccccttggatctgctcacatctgccctggactgtgggagccttggagactgcccaccacccccctgctgctgctccattccccagccttgccgggggtctggccccaaagaccttgacctcccgccgggctcccctgggcgctgcaccccaaagtcttccgagcctgcccctgccactctcactggggtccctcgaaggacagccaagaaggcagagtctctctccaactcctcccactccgagtccatccacaacagccccaagtcatgccctacacctgaggtggacacagccagtgaggtagaggagctggaggcagacagtgtctccctgctcccagctgcgccagagggcagccggggaggagccaggatccaggtcttcctagcacgttatagctacaacccctttgagggtcccaatgagaatccagaagcagagcttccgctgacagctggcgagtacatctacatctatggcaacatggatgaggatggcttttttgaaggagagctcatggatggccgaaggggcctggtcccttccaattttgtagagcgtgtgtcggatgatgacctcctgacctccctccctccagagctggccgatttgtcccacagctcaggccctgaactcagtttcctgagtgtaggtgggggtggcagcagtagcgggggccaaagcagtgtgggaaggagccagcccagacctgaggaggaggatgcaggggacgagctcagtctgagcccatcaccggagggcctgggcgagcctcctgccgtgccttacccccgccgtctggtggtcctcaagcagctggcccacagcgtggtgctggcctgggagccgcctcctgagcaagtggagctacacggcttccatatctgtgtgaatggggagctgcgacaggccctggggcctggggcgccacccaaggccgtgctggagaacctggacctgtgggccgggccccttcacatttctgtccaggccctgactagccggggcagctctgacccactgcgctgttgcttggcggtgggtgcccgggccggagtggtgcccagccagctgcgggtccatcggttgacagccacatctgctgagatcacctgggtgcccggcaatagcaacttggcccatgccatctacctcaatggggaagagtgcccacctgccagccccagtacctactgggccaccttctgccacttacggcctggcacaccctatcaggcccaagtggaggctcagctcccaccccaagggccctgggaaccaggctgggagaggctggagcagcgggctgccaccctgcagttcaccacactcccagcaggcccacctgatgcccctctggatgtgcagatcgagcctgggccctcccctgggatcttgatcatcagttggctcccagtcaccatcgatgctgctggcacatccaacggtgtccgggtcacaggctatgccatctacgctgatgggcagaagatcatggaggtggcctcacccacggcaggcagtgtactggtggagttgtcccagctgcagctgctgcaggtgtgtcgtgaggtggtcgtgcgcaccatgtcgccccacggggagtcggcggactccatcccggctcctatcactcccgccctggctccggccagcctgccagcccgagtctcctgcccctcaccgcacccaagcccagaggccagagcgccccttgcttcagcctccccagggcctggagaccccagctctcctctccagcaccctgctccccttggaactcaagagcctccaggagcaccccctgcaagcccttccagagagatggcaaaagggtcccacgaggaccctccagcaccttgctcccaggaggaggctggggcagcagtgctgggcacctcagaggagaggacagccagcacatctaccctgggtgagaaggaccctggccccgcagctccctcactggccaagcaggaggccgagtggactgcaggagaggcctgtccggcctccagctccacccagggagcacgggcccagcaggcgccaaataccgagatgtgccaaggaggagacccagggtctgggctgaggcccagggctgagaaggaggacacagcagagcttggggttcatctggtgaactccctcgtggaccacggccgcaactcagacctgtcagacatccaggaggaagaggaagaggaggaggaggaggaggaagaggagctgggttccaggacttgctccttccagaagcaggttgctggcaacagcatcagggagaatggggccaagtcccagcccgaccccttttgtgagactgacagcgatgaggagatcttggagcagatcctggagctgcccctccagcagttctgtagcaagaagctctttagcatcccggaggaggaggaagaggaagaggaggacgaggaggaggagaagtcaggggcaggctgttcttcccgagaccctggcccgcctgaacctgcattgctggggctgggctgtgacagtggtcagccccgaagacctggccagtgtcccttgtctcctgagtcctccagggctggagactgcctggaagacatgcctggattagttggtggaagcagccggaggagaggagggggctcccctgagaagcccccaagccgcaggcggcctccagatccccgagaacactgcagccgacttctcagcaacaatgggccccaggcctctggacgactgggccccacacgggagaggggtggcctccccgtaattgagggccccaggactggactagaggctagcgggagaggccggctgggcccttcccggaggtgctcccgtggccgggcgctggagcctggcctggccagctgcctttcccccaagtgcttggaaatcagcattgaatatgattcggaggatgagcaggaggcgggcagcgggggcatcagcatcaccagctcctgctaccctggagatggggaggcctggggcacagcaactgtaggaaggcccagggggcctccgaaggccaattcaggccccaagccctacccacgcctcccagcctgggagaaaggggaaccagagcggagaggccgcagtgcgacgggcagagccaaggagccactctcccgggcaacagagaccggagaggccagagggcaggacggctctgggcggaggggcccccagaagagaggtgtccgagtcctcaggccaagcactgcagagctagtccctgcgaggagcccctcagaaacactggcttaccagcacctacccgtcaggatctttgtggctctgtttgactatgaccccgtgtcaatgtcgcccaatcctgatgctggagaagaagagcttcccttccgagagggtcagatcctgaaggtgtttggggacaaggatgccgatggcttctaccagggcgaaggtgggggccggacaggctacattccctgcaacatggtggctgaggtggctgtggacagccctgctgggagacagcaactgctccagcggggttatttgtccccagatattctccttgagggctcagggaatggtccgtttgtgtactccacagcccacacaactgggcctcctcccaagccccgccgctccaagaaagctgagtcggaaggccctgcccagccctgtccaggcccccctaagctggtcccctctgctgacctgaaagctccccactccatggtggctgcatttgactacaacccccaggagagttcccccaatatggacgtggaggcagagctgcccttccgggcaggggatgtcattactgtgtttgggggcatggacgatgacggtttctactatggggaattaaatggacaaaggggcctggttccatccaacttcctggagggccctgggcctgaggcaggcggcctggacagggaacccaggacaccccaggctgagagtcagagaacgaggaggagaagagtccagtgctagatggagatagatatatgtagagagagcaacatgactggggctgcaccacacaagggtccccagggcccccaggtgggccttgtacccccagctctggcagcgcccccaggattgaacgtggggagccccagggcagaagcgagaaggtgtggggtttcttctccaaggggaagcagctcctcaggaggctgggctctgggaagaaggagtgaagctgtggcccatcctgcaggcagaagaggccctgagaggcccccagatcactgtctctgctgagcagggaaggctcagactgggcccagagcccccgttcttctgcgttaacactgtggcattcagagggaatcaaagagccttggtgaaggtcagagctaaatggctccttaaggatgaactctctagagaagcaccttcctcctacaggaggggaaactgagcccacagtgagtatgtaacttgaccaaggtcactgagccaggactggacccaggaccctcgcgtcctggtccacccacctcgtctactagtgtcccacagtgctgcgctagtcccttctgccacccttcccagtcccaggacgggccctggagggagaaaggagcctgtgccccctgatggctctggctgtcctgatcctgtcttccctcccctgaaggaaagtttgcactggattttattggagccccatctccccagcgggcaggcgggcggagcctgtatatatgtatatactcagtgcctcagttcagcttcctccacctcgcttccactgcacaggcccaggaaggagaaaggccaagccaaagtgggccccaccctgcccccgtcgtgctccatccttccctgccggggcctgctggcccctgtaaggtcccgcccccaaagaccctggggccagcggggccgaaagcggagttgggtttgccttattttgctcattggattcaagttcttttgcatagttttcttctaacccctgttggagtccaggggctggagaaaaggacagatttatgcagctattttcatacattccctgttcagagtggggtaggggttctccgccgttacccgatccactccatcccccaccctctgaggggtgagtgtgtctttgcatgtttcctttgctgtggtgggagatagtttgactgaacccccaccttgaccttggtctccaggggtgtggaatggtgggggaatttgtttaaaaagacattttattataataaagtctattttcacaaaaaaaaaaaaaaaa

SEQ ID NO: 328 - DNA, 1313 bp, Homo Sapiens
ggggaggaggaggcgggctcccaatccggttccatccggttctcccaccgcccccgctgtgggtctcagcagctcgggcggcgggaggagtggcagcggcaaggcagcccagtttcgcgaaggctgtcggcgcgccgcggcccgcaggcacccggcacgcgccttccccgcaggcacccggcacgcgccttccccgccgccacgatgcccaagaggaaggtcagctccgccgaaggcgccgccaaggaagagcccaagaggagatcggcgcggttgtcagctaaacctcctgcaaaagtggaagcgaagccgaaaaaggcagcagcgaaggataaatcttcagacaaaaaagtgcaaacaaaagggaaaaggggagcaaagggaaaacaggccgaagtggctaaccaagaaactaaagaagacttacctgcggaaaacggggaaacgaagactgaggagagtccagcctctgatgaagcaggagagaaagaagccaagtctgattaataaccatataccatgtcttatcagtggtccctgtctcccttcttgtacaatccagaggaatatttttatcaactattttgtaaatgcaagttttttagtagctctagaaacatttttaagaaggagggaatcccacctcatcccattttttaagtgtaaatgcttttttttaagaggtgaaatcatttgctggttgtttattttttggtacaaccagaaaatagtgtgggatattgaattatgggaggctctgactgtctcgggtgtcagcttaacattccacagatggggggttagtttttatatcctataatacaaagcatattaaatggcaatatggagtcagtcctgcatttaatgtcttgaacattttaaattacttctattaccatgttgttttttagtagaattgtttcctaaagaaaaccactctttgatcatggctctctctgccagaattgtgtgcactctgtaacatctttgtggtagtcctgttttcctaataactttgttactgtgctgtgaaagattacagatttgaacatgtagtgtacgtgctgttgagttgtgaactggtgggccgtatgtaacagctgaccaacgtgaagatactggtacttgatagcctcttaaggaaaatttgcttccaaattttaagctggaaagtcactggaataactttaaaaaagaattacaatacatggctttttagaatttcgttacgtatgttaagatttgtgtacaaattgaaatgtctgtactgatcctcaaccaataaaatctcagttatgaaaataaaaaaaaaa

SEQ ID NO: 329 - DNA, 8962 bp, Homo Sapiens
agtctgcagaggggcccgggcacgctggctgggctcagccgcggcaccagctgccgcaccgcgattacggggctgcccgccgggaaaccgtgcaggattggtggtgattttcatagccaagagccaccacccctgaccatgtagatgccagttccagggagcagcatgggccccactgaatggagactcctgggtctacagccctgagcccctccggcccctggacctcgtcccacaccggaggacacctcttggagctcaccaccactgtcaccagcccgcctcggccacccccaccccccgggacccggagtcggccgcctggtgccacagctgaccagtgagggtgtgctgaggacagccacaagcagccatcacccggcagcctcttgtccagcgctgacccttgggcccagcccgagcaaggaccgcagcaaacatgggtgacatgaccaacagcgacttttactccaaaaaccaaagaaatgagtcgagccatgggggcgagttcgggtgcacaatggaggagctccgctccctcatggagctgcggggcactgaggctgtggtcaagatcaaggagacttatggggacaccgaagccatctgccggcgcctcaaaacctcacctgttgaaggtttgccgggcaccgctccagacctggaaaagagaaagcaaatttttgggcaaaactttatacctccaaagaagccaaaaaccttcctgcagctcgtgtgggaggcgctgcaggacgtgacgctcatcatcctggagattgccgccatcatctccctggggctgtccttctaccacccgcccggcgagggcaacgaaggatgtgcgacggcccagggtggggcagaggatgaaggagaggcagaggcaggttggatcgagggggccgccattctcctctcagttatctgtgtggtcctggtcacggccttcaatgactggagcaaagagaaacagttccggggcctgcagagccgcatcgagcaggaacagaaatttaccgtggtccgggctggccaggtggtccagatccctgtggctgagatcgtggttggggacatagcccaggtcaaatatggtgacctcctccctgccgacggcctcttcatccagggcaatgacctcaagattgatgaaagctccctaactggagagtctgaccaggtgcgcaagtccgtggacaaggaccccatgctgctgtcaggaacccacgtgatggagggctcaggacggatgttggtgactgctgtgggtgtgaactctcagactggcatcatctttaccctcctgggggctggtggtgaagaggaagagaagaaagacaaaaaaggtgtgaagaagggggatggccttcagctaccagcagcagacggtgcggcagcttcaaatgctgcagatagtgcgaatgccagcctagtcaatggtaaaatgcaggatggcaatgtggacgccagccagagcaaagccaaacaacaggacggggcagccgccatggagatgcagcccctcaagagtgccgagggcggcgacgctgacgacaggaagaaggccagcatgcacaagaaggagaagtccgtgctgcagggcaagctcaccaagctggctgtgcagatcgggaaggcgggcttggtgatgtcagccatcacggtgatcatcctggtgctctacttcactgtggacaccttcgtggtcaacaagaagccgtggctgcctgagtgcacgcccgtctacgtgcagtactttgtcaagttcttcatcattggcgtgacggtgctggtggtcgccgtgcccgaggggctccctctggccgtcaccatctcgttggcctattcggtgaagaaaatgatgaaggacaacaacctggtacgccacctggatgcctgtgagaccatgggcaatgccacagccatctgctcagacaagacaggcacgctgaccaccaatcgcatgacagtggtacaggcctatgtcggcgacgtccactataaagagatccccgaccccagctccatcaacaccaagaccatggagctgctgatcaatgccatcgccatcaacagcgcctacaccaccaagattctgcccccagagaaggagggcgccctgcctcggcaggtgggcaacaagacggagtgcggcctgctgggcttcgtgctggacctgaagcaggactacgagcccgtgcgcagccagatgccagaggagaagttgtacaaagtgtacaccttcaactccgtgcgcaagtccatgagcactgtcatcaagctgcccgacgagagcttccgcatgtacagcaagggggcttctgagatcgtgctcaagaagtgctgcaaaatcctcaatggggcgggagagcctcgtgtcttccggccccgcgaccgggacgagatggtaaagaaggtgattgagcccatggcttgcgatgggctccgcactatctgcgtggcctaccgcgacttccccagcagcccggagccggactgggacaatgagaatgacatcctcaacgaactcacctgcatctgcgtggtgggcatcgaggacccggtgcggccagaggtcccagaagccatccgcaagtgccagcgggcaggcatcacggtccgcatggtcactggcgacaatatcaacacggctcgggccatcgccatcaagtgtggcatcatccatcctggggaggactttctgtgcctcgagggcaaggagttcaacaggaggatccgcaacgagaagggggagattgagcaggagcgaattgacaagatctggccaaagctgcgggtgctggctcgctcctccccaacggacaagcataccctggttaaaggcatcatcgacagcacacacactgagcagcggcaggtggtggccgtgacgggggacgggaccaacgacgggcctgcactcaagaaggccgacgtgggcttcgccatgggcatcgcaggcactgacgtggccaaggaggcctcagacatcatcctgacagacgacaatttcagcagcatcgtcaaggcagtgatgtggggccgcaacgtctatgacagcatctccaaattcttgcagttccagctcaccgtcaacgtggtggccgtgattgtggccttcacaggcgcctgcatcacgcaggactcccctctgaaggccgtgcagatgctctgggtgaacctcatcatggacacgtttgcctcgctggcactggccactgagccgcccacggagaccctgctgctgaggaagccgtacggccgcaacaagccgctcatctccaggaccatgatgaagaacatcctgggccatgctgtctaccagcttgccctcatcttcaccctgctctttgttggcgagaagatgttccagatcgacagcgggaggaacgcgcccctgcattcgccaccctcagaacattacaccatcatcttcaacaccttcgtcatgatgcagctcttcaacgagatcaacgcccgcaagatccacggcgagcgcaatgtctttgacggcatcttccggaaccccatcttctgcaccatcgtgctgggcacctttgccatccagatagtgatcgtgcagtttggagggaagccattcagctgctctccactgcagctggaccagtggatgtggtgcatattcattgggttaggagagctcgtttggggccaggtcatcgccaccatcccgaccagcagactcaagttcctcaaggaggcaggcaggctcacacagaaggaggagatcccggaggaggagctcaacgaggacgtggaggagatcgaccacgcggagcgggagctgcggcggggccagatcctgtggttccgaggcctgaatcggatccagacacagatccgcgtcgtgaaggcgttccgtagctctctctatgaaggtttagaaaagcctgaatctcgaacctccatccataacttcatggctcatcctgaattccggatcgaagattcccagccccacatccccctcattgatgacaccgacctggaagaagatgccgcgctcaagcagaactcgagcccgccgtcatccctcaacaagaacaacagcgccatcgacagtgggatcaacctgacgaccgacacaagcaaatcagctacctcttcaagtccagggagccccatccacagcctggagacgtcgctttagctgaggaccctctcgcctgcccgcccgccctcatggaccccgctgccacccgctttccgggcacccatccatccaggcacccaactcacccaagcagcaacgagcaacaatcggaaaccaaatactggagagaaaaccaacgtttccacccacagaccctttctctggctgcgatgctgtttgaactctttttcacttcaaggcaaggggcgggatctccactgggggcttacgggagtgagcggttttcccaaaacaagcccttcctggctcccacccagacatggaccagccatgcacccgcccagccaccacgtcccccgcatgaatgtactgtacactttcaatcctccccttgtttggtttttgggggttggggaggggtttttgtttgtttgtttgttttcttaggcgggaactgcaaacagactcttttctgagactatttatccaatccactggtctgtgagtttttgaaatgcttgcacagcatggtctcagttgtatagattaatttaataactttttgaaattgcagagcttaactcgcctagtagatttgcaccaatggaaccgaagaacttcatagacactcacaaggttatatccatttctttgtatctatatcaacgtatacttttccgagactgtatacgtccatatagataggtagatatatatatatatatataaatatatatacatggatatataaagtttctttgccggcatgttgccttgtttccgcttaaattgctctattttaacttatttatgtcctaaaagaagaatgtaatttgtttacaaacctgtagataacgtctttggctatttgtatggtttaagaacactggtggctgagatgctataaaaacagctcggcccaacagacacttcccctgggttgcatcctggatgttttatgatagccatgctctgatttttgcctgctatttccgttcaataatgtcactaccgtgagaggctcaggcagaagccaaatgctaccgagttgccatcctgaggggtttaacaacatgctccgtagacgaagggagaggaggagagaaggcttcctgggtttgcaacactaacggccatccggcccaaggatgccaggatctgcaaagcactgctcgaagacttttctctcaatgaaactcgcttgagtttactaagagcatttcaaaaataggttctctttggcactgtctgtacagagattgaggtagtgttgaaatattataaatggtattgtgttgatttttttttttatttagtaacttacaggtttgtttccttattaatggcagcatctgagctgttggcatattggatgaggatcagtatggcttgctgcttttatttttatttttgaagaagaatagcctttttctctgcactatttagatccgaatgaaccttatgatgtgtatattgagatgtactcagtgtgattttaaaccaaattgtcttcctgtagtcacaatatatactgtagccttttaacagcaagtcttgctttcccaaacagaaagccattctgaaaccctacagtatcacaggtgagaaaaggtggttattttttccccaagacaacagcactagtaatcccacttaataagagcttatttaattggatgtcagcctcttaactgctaagcactttgtgggtctcagcgtttttcataaaagaacttttgtatttaatacaaagtttgctttgagacttttcagcatatgatcttttttccataaacttgtacagtgcaaaagacattttgaataccatgatcgatgatgtcccatgcttcgaggaaaaccaaacactttccgcctctcttgcaaaatccattcctcatgctgaccctcctcacgatggctgtgtcagcccagccccttcccttctccaggcccagagaactcttccacaaacaagatgagagccactcgggaaaagagccatagtcaactgggagggcctacatctggatggcggtggaaaaacttgagggtttggggttcaaagtcagcccatcccacctggcaaaatcctcctggaaggaggaccttcaagagcgcatcacctgaatgtcgtgaagaagtatctctgaatgtatccaggagaggaactgcataaccaaaggggtgaccagccctcagatgtgcttattggattccagtacaaacgccaccaaagccagcccactgctctcctacaaggaaggaaagatctgcacgtgtaaaacatggggcagccttggaacatggtgttttttggagtttcctttctcacagttttccatctccccacttctttgatcagtcatgtgtccgtgacctcgttccatgacatcaggatagctgtgtttgcacaccatgctccatgttcattcggagccaggaggggttctcagtggagcctggcttagggaacagggagcgatggaagaatgccaacattagcgttggtcttctcttgtcaggaatgaaggatgcttgcacacatgcaccccctcactctcacacttgcacacatacacacacacacacacgaaatggttggtttgtcaaaactcactgtagtacataaagcttgcactctgcgtcctatatctagcagcatggggtacgtttggcagttcactccattagggggtaaataatttatgaccattcatctgtttttatgaatttttttatctagacaataatgtaaataaagaactcaccatctctgttcatttaatactatgcaatggttatgctttcaatcgctggctcttctgactcgtgcagtgtggttctgaaatgtttgtggtttaaaaaaaaaagcaaaaaacaacatcaaacagaacatagtaaatatatctgtaatgtatacttttttctactttgggactgcatcatccacatagcttcttttctgtcctctagacaagggctccaggagtaagtggcagatttggttctgagagctaagctcaccaacttgtctccccctcaacagatgagggaagggcagggagcccgttcagtgactcctggcgctgcagaatcactcatctttggaggtgagcagagagagctctgaggagtttccttcttgcaactcaggcggagctttctttaactcaggagcagcctccattgctcccgccaacccctcaccatggccccttgtccccttgtcccaaccatagcatagagatgacaagagagaggcagtcctatttctgagactggaccaattaaaatgactgcactggctcaaaggactctgaacctgtcttgtcctgggtcctccagttgttggaagccactcttttccccaaccatgctgaaatgccacctttaccacacactgatgtcttacatagacttagatctatttctggaacttctcttctcttcgcttacttgggtgtctcatctggcaccagccatacaattttaactattgtcaatttctaatgtcttattatgtggtgggatgagtcccttcactcttcttttacaaaatttcctagttattctctcacatctattcttccacataaactttaaattgtgcccagtcctccaccccctgtcccattcccacccccaaattctgggctctgtcattccctgtgccatcatcttccccccattgtaattactgtccactcagggctgtgaaatagactatgttctgtaaagagggacaaaaagggcatcctgatcttgagagaagcctgctgttcctcccatcatttcacctgccccctaagcccaggagttgtcatgagaggtcaccaggcccccactcaatctcagcttgggaaccaaagtcacccaccttggttgtgttggggtggacccgccatctgtccctggtccagacgagaaagaggagtctctcctaggcctggagctgggaaagaatgtgtggcccagttgtctgcacttctaattctcatcatggagaaacctttattcctatctccctttcctgaactggttttttgttgtttttgtttcattttgttttggggggatagtttcttgctctttaatttggagtctccagtacctttgggatgcaggcagttcttgcctgggccttctcggaaccctcactcccctagcccactcttgcgctacctgcaggaggctgccaacctggtgcattctgacaagcctcccacccaaatctctctcctgccattgtgtccaaaatcccaccattagaggctcttgtagggaagagcgtttcttgaaggcttttaggccttccagagccaggagggaagtcagacaatagcaggaagtccccaggccttttcaaagttccaaaccaagctctcctgattttaatgtagagatcataccaacccaggtgggggaggagggtccccagccccaggcagcagccatcaccccctccactgaaaacaatattggaggctgctttgggactgcccttctcagccccctaagtctgttttgtaatgcctgtggtgctctccctcctggacctttcctctcgggggtcaccacactttgctaactcttgtgtgcacatattttataatagagtagcgagggaatggtgccgcctccagcttccgtaagctgcccgggctctggggggctctgggacaatcggggctgggaagtgactgtgctcttattgtacactctttatttctctgtatctttggcttgtgctctttgtaattaatgggatttgtctgccttttcaacactatactgagcaataacaataaatgcacacgtggaaatgca

SEQ ID NO: 330 - DNA, 2437 bp, Homo Sapiens
ctgcaatggcggctctagactccctgtcgctcttcactagcctcggcctgagcgagcagaaggcccgcgagacgctcaagaactcggctctgagcgcgcagctgcgcgaggccgctactcaggctcagcagaccctgggttccaccattgacaaagctaccgggatcctgttatatggcttggcctcccgactcagggatacccggcgtctctccttccttgtaagctacatagccagtaagaagatccacactgagccccagctaagcgctgcccttgagtatgtgcggagtcaccccttggaccccatcgacactgtggacttcgagcgggaatgtggcgtgggtgtcattgtgaccccagagcagattgaggaggctgtggaggctgctattaacaggcaccggccccagctcctggtggaacgttaccatttcaacatggggctgctgatgggagaggctcgggctgtgctgaagtgggcagatggcaaaatgatcaagaatgaagtggacatgcaggtcctccaccttctgggccccaagttggaggctgatctggagaagaagttcaaggtggcaaaagctcggctagaagaaacagaccggaggacggcaaaggatgtggtggagaatggcgagactgctgaccagaccctgtctctgatggagcagctccggggggaggcccttaagttccacaagcctggtgagaactacaagaccccaggctatgtggtcactccacacaccatgaatctactaaagcagcacctggagattactggtgggcaggtacgtacccggttcccgccagaacccaatggaatcctgcatattggacatgccaaagccatcaatttcaactttggctatgccaaggccaacaatggcatctgttttctgcgttttgatgacaccaaccctgagaaggaggaagcaaagttcttcacggccatctgtgacatggtagcctggctaggctacacaccttacaaagtcacatatgcgtctgactattttgaccagctatatgcgtgggctgtggagctcatccgcaggggtctggcttatgtgtgccaccagcgaggagaggagctcaaaggccataatactctgccttcaccctggagagaccgtcccatggaggagtcactgctgctctttgaggcaatgcgcaagggcaagttttcagagggcgaggccacactacggatgaagctggtgatggaggatggcaagatggaccctgtagcctatcgagtcaagtatacaccacaccaccgcacaggggacaaatggtgcatctatcccacctacgactacacacactgcctctgtgactccatcgagcacatcactcactcactctgcaccaaggaattccaggcccgacgctcttcctacttctggctttgcaatgcactggacgtctattgccctgtgcagtgggagtatggccgcctcaacctgcactatgctgttgtctctaagaggaagatcctccagcttgtagcaactggtgctgtgcgggactgggatgacccacggctctttacactcacggccctgcgacggcggggcttcccacctgaggccatcaacaacttctgtgcccgggtgggagtgactgtggcacaaaccacaatggagccacatcttctagaagcctgtgtgcgtgatgtgctgaatgacacagccccacgagccatggctgtgctggagtcactacgggtcatcatcaccaactttcctgctgccaagtccttggacatccaggtgcccaacttcccagctgatgagaccaaaggcttccatcaggttccctttgcacccattgtcttcattgagaggactgacttcaaggaggagccagagccaggatttaagcgcctggcttggggccagcctgtgggcctgaggcatacaggctacgtcattgagctgcagcatgttgtcaagggccccagtggttgtgtagagagtctggaggtgacctgcagacgggcagatgctggagagaagccaaaggcctttattcactgggtgtcacagcctttgatgtgtgaggttcgcctctatgagcgactattccagcacaagaaccctgaagatcctactgaggtgcctggtggatttttaagtgacctgaacctggcatcactacacgtggtggatgcagcattagtggactgctctgtggccctggcaaaacccttcgacaagttccagtttgagcgtcttggatatttctccgtggatccagacagccatcagggaaagcttgtctttaaccgaactgtcacactgaaggaagacccaggaaaggtgtgagctggaagcactgaacctacctcatcctcctggagggtgtggctaccctcgccaccccaaattccatgtcaataaagaacagctaaattctcctagaaaaaaaa

SEQ ID NO: 331 - DNA, 3778 bp, Homo Sapiens
agcagcgggggcggccccgggactgagccggcatccctgagcctggctcccctccctgcgaccgccgtcacctccttctccttccttttccctccgccctccgtgccctgaggaaaggcgcgctcctccccttcccctggggcgctccgccggggcctcctcccgggcctccgttcccgccgcggccccggttccggcgggggcagcctccgggttcggggctccttctcctggggacgctggggcttagcttgctccgcgcagaggcggccgccctcccccaaagaaaaaactggctgcttctaagtgcgaagccggctgggcgggctggtgccagaaagggtgtgtcttcactgccctaagatggcctttaaggttggacgtgataagtatgagcctgcagctgtttcagaacaaggtgataaaaagggcaaaaagggcaaaaaagacagggacatggatgaactgaagaaagaagtttctatggatgatcataaacttagccttgatgaacttcatcgtaaatatggaacagacttgagccggggattaacatctgctcgtgcagctgagatcctggcgcgagatggtcccaacgccctcactccccctcccactactcctgaatggatcaagttttgtcggcagctctttggggggttctcaatgttactgtggattggagcgattctttgtttcttggcttatagcatccaagctgctacagaagaggaacctcaaaacgataatctgtacctgggtgtggtgctatcagccgttgtaatcataactggttgcttctcctactatcaagaagctaaaagttcaaagatcatggaatccttcaaaaacatggtccctcagcaagcccttgtgattcgaaatggtgagaaaatgagcataaatgcggaggaagttgtggttggggatctggtggaagtaaaaggaggagaccgaattcctgctgacctcagaatcatatctgcaaatggctgcaaggtggataactcctcgctcactggtgaatcagaaccccagactaggtctccagatttcacaaatgaaaaccccctggagacgaggaacattgccttcttttcaaccaattgtgttgaaggcaccgcacgtggtattgttgtctacactggggatcgcactgtgatgggaagaattgccacacttgcttctgggctggaaggaggccagacccccattgctgcagaaattgaacattttatccacatcatcacgggtgtggctgtgttcctgggtgtgtctttcttcatcctttctctcatccttgagtacacctggcttgaggctgtcatcttcctcatcggtatcatcgtagccaatgtgccggaaggtttgctggccactgtcacggtctgtctgacacttactgccaaacgcatggcaaggaaaaactgcttagtgaagaacttagaagctgtggagaccttggggtccacgtccaccatctgctctgataaaactggaactctgactcagaaccggatgacagtggcccacatgtggtttgacaatcaaatccatgaagctgatacgacagagaatcagagtggtgtctcttttgacaagacttcagctacctggcttgctctgtccagaattgcaggtctttgtaacagggcagtgtttcaggctaaccaggaaaacctacctattcttaagcgggcagttgcaggagatgcctctgagtcagcactcttaaagtgcatagagctgtgctgtggttccgtgaaggagatgagagaaagatacgccaaaatcgtcgagatacccttcaactccaccaacaagtaccagttgtctattcataagaaccccaacacatcggagccccaacacctgttggtgatgaagggcgccccagaaaggatcctagaccgttgcagctctatcctcctccacggcaaggagcagcccctggatgaggagctgaaagacgcctttcagaacgcctatttggagctggggggcctcggagaacgagtcctaggtttctgccacctctttctgccagatgaacagtttcctgaagggttccagtttgacactgacgatgtgaatttccctatcgataatctgtgctttgttgggctcatctccatgattgaccctccacgggcggccgttcctgatgccgtgggcaaatgtcgaagtgctggaattaaggtcatcatggtcacaggagaccatccaatcacagctaaagctattgccaaaggtgtgggcatcatctcagaaggcaatgagaccgtggaagacattgctgcccgcctcaacatcccagtcagccaggtgaaccccagggatgccaaggcctgcgtagtacacggcagtgatctaaaggacatgacctccgagcagctggatgacattttgaagtaccacactgagatagtgtttgccaggacctcccctcagcagaagctcatcattgtggaaggctgccaaagacagggtgctatcgtggctgtgactggtgacggtgtgaatgactctccagctttgaagaaagcagacattggggttgctatggggattgctggctcagatgtgtccaagcaagctgctgacatgattcttctggatgacaactttgcctcaattgtgactggagtagaggaaggtcgtctgatctttgataacttgaagaaatccattgcttataccttaaccagtaacattcccgagatcaccccgttcctgatatttattattgcaaacattccactaccactggggactgtcaccatcctctgcattgacttgggcactgacatggttcctgccatctccctggcttatgagcaggctgagagtgacatcatgaagagacagcccagaaatcccaaaacagacaaacttgtgaatgagcggctgatcagcatggcctatgggcagattggaatgatccaggccctgggaggcttctttacttactttgtgattctggctgagaacggcttcctcccaattcacctgttgggcctccgagtggactgggatgaccgctggatcaacgatgtggaagacagctacgggcagcagtggacctatgagcagaggaaaatcgtggagttcacctgccacacagccttcttcgtcagtatcgtggtggtgcagtgggccgacttggtcatctgtaagaccaggaggaattcggtcttccagcaggggatgaagaacaagatcttgatatttggcctctttgaagagacagccctggctgctttcctttcctactgccctggaatgggtgttgctcttaggatgtatcccctcaaacctacctggtggttctgtgccttcccctactctcttctcatcttcgtatatgacgaagtcagaaaactcatcatcaggcgacgccctggcggctgggtggagaaggaaacctactattagccccccgtcctgcacgccgtggagcatcaggccacacactctgcatccgacacccaccccctctttgtgtacttcagtcttggagtttggaactctaccctggtaggaaagcaccgcagcatgtggggaagcaagacgtcctggaatgaagcatgtagctctatggggggaggggggagggctgcctgaaaaccatccatctgtggaaatgacagcggggaaggtttttatgtgcctttttgtttttgtaaaaaaggaacacccggaaagactgaaagaatacattttatatctggatttttacaaataaagatggctattataatggaaaaaaaaaaaaaaa

SEQ ID NO: 332 - DNA, 3277 bp, Homo Sapiens
gcgtgctgtgggcggtgccgcgcggacccccgggaagtgtctctgtgggcggccgccgggttgagctgcggcacacgtgcgacggccgtgatgaagttcgcttaccggttttcaaatttgctgggtacggtgtaccggcgtgggaacctaaattttacctgcgatggaaattcagttatcagtcccgtgggcaatagagtcactgtatttgaccttaaaaacaacaaatctgacacgctgcccctggccactcggtacaacgtcaagtgcgtggggctgtccccggatggccgcctcgctatcatcgtcgatgaagggggcgatgcgctgctggtcagcctggtctgcaggtctgtgctgcaccacttccacttcaagggctctgtgcacagtgtgtccttctcccctgatggcaggaagtttgttgtcacaaagggtaacattgcccagatgtatcatgcccctgggaagaagcgggagttcaacgccttcgttctggacaagacctattttgggccctacgatgagaccacctgcatcgactggacggatgactccaggtgctttgtggttgggagcaaagacatgtccacctgggtgttcggagccgagcgctgggacaacctcatctactatgcactggggggacataaggatgccatcgtggcctgcttctttgaatccaacagcctggacctgtactcactcagccaggacggagtgctgtgcatgtggcagtgtgacacgccccccgagggcttgcggctgaagccccctgcgggctggaaagcagacctgttgcagcgggaggaggaagaggaggaggaggaggaccaggagggcgacagagagaccaccatccggggaaaagccactccggccgaggaggagaagacaggaaaagtgaagtactcacggctggccaagtacttcttcaataaagaaggggattttaacaacctgacagctgcagcatttcataagaagtctcacctcttggtcactggctttgcttctggaatcttccatcttcatgagctgccagagtttaacctcatccactccctgagcatttcagatcagagcatcgcctcagtggccatcaatagctcgggggactggattgcttttggctgttcaggcctgggccagctgctggtgtgggagtggcagagtgagtcctacgtgctcaagcagcagggccacttcaacagcatggtggccctggcctactcgcccgacggacagtacatcgtgactggcggggacgacggcaaggtcaaggtgtggaacaccctcagcggcttctgcttcgtcacttttacggagcactccagcggggtgaccggtgtgacctttactgccaccggctacgttgtggtgacctcatccatggacgggaccgtgcgagcctttgaccttcacaggtaccgaaacttccgcaccttcacctctccacgccccacccagttctcctgtgtggcggtggatgcgagcggtgagatcgtctctgcaggggcgcaggactcctttgagattttcgtgtggtccatgcagacaggcaggctccttgatgttttgtctggacacgaagggcccatcagtggtctgtgttttaacccaatgaagtccgtcctggccagtgcctcctgggacaagacagtgcgcctatgggacatgtttgacagctggaggaccaaggagacgctggccctgacctctgatgctctggctgtgacttttcgccctgatggtgcggagctggctgtggccacactgaactcacagatcaccttctgggaccctgagaacgcggtgcagacgggctccattgagggcaggcatgacctcaagactggcaggaaggagctggacaagattacagccaagcacgcggccaaggggaaggccttcaccgccctgtgctactctgcagacggccacagcatcctggcgggaggcatgtccaagttcgtgtgcatctaccacgtccgtgagcagattctcatgaagaggttcgagatctcttgcaacctgtctttggacgccatggaggaatttttgaaccgaagaaaaatgacagagtttggcaacctggcactaattgatcaggatgctgggcaggaggatggagtcgcgataccactgccaggcgtcaggaaaggtgacatgagttctcggcacttcaaacctgagatcagggtgacctcactccgcttctctcccactgggcgctgctgggcggccaccaccacggagggactcctcatctactccctggacacccgcgtgctctttgacccgtttgagctggacaccagcgtcacccccgggagggtgcgcgaggcactgcgccagcaggacttcaccagggccatcctcatggccctccggctcaacgagagcaaactggtgcaggaggccctggaggcggtgcccaggggcgagattgaagtggtcacctcctcccttcctgaactgtatgtggagaaagtgctggagtttttagcttcctcctttgaagtgtctcgccacctggaattctacctcctctggactcacaaactgctcatgttgcacggacagaagctgaagtccagagccgggacgctgctgcctgtcattcagttcctccagaagagcatccagcggcacctggacgacctgtcgaaactctgtagctggaaccactataacatgcagtacgcactagcagtttccaagcagcggggcacaaaacgctccctagacccgctgggaagtgaggaggaggcagaagcatctgaagatgacagcctgcatctgcttggaggaggaggcagagactcagaagaagagatgctggcctagagccagccggttgcagcgttggattgtgccggctaagacctgccagggagatgggacccttgtgccacctgggccagcaaagaggaggggtccagagaacagctgaaatactgtcactagtggtagtgacttgcttttcctgtgcacacatgtagcccatcaggacagcgagccgacgggtcacgccaggggccggcacgcactggcacctggccccaggagcggggccgtgtgaacggtgatgaatgttgaaaatgcgtctcagagaggtattcacatgaactttgtatgagacttatttatatctttaacataaaggtttgataaagaacttagggattaaaaaaaagatggagttttctaacgtgaggatgaagtctacacttcagattaaaaagggttatgttgtaaaaaaaaaaaaaaaaaa

SEQ ID NO: 333 - DNA, 2587 bp, Homo Sapiens
ggtaggtggcgcgcgggtccggcgggcggttggcttgagcgggaccggagctgaggcaggaagagccggcgccatggtggagaaggaggaggctggcggcggcattagcgaggaggaggcggcacagtatgaccggcagatccgcctgtggggactggaggcccagaaacggtcagggccggcgcggcttgaggccgctagggtctggagggggcgtctattctgaggcgtttgcggcccggaaggagcgggaaggctgcgggcctctcgggtgcttcttgtcggcttgaaaggacttggggctgaaattgccaagaatctcatcttggcaggagtgaaaggactgaccatgctggatcacgaacaggtaactccagaagatcccggagctcagttcttgattcgtactgggtctgttggccgaaatagggctgaagcctctttggagcgagctcagaatctcaaccccatggtggatgtgaaggtggacactgaggatatagagaagaaaccagagtcatttttcactcaattcgatgctgtgtgtctgacttgctgctccagggatgtcatagttaaagttgaccagatctgtcacaaaaatagcatcaagttctttacaggagatgtttttggctaccatggatacacatttgccaatctaggagagcatgagtttgtagaggagaaaactaaagttgccaaagttagccaaggagtagaagatgggcccgacaccaagagagcaaaacttgattcttctgagacaacgatggtcaaaaagaaggtggtcttctgccctgttaaagaagccctggaggtggactggagcagtgagaaagcaaaggctgctctgaagcgcacgacctccgactactttctccttcaagtgctcttaaagttccgtacagataaaggaagagatcccagttctgatacatatgaggaagattctgagttgttgctccagatacgaaatgatgtgcttgactcactgggtattagtcctgacctgcttcctgaggactttgtcaggtactgcttctccgagatggccccagtgtgtgcggtggttggagggattttggcacaggaaattgtgaaggccctgtctcagcgggaccctcctcacaacaacttcttcttcttcgatggcatgaaggggaatgggattgtggagtgccttggccccaagtgaactcaagatttggcagccccagagatgccaactgcagcatgcccacctgtattccctgtccccttccttcatgaaggcatctccaggcaaggaaaactgaagtcattggcccgatacaaaacatttcctgcaacgaaggaggtggtgccgacgtgctgcttcccatcaccagcagctgctcgacaaggggcgcagggtggctgtctttgttccagcactgttcaggctgcctgtcatcccgggcctgccagctcccctgagtgatgagcacttccaagcacccctctgccctttctctgtccttatgctgtcccggcctcgccagccctctggggcattgtgggagatgcctgccaggaatgagcaagctctgttgctcgggagcctcttgtcaccttcttggacttattccccacctgataccttatagagaaaagtgtgaattcaggtggagagtaggcccaggccccatgaggcaccagtggaagcacagctccaagttcagacaggtgcccttagagaggaaaaccatgacaggcaaatgcatttcctctggagtttgagaccctgacaaacaacaggtggcatctggtgtgctgttcttgagttttcgtttaggattagttgagttccagctgggttttgggagaaaggagatgctaccaagtcttggatgttagggcgagaccctgcaagttgagtattagagagcttgtctttcaaggcaggttcctggggcttcagggctaggagggaggagcctgcccttttaacagaaccccagtcacatgcggctcaagtcactcagaggctgttgcatttcagggctatgttggtcctttgtttacctcctaaaccacagctgtttgtgtttcacatatgttgtgaattttccttggttctttttaaaggaatgataataaagttacttgctttaggatttgcttgtttttcttccacttcagaagcttctgagagggaatgggatgatcctaccagttgccttttcagacctgaggctctaactcaagagattcctcctctccctcaccattcctgccaccattttttctgggtgatgcagcaagagttaaattgttcacattctagaatgtgtagaagcttctggctccagttgtctaatggataattcagctaaatagtggctattttcagtggcaagaattataataataaagggaagtcaaaagtgatgcttcatatgccccaagtgccacagccgctacgggtcagagcttttattggaagaccaggtttgccttgatgcagccaaagtgcgttccagttcaccccactcttgcttgtgtttcttctttatgtaaattgtgtgatgtttcaataaatcagtctctttcctattctgaaaaa

SEQ ID NO: 334 - DNA, 4124 bp, Homo Sapiens
actgctcttccggacgcaattttgaggaggtcggagcggaaggacgtcgtggagattgcttgcgctggggtgccacacttaggctgagctgcaggttttcgcacagtcgcgagttaacctctgcttgctccagaggcctcgtcctaatccacctcggctgacggcgcgggatccctggctccgcgagcctcagcctcaccatgtgtgtcaggagctgtttccagtccccccgtctccagtgggtgtggagaacagccttcctgaaacacacccagcgcaggcaccaggggtcccaccgatggacacaccttggaggcagcacctacagagcggtgattttcgacatgggcggagttctcattccttctccagggagagtcgctgcagaatgggaggtacagaatcgtatcccttctggaactatattaaaggccttgatggaaggtggtgaaaatgggccctggatgagatttatgagagcagaaataacagcagagggttttttacgagaatttgggagactttgctctgaaatgttaaagacctccgtgcctgtggactcatttttctctctgttgaccagtgagcgagtggcaaagcagttcccagtgatgactgaggccataactcaaattcgggcaaaaggtcttcagactgcagtcttgagcaataatttttatcttcccaaccagaaaagctttttgcccctggaccggaaacagtttgatgtgattgtggagtcctgcatggaagggatctgtaagccagaccctaggatctacaagctgtgcttggagcagctcggcctgcagccctctgagtccatctttcttgatgaccttggaacaaatctaaaagaagctgccagacttggtattcacaccattaagagacagggttttgccgtgttgcccaagctggtgtcgaactcctgggctcaagcgatctacccaccttaccctcccaaagtggtgagattacaggttaatgacccagagactgcagtaaaggaattagaagctctcttgggttttacattgagagtaggtgttccaaacactcggcctgtgaaaaagacgatggaaattccgaaagattccttgcagaagtacctcaaagacttactgggtatccagaccacaggcccattggaactacttcagtttgatcacgggcagtcaaatccaacttactacatcaggctggctaatcgtgatctagttctgaggaagaagcccccagggacactccttccatctgcccatgccatagagagggagttcaggattatgaaagcccttgcaaatgctggagtacctgtccctaacgttcttgatctctgtgaagattcaagtgtcattggcacccccttctatgtgatggagtactgcccaggtctcatctacaaagacccttccctgccaggcttggagcccagccacagacgagccatatacactgccatgaacacagtcctgtgcaaaattcacagtgtggatctgcaggctgtgggacttgaagactatgggaagcaaggggactatattccacgccaggtacgaacctgggttaagcagtatcgagcttccgaaactagcaccatcccagccatggagaggctgatcgaatggctgcccctccatcttccccgtcagcagaggaccacagtggtgcacggggacttcaggctcgacaacctggtgtttcatccagaagagccagaggtgcttgctgtccttgactgggaactttctaccttgggcgacccccttgctgatgtggcctacagctgcctggctcattacctgccatccagttttcccgtgctgagaggtattaatgactgtgacttgacacagctgggaatccctgctgcagaggagtatttcaggatgtactgtctccaaatggggctccctcccactgagaactggaacttctatatggctttttcctttttccgtgtggctgcaatcctacagggagtctacaagcgatcactcacagggcaagcaagctccacatatgcggaacaaactggaaagctgaccgaatttgtgtctaacctggcgtgggatttcgcagtcaaagaagggttccgggttttcaaagagatgcccttcacaaatccgttaacaaggtcctaccacacgtgggccaggccccagtcccagtggtgccccacaggcagcaggagttatagctccgttccagaagcttccccagctcatacctcaaggggaggtctggttatctctccagagagcctctctccacctgtcagagagctgtatcaccggctgaagcacttcatggagcaacgtgtgtaccctgcagagccagagctgcagagtcaccaggcctcagcagccaggtggagcccctccccactgatcgaagacctcaaggagaaagccaaagctgaaggactttggaaccttttcctacccttagaggctgatcccgagaaaaaatacggagcaggactgaccaatgtggaatatgcacatctgtgtgagctcatgggcacgtccctgtatgcccccgaggtatgtaactgctctgcgcctgacacgggcaacatggagctgctggtgaggtatggcaccgaagcgcagaaggctcgctggctgattcctctgctggaggggaaagcccgctcctgttttgctatgaccgagccccaggttgcctcttcagatgccaccaacattgaggcttccatcagagaggaggacagcttctatgtcataaacggtcacaaatggtggatcacaggcatcctggatcctcgttgccaactctgtgtgtttatgggaaaaacagacccacatgcaccaagacaccggcagcagtctgtgctcttggttcccatggataccccagggataaaaatcatccggcctctgacggtgtatggactggaagatgcaccaggtggccatggtgaagtccgatttgagcacgtgcgtgtgcccaaagagaacatggtcctgggccctggccgaggctttgagatcgcccagggcagactgggccccggcaggatccatcactgcatgaggctgatcgggttctcagagagggccctggcactcatgaaggcccgcgtgaagtcccgcttggcttttgggaagcccctggtggagcagggcacagtgctggcggacatcgcgcagtcgcgcgtggagattgagcaggcacggctgctggtgctgagagctgcccacctcatggacctggcaggaaacaaggctgcagccttggatatagccatgattaaaatggtcgccccgtccatggcctcccgagtgattgatcgtgcgattcaggcctttggagcagcaggcctgagcagcgactacccactggctcagttcttcacctgggcccgagccctgcgctttgccgacggccctgacgaggtgcaccgggccacggtggccaagctagagctgaagcaccgcatttagagccttggggctgcagtggctcaatgtcctggctggtccagctgtgcccagatctgtcactgatgtgcctcgaaagatccggtgtttgtggctcctgcaccctgctcagcagctctgtcccgggacagtcagggtggactcaatctttctggttctccacagaagacgtctctgcaagaagcctggagtctgtttcaggccaggaggaggggatttgctgagggccaagggggttctgggacagagtctggaaagctggtcttcaggctctcagtcccaggctgggcaggcacggtcacttcacttcagcctttcagtccctctctctctgcctgtgggaatctggacacattttgggaggcctcccaaggctgtgggacgtgcttgctctggcagctgcagggttcctgtctggcctccctggtgagcagaggggcggccacggcgggcggtggcctagagacccaggacctgggcgcctgggaaaatggaatgcaacccacattgtaaagccactggcatctgattatctccatttgaacacacagcacagaacaatcatttaaatgttattttggaaaggggttttggggacacagaagaataagtaaacacatctcggaggctttgtggaaaaaaaaaaaaaaaaaa

SEQ ID NO: 335 - DNA, 2136 bp, Homo Sapiens
gtgtgtggaggggaccctgtggttagcagcagctatcgcagcgtcggatgttcagagcagcagaagccggcgtcgtcggatgttgtgttgcccgccaccatgagctacacaggctttgtccagggatctgaaaccactttgcagtcgacatactcggataccagcgctcagcccacctgtgattatggatatggaacttggaactctgggacaaatagaggctacgagggctatggctatggctatggctatggccaggataacaccaccaactatgggtatggtatggccacttcacactcttgggaaatgcctagctctgacacaaatgcaaacactagtgcctcgggtagcgccagtgccgattccgttttatccagaattaaccagcgcttagatatggtgccgcatttggagacagacatgatgcaaggaggcgtgtacggctcaggtggagaaaggtatgactcttatgagtcctgcgactcgagggccgtcctgagtgagcgcgacctgtaccggtcaggctatgactacagcgagcttgaccctgagatggaaatggcctatgagggccaatacgatgcctaccgcgaccagttccgcatgcgtggcaacgacaccttcggtcccagggcacagggctgggcccgggatgcccggagcggccggccaatggcctcaggctatgggcgcatgtgggaagaccccatgggggcccggggccagtgcatgtctggtgcctctcggctgccctccctcttctcccagaacatcatccccgagtacggcatgttccagggcatgcgaggtgggggcgccttcccgggcggctcccgctttggtttcgggtttggcaatggcatgaagcagatgaggcggacctggaagacctggaccacagccgacttccgaaccaagaagaagaagagaaagcagggcggcagtcctgatgagccagatagcaaagccacccgcacggactgctcggacaacagcgactcagacaatgatgagggcaccgagggggaagccacagagggccttgaaggcaccgaggctgtggagaagggctccagagtggacggagaggatgaggagggaaaagaggatgggagagaagaaggcaaagaggatccagagaagggggccctaaccacccaggatgaaaatggccagaccaagcgcaagttgcaggcaggcaagaagagtcaggacaagcagaaaaagcggcagcgagaccgcatggtggaaaggatccagtttgtgtgttctctgtgcaaataccggaccttctatgaggacgagatggccagccatcttgacagcaagttccacaaggaacactttaagtacgtaggcaccaagctccctaagcagacggctgactttctgcaggagtacgtcactaacaagaccaagaagacagaggagctccgaaaaaccgtggaggaccttgatggcctcatccaccaaatctacagagaccaggatctgacccaggaaattgccatggagcattttgtgaagaaggtggaggcagcccattgtgcagcctgcgacctcttcattcccatgcagtttgggatcatccagaagcatctgaagaccatggatcacaaccggaaccgcaggctcatgatggagcagtccaagaagtcctccctcatggtggcccgcagtattctcaacaacaagctcatcagcaagaagctggagcgctacctgaagggcgagaaccctttcaccgacagccccgaggaggagaaggagcaggaggaggctgagggcggtgccctggacgagggggcgcagggcgaagcggcagggatctcggagggcgcagagggcgtgccggcgcagcctcccgtgcccccagagccagcccccggggccgtgtcgccgccaccgccgccgcccccagaggaggaggaggagggcgccgtgcccttgctgggaggggcgctgcaacgccagatccgcggcatcccgggcctcgacgtggaggacgacgaggagggcggcgggggcgccccgtgacccgagctcggggcgggcggagcccgcgtggccgaagctggaaaccaaacctaataaagttttcccatcccaccaaaaaaaaaaaaaaaaaaaaaa

SEQ ID NO: 336 - DNA, 1675 bp, Homo Sapiens
ctccgacccgccccgcggcgcattgtgggatctgtcggcttgtcaggtggtggaggaaaaggcgctccgtcatggggatccagacgagccccgtcctgctggcctccctgggggtggggctggtcactctgctcggcctggctgtgggctcctacttggttcggaggtcccgccggcctcaggtcactctcctggaccccaatgaaaagtacctgctacgactgctagacaagacgactgtgagccacaacaccaagaggttccgctttgccctgcccaccgcccaccacactctggggctgcctgtgggcaaacatatctacctctccacccgaattgatggcagcctggtcatcaggccatacactcctgtcaccagtgatgaggatcaaggctatgtggatcttgtcatcaaggtctacctgaagggtgtgcaccccaaatttcctgagggagggaagatgtctcagtacctggatagcctgaaggttggggatgtggtggagtttcgggggccaagcgggttgctcacttacactggaaaagggcattttaacattcagcccaacaagaaatctccaccagaaccccgagtggcgaagaaactgggaatgattgccggcgggacaggaatcaccccaatgctacagctgatccgggccatcctgaaagtccctgaagatccaacccagtgctttctgctttttgccaaccagacagaaaaggatatcatcttgcgggaggacttagaggaactgcaggcccgctatcccaatcgctttaagctctggttcactctggatcatcccccaaaagattgggcctacagcaagggctttgtgactgccgacatgatccgggaacacctgcccgctccaggggatgatgtgctggtactgctttgtgggccacccccaatggtgcagctggcctgccatcccaacttggacaaactgggctactcacaaaagatgcgattcacctactgagcatcctccagcttccctggtgctgttcgctgcagttgttccccatcagtactcaagcactataagccttagattcctttcctcagagtttcaggttttttcagttacatctagagctgaaatctggatagtacctgcaggaacaatattcctgtagccatggaagagggccaaggctcagtcactccttggatggcctcctaaatctccccgtggcaacaggtccaggagaggcccatggagcagtctcttccatggagtaagaaggaagggagcatgtacgcttggtccaagattggctagttccttgatagcatcttactctcaccttctttgtgtctgtgatgaaaggaacagtctgtgcaatgggttttacttaaacttcactgttcaacctatgagcaaatctgtatgtgtgagtataagttgagcatagcatacttccagaggtggtcttatggagatggcaagaaaggaggaaatgatttcttcagatctcaaaggagtctgaaatatcatatttctgtgtgtgtctctctcagcccctgcccaggctagagggaaacagctactgataatcgaaaactgctgtttgtggcaggaacccctggctgtgcaaataaatggggctgaggcccctgtgtgatattgaaaaaaaaaaaaaaaaaaaaaaaaaaaaaaaaaaa

SEQ ID NO: 337 - DNA, 1720 bp, Homo Sapiens
agtccctcccctcagcctttccccaaattgctacttctctggggctccaggtcctgcttgtgctcagctccagctcactggctggccaccgagacttctggacaggaaactgcaccatcctcttctcccagcaagggggctccagagactgcccacccaggaagtctggtggcctggggatttggacagtgccttggtaatgaccagggctccaggaagagatgtccttgtggctgggggcccctgtgcctgacattcctcctgactctgcggtggagctgtggaagccaggcgcacaggatgcaagcagccaggcccagggaggcagcagctgcatcctcagagaggaagccaggatgccccactctgctgggggtactgcaggggtggggctggaggctgcagagcccacagccctgctcaccagggcagagcccccttcagaacccacagagatccgtccacaaaagcggaaaaaggggccagcccccaaaatgctggggaacgagctatgcagcgtgtgtggggacaaggcctcgggcttccactacaatgttctgagctgcgagggctgcaagggattcttccgccgcagcgtcatcaagggagcgcactacatctgccacagtggcggccactgccccatggacacctacatgcgtcgcaagtgccaggagtgtcggcttcgcaaatgccgtcaggctggcatgcgggaggagtgtgtcctgtcagaagaacagatccgcctgaagaaactgaagcggcaagaggaggaacaggctcatgccacatccttgccccccagggcttcctcacccccccaaatcctgccccagctcagcccggaacaactgggcatgatcgagaagctcgtcgctgcccagcaacagtgtaaccggcgctccttttctgaccggcttcgagtcacgccttggcccatggcaccagatccccatagccgggaggcccgtcagcagcgctttgcccacttcactgagctggccatcgtctctgtgcaggagatagttgactttgctaaacagctacccggcttcctgcagctcagccgggaggaccagattgccctgctgaagacctctgcgatcgaggtgatgcttctggagacatctcggaggtacaaccctgggagtgagagtatcaccttcctcaaggatttcagttataaccgggaagactttgccaaagcagggctgcaagtggaattcatcaaccccatcttcgagttctccagggccatgaatgagctgcaactcaatgatgccgagtttgccttgctcattgctatcagcatcttctctgcagaccggcccaacgtgcaggaccagctccaggtagagaggctgcagcacacatatgtggaagccctgcatgcctacgtctccatccaccatccccatgaccgactgatgttcccacggatgctaatgaaactggtgagcctccggaccctgagcagcgtccactcagagcaagtgtttgcactgcgtctgcaggacaaaaagctcccaccgctgctctctgagatctgggatgtgcacgaatgactgttctgtccccatattttctgttttcttggccggatggctgaggcctggtggctgcctcctagaagtggaacagactgagaagggcaaacattcctgggagctgggcaaggagatcctcccgtggcattaaaagagagtcaaagggttgcgaa

SEQ ID NO: 338 - DNA, 1950 bp, Homo Sapiens
tctggcattgcaagcctcgcttcgttgccacttcccagctcttcccgccttccgcggtataatcaacactacgagagatagagccgcctagaaccagtccggaggctgcggctgcagaagtaccgcctgcggagtaactgcaaagatgctgtccgtgcgcgttgctgcggccgtggtccgcgcccttcctcggcgggccggactggtctccagaaatgctttgggttcatctttcattgctgcaaggaacttccatgcctctaacactcatcttcaaaagactgggactgctgagatgtcctctattcttgaagagcgtattcttggagctgatacctctgttgatcttgaagaaactgggcgtgtcttaagtattggtgatggtattgcccgcgtacatgggctgaggaatgttcaagcagaagaaatggtagagttttcttcaggcttaaagggtatgtccttgaacttggaacctgacaatgttggtgttgtcgtgtttggaaatgataaactaattaaggaaggagatatagtgaagaggacaggagccattgtggacgttccagttggtgaggagctgttgggtcgtgtagttgatgcccttggtaatgctattgatggaaagggtccaattggttccaagacgcgtaggcgagttggtctgaaagcccccggtatcattcctcgaatttcagtgcgggaaccaatgcagactggcattaaggctgtggatagcttggtgccaattggtcgtggtcagcgtgaactgattattggtgaccgacagactgggaaaacctcaattgctattgacacaatcattaaccagaaacgtttcaatgatggatctgatgaaaagaagaagctgtactgtatttatgttgctattggtcaaaagagatccactgttgcccagttggtgaagagacttacagatgcagatgccatgaagtacaccattgtggtgtcggctacggcctcggatgctgccccacttcagtacctggctccttactctggctgttccatgggagagtattttagagacaatggcaaacatgctttgatcatctatgacgacttatccaaacaggctgttgcttaccgtcagatgtctctgttgctccgccgaccccctggtcgtgaggcctatcctggtgatgtgttctacctacactcccggttgctggagagagcagccaaaatgaacgatgcttttggtggtggctccttgactgctttgccagtcatagaaacacaggctggtgatgtgtctgcttacattccaacaaatgtcatttccatcactgacggacagatcttcttggaaacagaattgttctacaaaggtatccgccctgcaattaacgttggtctgtctgtatctcgtgtcggatccgctgcccaaaccagggctatgaagcaggtagcaggtaccatgaagctggaattggctcagtatcgtgaggttgctgcttttgcccagttcggttctgacctcgatgctgccactcaacaacttttgagtcgtggcgtgcgtctaactgagttgctgaagcaaggacagtattctcccatggctattgaagaacaagtggctgttatctatgcgggtgtaaggggatatcttgataaactggagcccagcaagattacaaagtttgagaatgctttcttgtctcatgtcgtcagccagcaccaagccttgttgggcactatcagggctgatggaaagatctcagaacaatcagatgcaaagctgaaagagattgtaacaaatttcttggctggatttgaagcttaaactcctgtggattcacatcaaataccagttcagttttgtcattgttctagtaaattagttccatttgtaaaagggttactctcatactccttatgtacagaaatcacatgaaaaataaaggttccataatgcatagttaaaaa

SEQ ID NO: 339 - DNA, 3401 bp, Homo Sapiens
gcggggacggcgacgcggcgcaggcggcgggagtgcgagctgggcccgtgtttcggccgccgccatggccgcggtggacctggagaagctgcgggcgtcgggcgcgggcaaggccatcggcgtcctgaccagcggcggcgacgcgcaaggtcccctgacaagcccaccaggccccctgctgagatggctgtgaccctgggctgacccgcccagtggcacattgactccgcctggagctggggagaccagagaggccctgtggttggacggtggcctgggtgcgctgctcctgccctctccttgccctgcctcagctgctgcctgccagaggcgtggcacctcacctcacacctgctccctgctgctgagccccacgccaagctggagagcggatgagaagcatgtgtaaccagggtagaggtcgagagtcctctcgtgggggtctccatgttcaagggagctgccgaggcttgagcaggagcccccagcaggaaactggctttgccaaggcccccgctgggacagactgtttctttcactgcagtcctgggagccgagggcaaggggacaggaaagaggaagtgacctcagagcctggtggcaccagcatcatgtccaggctggggggcatgaacgctgctgtccgggctgtgacgcgcatgggcatttatgtgggtgccaaagtcttcctcatctacgagggctatgagggcctcgtggagggaggtgagaacatcaagcaggccaactggctgagcgtctccaacatcatccagctgggcggcactatcattggcagcgctcgctgcaaggcctttaccaccagggaggggcgccgggcagcggcctacaacctggtccagcacggcatcaccaacctgtgcgtcatcggcggggatggcagcctcacaggtgccaacatcttccgcagcgagtggggcagcctgctggaggagctggtggcggaaggtaagatctcagagactacagcccggacctactcgcacctgaacatcgcgggcctagtgggctccatcgataacgacttctgcggcaccgacatgaccatcggcacggactcggccctccaccgcatcatggaggtcatcgatgccatcaccaccactgcccagagccaccagaggaccttcgtgctggaagtgatgggccggcactgcgggtacctggcgctggtatctgcactggcctcaggggccgactggctgttcatccccgaggctccacccgaggacggctgggagaacttcatgtgtgagaggctgggtgagactcggagccgtgggtcccgactgaacatcatcatcatcgctgagggtgccattgaccgcaacgggaagcccatctcgtccagctacgtgaaggacctggtggttcagaggctgggcttcgacacccgtgtaactgtgctgggccacgtgcagcggggagggacgccctctgccttcgaccggatcctgagcagcaagatgggcatggaggcggtgatggcgctgctggaagccacgcctgacacgccggcctgcgtggtcaccctctcggggaaccagtcagtgcggctgcccctcatggagtgcgtgcagatgaccaaggaagtgcagaaagccatggatgacaagaggtttgacgaggccacccagctccgtggtgggagcttcgagaacaactggaacatttacaagctcctcgcccaccagaagccccccaaggagaagtctaacttctccctggccatcctgaatgtgggggccccggcggctggcatgaatgcggccgtgcgctcggcggtgcggaccggcatctcccatggacacacagtatacgtggtgcacgatggcttcgaaggcctagccaagggtcaggtgcaagaagtaggctggcacgacgtggccggctggttggggcgtggtggctccatgctggggaccaagaggaccctgcccaagggccagctggagtccattgtggagaacatccgcatctatggtattcacgccctgctggtggtcggtgggtttgaggcctatgaaggggtgctgcagctggtggaggctcgcgggcgctacgaggagctctgcatcgtcatgtgtgtcatcccagccaccatcagcaacaacgtccctggcaccgacttcagcctgggctccgacactgctgtaaatgccgccatggagagctgtgaccgcatcaaacagtctgcctcggggaccaagcgccgtgtgttcatcgtggagaccatggggggttactgtggctacctggccaccgtgactggcattgctgtgggggccgacgccgcctacgtcttcgaggaccctttcaacatccacgacttaaaggtcaacgtggagcacatgacggagaagatgaagacagacattcagaggggcctggtgctgcggaacgagaagtgccatgactactacaccacggagttcctgtacaacctgtactcatcagagggcaagggcgtcttcgactgcaggaccaatgtcctgggccacctgcagcagggtggcgctccaaccccctttgaccggaactatgggaccaagctgggggtgaaggccatgctgtggttgtcggagaagctgcgcgaggtttaccgcaagggacgggtgttcgccaatgccccagactcggcctgcgtgatcggcctgaagaagaaggcggtggccttcagccccgtcactgagctcaagaaagacactgatttcgagcaccgcatgccacgggagcagtggtggctgagcctgcggctcatgctgaagatgctggcacaataccgcatcagtatggccgcctacgtgtcaggggagctggagcacgtgacccgccgcaccctgagcatggacaagggcttctgaggccagccatgcccacgcccctccccagcccccacccatgccagcgcagcgccagggctcagatggggcctgggctgttgtgtctggagcctgcaggcaggtgggggctgcgtccctgctcagcccatcccctgcctctatccctggccacctgccaggcctccctcgggctggtgtcttgagaccagcctgccaggccctccagcaggaggacagagtgccctggggcatccaccttcctgcccaggggacgtggcgctgtcggtgtttggaggctgctgccccctggctttggcgccccatgggccctcagcgtctccccatgctgggctcactacatgggccagcccttgctctacctggccggtaggctgctggcgcctaggttgtgttgagagggggatgcccctggccctgcctcactgtgacctgctcctgcccacgtgcagcacctgtcaccttttctagaaataaaatcaccctgactgtggggtgcatcggtctccggagagcaca

SEQ ID NO: 340 - DNA, 858 bp, Homo Sapiens
gacaggaagagaaggaaaaaagagaaggcgctgtcccgctcttgctacggtggcctggaggagtggcgaaaccggaacagagaatttatcacttctgggactcacagtcgtgatgtctttcaagagggaaggagacgattggagtcaactcaatgtgctcaaaaaaagaagagtcggggacctcctagccagttacattccagaggatgaggcgctgatgcttcgggatggacgctttgcttgtgccatctgcccccatcgaccggtactggacaccctggccatgctgactgcccaccgtgcaggcaagaaacatctgtccagcttgcagcttttctatggcaagaagcagccgggaaaggaaagaaagcagaatccaaaacatcagaatgaattgagaagggaagaaaccaaagctgaggctcctctgctaactcagacacgacttatcacccagagtgctctgcacagagctccccactataacagttgctgccgccggaagtacagaccagaagcccctggtccctctgtctccctttcccctatgccaccctcagaggtcaaactccaaagtgggaagatcagtagggaacctgaacctgcggctggcccacaggccgaggagtcagcaactgtctcagcccctgcacccatgagccccacaagaagacgagccctggaccattatctcacccttcgaagctctggatggatcccagatggacgaggtcgatgggtaaaagatgaaaatgttgagtttgactctgatgaggaggaaccacctgatctccccttggactgatacccttttcccattcattcacaaataaattacaatgggtgctgagaacttaa

SEQ ID NO: 341 - DNA, 1402 bp, Homo Sapiens
actgggtgggcgcgtcggaaagaccagggcgcctcagtctggagctcgcagtcgtatggagagggcaggaccagccggggaggagggcggcgcgcgcgagggtcgccttcttcccagggcaccgggggcgtgggtgctgcgggcgtgcgccgagagggcagccttggaagtgggcgcagcttcggcagacacaggcgtgaggggctgcggagctcgagggccggcgcccctgcttgcctctgcgggaggtgggcgcgcccgggacggaacctggggcgtcagaacgaaaggcagcggcgccgcgcttcccagccggccagcctcccgcgcagcgccccggccggaagcctcctcgccgccgcttcctctcgagaaggcgcggggcgggctgtccggcccgcagggcggtcgagcccgcggcgccatggctcacgtcggctcccgcaagcgctcgaggagtcgcagccggtcccggggacgggggtcggaaaagagaaagaagaagagcaggaaagacacctcgaggaactgctcggcctccacatcccaagagagaagcaagcagaaggcccggaggagaacaagatccagctcctcctcctcttcttccagttcttctagctcctcttcttcctcctcgtcctcctcctcttcctccagtgatggccggaagaagcgggggaagtacaaggacaagaggaggaagaagaagaagaagaggaagaagctgaagaagaagggcaaggagaaggcggaagcacagcaggtggaggctctgccgggcccctcgctggaccagtggcaccgatcagctggggaggaagaggatggcccagtcctgacggatgagcagaagtcccgaatccaggccatgaagcccatgaccaaggaggagtgggatgcccggcagagcatcatccgcaaggtggtggaccctgagacggggcgcaccaggcttattaagggagatggcgaggtcctagaggaaatcgtaaccaaagaacgacacagagagatcaacaaggtgggtgtggcccctctgcctgccatccgcccccagctctgtttgtgatgtacccctcctcctgtgtgctttcttccccagcaagccacccgaggggactgcctggccttccagatgcgagctgggttgcttccctgagggcccccgctggccaaggcctgtggacgacgctggcggcccagcctgggcaggtttcagggtgccagtgggaagcctgatgggtgctggtggcctttcccccgtggattggtctctggcccagcccagtctcttctcaggggcagggggtggaggttggggtcaccggcctgcttggcacccccatctgaaagagcagcacttctcagctattaaaggccccctggatagactttcaaa

SEQ ID NO: 342 - DNA, 1853 bp, Homo Sapiens
gagggtctgtggtcctctgatcaacataggctggtgggagtacaggactcgcctcctcagggttccctgtgctgccacttttcagccatggccacaagtgaacagagtatctgccaagcccgggcttccgtgatggtctacgatgacaccagtaagaaatgggtaccaatcaaacctggccagcagggattcagccggatcaacatctaccacaacactgccagcaacaccttcagagtcgttggagtcaagttgcaggatcagcaggttgtgatcaattattcaatcgtgaaagggctgaagtacaatcaggccacgccaaccttccaccagtggcgagatgcccgccaggtctacggcttaaactttgcaagtaaagaagaggcaaccacgttctccaatgcaatgctgtttgccctgaacatcatgaattcccaagaaggaggcccctccagccagcgtcaggtgcagaatggcccctctcctgatgagatggacatccagagaagacaagtgatggagcagcaccagcagcagcgtcaggaatctctagaaagaagaacctcggccacagggcccatcctcccaccaggacatccttcatctgcagccagcgcccccgtctcatgtagtgggcctccaccgccccccccacccccagtcccacctccacccactggggctaccccacctcccccacccccactgccagccggaggagcccaggggtccagccacgacgagagctccatgtcaggactggccgctgccatagctggggccaagctgagaagagtccaacggccagaagacgcatctggaggctccagtcccagtgggacctcaaagtccgatgccaaccgggcaagcagcgggggtggcggaggaggcctcatggaggaaatgaacaaactgctggccaagaggagaaaagcagcctcccagtcagacaagccagccgagaagaaggaagatgaaagccaaatggaagatcctagtacctccccctctccggggacccgagcagccagccagccacctaactcctcagaggctggccggaagccctgggagcggagcaactcggtggagaagcctgtgtcctcgattctgtccagaaccccgtctgtggcaaagagccccgaagctaagagcccccttcagtcgcagcctcactctaggatgaagcctgctgggagcgtgaatgacatggccctggatgccttcgacttggaccggatgaagcaggagatcctagaggaggtggtgagagagctccacaaggtgaaggaggagatcatcgacgccatcaggcaggagctgagtgggatcagcaccacgtaaggggccggcctcgctgcgctgattcgtcgagcccatccggcgacagaggacagccagaagcccagccagccccagactccagtgcaccagagcacgcacaggagcctgggcgcgctgctgtgaaacgtcctgacctgtgatcacacatgacagtgaggaaaccaagtgcaactcctgggtttttttagattctgcctgacacggaacaccaggtctgctcgtcttttttgtgttttatatttgcttatttaaggtacatttctttgggtttctagagacgcccctaagtcacctgcttcattagacggtttccaggttttctcccaggtgacgctgttagcgcctcagctggcggtgacagccggcccagcgtggcgccaccacacaccgcagagctgtccaggcacagctccgtccccagcgctcatggtgttgaaactgtctgtcatgcaccacggtgtctgtgtccacacagtaataaacggtttactgtccgcaaaaaaaaaaaa

SEQ ID NO: 343 - DNA, 6046 bp, Homo Sapiens
gggtggcggggggttgcaagtgggaagcctgctgttcagctgccggggctctccgcctccccccacctgtatgaggctgggtctggggaacctgtgctcagcattccaccccctggagcttgggcttggtcttccctgcgggtccctgcgctgacattcaggcggggagccaggaggcctggcgcgcctccagagcccgccgggggagccgggcgagggttctgggctctgacggcggggtcgcagggtcgcccgcctcctggacacgtctgtaggcctagggaagcctgccggccgggaggtacagagtaggagaagccagatcccagggcggacaacgagaagtcgtcaggctaagaaatggcatttcaaaaggcagtgaaagggacgattcttgttggaggaggtgctcttgcaactgttttaggactttctcagtttgctcattacagaaggaaacaaatgaacctggcctatgttaaagcagcagactgcatttcagaaccagttaacagggagcctccttccagagaagctcagctactgactttgcaaaacacatctgaatttgatatccttgttattggaggaggagcaacaggaagtggctgtgcgctagatgctgtcaccagaggactaaaaacagcccttgtagaaagagatgatttctcatcagggaccagcagcagaagcactaaattgatccatggtggtgtgagatatctgcagaaggccatcatgaagttggatattgagcagtataggatggtaaaagaagcccttcatgagcgtgccaacctgctagaaattgctccccatttatcagctccattgcctataatgcttccagtttacaagtggtggcagttaccttactactgggtaggaatcaagctgtatgatttggttgcaggaagcaattgcctaaaaagcagttatgtcctcagcaaatcaagagcccttgaacatttcccaatgctccagaaggacaaactggtaggagcaattgtctactatgacggacaacataacgatgcacggatgaaccttgccattgctctgactgctgccaggtatggggctgccacagccaattacatggaggtagtgagcttgctcaagaagacagacccccagacagggaaagtgcatgtgagcggcgcacggtgcaaggatgtcctcacagggcaggaatttgacgtgagagccaaatgtgttatcaatgccacgggacctttcacggactctgtgcgcaaaatggatgataaagacgcagcagctatctgccagccaagtgctggtgtccatattgtgatgcctggttattacagcccagagagcatgggacttcttgacccagcgaccagtgatgggcgagttattttcttcttaccctggcaaaagatgacgatcgctggcactactgatactccaactgatgttacacaccatccaattccttcagaagaagatatcaacttcattttgaatgaagtgcgtaattacctgagttgtgatgttgaagtgagaagaggggatgtcctggcagcatggagtggaatccgtcctcttgttacagaccccaaatctgcagatactcagtctatctcccgaaatcatgttgttgatatcagtgagagtggccttattactatagcaggtggaaagtggacaacttatcggtctatggcagaagataccataaatgctgctgtcaaaactcataatttaaaagcaggaccaagtagaacagttgggcttttccttcaagggggtaaagattggagccccacactctacattaggcttgtgcaggattatggacttgaaagcgaggtggcacagcatcttgccgccacctatggtgataaggcctttgaggtggccaaaatggcaagtgtgactggcaaaaggtggcctattgttggagtacgtcttgtgtcagaatttccatatattgaagcagaggtgaaatatgggattaaggagtatgcctgcactgctgtggatatgatttcacgtcgtactcgcctggcctttctaaatgtccaggcagcagaggaagccctacccaggattgttgaactgatgggcagggaactgaattgggatgattataagaagcaggaacaacttgaaacagccaggaagtttctatattatgaaatgggctataaatctcgatcagaacagttaacagatcgctctgaaattagcctactgccttcagacattgacaggtataagaagagatttcataagtttgatgcagaccagaaaggctttattaccattgttgatgttcagcgtgtattagagagtatcaatgtccaaatggatgaaaatacactccatgaaattctaaatgaagttgatttgaataaaaatggacaggttgaactcaatgaatttttgcagctgatgagtgctattcaaaaaggaagggtatctggaagccggcttgctatactaatgaaaactgcagaagagaacctcgacagaagagttccaattccagtggaccgtagttgtggaggattgtgagtctgggcagtaaatccacagccaacaaacatagaaacgacaaatcaccatgtaacaaccagagatgactgaaaccactctgaaataatgaatgtggatagctgccttttttaacactagaaaacattccaaaactttaaggtgttggtgtatttgccagctttatttgctgtactttatttgtatttgccattcagtctagcttttaagtatatttttttctttttctcattttcaatgcacattagttttgcatctgttttgtgacctgttagatgtgacacattctctttttgtttattcccttattctaaatgagttctaaaaacataatattttggcaaaaattgaaaaaagctggagacattttgtgacatgcatacagatagcatgtgttattaaaaagagttgcctattgaaatgatcgtgtttctggagaaattaagcttatagacagcatgtgttattaaaaagagttacctattgaaatgatagtgtttctggagatttctcagccccatcttcctccagcttgtctaccttcctcatgcaaacaatattccacatttttatatctagagcatgactggctaactggagagggaaggaaaagtttagatctggttactggagcaagtctcaaagagaaactctgaaagcttccagaatcacaggtataagataaggatagcattgacatttgctgggagttacagtgatagtttcatctcagcagttcatttttttcttcagtcactgctggttttctttgactattatagttgccaggaagatccttgctcttcttactttaaaaccagcatttaagtggcaatttggatgtaataggatgagaccaaatttatctaattattacagtagtaatacatttaagagttaaaaatgtgtttttatatatccacatatgataacaaaagattcaattcccaagcctaaattttgaagcatgtggtattgtcaaatctagcttaccatcttttttgggggtacttgcaaccatagtaaaggaagatggaatagactttagttaactttaattataattatatgttaaataaggcacataaccagtttccaaggtcatcatggttgcttaaagtctttccccttctgtactccatggaaatattctcagtaaaccaaaaacaaaaatggaaaaataatcaccaacccccatcccgacacacacacagagtccaaagcaaaagtcagtgtgtattgaatttaacaagtaatgcagtttgggatgcttttgctacattttggtggcattttaactagttatctgaatatttattaatcgtacttcctcttgtaaagttaactacttacttttttgttgttgtttttttaacatcaggttctgtatctaataggagatgtaacactttatttcatggcaggtttttattgcagagacttgaagtcttagttttttaaactggcacataaaacactttttgctgttatttttatttatgtcaatactgcagagtatctttatgccttattcaagtggattctgagcctgtatgtcacaatgtaaacactggaggttcactcacctacgcactcacccaccacctctgaaagaaacagaaactgcagagaaagacagcatcttagctcattttgtttttaaatgaggttttagacgcttgccacttcctaagggaaatcctaaaacagagcaagtgatgctcccaggtatcactgtgaacttttttctttcaaagtgtgaatttttacactggctttttcatttttttaaagtaattgaagcttgtggctttacaacttagtgttttttgctatccagataacaagtttcattgtttagaacccagtgacacttaataggtagataaattgtcctttaaaatatcccagatgatatacacaatatggtacatttgtgctctctctctctgtttttctctctttctctttctagttagatcaagataacgatgacttgtaccctccctgattctgttacagtagggcccgggcagatctgtgtttgttaaacaggccttgtttgtgcatgctttgctatgaatgaagttcctttaaggacaaagaaaagcacacttttcttcttttgagcatatctgcttttactttaaatctgctaatttctaaaatgtagagtccttcaccaatcccagagactcaatttggaaatgaactgatttcaagccgttactgtgaataaagcaccccagcattttgtataagctcttaattaaacctgtacagcttctttacctgatttaagaaagggagacaagcaataggggggaataagcttcttcaaaattcattccaagcacaaaagaaattttttccctttgcatataaacttgacatcagttgattctgttggggtcggggtgggtatgcagggattgccttttattatcaagtgatttatttcaagagcctttgaggggattcaggtgaaggaacccccatctgtgctggagagttggatactcctttaaatagcccccaccacagtcataacaataatgataatgctggattatttgttaagccaaggttgtctgcctcatatccatcatgctgtttgcaatattcttgctttcaatcaatttatactgagtgtaactttaggatttctgctattaaatgcatgctctctatcctgcttcagtttctggctttgctttgtctgtttcaaaatatgtagcttcctcttttgtacaacaaaaaactcattctcacttttactaaatatactgtaggagtcatcattgatgttatttttctcttatgtatctgtaaagatttttggcatatgaatgtaatattaaagtcaatgatgctataacttgcgatgtttgcatcatgtcaacctttttgaaggagtgaaaaagccctactatgtttttaaatagcaagtgtaagctcagtgctagagtggatatacacaccgcatgttttcatatgtggcacttttatgtatcatgttgggttattgttctagactggactgttaaatactatgtttgaggctgggttgtcatttttataactgtcttggtgttttatggccattatttattacttttgatacacagaatgagctgcatgcatttatagagcaataagaggatgtatttaatgtgccttgtttttaactgaataagaactggaagcatgaatcaataaaactgattaaaatggtctatttgctagcattttgatgttacttgcagtcagataactttgattactgttgaagtttaaaaaaagtttgaaaatatttttacaaactgtgtttttgatgacacaaaagtgaaatatctacagagatagatgtaattttataagactgccagaattatttgtattaatttgttgctgtagcctttagggcatgacttctgtatttgtgcaatcctattctacaattacattcatcctattacaactcaaaaaaaaaaaaaaaaaa

SEQ ID NO: 344 - DNA, 4567 bp, Homo Sapiens
ggcgcatgcgccacggtggccgacttgaaccgaggcttttattgctgtagtttatttccacccccttccctcctgtttctctctctccttctctctctctctctctctctctcttttttttccgccctagctggggctgtgttggaggagaggaagaaagagagacagaggattgcattcatccgttacgttcttgaaatttcctaatagcaagaccagcgaagcggttgcacccttttcaatcttgcaaaggaaaaaaacaaaacaaaacaaaaaaaacccaagtccccttcccggcagtttttgccttaaagctgccctcttgaaattaattttttcccaggagagagatgtcttatcaggggaagaaaaatattccacgcatcacgagcgatcgtcttctgatcaaaggaggtaaaattgttaatgatgaccagtcgttctatgcagacatatacatggaagatgggttgatcaagcaaataggagaaaatctgattgtgccaggaggagtgaagaccatcgaggcccactcccggatggtgatccccggaggaattgacgtccacactcgtttccagatgcctgatcagggaatgacgtctgctgatgatttcttccaaggaaccaaggcggccctggctgggggaaccactatgatcattgaccacgttgttcctgagcctgggacaagcctgctcgctgcctttgaccagtggagggaatgggccgacagcaagtcctgctgtgactactctctgcatgtggacatcagcgagtggcataagggcatccaggaggagatggaagcgcttgtgaaggatcacggggtaaattccttcctcgtgtacatggctttcaaagatcgcttccagctaacggattgccagatttatgaagtactgagtgtgatccgggatattggcgccatagcccaagtccacgcagaaaatggcgacatcattgcagaggagcagcagaggatcctggatctgggcatcacgggccccgagggacatgtgctgagccgacctgaggaggtcgaggccgaagccgtgaatcgtgccatcaccatcgccaaccagaccaactgcccgctgtatatcaccaaggtgatgagcaaaagctctgctgaggtcatcgcccaggcacggaagaagggaactgtggtgtatggcgagcccatcactgccagcttgggaacggacggctcccattactggagcaagaactgggccaaggctgctgcctttgtcacctccccacccttgagccctgatccaaccactccagactttctcaactccttgctgtcctgtggagacctccaggtcacgggcagtgcccattgcacgtttaacactgcccagaaggctgtaggaaaggacaacttcaccctgattccggagggcaccaatggcactgaggagcggatgtccgtcatctgggacaaggctgtggtcactgggaagatggatgagaaccagtttgtggctgtgaccagcaccaatgcagccaaagtcttcaacctttacccccggaaaggccgcattgctgtgggatccgatgccgacctggtcatctgggaccccgacagcgttaaaaccatctctgccaagacacacaacagctctctcgagtacaacatctttgaaggcatggagtgccgcggctccccactggtggtcatcagccaggggaagattgtcctggaggacggcaccctgcatgtcaccgaaggctctggacgctacattccccggaagcccttccctgattttgtttacaagcgtatcaaggcaaggagcaggctggctgagctgagaggggttcctcgtggcctgtatgacggacctgtgtgtgaagtgtctgtgacgcccaagacagtcactccagcctcctcggccaagacgtctcctgccaagcagcaggccccacctgtccggaacctgcaccagtctggattcagtttgtctggtgctcagattgatgacaacattccccgccgcaccacccagcgtatcgtggcgccccccggtggccgtgccaacatcaccagcctgggctagagctcctgggctgtgccgtccactggggactggggatgggacacctgaggacattctgagacttctttcttccttcctttttttttttttgtttttttttttaagagcctgtgatagttactgtggagcagccagttcatggggtcccccttggggccccacaccccgtctctcaccaagagttactgattttgctcatccacttccctacacatctatgggtatcacacccaagactacccaccaagctcatacagggaaccacacccaacacttagacatgcgaacaagcagcccccagcgagggtctccttcgccttcaacctcctagtgtctgttagcatcttccttttcatggggggagggaagataaagtgaattgcccagagctgcctttttcttttctttttaaaaattttaagaagttttctttgtggggctggggaggggccggggtcagggagagtcttttttttttttttttttaaatactaaattggaacatttaattccatattaatacaaggggtttgaactggacatcctaatgatgcaattacgtcatcacccagctgattccgggtggttggcaaactcatcgtgtctgtcctgagaggctccacaatgcccacccgcatcgccattctgtagtcttcagggtcagctgttgataaaggggcaggcttgcgttattggcctagattttgctgcagattaaatcctttgaggattctcttctcttttaccatttttctgcgtgctctcactctctctttctctctctagctttttaattcatgaatattttcgtgtctgtctctctctctctctgtgtttcctccagcccttgtctcggagacggtgttttcctcccttgccccattatcttttcacctcccaggtctaccatttcatggtggtcgttgggtccgcctaaaggatttgagcgtttgccattgcaagcatagtgctgtgtcatcctggtccatgtaggactggtgctaaccacctgccatcatgaggatgtgtgctagagtgtgggaccctggccaagtgcaggaatgggccatgccgtctcacccacagtatcacacgtggaaccgcagacagggcccagaagctttagaggtatgaggctgcagaaccggagagattttcctctgtgcagtgctctctggctaaagtcacggtcaaacctaaacaccgagcctcattaacccaagtgaaccaaccaaagtcaccagttcagaagtgctaagctaataggagtctgacccgagggcctgctgcttcctggttaagtatcttttgagattctagaacacatgggagctttttattttcggggaaaaaccgtatttttttcttgtccaattatttctaaagacacactacatagaaagaggccctataaactcaaaaagtcattgggaaacttaaagtctattctactttgcaagaggagaaatgtgttttatgaacgatagatcacatcagaactcctgtggggaggaaaccttataaattaaacacatggcccccttagagaccacaggtgatgtctgtctccatccttccctctccttttctgtcacctttccccctagctggctcctttggacctacccctgtccttgctgacttgtgttgcattgtattccaaacgtgtttacaggttctcttaagcaatgttgtatttgcaggcttttctgaataccaaatctgctttttgtaaagcgtaaaaacatcacaaagtaggtcattccatcaccacccttgtctctctacacattttgcctttggggatctggttggggttttgggttttttgttgttgttgtttatttgttattttaaaggtaaattgcacttttaaaaaaataattggttgacttaatatatttgctttttttctcacctgcacttagaggaaatttgaacaagttggaaaaaaacaatttttgtttcaattctaagaaacacttgcagctctagtattcacttgagtcttcctgtttttcctgtaccgggtcatggtaatttttggttgttttggttgttttcttaaaaaacaagttaaaacctgacgatttctgcaggctgtgtaagcatgtttacctgttggcttgctttgtgtgtctgttaaatgaatgtcatatgtaaatgctaaaataaatcgacagtgtctcagaactgaataactgcagtgacttgatgctctaaaacagtgtaggatttaagaatagatggtttttaatcctggaaattgtgattgtgacccatgagtggaggaactttcagttctaaagctgataaagtgtgtagccagaagagtacttttttttttgtaaccactgtcttgatggcaaaataattatggtaaaaaacaagtctcgtgtttattattccttaagaactctgtgttatattaccatggaacgcctaataaagcaaaatgtggttgtttcaggaaaaaaaaaaaaaaaaaaaaaaaaaaa

SEQ ID NO: 345 - DNA, 1970 bp, Homo Sapiens
ccgagtggggctgaacttccggcctcaggacgcaggcgcgggccgctcatttcgctctttccggcggtgctcgcaagcgaggcagccatgtcttatcccgctgatgattatgagtctgaggcggcttatgacccctacgcttatcccagcgactatgatatgcacacaggagatccaaagcaggaccttgcttatgaacgtcagtatgaacagcaaacctatcaggtgatccctgaggtgatcaaaaacttcatccagtatttccacaaaactgtctcagatttgattgaccagaaagtgtatgagctacaggccagtcgtgtctccagtgatgtcattgaccagaaggtgtatgagatccaggacatctatgagaacagctggaccaagctgactgaaagattcttcaagaatacaccttggcccgaggctgaagccattgctccacaggttggcaatgatgctgtcttcctgattttatacaaagaattatactacaggcacatatatgccaaagtcagtgggggaccttccttggagcagaggtttgaatcctattacaactactgcaatctcttcaactacattcttaatgccgatggtcctgctccccttgaactacccaaccagtggctctgggatattatcgatgagttcatctaccagtttcagtcattcagtcagtaccgctgtaagactgccaagaagtcagaggaggagattgactttcttcgttccaatcccaaaatctggaatgttcatagtgtcctcaatgtccttcattccctggtagacaaatccaacatcaaccgacagttggaggtatacacaagcggaggtgaccctgagagtgtggctggggagtatgggcggcactccctctacaaaatgcttggttacttcagcctggtcgggcttctccgcctgcactccctgttaggagattactaccaggccatcaaggtgctggagaacatcgaactgaacaagaagagtatgtattcccgtgtgccagagtgccaggtcaccacatactattatgttgggtttgcatatttgatgatgcgtcgttaccaggatgccatccgggtcttcgccaacatcctcctctacatccagaggaccaagagcatgttccagaggaccacgtacaagtatgagatgattaacaagcagaatgagcagatgcatgcgctgctggccattgccctcacgatgtaccccatgcgtattgatgagagcattcacctccagctgcgggagaaatatggggacaagatgttgcgcatgcagaaaggtgacccacaagtctatgaagaacttttcagttactcctgccccaagttcctgtcgcctgtagtgcccaactatgataatgtgcaccccaactaccacaaagagcccttcctgcagcagctgaaggtgttttctgatgaagtacagcagcaggcccagctttcaaccatccgcagcttcctgaagctctacaccaccatgcctgtggccaagctggctggcttcctggacctcacagagcaggagttccggatccagcttcttgtcttcaaacacaagatgaagaacctcgtgtggaccagcggtatctcagccctggatggtgaatttcagtcagcctcagaggttgacttctacattgataaggacatgatccacatcgcggacaccaaggtcgccaggcgttatggggatttcttcatccgtcagatccacaaatttgaggagcttaatcgaaccctgaagaagatgggacagagaccttgatgatattcacacacattcaggaacctgttttgatgtattataggcaggaagtgtttttgctaccgtgaaacctttacctagatcagccatcagcctgtcaactcagttaacaagttaaggaccgaagtgtttcaagtggatctcagtaaaggatctttggagccagaaaaaaaaaaaaaaaaaaaaaa

SEQ ID NO: 346 - DNA, 2345 bp, Homo Sapiens
tggcgcgggcaatccctcaacctgattggtcccctcgcccgtcactccagtgcgcccccaacctaccacgcagtaaaagccacccccgcctcggcccggacggtttccaagctggttttgaagtcgcggcagctgttcctgggacgtccggttgaccgcgcgtctgctgcagagaccatgtctgccgacggggcagaggctgatggcagcacccaggtgacagtggaagaaccggtacagcagcccagtgtggtggaccgtgtggccagcatgcctctgatcagctccacctgcgacatggtgtccgcagcctatgcctccaccaaggagagctacccgcacatcaagactgtctgcgacgcagcagagaagggagtgaggaccctcacggcggctgctgtcagcggggctcagccgatcctctccaagctggagccccagattgcatcagccagcgaatacgcccacagggggctggacaagttggaggagaacctccccatcctgcagcagcccacggagaaggtcctggcggacaccaaggagcttgtgtcgtctaaggtgtcgggggcccaagagatggtgtctagcgccaaggacacggtggccacccaattgtcggaggcggtggacgcgacccgcggtgctgtgcagagcggcgtggacaagacaaagtccgtagtgaccggcggcgtccaatcggtcatgggctcccgcttgggccagatggtgttgagtggggtcgacacggtgctggggaagtcggaggagtgggcggacaaccacctgccccttacggatgccgaactggcccgcatcgccacatccctggatggctttgacgtcgcgtccgtgcagcagcagcggcaggaacagagctacttcgtacgtctgggctccctgtcggagaggctgcggcagcacgcctatgagcactcgctgggcaagcttcgagccaccaagcagagggcacaggaggctctgctgcagctgtcgcaggtcctaagcctgatggaaactgtcaagcaaggcgttgatcagaagctggtggaaggccaggagaagctgcaccagatgtggctcagctggaaccagaagcagctccagggccccgagaaggagccgcccaagccagagcaggtcgagtcccgggcgctcaccatgttccgggacattgcccagcaactgcaggccacctgtacctccctggggtccagcattcagggcctccccaccaatgtgaaggaccaggtgcagcaggcccgccgccaggtggaggacctccaggccacgttttccagcatccactccttccaggacctgtccagcagcattctggcccagagccgtgagcgtgtcgccagcgcccgcgaggccctggaccacatggtggaatatgtggcccagaacacacctgtcacgtggctcgtgggaccctttgcccctggaatcactgagaaagccccggaggagaagaagtagggggagaggagaggactcagcgggccccgtctctataatgcagctgtgctctggagtcctcaacccggggctcatttcaaacttattttctagccactcctcccagctcttctgtgctgtccacttgggaagctaaggctctcaaaacgggcatcacccagttgacccatctctcagcctctctgagcttggaagaagcctgttctgagcctcaccctatcagtcagtagagagagatgtccagaaaaaatatctttcaggaaagttctcccctgcagaattttttttccttgttaaatatcaggaatataggccgggtgcggtggctcacacctgtaatcccagcactttgggaggctgaggcgggcggaacacctgaggtcaggtgttcgagaccagccaggccaacatggtgaaaccccgtctctactaaaaatacaaaaaaaaatgagccgggcatggtagcaggtgtctgttatcccagttaggaggctgaggcaagagaatctcttgaacctgagaggcggaggttgcagtgagccaagatcgcgccattgcactccagcctgggggacaagagtgagacttagtctcaaaaaaaaaaaaaaagaaaaaaaaatcagggatatagttcatatcccacttctttgtttacaccgatgtccctgaatatcagcctgtagctaatggacttgggatttctggtctaagtgggcctcctggggatggggtggtacactgagcttctgagcctcattgtagagtagaaaggtactggggcctgtgtggtaagccttgttgaaatgctctggtattcagtattgccttaataaacttcacccacaactgcatacaggcaaaaa

SEQ ID NO: 347 - DNA, 1 bp, Homo Sapiens
  misc_feature (1)..(1): n is a, c, g, or t
n

SEQ ID NO: 348 - DNA, 1 bp, Homo Sapiens
  misc_feature (1)..(1): n is a, c, g, or t
n

SEQ ID NO: 349 - DNA, 2737 bp, Homo Sapiens
atccgtgtgatgggcgggctgttgacggcgctgcgatggctgcctgcgagggcaggagaagcggagctctcggttcctctcagtcggacttcctgacgccgccagtgggcggggccccttgggccgtcgccaccactgtagtcatgtacccaccgccgccgccgccgcctcatcgggacttcatctcggtgacgctgagctttggcgagaactatgacaacagcaagagttggcggcggcgctcgtgctggaggaaatggaagcaactgtcgagattgcagcggaatatgattctcttcctccttgcctttctgcttttctgtggactcctcttctacatcaacttggctgaccattggaaagctctggctttcaggctagaggaagagcagaagatgaggccagaaattgctgggttaaaaccagcaaatccacccgtcttaccagctcctcagaaggcggacaccgaccctgagaacttacctgagatttcgtcacagaagacacaaagacacatccagcggggaccacctcacctgcagattagacccccaagccaagacctgaaggatgggacccaggaggaggccacaaaaaggcaagaagcccctgtggatccccgcccggaaggagatccgcagaggacagtcatcagctggaggggagcggtgatcgagcctgagcagggcaccgagctcccttcaagaagagcagaagtgcccaccaagcctcccctgccaccggccaggacacagggcacaccagtgcatctgaactatcgccagaagggcgtgattgacgtcttcctgcatgcatggaaaggataccgcaagtttgcatggggccatgacgagctgaagcctgtgtccaggtccttcagtgagtggtttggcctcggtctcacactgatcgacgcgctggacaccatgtggatcttgggtctgaggaaagaatttgaggaagccaggaagtgggtgtcgaagaagttacactttgaaaaggacgtggacgtcaacctgtttgagagcacgatccgcatcctgggggggctcctgagtgcctaccacctgtctggggacagcctcttcctgaggaaagctgaggattttggaaatcggctaatgcctgccttcagaacaccatccaagattccttactcggatgtgaacatcggtactggagttgcccacccgccacggtggacctccgacagcactgtggccgaggtgaccagcattcagctggagttccgggagctctcccgtctcacaggggataagaagtttcaggaggcagtggagaaggtgacacagcacatccacggcctgtctgggaagaaggatgggctggtgcccatgttcatcaatacccacagtggcctcttcacccacctgggcgtattcacgctgggcgccagggccgacagctactatgagtacctgctgaagcagtggatccagggcgggaagcaggagacacagctgctggaagactacgtggaagccatcgagggtgtcagaacgcacctgctgcggcactccgagcccagtaagctcacctttgtgggggagcttgcccacggccgcttcagtgccaagatggaccacctggtgtgcttcctgccagggacgctggctctgggcgtctaccacggcctgcccgccagccacatggagctggcccaggagctcatggagacttgttaccagatgaaccggcagatggagacggggctgagtcccgagatcgtgcacttcaacctttacccccagccgggccgtcgggacgtggaggtcaagccagcagacaggcacaacctgctgcggccagagaccgtggagagcctgttctacctgtaccgcgtcacaggggaccgcaaataccaggactggggctgggagattctgcagagcttcagccgattcacacgggtcccctcgggtggctattcttccatcaacaatgtccaggatcctcagaagcccgagcctagggacaagatggagagcttcttcctgggggagacgctcaagtatctgttcttgctcttctccgatgacccaaacctgctcagcctggatgcctacgtgttcaacaccgaagcccaccctctgcctatctggacccctgcctagggtggatggctgctggtgtggggacttcgggtgggcagaggcaccttgctgggtctgtggcattttccaagggcccacgtagcaccggcaaccgccaagtggcccaggctctgaactggctctgggctcctcctcgtctctgctttaatcaggacaccgtgaggacaagtgaggccgtcagtcttggtgtgatgcggggtgggctgggccgctggagcctccgcctgcttcctccagaagacacgaatcatgactcacgattgctgaagcctgagcaggtctctgtgggccgaccagaggggggcttcgaggtggtccctggtactggggtgaccgagtggacagcccagggtgcagctctgcccgggctcgtgaagcctcagatgtccccaatccaagggtctggaggggctgccgtgactccagaggcctgaggctccagggctggctctggtgtttacaagctggactcagggatcctcctggccgccccgcagggggcttggagggctggacggcaagtccgtctagctcacgggcccctccagtggaatgggtcttttcggtggagataaaagttgatttgctctaaccgcaaaaaa

SEQ ID NO: 350 - DNA, 4869 bp, Homo Sapiens
gcgtggaagcggagcggcggcctcgctgtaacgcagaagcgaaatgtagcgagccgggtgtcgcggctggacgctcgccttggctgggggtgtgggggggcacgccgggggccaaggaggactgtcgaggaggagtgatgagaagagggggtgccctgcaccccccgagaccacgggccacgctgccacttgccaggcgccccccttcctcccaggcgaggggcaggtgttccacactgattctcgtgactttaaggaccagggatttgaagaggtattagctcttcccaggaagggaggaagtttctggaagagaagggaaagacggcagacgctgcgctgggaccagcagagcctgaggagctgtgggaagctgacagagcccagccaaaggagcgggaaggagccgcagccccaggctggcactgtgttctgaaagatttgaactcaagctgctttttacggaagaggggccacttcagagggcaccccagaatttggttgagctcttctactctggatgccccctgctctgaggagcctgccactgagaaccaaagaagataagaggacagatactttttcttcaagcacagagctggtgggttggagtcaggcatctgcacccctagtggctgtctggtgaggaatttcttgtttcttcccagcttgcggcttcagtgcttgatggggctgcctgttggtggatcagtttttgcagtgcctggtaggagtggagagccgtgggaagaggtcctgcggcgcccaagcctgggttcaccccaagactaagttctttcccaagttagagaagaagagagaaagcaaaaagaagagaggaaagttctcccttcccctcctccgtgcctgtcatgtcctctaagccagagccgaaggacgtccaccaactgaacgggactggcccttctgcctctccctgctcttcagatggcccagggagagagcccttggctgggacctcagagttcctggggcctgatggggctggggtagaggtggtgattgagtctcgggccaacgccaagggggttcgggaggaggacgccctgctggagaacgggagccagagcaacgaaagtgacgacgtcagcacagaccgtggccctgcgccaccttccccgctcaaggagacctccttttccatcgggctgcaagtactgtttccattcctcctggcaggctttgggaccgtggctgctggcatggtgttggacatcgtgcagcactgggaagtcttccagaaggtgacagaggtcttcatcctagtgcctgcgctgctggggctcaaagggaacctggaaatgaccctggcatcaaggctttccactgcagccaacattggacacatggacacacccaaggagctctggcggatgatcactgggaacatggccctcatccaggtgcaggccacggtggtgggcttcctggcgtccatcgcagccgtcgtctttggctggatccctgatggccacttcagtattccgcacgccttcctgctctgtgctagcagcgtggccacagccttcattgcctccctggtactgggtatgatcatgattggagtcatcattggctctcgcaagattgggatcaacccagacaacgtggccacacccattgctgccagcctgggcgacctcatcaccttggcgctgctctcaggcatcagctggggactctacctggaactgaatcactggcgatacatctacccactggtgtgtgctttctttgtggccctgctgcctgtctgggtggtgctggcccgacgaagtccagccacaagggaggtgttgtactcgggctgggagcctgttatcattgccatggccatcagcagtgtgggaggcctcatcttggacaagactgtctcagaccccaactttgctgggatggctgtcttcacgcctgtgattaatggtgttgggggcaatctggtggcagtgcaggccagccgcatctccaccttcctgcacatgaatggaatgcccggagagaactctgagcaagctcctcgccgctgtcccagtccttgtaccaccttcttcagccctgatgtgaattctcgctcagcccgggtcctcttcctcctcgtggtcccaggacacctggtgttcctctacaccatcagctgtatgcagggcgggcacaccaccctcacactcatcttcatcatcttctatatgacagctgcactgctccaggtgctgattctcctgtacatcgcagactggatggtgcactggatgtggggccggggcctggacccggacaacttctccatcccatacttgactgctctgggggacctgcttggcactgggctcctagcactcagcttccatgttctctggctcataggggaccgagacacggatgtcggggactagcttggtcactcaacattttccccatccctctgcactttctatttgaaatttttcttttgttcccctgtccctcctccaccccacactcccacctctttctaggacttcactttgataccaaattctcattattttcaatgggaatttttatacattgagccaagtttgtatagcaagaatttgggaaacacagatggcctgagataagcagtacaagtaggtttttgagacaatcaccaagtgcagtttcatggtgggtgcctccaggtgatgtggactggagcaggggagttttgtctggaatctggggacatggggtttggctttagcaacctgtcttggccctaatgagaaaccctttgtaagtgggctctggatttttggttttgttttctttttatctgttttgttttatttttggttttggttgaacagagggacagaagaataagtaacactcccaaacacagacatacttttgtagaagtggaccaacttcaaagctctggacaggagacacctgctccaggcccctgtgatcccagttctgttctcttgccctctggacctaagcgttcccactcgcagaaagagtaaggtggactgacttttcaatttgtgcacatgcctcttgttcaatggcctggtcaacatcaacaacccctccctctgatcatttccagttgattgtcatatccaggaaaaaatggaacagtgcactcttctccctgttgacccatgtccacctattggttccccaaaatccacattctccctgggcccagatgactttgtctccctgggcccagattctttgtctctcttcaaccttcatctcaaattgtctctaagcactaccttccccagagcttgccaggttgggttttgagattagggtcaggtcatgggtatgtggagaatggtttggaggttgaggacaaccacaggtgtctcattgctgccatttctcctgaggacataatcacttggtcaccttggaccctgtcacttcctaaaattactcgttctgtcatgccatagaggtcagttttcctctttcttggcttctacccacaaacattcaccaatcatttattcgttcatttagcaaatatgcagcctccgcaagatgagctctcctgcagacaagcatggtctgaaacattctttgagcaatatttattgagtgcctactatgtgttaggtactgtgccaggcactgataagccagtggtaagggaaacacagctctaacctcacctcattctccaggttacaaaggccatgtgcccctttgaatctggcagagaaagtttcctcgttgtaagtatttgcatctacttcaagccagattcttctgcctctttctcctttccagacccctactctgtgcagtgctgaccacagctagagccaccgccccattgctcaaccagtatttatttccctaaacgacccttcctcacattcccttccctccacctctccttaccaagcacccaaaagaggatttagaactagcagggtggacatcatctggttgtttctacttttctctgcctagcacaaaattgggagaaaactggagcctccatccgcagtcacacgtgtacagatctggggatttggatgtaggctttttctaacttctctctcagaagcttctacagaaacccttccatctgtagcctcaagggcccacctccaagggaaggcttaggcaatgatcctgtttctaccaacactgcaccttatcccaggaacctgccctagacctccagagaccatattttctctccctccatttctacccagacctccaggcctccttctggaatcatagaaccgtagaattggaaggaattttagaggttttctagttggagttgtgtccaacagaattcattaacaccagcctgggcttgtttttcctcctccctctggacttttttcatcttttcctccacctcaaaaaatacttacacacagattcttcttgtacaggcatcaaaaccaactcctctgcccctaaggctgtgtccctgtggtctccagccacccctaccccagtcactcgccccttcctcatctctggaatttggccaggcagtcccagaagactctggagtgacctcctttgcctaaaaagcagacagataggcatgccccaggccctgagtgagcagaggaggactgtagggtgagagggaaagaaaatgaaggtgactttcatggaagtttcatttcttttccccgattgtaccaactgcatgtacttttggcctggctgcaaggagcaatattggtttactctcgtatccttaaaaagttacagaactgtgtcttaagagaattatttatagttactataactgaattgacaaatgtcaacttaactgataaattatatttggtaaaataaagaggacgtttatttagaaaaaaaaaaaaaaaa

SEQ ID NO: 351 - DNA, 2209 bp, Homo Sapiens
actgcgcgcgtcgtgcgtaatgacgtcagcgccggcggagaatttcaaattcgaacggctttggcgggccgaggaaggacctggtgttttgatgaccgctgtcctgtctagcagatacttgcacggtttacagaaattcggtccctgggtcgtgtcaggaaactggaaaaaaggtcataagcatgaagcgcagttcagtttccagcggtggtgctggccgcctctccatgcaggagttaagatcccaggatgtaaataaacaaggcctctatacccctcaaaccaaagagaaaccaacctttggaaagttgagtataaacaaaccgacatctgaaagaaaagtctcgctatttggcaaaagaactagtggacatggatcccggaatagtcaacttggtatattttccagttctgagaaaatcaaggacccgagaccacttaatgacaaagcattcattcagcagtgtattcgacaactctgtgagtttcttacagaaaatggttatgcacataatgtgtccatgaaatctctacaagctccctctgttaaagacttcctgaagatcttcacatttctttatggcttcctgtgcccctcatacgaacttcctgacacaaagtttgaagaagaggttccaagaatctttaaagaccttgggtatccttttgcactatccaaaagctccatgtacacagtgggggctcctcatacatggcctcacattgtggcagccttagtttggctaatagactgcatcaagatacatactgccatgaaagaaagctcacctttatttgatgatgggcagccttggggagaagaaactgaagatggaattatgcataataagttgtttttggactacaccataaaatgctatgagagttttatgagtggtgccgacagctttgatgagatgaatgcagagctgcagtcaaaactgaaggatttatttaatgtggatgcttttaagctggaatcattagaagcaaaaaacagagcattgaatgaacagattgcaagattggaacaagaaagagaaaaagaaccgaatcgtctagagtcgttgagaaaactgaaggcttccttacaaggagatgttcaaaagtatcaggcatacatgagcaatttggagtctcattcagccattcttgaccagaaattaaatggtctcaatgaggaaattgctagagtagaactagaatgtgaaacaataaaacaggagaacactcgactacagaatatcattgacaaccagaagtactcagttgcagacattgagcgaataaatcatgaaagaaatgaattgcagcagactattaataaattaaccaaggacctggaagctgaacaacagaagttgtggaatgaggagttaaaatatgccagaggcaaagaagcgattgaaacacaattagcagagtatcacaaattggctagaaaattaaaacttattcctaaaggtgctgagaattccaaaggttatgactttgaaattaagtttaatcccgaggctggtgccaactgccttgtcaaatacagggctcaagtttatgtacctcttaaggaactcctgaatgaaactgaagaagaaattaataaagccctaaataaaaaaatgggtttggaggatactttagaacaattgaatgcaatgataacagaaagcaagagaagtgtgagaactctgaaagaagaagttcaaaagctggatgatctttaccaacaaaaaattaaggaagcagaggaagaggatgaaaaatgtgccagtgagcttgagtccttggagaaacacaagcacctgctagaaagtactgttaaccaggggctcagtgaagctatgaatgaattagatgctgttcagcgggaataccaactagttgtgcaaaccacgactgaagaaagacgaaaagtgggaaataacttgcaacgtctgttagagatggttgctacacatgttgggtctgtagagaaacatcttgaggagcagattgctaaagttgatagagaatatgaagaatgcatgtcagaagatctctcggaaaatattaaagagattagagataagtatgagaagaaagctactctaattaagtcttctgaagaatgaagataaaatgttgatcatgtatatatatccatagtgaataaaattgtctcagtaaagtgtaaaaaaaaaaaaaaaaaaaaaaaaaaaaaaaaaaaaaa

SEQ ID NO: 352 - DNA, 2135 bp, Homo Sapiens
aaagccgaccgagacggagccgctgtcaactctccaactcagctcagctgatcggttgccgccgccgccgccgccagattctggaggcgaagaacgcaaagctgagaacatggacgttaatatcgccccactccgcgcctgggacgatttcttcccgggttccgatcgctttgcccggccggacttcagggacatttccaaatggaacaaccgcgtagtgagcaacctgctctattaccagaccaactacctggtggtggctgccatgatgatttccattgtggggtttctgagtcccttcaacatgatcctgggaggaatcgtggtggtgctggtgttcacagggtttgtgtgggcagcccacaataaagacgtccttcgccggatgaagaagcgctaccccacgacgttcgttatggtggtcatgttggcgagctatttccttatctccatgtttggaggagtcatggtctttgtgtttggcattacttttcctttgctgttgatgtttatccatgcatcgttgagacttcggaacctcaagaacaaactggagaataaaatggaaggaataggtttgaagaggacaccgatgggcattgtcctggatgccctagaacagcaggaagaaggcatcaacagactcactgactatatcagcaaagtgaaggaataaacataacttacctgagctagggttgcagcagaaattgagttgcagcttgcccttgtccagacctatgttctgcttgcgtttttgaaacaggaggtgcacgtaccacccaattatctatggcagcatgcatgtataggccgaactattatcagctctgatgtttcagagagaagacctcagaaaccgaaagaaaaccaccaccctcctattgtgtctgaagtttcacgtgtgtttatgaaatctaatgggaaatggatcacacgatttctttaagggaattaaaaaaaataaaagaattacggcttttacagcaacaatacgattatcttataggaaaaaaaaaatcattgtaaagtatcaagacaatacgagtaaatgaaaaggctgttaaagtagatgacatcatgtgttagcctgttcctaatcccctagaattgtaatgtgtgggatataaattagtttttattattctcttaaaaatcaaagatgatctctatcactttgccacctgtttgatgtgcagtggaaactggttaagccagttgttcatacttcctttacaaatataaagatagctgtttaggatattttgttacatttttgtaaatttttgaaatgctagtaatgtgttttcaccagcaagtatttgttgcaaacttaatgtcattttccttaagatggttacagctatgtaacctgtattattctggacggacttattaaaatacaaacagacaaaaaataaaacaaaacttgagttctatttaccttgcacattttttgttgttacagtgaaaaaaatggtccaagaaaatgtttgccatttttgcattgtttcgtttttaactggaacatttagaaagaaggaaatgaatgtgcattttattaattccttaggggcacaaggaggacaataatagctgatcttttgaaatttgaaaaacgtctttagatgaccaagcaaaaagactttaaaaaatggtaatgaaaatggaatgcagctactgcagctaataaaaaattttagatagcaattgttacaaccatatgcctttatagctagacattagaattatgatagcatgagtttatacattctattatttttcctccctttctcatgtttttataaataggtaataaaaaatgttttgcctgccaattgaatgatttcgtagctgaagtagaaacatttaggtttctgtagcattaaattgtgaagacaactggagtggtacttactgaagaaactctctgtatgtcctagaataagaagcaatgatgtgctgcttctgatttttcttgcattttaaattctcagccaacctacagccatgatctttagcacagtgatatcaccatgacttcacagacatggtctagaatctgtacccttacccacatatgaagaataaaattgattaaaggtttttttggtgagactttatttaaaaaaaaa

SEQ ID NO: 353 - DNA, 755 bp, Homo Sapiens
ttccccaggagcagttttggtttcagacggcgccgtctcccgcgaaagtcctgagaggagcccagccttttccgcctgccgcccccggatgggatggttgaggccggggccacgccccctctgcccccctgcgagggcatcctgggctttctcccaccgctttccgagcccgcttgcacctcggcgatccccgactcccttctttatggcgtcgctcctgtgctgtgggccgaagctggccgcctgcggcatcgtcctcagcgcctggggagtgatcatgttgataatgctcggaatatttttcaatgtccattccgctgtgttgattgaggacgttcccttcacggagaaagattttgagaatggcccccagaacatatacaacctttacgagcaagtcagctacaactgtttcatcgctgcaggcctttacctcctcctcggaggcttctctttctgccaagttcggctcaataagcgcaaggaatacatggtgcgctagggccccggcgcgtttccccgctccagcccctcctctatttaaagactccctgcaccgtgtcacccaggtcgcgtcccacccttgccggcgccctctgcgggactgggtttcccgggcgagagactgaatcccttctcccatctctggcatccggcccccgtggagagggctgaggctggggggctgttccgtttctccacccttcgctgtgtcccgtatctcaataaagagaatctgctctcttcaaaaaaaa

SEQ ID NO: 354 - DNA, 2932 bp, Homo Sapiens
ggagagacatgcgattggtgaccgagccgagcggaccgaaggcgcgcccgagatgcaggtgagcaagaggatgctggcggggggcgtgaggagcatgcccagccccctcctggcctgctggcagcccatcctcctgctggtgctgggctcagtgctgtcaggctcggccacgggctgcccgccccgctgcgagtgctccgcccaggaccgcgctgtgctgtgccaccgcaagcgctttgtggcagtccccgagggcatccccaccgagacgcgcctgctggacctaggcaagaaccgcatcaaaacgctcaaccaggacgagttcgccagcttcccgcacctggaggagctggagctcaacgagaacatcgtgagcgccgtggagcccggcgccttcaacaacctcttcaacctccggacgctgggtctccgcagcaaccgcctgaagctcatcccgctaggcgtcttcactggcctcagcaacctgaccaagctggacatcagcgagaacaagatcgttatcctactggactacatgtttcaggacctgtacaacctcaagtcactggaggttggcgacaatgacctcgtctacatctctcaccgcgccttcagcggcctcaacagcctggagcagctgacgctggagaaatgcaacctgacctccatccccaccgaggcgctgtcccacctgcacggcctcatcgtcctgaggctccggcacctcaacatcaatgccatccgggactactccttcaagaggctgtaccgactcaaggtcttggagatctcccactggccctacttggacaccatgacacccaactgcctctacggcctcaacctgacgtccctgtccatcacacactgcaatctgaccgctgtgccctacctggccgtccgccacctagtctatctccgcttcctcaacctctcctacaaccccatcagcaccattgagggctccatgttgcatgagctgctccggctgcaggagatccagctggtgggcgggcagctggccgtggtggagccctatgccttccgcggcctcaactacctgcgcgtgctcaatgtctctggcaaccagctgaccacactggaggaatcagtcttccactcggtgggcaacctggagacactcatcctggactccaacccgctggcctgcgactgtcggctcctgtgggtgttccggcgccgctggcggctcaacttcaaccggcagcagcccacgtgcgccacgcccgagtttgtccagggcaaggagttcaaggacttccctgatgtgctactgcccaactacttcacctgccgccgcgcccgcatccgggaccgcaaggcccagcaggtgtttgtggacgagggccacacggtgcagtttgtgtgccgggccgatggcgacccgccgcccgccatcctctggctctcaccccgaaagcacctggtctcagccaagagcaatgggcggctcacagtcttccctgatggcacgctggaggtgcgctacgcccaggtacaggacaacggcacgtacctgtgcatcgcggccaacgcgggcggcaacgactccatgcccgcccacctgcatgtgcgcagctactcgcccgactggccccatcagcccaacaagaccttcgctttcatctccaaccagccgggcgagggagaggccaacagcacccgcgccactgtgcctttccccttcgacatcaagaccctcatcatcgccaccaccatgggcttcatctctttcctgggcgtcgtcctcttctgcctggtgctgctgtttctctggagccggggcaagggcaacacaaagcacaacatcgagatcgagtatgtgccccgaaagtcggacgcaggcatcagctccgccgacgcgccccgcaagttcaacatgaagatgatatgaggccggggcggggggcagggacccccgggcggccgggcaggggaaggggcctggccgccacctgctcactctccagtccttcccacctcctccctacccttctacacacgttctctttctccctcccgcctccgtcccctgctgccccccgccagccctcaccacctgccctccttctaccaggacctcagaagcccagacctggggaccccacctacacaggggcattgacagactggagttgaaagccgacgaaccgacacgcggcagagtcaataattcaataaaaaagttacgaactttctctgtaacttgggtttcaataattatggatttttatgaaaacttgaaataataaaaagagaaaaaaactatttcctatagctagtcggaatgcaaacttttgacgtcctgattgctccagggccctcttccaactcagtttcttgtttttctcttcctcctcctcctcttcttcctcctttctcttctcttccccagtggggagggatcactcaggaaaacaggaaaggaggttccagccccacccacctgcccaccccgccccaggcaccatcaggagcaggctagggggcaggcctgggcccagctccgggctggctttttgcagggcgcaggtggaggggacaggtctgccgatgggggtgggagcctgtctgctgggctgccaggcggcaccactgcaaggggtgggagcctggcttgggtgtggctgagactctggacagaggctggggtcctcctgggggacagcacagtcagtggagagagccaggggctggaggtggggcccaccccagcctctggtcccagctctgctgctcacttgctgtgtggcctcaagcaggtcactggcctctctgggcctcagtctccacatctgtacaaatgggaacattaccccctgccctgcctacctcacagggctgttgtgaggaattgatgagatgatgtatgtgaaacactttgtaacctgtaaagcgctgtgcacacgtg

SEQ ID NO: 355 - DNA, 1538 bp, Homo Sapiens
atggccgtcatggcgccccgaaccctcctcctgctactctcgggggccctggccctgacccagacctgggcgggctcccactccatgaggtatttcttcacatccgtgtcccggcccggccgcggggagccccgcttcatcgccgtgggctacgtggacgacacgcagttcgtgcggttcgacagcgacgccgcgagccagaggatggagccgcgggcgccgtggatagagcaggaggggccggagtattgggaccaggagacacggaatgtgaaggcccagtcacagactgaccgagtggacctggggaccctgcgcggctactacaaccagagcgaggccggttctcacaccatccagataatgtatggctgcgacgtggggtcggacgggcgcttcctccgcgggtaccggcaggacgcctacgacggcaaggattacatcgccctgaacgaggacctgcgctcttggaccgcggcggacatggcggctcagatcaccaagcgcaagtgggaggcggcccatgaggcggagcagttgagagcctacctggatggcacgtgcgtggagtggctccgcagatacctggagaacgggaaggagacgctgcagcgcacggacccccccaagacacatatgacccaccaccccatctctgaccatgaggccaccctgaggtgctgggccctgggcttctaccctgcggagatcacactgacctggcagcgggatggggaggaccagacccaggacacggagctcgtggagaccaggcctgcaggggatggaaccttccagaagtgggcggctgtggtggtgccttctggagaggagcagagatacacctgccatgtgcagcatgagggtctgcccaagcccctcaccctgagatgggagctgtcttcccagcccaccatccccatcgtgggcatcattgctggcctggttctccttggagctgtgatcactggagctgtggtcgctgccgtgatgtggaggaggaagagctcagatagaaaaggagggagttacactcaggctgcaagcagtgacagtgcccagggctctgatgtgtccctcacagcttgtaaagtgtgagacagctgccttgtgtgggactgagaggcaagagttgttcctgcccttccctttgtgacttgaagaaccctgactttgtttctgcaaaggcacctgcatgtgtctgtgttcgtgtaggcataatgtgaggaggtggggagaccaccccacccccatgtccaccatgaccctcttcccacgctgacctgtgctccctccccaatcatctttcctgttccagagaggtggggctgaggtgtctccatctctgtctcaacttcatggtgcactgagctgtaacttcttccttccctattaaaattagaaccttagtataaatttactttctcaaattcttgccatgagaggttgatgagttaattaaaggagaagattcctaaaatttgagagacaaaataaatggaacacatgagaaccttccaaaaaaaaaaaaaaaaaaa

SEQ ID NO: 356 - DNA, 2666 bp, Homo Sapiens
ggggcggacgccgctcgccggctggccccatcctccactgcagcagtaacgtcgcggcgggttgcgggtaggactggacgccagagcagccgcgcagcgcctgaaccgctgcgggccgccgcggccgccccttcccaccctcgcctctgctgtctccagcctcgcttctccgactttcctgctcctctgctgccttcgtttctggtcctcggccgtcctcgccgcccgcccagaggagtccccgcgcccgccaagaagccgctttccgctggcccgcagccgccgcgacttcggcacagtttctccctctggctagtctcccaaacggccgctcctcgcccgcgggaagaccaggctgcgaccgcgaacgcccgatcctctccaggagccgcagcgagcgcccggcggccacgccccgcgaccacaccccggcggctctcggcccagcgcgcctgccttcgccgcccgccgtcgctcctcgcccgctgcacgacgacgcgacgcccctgctgcaggcggcggacccgaccggacccagacccagacgcaagatggcgacggccgcgtgactgcctcagcgtccccgagctcggctccgagtgcacctacggactgactgtgggggcagagaagggcgagatcaggactctgtctttgttaatcgtgactgcatgaaggtcgcctccctcgggcctacttggtgggagtgtctggtattgttctaaggccaggagcacggtgagccacagtctgttggtagaatttggcgtcttgatagttgagaaaatggcgatgacactgttggaagactggtgccgggggatggatgtgaactcccagagagctctgttagtctggggcatcccagtgaactgtgatgaggctgaaatcgaagagaccctccaggctgcgatgccccaggtctcctaccgaatgcttgggagaatgttctggagggaagaaaatgcgaaagcagccttattagagctcactggcgctgtagattacgccgcgatccccagggagatgccgggcaaaggaggggtctggaaagtgttatttaagcccccaacttctgatgctgaatttttagaaagattgcacctcttcctagctagagaggggtggaccgtgcaagatgttgcccgtgtccttgggtttcagaaccctactccgaccccgggcccagagatgccagcagagatgctaaactatattttggataatgttattcagcctcttgttgagtccatatggtacaagaggctgacacttttctcggggagggacatcccagggcctggagaggaaacctttgatccctggctggagcacactaatgaggtcctagaggagtggcaggtgtccgatgtagaaaagaggcggcggttgatggagagtcttagaggccccgccgctgatgttattcgcatccttaagtccaacaaccccgcgataaccactgccgaatgcctgaaggcgcttgagcaggtgtttgggagcgttgagagctctagggatgcccagatcaaatttctgaacacttatcagaacccgggagaaaaattgtctgcttatgtcattcgtctggagcctctgctacagaaggtggtagagaagggggccattgataaagataatgtgaaccaggcccgcctagagcaggtcattgccggggccaaccacagcggggccatccgaaggcagctgtggcttaccggggctggggaagggccagccccaaacctctttcagttgctggtgcagatccgtgaggaggaagccaaggaggaggaggaggaggctgaggccacccttctgcagttaggcctggaagggcacttctgagtgccaggaaaggcagctttagtgcagacctagatcacagctacttttcttgtccctgtggggtcttacagatgtgtctctgagtagtaaaggcttagccttgttctgttttgttgttttttggaggggaaggttagtcaggcctgagtattcatgtaacattctaaaattgtgccagcgagcaccgtgaacgactgcaatgcaagcgggtcttgctggctaaaatgccaggtaaagggttggttggacacagcgcttagtgcacgctgtcatcatggacatcataatcagttgtgaaaaacacgcgaacctatgacacttcttattccacactgaatgtgaaattgcatgttcagatgtttactacgaggcctggctcacaggaagtgttcagtaaaagtatgcactgttagattactgataacgcggatagatttttgtttaccataaattgttccagatttatattaatggaaggaagtgtgcatttattagctattactcaactttacaatgcaaacatcttatttctcatctttaaacatgtcgaccagtttaattgaaaagtattctgagactgcaaaatggggtgttaaaaaatactgcagttacggagctgtgtaaaccagtttctcattgcataagatacagatgtaaattgcatggagaggttgatatgcacctgtacagtaattcactcccccatttcacatctttgtcagagaatagttcttgttcatactgagtgttctaaatttgaagttatatatacaaattaaaatattttaaaaattcaaaaaaaaaaaaaaaaaaaaaaa

SEQ ID NO: 357 - DNA, 2067 bp, Homo Sapiens
aggcctatttccggtaggaatcagtggacttggcggcagaggcagtgcggatccggcgttctccactgatcttttccaaggctgtacagacatggcggcggcttttcggaaggcggctaagtcccggcagcgggaacacagagagcgaagccagcctggctttcgaaaacatctgggcctgctggagaaaaagaaagattacaaacttcgtgcagatgactaccgtaaaaaacaagaatacctcaaagctcttcggaagaaggctcttgaaaaaaatccagatgaattctactacaaaatgactcgggttaaactccaggatggagtacatattattaaggagactaaggaagaagtaaccccagaacaactaaagctgatgagaactcaggacgtcaaatatatagaaatgaagagggttgcagaagctaagaaaatcgaaagactaaaatcagagctccatctgctggatttccaggggaagcaacagaacaagcatgtgttcttttttgacaccaaaaaggaagttgaacagtttgatgtcgcaactcacctgcaaacagccccggagctagtcgacagagtctttaataggcccaggatagagaccttgcagaaagaaaaagtgaaaggagttaccaatcagactggacttaagcgaatagctaaagaaaggcaaaagcagtataactgcctgacacagcggattgaacgagagaagaaattgttcgttattgctcagaaaattcaaacacgcaaagatcttatggataaaactcagaaagtgaaggtgaagaaagaaacggtgaactccccagctatttataaatttcagagtcgtcgaaaacgttgacgtgttatagataagccttgtcattctgtatcaaaaatctgttgtcgttttctagtaacttcaaattccattactccaaatggcatggttttccggtttgtaaccataactaaattgtcagtctgacatttaatgtctttctatggacaacattaaatctccctcccttctgtaattgtttttggattgtgaaattagtcttatttttatatacttaattttttttttctttgagatagggtctttgttgccaggctggaagtgcagtgtgtgattatggctcactgcaactttgaactcctgggctcaagtgatcttcctgcatcagcctcttgagtagctgggaccacagacatgtgccaccatgtctgagtaatgtttaaattttctgtagagaccaggttttgccatgttggccaggctggttttgaactcgtggcctcaagcgatcctcccaccttggcctcccaaagggctgggattacagggatgagccactatgcccagcccataattttttttgttatgaaacataggatctcattacagcagatttggaaagtagattaattcattcctaatcccagtgcttattcaataataacaaatatttattgcatgcttaactgtgctaggagctagagctgtggaggtggacaattactgtgagtagtctagttgatttcctccattttgtaaaacgaggcatcactttttgtccatgtttttgtgttttatagttacagtaaacaatttgatgtcctactttttttttttttttttttgagacggagtctcgctctgtcgcccaggccggactgcggactgcagtggcgcaatctcggctcactgcaagctccgcttcccgggttcacgccattctcctgcctcagcctcccgagtagctgggactacaggcgcccgccaccgcgcctggctaatttttttttgtatttttttagtagagacggggtttcaccttgttagccaggatggtctcgatctcctgacctcatgatccacccgcctcggcctcccaaagtgctgggattacaggcgtgagccaccgcgcccggccgatgtcctactttttaattaaatcattagctctttcccagtttgttacatcacaaaagttttttacagtaatatatgctagagtaaacgttaaaataaatattatttttaatgattgcaaaaaaaaaaaaaaaaaa

SEQ ID NO: 358 - DNA, 3210 bp, Homo Sapiens
cctctttctcccccctctctccctcctctcctctctctctcctctcttctctgaacctctcttctctttctcttttcttacatattctactagttgttttccccttcttcttctcctttctctcctttttctccctcctccttgtctcttttactccattcctgcagaagagagagggctaaacttaaaaaaaaaaaaaaggaggaggaggaggaggaggcacccccttcgtattcttcttatcgttattttatacatatatgattttttttggagggagggtgttggttgccggctgaagagcacttatttaaaatactaaaaaaagaacatttttgggcgatctccagggtttttttaactagctctgtgtgttatagcagaagaagcagaagaaggagcaagaaagaggaaaagaagaggattatttattcgacctactttggatgtctctctcgcttttcctttttcctttttttggcaattattttcttctgatttttattttttctatttcgctgtgatttcgtcgccggcgtgaattatcccgtatttttctcccccttccgtcacctcccgaaagaagaaggcagcgagagcccggcgccaccggcacaacaaaaagagcaaagtgtgtgatcttcctcgccggctgcctcccgctctccagcgctgccttcctgaatggctggctgcgtccggccctggacctggccccccgacacccgcgcgccctgatcgccggcggcagcctcgcccagcgccctgctcggctcaccgcgctccccgcactcccgagcccggcgagggctcccgccgggacagcggcggcgccgcgggcggccccggcctccgctcgcgctccggctgcggccccgactcctgctcggactccggcccgggtcccggctcctccagcggcgctcgccgcagcagctccggcggcagctccagcggcgcctgcagccgcgacctcctcctcctccgccgccgccgccgcctccgccctcgccggcttcctctatgtcggctcagcccgcgcgctgcgcgtagcccgagcggccggcgggcgggcgcccggcgcgggtgagcgactgtgtgtgcgagtgtgtgtgtgcgcgggggtgcgggcgaggcggagggcgagtgtgtgcgcgcgccgtggcccatgcccgccgcccccggcgctgcgccccgcgccgctcccggctgccgcctgtgccatttctgattttgcaacttggggaagaagaaaaaagcgagagaagggagcttgctcgccggggggtggggaggggggaaggagagcgcggcccccccaggaacggagcgcggggggagcgggcgaggggagcaggggtgttggggggggagcctgagagcctgggggggctgcaaaaagagagaaagaaaacagcaggaaccacaacaaaacgccagcagggcgggcgggcgcgcagcagcagcggggcggccgaggcagtagcggcggcagcggcggcggcggcggaggcagcggccggtgtccggctcgggctcggctcctgcgaccccggggcgcccggcgggccccccgccccctccccctccccccttccccttccccttcccctcccagcgcgcccgcgcgccccgcggccctcggcgagcagctcggctccccccagcgctccccgggcccaaagatatggcaatggtagttagcagctggcgagatccgcaggacgacgtggccgggggcaaccccggcggccccaaccccgcagcgcaggcggcccgcggcggcggcggcggcgccggcgagcagcagcagcaggcgggctcgggcgcgccgcacacgccgcagaccccgggccagcccggagcgcccgccacccccggcacggcgggggacaagggccagggcccgcccggttcgggccagagccagcagcacatcgagtgcgtggtgtgcggggacaagtcgagcggcaagcactacggccaattcacctgcgagggctgcaaaagtttcttcaagaggagcgtccgcaggaacttaacttacacatgccgtgccaacaggaactgtcccatcgaccagcaccaccgcaaccagtgccaatactgccgcctcaagaagtgcctcaaagtgggcatgaggcgggaagcggttcagcgaggaagaatgcctccaacccagcccaatccaggccagtacgcactcaccaacggggaccccctcaacggccactgctacctgtccggctacatctcgctgctgctgcgcgccgagccctaccccacgtcgcgctacggcagccagtgcatgcagcccaacaacattatgggcatcgagaacatctgcgagctggccgcgcgcctgctcttcagcgccgtcgagtgggcccgcaacatccccttcttcccggatctgcagatcaccgaccaggtgtccctgctacgcctcacctggagcgagctgttcgtgctcaacgcggcccagtgctctatgccgctgcacgtggcgccgttgctggccgccgccggcctgcatgcctcgcccatgtctgccgaccgcgtcgtggccttcatggaccacatccgcatcttccaggagcaggtggagaagctcaaggcgctacacgtcgactcagccgagtacagctgcctcaaagccatcgtgctgttcacgtcagacgcctgtggcctgtcggatgcggcccacatcgagagcctgcaggagaagtcgcagtgcgcactggaggagtacgtgaggagccagtaccccaaccagcccagccgttttggcaaactgctgctgcgactgccctcgctgcgcaccgtgtcctcctccgtcatcgagcagctcttcttcgtccgtttggtaggtaaaacccccatcgaaactctcatccgcgatatgttactgtctgggagcagcttcaactggccttacatgtccatccagtgctcctagaccttgggcgcttcccacctgccccgtccccctagagactcagaggacccacctgggccaaggactccaaagccgcggggacaccgggaagtgcagcgggccaggcaggctgggtgggagggaggagggccgagacaggagcagcccacccagcagaaatacaatccgagctacaaagcatgggaaaaagagactcttttaggatcagatctgtgagcacgttggcgaggaaaaacaaaaaaaaaaaaaaa

SEQ ID NO: 359 - DNA, 2462 bp, Homo Sapiens
accgccgagcgcacgggccgagccaagcctgatcccggagccggagggggactgggaccgagagaacggcgatggggggcggccccgccgcaggaggacccgggcgcgtaaccccgggggcccggcccgctccagacccagacccgcggggtgcggcaccctgagcccccctccccgccccctgccctggccatggccgcccaccccgccgcccccgggccgccagcccgctcggccccgcaagcaccggagccccggcggtggcagcagtgaacggctgtcgcaggccccgaagaccccggcccggctcggctctctagcgcgcgcccccttcccggccttgtcctctcccctccccccgccgctagcgagccccccttgcacgctgccccccgcccccggtgtccggacgatgctcaagtctcggctccgcatgtttctgaacgagctgaagctgctggtgctgacaggcggggggcggccccgggccgagccgcaaccccgggggggccggggaggcggctgcggctgggcgcccttcgctggttgctccacccgggacggcgacggcgacgaggaggagtactacgggtcggagccgcgggcccggggcctggccggcgacaaggagccgcgggccggacccctgccgccgcccgcgccgccgctgccgcccccgggcgcgctggacgccctgtcgctcagcagtagcctggacagcggactccgaacccctcagtgccggatctgcttccagggcccggagcagggggagctcttaagcccctgccgctgcgacggctcagtgcgctgcacgcatcagccctgcctcatccgctggatcagcgagaggggctcctggagctgtgagctctgctacttcaagtaccaggtcctggcgatcagcaccaagaacccactgcagtggcaggccatctccctgacggtcatcgagaaggtccagattgctgccatagttctgggctcgctcttcctggttgccagcatctcctggctcatctggtcctcactcagcccttcagccaagtggcaacgacaggatctgctctttcagatctgctacggcatgtatggcttcatggatgtcgtctgcataggcctcatcatccatgaaggctcctctgtctaccgcatcttcaagcgctggcaggcagtgaaccagcagtggaaggtcctaaattatgacaagaccaaggacataggaggagatgcagggggagggacggcagggaagtcaggccccaggaactcacggacgggccccacctctggggccacgagccgccccccagctgcccagcgcatgcggacgctcttgcctcagcgctgcggttatacaatcttgcacctccttgggcagctgcggccaccagatgcccgttccagctcccattctggccgagaggttgtcatgagggtcactacagtctgaactggactccaggagcagggatcttgagtcaatgcatcagtcagagaagaactctcatggctgctggaggtaccagctggacaaggtgtttggggcatgctgcccccgtcaccgaggatctgtgtgggtagcctcaagctggagacattgtctggcctcactgcccactgggtagagacacctggatgacatttcagtacccgctggcagctcctcccactcatccagagacggccggtgggcaggcggggagagcagctttccttccctggagagaaccgtctttacctcagctcctagggcctccagccccccagctccaccacggtgacttggtgaagggggaccaatgccagaagaaaggggctgtagacccctattccccaccccatggccacagggcatctggcaataagactagtatacattgacctcccgttccctgcatgagggcggggagttccccctgctccatcccccattgcatgggggaagggcataaagaatcatttatatgcacgtggagactcctttctcatctggggcttttctggagggttgggagatgtggggaggtttctctgcacaggttgcaaatcccaaatgcagcagtgggttctgagttgtaggtgtgactcccacttgctggtgaataattcatgttggctgctaggtggcagcactccgaggtatctaaagggtagacctggacctgccacctatgagttgtgtgatatagaaaaaaatctcttagctctggttttcctgtctacttcatagggttggaataaggataaatgagggacaggttggatgccgttgcagagaaaatcagcaatgacataaagagatttctagaatagttgatggtccatttatttcaaatagtagctggtgtaacaaattctaaaatgtgtttttcatctggagttgcacagaatcatggaattttgtgttgagtgacataataggtatggaaatatgaggggaaatagacattgcaaatgtg

SEQ ID NO: 360 - DNA, 8097 bp, Homo Sapiens
cgaggccgccgccgtcgcctccgccgggcgagccggagccggagtcgagccgcggccgggagccgggcgggctggggacgcgggccgggggcggaggcgctgggggccggggccggggccgggggcggaggcgctgggggccggggccggggccgggcgccgagcggggtccgcggtgaccgcgccgcccgggcgatgcccgcggggacgccgccggccagcagagcgaggtgctgccggccgccaccatgaccgagggcgcacgggccgccgacgaggtccgggtgcccctgggcgcgccgccccctggccctgcggcgttggtgggggcgtccccggagagccccggggcgccgggacgcgaggcggagcgggggtccgagctcggcgtgtcaccctccgagagcccggcggccgagcgcggcgcggagctgggtgccgacgaggagcagcgcgtcccgtacccggccttggcggccacggtcttcttctgcctcggtcagaccacgcggccgcgcagctggtgcctccggctggtctgcaacccatggttcgagcacgtgagcatgctggtaatcatgctcaactgcgtgaccctgggcatgttccggccctgtgaggacgttgagtgcggctccgagcgctgcaacatcctggaggcctttgacgccttcattttcgccttttttgcggtggagatggtcatcaagatggtggccttggggctgttcgggcagaagtgttacctgggtgacacgtggaacaggctggatttcttcatcgtcgtggcgggcatgatggagtactcgttggacggacacaacgtgagcctctcggctatcaggaccgtgcgggtgctgcggcccctccgcgccatcaaccgcgtgcctagcatgcggatcctggtcactctgctgctggatacgctgcccatgctcgggaacgtccttctgctgtgcttcttcgtcttcttcattttcggcatcgttggcgtccagctctgggctggcctcctgcggaaccgctgcttcctggacagtgcctttgtcaggaacaacaacctgaccttcctgcggccgtactaccagacggaggagggcgaggagaacccgttcatctgctcctcacgccgagacaacggcatgcagaagtgctcgcacatccccggccgccgcgagctgcgcatgccctgcaccctgggctgggaggcctacacgcagccgcaggccgagggggtgggcgctgcacgcaacgcctgcatcaactggaaccagtactacaacgtgtgccgctcgggtgactccaacccccacaacggtgccatcaacttcgacaacatcggctacgcctggattgccatcttccaggtgatcacgctggaaggctgggtggacatcatgtactacgtcatggacgcccactcattctacaacttcatctatttcatcctgctcatcatcgtgggctccttcttcatgatcaacctgtgcctggtggtgattgccacgcagttctcggagacgaagcagcgggagagtcagctgatgcgggagcagcgggcacgccacctgtccaacgacagcacgctggccagcttctccgagcctggcagctgctacgaagagctgctgaagtacgtgggccacatattccgcaaggtcaagcggcgcagcttgcgcctctacgcccgctggcagagccgctggcgcaagaaggtggaccccagtgctgtgcaaggccagggtcccgggcaccgccagcgccgggcaggcaggcacacagcctcggtgcaccacctggtctaccaccaccatcaccaccaccaccaccactaccatttcagccatggcagcccccgcaggcccggccccgagccaggcgcctgcgacaccaggctggtccgagctggcgcgcccccctcgccaccttccccaggccgcggaccccccgacgcagagtctgtgcacagcatctaccatgccgactgccacatagaggggccgcaggagagggcccgggtggcacatgccgcagccactgccgctgccagcctcagactggccacagggctgggcaccatgaactaccccacgatcctgccctcaggggtgggcagcggcaaaggcagcaccagccccggacccaaggggaagtgggccggtggaccgccaggcaccggggggcacggcccgttgagcttgaacagccctgatccctacgagaagatcccgcatgtggtcggggagcatggactgggccaggcccctggccatctgtcgggcctcagtgtgccctgccccctgcccagccccccagcgggcacactgacctgtgagctgaagagctgcccgtactgcacccgtgccctggaggacccggagggtgagctcagcggctcggaaagtggagactcagatggccgtggcgtctatgaattcacgcaggacgtccggcacggtgaccgctgggaccccacgcgaccaccccgtgcgacggacacaccaggcccaggcccaggcagcccccagcggcgggcacagcagagggcagccccgggcgagccaggctggatgggccgcctctgggttaccttcagcggcaagctgcgccgcatcgtggacagcaagtacttcagccgtggcatcatgatggccatccttgtcaacacgctgagcatgggcgtggagtaccatgagcagcccgaggagctgactaatgctctggagatcagcaacatcgtgttcaccagcatgtttgccctggagatgctgctgaagctgctggcctgcggccctctgggctacatccggaacccgtacaacatcttcgacggcatcatcgtggtcatcagcgtctgggagatcgtggggcaggcggacggtggcttgtctgtgctgcgcaccttccggctgctgcgtgtgctgaagctggtgcgctttctgccagccctgcggcgccagctcgtggtgctggtgaagaccatggacaacgtggctaccttctgcacgctgctcatgctcttcattttcatcttcagcatcctgggcatgcaccttttcggctgcaagttcagcctgaagacagacaccggagacaccgtgcctgacaggaagaacttcgactccctgctgtgggccatcgtcaccgtgttccagatcctgacccaggaggactggaacgtggtcctgtacaacggcatggcctccacctcctcctgggccgccctctacttcgtggccctcatgaccttcggcaactatgtgctcttcaacctgctggtggccatcctcgtggagggcttccaggcggagggcgatgccaacagatccgacacggacgaggacaagacgtcggtccacttcgaggaggacttccacaagctcagagaactccagaccacagagctgaagatgtgttccctggccgtgacccccaacgggcacctggagggacgaggcagcctgtcccctcccctcatcatgtgcacagctgccacgcccatgcctacccccaagagctcaccattcctggatgcagcccccagcctcccagactctcggcgtggcagcagcagctccggggacccgccactgggagaccagaagcctccggccagcctccgaagttctccctgtgccccctggggccccagtggcgcctggagcagccggcgctccagctggagcagcctgggccgtgcccccagcctcaagcgccgcggccagtgtggggaacgtgagtccctgctgtctggcgagggcaagggcagcaccgacgacgaagctgaggacggcagggccgcgcccgggccccgtgccaccccactgcggcgggccgagtccctggacccacggcccctgcggccggccgccctcccgcctaccaagtgccgcgatcgcgacgggcaggtggtggccctgcccagcgacttcttcctgcgcatcgacagccaccgtgaggatgcagccgagcttgacgacgactcggaggacagctgctgcctccgcctgcataaagtgctggagccctacaagccccagtggtgccggagccgcgaggcctgggccctctacctcttctccccacagaaccggttccgcgtctcctgccagaaggtcatcacacacaagatgtttgatcacgtggtcctcgtcttcatcttcctcaactgcgtcaccatcgccctggagaggcctgacattgatcccggcagcaccgagcgggtcttcctcagcgtctccaattacatcttcacggccatcttcgtggcggagatgatggtgaaggtggtggccctggggctgctgtccggcgagcacgcctacctgcagagcagctggaacctgctggatgggctgctggtgctggtgtccctggtggacattgtcgtggccatggcctcggctggtggcgccaagatcctgggtgttctgcgcgtgctgcgtctgctgcggaccctgcggcctctgagggtcatcagccgggccccgggcctcaagctggtggtggagacgctgatatcatcactcaggcccattgggaacatcgtcctcatctgctgcgccttcttcatcatttttggcattttgggtgtgcagctcttcaaagggaagttctactactgcgagggccccgacaccaggaacatctccaccaaggcacagtgccgggccgcccactaccgctgggtgcgacgcaagtacaacttcgacaacctgggccaggccctgatgtcgctgttcgtgctgtcatccaaggatggatgggtgaacatcatgtacgacgggctggatgccgtgggtgtcgaccagcagcctgtgcagaaccacaacccctggatgctgctgtacttcatctccttcctgctcatcgtcagcttcttcgtgctcaacatgttcgtgggcgtcgtggtcgagaacttccacaagtgccggcagcaccaggaggcggaggaggcgcggcggcgagaggagaagcggctgcggcgcctagagaggaggcgcaggagcactttccccagcccagaggcccagcgccggccctactatgccgactactcgcccacgcgccgctccattcactcgctgtgcaccagccactatctcgacctcttcatcaccttcatcatctgtgtcaacgtcatcaccatgtccatggagcactataaccaacccaagtcgctggacgaggccctcaagtactgcaactacgtcttcaccatcgtgtttgtcttcgaggctgcactgaagctggtagcatttgggttccgtcggttcttcaaggacaggtggaaccagctggacctggccatcgtgctgctgtcactcatgggcatcacgctggaggagatagagatgagcgccgcgctgcccatcaaccccaccatcatccgcatcatgcgcgtgcttcgcattgcccgtgtgctgaagctgctgaagatggctacgggcatgcgcgccctgctggacactgtggtgcaagctctcccccaggtggggaacctgggccttcttttcatgctcctgttttttatctatgctgcgctgggagtggagctgttcgggaggctggagtgcagtgaagacaacccctgcgagggcctgagcaggcacgccaccttcagcaacttcggcatggccttcctcacgctgttccgcgtgtccacgggggacaactggaacgggatcatgaaggacacgctgcgcgagtgctcccgtgaggacaagcactgcctgagctacctgccggccctgtcgcccgtctacttcgtgaccttcgtgctggtggcccagttcgtgctggtgaacgtggtggtggccgtgctcatgaagcacctggaggagagcaacaaggaggcacgggaggatgcggagctggacgccgagatcgagctggagatggcgcagggccccgggagtgcacgccgggtggacgcggacaggcctcccttgccccaggagagtccgggcgccagggacgccccaaacctggttgcacgcaaggtgtccgtgtccaggatgctctcgctgcccaacgacagctacatgttcaggcccgtggtgcctgcctcggcgccccacccccgcccgctgcaggaggtggagatggagacctatggggccggcacccccttgggctccgttgcctctgtgcactctccgcccgcagagtcctgtgcctccctccagatcccattggctgtgtcgtccccagccaggagcggcgagcccctccacgccctgtcccctcggggcacagcccgctcccccagtctcagccggctgctctgcagacaggaggctgtgcacaccgattccttggaagggaagattgacagccctagggacaccctggatcctgcagagcctggtgagaaaaccccggtgaggccggtgacccaggggggctccctgcagtccccaccacgctccccacggcccgccagcgtccgcactcgtaagcataccttcggacagcgctgcgtctccagccggccggcggccccaggcggagaggaggccgaggcctcggacccagccgacgaggaggtcagccacatcaccagctccgcctgcccctggcagcccacagccgagccccatggccccgaagcctctccggtggccggcggcgagcgggacctgcgcaggctctacagcgtggatgctcagggcttcctggacaagccgggccgggcagacgagcagtggcggccctcggcggagctgggcagcggggagcctggggaggcgaaggcctggggccctgaggccgagcccgctctgggtgcgcgcagaaagaagaagatgagccccccctgcatctcggtggaaccccctgcggaggacgagggctctgcgcggccctccgcggcagagggcggcagcaccacactgaggcgcaggaccccgtcctgtgaggccacgcctcacagggactccctggagcccacagagggctcaggcgccgggggggaccctgcagccaagggggagcgctggggccaggcctcctgccgggctgagcacctgaccgtccccagctttgcctttgagccgctggacctcggggtccccagtggagaccctttcttggacggtagccacagtgtgaccccagaatccagagcttcctcttcaggggccatagtgcccctggaacccccagaatcagagcctcccatgcccgtcggtgaccccccagagaagaggcgggggctgtacctcacagtcccccagtgtcctctggagaaaccagggtccccctcagccacccctgccccagggggtggtgcagatgaccccgtgtagctcggggcttggtgccgcccacggctttggccctggggtctgggggccccgctggggtggaggcccaggcagaaccctgcatggaccctgacttgggtcccgtcgtgagcagaaaggcccggggaggatgacggcccaggccctggttctctgcccagcgaagcaggagtagctgccgggccccacgagcctccgtccgttctggttcgggtttctccgagttttgctaccagccgaggctgtgcgggcaactgggtcagcctcccgtcaggagagaagccgcgtctgtgggacgaagaccgggcacccgccagagaggggaaggtaccaggttgcgtcctttcaggccccgcgttgttacaggacactcgctgggggccctgtgcccttgccggcggcaggttgcagccaccgcggcccaatgtcaccttcactcacagtctgagttcttgtccgcctgtcacgccctcaccaccctccccttccagccaccaccctttccgttccgctcgggccttcccagaagcgtcctgtgactctgggagaggtgacacctcactaaggggccgaccccatggagtaacgcgcccggccccgatgcgaatcaggcctcccctacatctgggggcgttggccgcgagattcccattgacacctttgtttcgtgtgcttttaaattcaggttaaatgttgcaataatctgatgcagaagactcagcttctcaagggagagggagggggcggagcggaataaatagtaacttatttaagaaatgcaaaaaaaaaa

SEQ ID NO: 361 - DNA, 1067 bp, Homo Sapiens
ggcggacgctccacgtgtccctcgccgcgccccgtctacccgcccctgccctgaggaccctagtccaacatggcggcgcccagcggagggtggaacggcgtcggcgcgagcttgtgggccgcgctgctcctaggggccgtggcgctgaggccggcggaggcggtgtccgagcccacgacggtggcgtttgacgtgcggcccggcggcgtcgtgcattccttctcccataacgtgggcccgggggacaaatatacgtgtatgttcacttacgcctctcaaggagggaccaatgagcaatggcagatgagtctggggaccagcgaagaccaccagcacttcacctgcaccatctggaggccccaggggaagtcctatctgtacttcacacagttcaaggcagaggtgcggggcgctgagattgagtacgccatggcctactctaaagccgcatttgaaagggaaagtgatgtccctctgaaaactgaggaatttgaagtgaccaaaacagcagtggctcacaggcccggggcattcaaagctgagctgtccaagctggtgattgtggccaaggcatcgcgcactgagctgtgaccagcagccctgttgcgggtggcaccttctcatctccggtgaagctgaaggggcctgtgtccctgaaagggccagcacatcactggttttctaggagggactcttaagttttctacctgggctgacgttgccttgtccggaggggcttgcagggtggctgaagccctggggcagagaacagagggtccagggccctcctggctcccaacagcttctcagttcccacttcctgctgagctcttctggactcaggatcgcagatccggggcacaaagagggtggggaacatgggggctatgctggggaaagcagccatgctccccccgacctccagccgagcatccttcatgagcctgcagaactgctttcctatgtttacccaggggacctcctttcagatgaactgggaagagatgaaatgttttttcatatttaaataaataagaacattaaaaagcaaaaaaaaaaaaaaaaaa

SEQ ID NO: 362 - DNA, 3352 bp, Homo Sapiens
ctctgtggttcgggtccgctttcgtctccgtcctgctgccgttaccgccgctgctgccgccgcttgcgtcccccgctccggtctgtggtgcagccgggacccaggaccatgtctctgtctcgctcagaggagatgcaccggctcacggaaaatgtctataagaccatcatggagcagttcaaccctagcctccggaacttcatcgccatggggaagaattacgagaaggcactggcaggtgtgacgtatgcagccaaaggctactttgacgccctggtgaagatgggggagctggccagcgagagccagggctccaaagaactcggagacgttctcttccagatggctgaagtccacaggcagatccagaatcagctggaagaaatgctgaagtcttttcacaacgagctgcttacgcagctggagcagaaggtggagctggactccaggtatctgagtgctgcgctgaagaaataccagactgagcaaaggagcaaaggcgacgccctggacaagtgtcaggctgagctgaagaagcttcggaagaagagccagggcagcaagaatcctcagaagtactcggacaaggagctgcagtacatcgacgccatcagcaacaagcagggcgagctggagaattacgtgtccgacggctacaagaccgcactgacagaggagcgcaggcgcttctgcttcctggtggagaagcagtgcgccgtggccaagaactccgcggcctaccactccaagggcaaggagctgctggcgcagaagctgccgctgtggcaacaggcctgtgccgaccccagcaagatcccggagcgcgcggtgcagctcatgcagcaggtggccagcaacggcgccaccctccccagcgccctgtcggcctccaagtccaacctggtcatttccgaccccattccgggggccaagcccctgccggtgccccccgagctggcaccgttcgtggggcggatgtctgcccaggagagcacacccatcatgaacggcgtcacaggcccggatggcgaggactacagcccgtgggctgaccgcaaggctgcccagcccaaatccctgtctcctccgcagtctcagagcaagctcagcgactcctactccaacacactccccgtgcgcaagagcgtgaccccaaaaaacagctatgccaccaccgagaacaagactctgcctcgctcgagctccatggcagccggcctggagcgcaatggccgtatgcgggtgaaggccatcttctcccacgctgctggggacaacagcaccctcctgagcttcaaggagggtgacctcattaccctgctggtgcctgaggcccgcgatggctggcactacggagagagtgagaagaccaagatgcggggctggtttcccttctcctacacccgggtcttggacagcgatggcagtgacaggctgcacatgagcctgcagcaagggaagagcagcagcacgggcaacctcctggacaaggacgacctggccatcccaccccccgattacggcgccgcctcccgggccttccccgcccagacggccagcggcttcaagcagaggccctacagtgtggccgtgcccgccttctcccagggcctggatgactatggagcgcggtccatgagcagcgccgatgtggaagtggccagattctgagccgcctgactagagttagaatccctttgcccacgtccagctgaagccgacagtgaccaacgacaggtctgcccccctcctcagctgatggccacatctgcagtgctgcccatctggtggcttcccccgcccttcccatgtagcctgttctgtcatcatctgtgcgttcctgtgtagagaacatccaggccccggctgcctggtcttgccccacttgagtctggcctggactggatcccagctgttctaggcagggccgggcagagtggggcgcaggcccctgaagggcgagacccagtggctgggctgcccagggctgaggggccgcctcttgagggtacacgcctctggtcacatggccatggagccttgggtacccctgagttaagggaggacatttggccagctggtggctgggaggggagcctggctgccctgctgcttctcctgcctaataaacaggcttctcctgcaccaggtgtgatctgtccgcccaagggccagaaggccgggagcacggggatgggagcgcccgcaccctggctggaagatgaacttcccgtaagcacgtaattccctgcaggtccggcagctacacctggagtgtggggcctggtccctccccatgcccctcggtggggctctcctgggcccctcactcccactggcaatgtcacaagggcctccccaggcccctcctgcctcgggcaggccccagccctcctccttacccaacctcccatccagaaccttgctgccagggcctcccagctcgctcctgcggccaaaggccagctgtcaggtgctatgcggggtcaccagcagagtgcccgctggcaggtgggggcttccccgcttccggggtctgccccaggactcctgggtggacctcccccccccacctccgctgactcctgcaggcactggggagctctgctggaattgggggttttaaaacttcattagcagatttgtgctcttccatactgtttgtttgtttgttaggtgaaatacagtgtggtgagctgcactggtgacaacagcccttacctggctggggaggtgtctccagcagagctcactcccgcctacagccactcacaccccggggacaggaagctgtagagttggcgggccaggagggcagttgagagctggccagcggagggtgcagggaagcccagctgtgctcaactctcctgcctccgccttccaccctgggcccagggacagacagacattgccctcagaagggcagggaggaggctgtcctggagaggcctgtaggtccattcttcacccgtccctaccaggccaactcggcctgcaggaagggagacctgcagggcgctacccctgcgcccccacacacagtagggccagaacaccatcccctccaccggggtgtgccgaggacagtggggaggagaggagaggggcagcttcctcctggccccaggaagggctggcatcgggttcctggcacagcccctcctgtccaggactttatcatcggcagacctcagaagacaacacacaaaggtttcttttgtcttagcttcatttctcttaaaaaacaaggaacaagaaaacattgcaccagcgttctaagcctcaaacaaaacacaaaacaaatccccctgcgaagcaacaataaactttacatctctttggcaacaat

SEQ ID NO: 363 - DNA, 3705 bp, Homo Sapiens
tttggcatccaggagaccgtgcgggagaccgacgctgagcgccggcctcgccctcggcggcccctccctcctccttaccccgcctcccccggcccgcccctccctccccggaggagcagtctctccgcgcgtctcccggagctttctccattgtctctgcctttacaacaggttcgggcggcggggaagacgggggggtgcggggccgccccagcccgggctttcttggggccgccccccttctaccgggtgtgcgagtctttggctgcttttattcggctcgggagctaattccccgacggagccgcgccggggcgagtccgacccctccctccgggccccctccgggccgcgctgccgcctcggccctgcgtgtgggaatgatgtgcgcattggagggtctaagttcttcacgcgcctggggaggcctcccttttctttcttaggcaaccaaagcgtattaatcctactgatcagtaaatccgaggcagcagcaggagagacaaacgttattttcccgcttgattccaagaacctcttcgatttttatttttatttttaaagagggagacgatggactgagctgatccgcaccatggagtctcgggtcttactgagaacattctgtttgatcttcggtctcggagcagtttgggggcttggtgtggacccttccctacagattgacgtcttaacagagttagaacttggggagtccacgaccggagtgcgtcaggtcccggggctgcataatgggacgaaagcctttctctttcaagatactcccagaagcataaaagcatccactgctacagctgaacagttttttcagaagctgagaaataaacatgaatttactattttggtgaccctaaaacagacccacttaaattcaggagttattctctcaattcaccacttggatcacaggtacctggaactggaaagtagtggccatcggaatgaagtcagactgcattaccgctcaggcagtcaccgccctcacacagaagtgtttccttacattttggctgatgacaagtggcacaagctctccttagccatcagtgcttcccatttgattttacacattgactgcaataaaatttatgaaagggtagtagaaaagccctccacagacttgcctctaggcacaacattttggctaggacagagaaataatgcgcatggatattttaagggtataatgcaagatgtccaattacttgtcatgccccagggatttattgctcagtgcccagatcttaatcgcacctgtccaacttgcaatgacttccatggacttgtgcagaaaatcatggagctacaggatattttagccaaaacatcagccaagctgtctcgagctgaacagcgaatgaatagattggatcagtgctattgtgaaaggacttgcaccatgaagggaaccacctaccgagaatttgagtcctggatagacggctgtaagaactgcacatgcctgaatggaaccatccagtgtgaaactctaatctgcccaaatcctgactgcccacttaagtcggctcttgcgtatgtggatggcaaatgctgtaaggaatgcaaatcgatatgccaatttcaaggacgaacctactttgaaggagaaagaaatacagtctattcctcttctggagtatgtgttctctatgagtgcaaggaccagaccatgaaacttgttgagagttcaggctgtccagctttggattgtccagagtctcatcagataaccttgtctcacagctgttgcaaagtttgtaaaggttatgacttttgttctgaaaggcataactgcatggagaattccatctgcagaaatctgaatgacagggctgtttgtagctgtcgagatggttttagggctcttcgagaggataatgcctactgtgaagacatcgatgagtgtgctgaagggcgccattactgtcgtgaaaatacaatgtgtgtcaacaccccgggttcttttatgtgcatctgcaaaactggatacatcagaattgatgattattcatgtacagaacatgatgagtgtatcacaaatcagcacaactgtgatgaaaatgctttatgcttcaacactgttggaggacacaactgtgtttgcaagccgggctatacagggaatggaacgacatgcaaagcattttgcaaagatggctgtaggaatggaggagcctgtattgccgctaatgtgtgtgcctgcccacaaggcttcactggacccagctgtgaaacggacattgatgaatgctctgatggttttgttcaatgtgacagtcgtgctaattgcattaacctgcctggatggtaccactgtgagtgcagagatggctaccatgacaatgggatgttttcaccaagtggagaatcgtgtgaagatattgatgagtgtgggaccgggaggcacagctgtgccaatgataccatttgcttcaatttggatggcggatatgattgtcgatgtcctcatggaaagaattgcacaggggactgcatccatgatggaaaagttaagcacaatggtcagatttgggtgttggaaaatgacaggtgctctgtgtgctcatgtcagaatggattcgttatgtgtcgacggatggtctgtgactgtgagaatcccacagttgatcttttttgctgccctgaatgtgacccaaggcttagtagtcagtgcctccatcaaaatggggaaactttgtataacagtggtgacacctgggtccagaattgtcaacagtgccgctgcttgcaaggggaagttgattgttggcccctgccttgcccagatgtggagtgtgaattcagcattctcccagagaatgagtgctgcccgcgctgtgtcacagacccttgccaggctgacaccatccgcaatgacatcaccaagacttgcctggacgaaatgaatgtggttcgcttcaccgggtcctcttggatcaaacatggcactgagtgtactctctgccagtgcaagaatggccacatctgttgctcagtggatccacagtgccttcaggaactgtgaagttaactgtctcatgggagatttctgttaaaagaatgttctttcattaaaagaccaaaaagaagttaaaacttaaattgggtgatttgtgggcagctaaatgcagctttgttaatagctgagtgaactttcaattatgaaatttgtggagcttgacaaaatcacaaaaggaaaattactggggcaaaattagacctcaagtctgcctctactgtgtctcacatcaccatgtagaagaatgggcgtacagtatataccgtgacatcctgaaccctggatagaaagcctgagcccattggatctgtgaaagcctctagcttcactggtgcagaaaattttcctctagatcagaatcttcaagaatcagttaggttcctcactgcaagaaataaaatgtcaggcagtgaatgaattatattttcagaagtaaagcaaagaagctataacatgttatgtacagtacactctgaaaagaaatctgaaacaagttattgtaatgataaaaataatgcacaggcatggttacttaatattttctaacaggaaaagtcatccctatttccttgttttactgcacttaatattatttggttgaatttgttcagtataagctcgttcttgtgcaaaattaaataaatatttctcttaccttataacac

SEQ ID NO: 364 - DNA, 1766 bp, Homo Sapiens
cggtcaggtccagcacttgggagctgactgtgctggaggtgacaggctttgcggggtccgcctgtgtgcaggagtcgcaaggtcgctgagcaggacccaaaggtggcccgaggcagccgggatgacagctctccccaggaatcctgctgcctgctgagaaacatggtcagcaagtcccgctggaagctcctggccatgttggctctggtcctggtcgtcatggtgtggtattccatctcccgggaagacagtttttattttcccatcccagagaagaaggagccgtgcctccagggtgaggcagagagcaaggcctctaagctctttggcaactactcccgggatcagcccatcttcctgcggcttgaggattatttctgggtcaagacgccatctgcttacgagctgccctatgggaccaaggggagtgaggatctgctcctccgggtgctagccatcaccagctcctccatccccaagaacatccagagcctcaggtgccgccgctgtgtggtcgtggggaacgggcaccggctgcggaacagctcactgggagatgccatcaacaagtacgatgtggtcatcagattgaacaatgccccagtggctggctatgagggtgacgtgggctccaagaccaccatgcgtctcttctaccctgaatctgcccacttcgaccccaaagtagaaaacaacccagacacactcctcgtcctggtagctttcaaggcaatggacttccactggattgagaccatcctgagtgataagaagcgggtgcgaaagggtttctggaaacagcctcccctcatctgggatgtcaatcctaaacagattcggattctcaaccccttcttcatggagattgcagctgacaaactgctgagcctgccaatgcaacagccacggaagattaagcagaagcccaccacgggcctgttggccatcacgctggccctccacctctgtgacttggtgcacattgccggctttggctacccagacgcctacaacaagaagcagaccattcactactatgagcagatcacgctcaagtccatggcggggtcaggccataatgtctcccaagaggccctggccattaagcggatgctggagatgggagctatcaagaacctcacgtccttctgacctgggcaagagctgtagcctgtcggttgcctactctgctgtctgggtgacccccatgcgtggctgtgggggtggctggtgccagtatgacccacttggactcaccccctcttggggagggagttctgggcctggccaggtctgagatgaggccatgcccctggctgctcttatggagccgagatccagtcagggtgggggcgctggagccgtgggagcccggccagggcagggggctcgtcgctgtggcaccccctctctgccagcaccaagagattatttaatgggctatttaattaaggggtaggaaggtgctgtgggctggtcccacacatccaggaaagaggccagtagagaattctgcccactttttataaaaacttacagcgatggccccaccaaggcctagacacggcactggcctcccaggagggcaggggcattgggaatgggtgggtgccctccagagaggggctgctacctcccagcaggcatgggaagagcactggtgtgggggttccaccgagaaggggacctcatctagaaaagaggttacaaacctaccattaaactatttttcctaaaacggaaaaaaaaaaaaaaaaaaaaaaaaa

SEQ ID NO: 365 - DNA, 2953 bp, Homo Sapiens
atatagagacgtttccgcctcctgcttgaaactaacccctctttttctccaaaggagtgcttgtggagatcggatcttttctccagcaattgggggaaagaaggctttttctctgaattcgcttagtgtaaccagcggcgtatattttttaggcgccttttcgaaaacctagtagttaatattcatttgtttaaatcttattttatttttaagctcaaactgcttaagaataccttaattccttaaagtgaaataattttttgcaaaggggtttcctcgatttggagctttttttttcttccaccgtcatttctaactcttaaaaccaactcagttccatcatggtgatgttcaagaagatcaagtcttttgaggtggtctttaacgaccctgaaaaggtgtacggcagtggcgagaaggtggctggccgggtgatagtggaggtgtgtgaagttactcgtgtcaaagccgttaggatcctggcttgcggagtggctaaagtgctttggatgcagggatcccagcagtgcaaacagacttcggagtacctgcgctatgaagacacgcttcttctggaagaccagccaacaggtgagaatgagatggtgatcatgagacctggaaacaaatatgagtacaagttcggctttgagcttcctcaggggcctctgggaacatccttcaaaggaaaatatgggtgtgtagactactgggtgaaggcttttcttgaccgcccgagccagccaactcaagagacaaagaaaaactttgaagtagtggatctggtggatgtcaatacccctgatttaatggcacctgtgtctgctaaaaaagaaaagaaagtttcctgcatgttcattcctgatgggcgggtgtctgtctctgctcgaattgacagaaaaggattctgtgaaggtgatgagatttccatccatgctgactttgagaatacatgttcccgaattgtggtccccaaagctgccattgtggcccgccacacttaccttgccaatggccagaccaaggtgctgactcagaagttgtcatcagtcagaggcaatcatattatctcagggacatgcgcatcatggcgtggcaagagccttcgggttcagaagatcaggccttctatcctgggctgcaacatccttcgagttgaatattccttactgatctatgttagcgttcctggatccaagaaggtcatccttgacctgcccctggtaattggcagcagatcaggtctaagcagcagaacatccagcatggccagccgaaccagctctgagatgagttgggtagatctgaacatccctgataccccagaagctcctccctgctatatggatgtcattcctgaagatcaccgattggagagcccaaccactcctctgctagatgacatggatggctctcaagacagccctatctttatgtatgcccctgagttcaagttcatgccaccaccgacttatactgaggtggatccctgcatcctcaacaacaatgtgcagtgagcatgtggaagaaaagaagcagctttacctacttgtttctttttgtctctcttcctggacactcactttttcagagactcaacagtctctgcaatggagtgtgggtccaccttagcctctgacttcctaatgtaggaggtggtcagcaggcaatctcctgggccttaaaggatgcggactcatcctcagccagcgcccatgttgtgatacaggggtgtttgttggatgggtttaaaaataactagaaaaactcaggcccatccattttctcagatctccttgaaaattgaggccttttcgatagtttcgggtcaggtaaaaatggcctcctggcgtaagcttttcaaggttttttggaggctttttgtaaattgtgataggaactttggaccttgaacttatgtatcatgtggagaagagccaatttaacaaactaggaagatgaaaagggaaattgtggccaaaactttgggaaaaggaggttcttaaaatcagtgtttcccctttgtgcacttgtagaaaaaaaagaaaaaccttctagagctgatttgatggacaatggagagagctttccctgtgattataaaaaaggaagctagctgctctacggtcatctttgcttaagagtatactttaacctggcttttaaagcagtagtaactgccccaccaaaggtcttaaaagccatttttggagcctattgcactgtgttctcctactgcaaatattttcatatgggaggatggttttctcttcatgtaagtccttggaattgattctaaggtgatgttcttagcactttaattcctgtcaaattttttgttctccccttctgccatcttaaatgtaagctgaaactggtctactgtgtctctagggttaagccaaaagacaaaaaaaattttactacttttgagattgccccaatgtacagaattatataattctaacgcttaaatcatgtgaaagggttgctgctgtcagccttgcccactgtgacttcaaacccaaggaggaactcttgatcaagatgccgaaccctgtgttcagaacctccaaatactgccatgagaaactagagggcaggtcttcataaaagccctttgaacccccttcctgccctgtgttaggagatagggatattggcccctcactgcagctgccagcacttggtcagtcactctcagccatagcactttgttcactgtcctgtgtcagagcactgagctccacccttttctgagagttattacagccagaaagtgtgggctgaagatggttggtttcatgtttttgtattatgtatctttttgtatggtaaagactatattttgtacttaaccagatatatttttaccccagatggggatattctttgtaaaaaatgaaaataaagtttttttaatggaaaaaaaaaaaaaaaaaaaaaaaaaaaa

SEQ ID NO: 366 - DNA, 5159 bp, Homo Sapiens
cgcatggagcggcgcgggccgggggccgccacggcgaggggccgggccaggccgggcggagccagagcagctgagttccagataaaaactgtcagacccggcctgtaggctgctccattgccaatgaactccatgaaccccatgaaacctgccctgccccctgcgccacacggtgatggttcattcgcatatgagtctgtgccttggcaacaaagcgccactcagccggctggatcgctgtctgtggtcactactgtgtggggagttggcaacgcgacacagagccaggttttggggaaccccatgggccctgcagggagtccctctggcagctccatgatgcctggtgtggcagggggcagctccgccttgacctccccacagtgcctgggacagcaggcgtttgctgaaggcggcgccaacaagggctacgtgcagcaaggcgtgtacagccgcgggggctaccctggggcccccggcttcaccaccgggtatgcaggcggcccggggggcctgggcctcccctcacatgctgcaagaccctccactgacttcacgcaagcggcagctgctgcagctgtggctgctgcggcagccactgccaccgccacagccacagccaccgtggctgctctccaggagaagcagagccaggagctgagccagtatggagcgatgggggccggacagtcttttaacagccagtttctgcagcatggaggtccccgggggcctagtgtccccgctggcatgaaccctactggcataggaggggtaatgggcccctctggcctctcccccttggctatgaaccccacccgggcagcaggaatgacacccttgtatgcagggcagcgtctgccccaacatgggtatcctgggcctccccaggcccagccactgccccgacagggggtcaagagaacctactctgaggtgtatccagggcagcagtatctgcaaggaggccagtatgcacccagcaccgcccagtttgcgcccagccctgggcagccccctgccccctccccttcctaccctgggcacaggctgcccctgcagcagggcatgacccagtccctgtccgtgcctggccccacgggactgcattataagcccacagagcagttcaacgggcagggcgccagcttcaacgggggcagcgtcagctacagccaacctggcctgagtgggcctacccgttccatcccgggctatcccagttccccactgccagggaaccccacgccacccatgaccccaagcagcagcgtcccttacatgtcaccaaaccaagaggtcaagtctcccttcttgcctgatctcaagcccaacctcaactccttgcactcatcgccctctggaagcgggccttgtgacgagttgcggctgaccttccctgtgcgcgatggggtggtcctggagcccttccgcctgcagcacaacctggctgtaagcaaccatgtcttccagctgcgagactcagtctacaagaccctgataatgaggcctgacctggagctgcaattcaagtgctaccaccacgaggaccggcagatgaacaccaactggccagcctcggtgcaggtcagcgtcaatgccacgccgctcaccatcgagcgtggcgacaacaagacctcgcacaagccactctacctgaagcatgtgtgccagccaggccgcaacaccatccagatcaccgtcaccgcctgctgctgctcccacctcttcgtgctgcagctagtgcaccgcccatccgtccgctcggtgctgcagggcctcctcaaaaagcgcctcctgcctgctgagcactgcatcaccaagataaagcggaacttcagcagcggcaccatccctggcacccctgggcccaacggagaggacggggtggagcagacagctatcaaggtgtccctgaagtgccccatcaccttccgcaggatccagctccctgcccgaggtcatgactgtcgccacatacagtgctttgacctggagtcgtacctgcagctcaactgtgagcgggggacttggaggtgtcctgtgtgcaacaagacagctttgctggagggcctggaggtggaccagtacatgctgggcatcctgatttacattcagaactctgactatgaggagatcaccatcgaccccacgtgcagctggaagccagtgcccgtgaagcctgacatgcacatcaaggaggagccggatgggccagcactgaagcgctgccgcaccgtgagccccgcccacgtgctcatgcccagcgtgatggagatgatcgccgccctgggccccggcgctgccccctttgcccccctgcagcccccctcagtccctgcccccagcgactaccctggccagggttccagcttcctggggcctggaactttccctgagtccttcccacccaccacgcccagcaccccaacccttgctgagttcaccccgggaccaccccccatctcctaccagtctgacattcccagcagcctcctgacttcagagaagtctaccgcctgcctcccaagccagatggcaccagcaggtcacctggaccccactcacaatcctgggacaccaggactacacacctccaaccttggggcccctccaggtccccagctgcaccattcaaaccctcccccagcgtcccggcagtccttgggccaagcgagcttaggacctacgggtgaactggccttcagtcctgccacaggcgtgatggggccccccagcatgtctggagccggggaggccccagaaccagctctggacctgctcccggaactgaccaaccctgatgagctactgtcctacttgggcccacccgacctccctacgaacaacaatgacgacctgctttctctgtttgagaacaactgatcctgtgtttaccccaagcccggcggggacacgctcacagatgtcaccacagccctgcccttcatgcccagccccatgggacacccggtggtctttcccaaacctcccccaaaacacacctggagccagagccttctgccgccagccctgcccctgaattggaagcagccctgtgctcgatgggaggggctcccaggccggcagcccttgccacctccctctgccaagcctgctgctgcagaacggtttttgctgaggtgcccctgcccagccctgtccagccttgtccacacacacatctcacgcccctggtctcacagcctcacaccttgtccttccacccctgcctgcccccacccagcctgcttcttgtccagcattgatccttctgtttcaacaactcctccactgggcagagctgggcatctggcagggctggctctgtcccctgggcctttggctccagtggcccctgtgcccagcagtccagctcttggaacctcgctgaatggcagcctcttgggggcctggagctctggcagcccagccgtgtgtggtgtcaggttcctctccccaccccagcttcaagcagaggcctcggggtgggggagctacaaagcacaacaatgtacatagtgtagaaacactaacagctgggagaggggagccagctgtccagccagcatgttcctgttgtacagcccggtctccctgcgcgctctgctccttcccatgtgcagacagatcagggaggaacctccaatgggtgggggacagtgagcttcggcctggccgaggtgggtgggtgggctctcagattcagctctgtgtaaagattctctagcgggctgcgctcccaagttccccttctctgtgaaagtgaagaattagtacagctgtgttttttaaagccacctctctgtctccaccccatgggcccacacccaggtgggggaggaggaagccactgcatctgttggctcagggccccagcctgtgcgagcagggcgcctgggctgttgtgtctcctgtctgtgccgatctctattaaaggactccctcttggtgggcctggccgagtccctcctttgtgctcccagggactattttctcctcgtaagccagcgacctgcctaaagcttgggctgtgcctgcaaagcttgtgcaggacctgggggccaggtcgaccttcaagtggcttttggggccccaggttgagctctggatgtttcaagccaaggctcggctattcccgccccatagtaaatttccttttccctggaattttccaagttggcttcagctgaagagctgttttgtgaagcatcccaggcttgcccaggagagacatttgccactatgtcaccttatctgggcttgccctggggcactgagacagttgtttggcagccccagcccagccaggggctcatccttctcagctcttgtccctgggaggcctctgcttgtcacttcccagagattgcagaggtgtgtcctgcctaccatctgcctgtccagcttggtgggggtccgggtcaccatttcctccagtcctgggccccatccttgagggccttcccagccagccagcaggagaggcaagaactgggggaacacaggaacctaggggaggaggggagcgctgggcatcctcaggctggcggccaaggcctgcccctggaggcactagaggagggcatctgtctgtgggagcccagaggctgcagggaggaggaggagggaggtatctggtgtgagcgttgcccctgcgacatttgggaccacacaggtgggcttccttattccctgacaaagcctctgtttccagctcttccgccctctctggatgagggaacagaagtggaggaaacaaaagaagcagcagcacgcacagtcctgtcgctgggtgcggagacagcctggcaaagtcccactcagccatggcctgatgcaggccccaggccctcctttcttgggtgtcaaatgactgtgtcctggacatctgatgcaccacctgccctgcctgttgcaaacgtgatgctcccggatggagtggagaaactaggagactgggacaagcaaaaggctgcaaacaacccagaagcccatcctcagaagactggagaaatgattgaggaatgcatgggcaccgtggccctgtgctccatcacaaacacctctcagaaacaacgtgggatgaaaaagcaagacagttcatacagtatgatgccatttttataaagctcaaaaccaaaaaaaaaaaaaaaaaa

SEQ ID NO: 367 - DNA, 2960 bp, Homo Sapiens
ggtggttgagtggaagcggtcgccatgtccgcggggagcgcgacacatcctggagctggcgggcgccgcagcaaatgggaccaaccagctccagccccacttctcttcctcccgccagcggccccaggtggggaggtcaccagcagtgggggaagtcctgggggcaccacagctgctccttcaggagccttggatgctgctgctgctgtggctgccaagattaatgccatgctcatggcaaaagggaagctgaaaccaactcagaatgcttctgagaagcttcaggctcctggcaaaggcctaactagcaataaaagcaaggatgacctggtggtagctgaagtagaaattaatgatgtgcctctcacatgtaggaacttgctgactcgaggacagactcaagacgagatcagccgacttagtggggctgcagtatcaactcgagggaggttcatgacaactgaggaaaaagccaaagtgggaccaggggatcgtccattatatcttcatgttcagggccagacacgggaattagtggacagagctgtaaaccggatcaaagaaattatcaccaatggagtggtaaaagctgccacaggaacaagtccaacttttaatggtgcaacagtaactgtctatcaccagccagcacccatcgctcagttgtctccagctgttagccagaagcctcccttccagtcagggatgcattatgttcaagataaattatttgtgggtctagaacatgctgtacccacttttaatgtcaaggagaaggtggaaggtccaggctgctcctatttgcagcacattcagattgaaacaggtgccaaagtcttcctgcggggcaaaggttcaggctgcattgagccagcatctggccgagaagcttttgaacctatgtatatttacatcagtcaccccaaaccagaaggcctggctgctgccaagaagctttgtgagaatcttttgcaaacagttcatgctgaatactctagatttgtgaatcagattaatactgctgtacctttaccaggctatacacaaccctctgctataagtagtgtccctcctcaaccaccatattatccatccaatggctatcagtctggttaccctgttgttccccctcctcagcagccagttcaacctccctacggagtaccaagcatagtgccaccagctgtttcattagcacctggagtcttgccggcattacctactggagtcccacctgtgccaacacaatacccgataacacaagtgcagcctccagctagcactggacagagtccgatgggtggtccttttattcctgctgctcctgtcaaaactgccttgcctgctggcccccagccccagccccagccccagcccccactcccaagtcagccccaggcacagaagagacgattcacagaggagctaccagatgaacgggaatctggactgcttggataccagcatggacccattcatatgactaatttaggtacaggcttctccagtcagaatgagattgaaggtgcaggatcgaagccagcaagttcctcaggcaaagagagagagagggacaggcagttgatgcctccaccagcctttccagtgactggaataaaaacagagtccgatgaaaggaatgggtctgggaccttaacagggagccatgattatccagccaagaagatgaaaactacagagaagggatttggcttggtggcttatgctgcagattcatctgatgaagaggaggaacatggaggtcataaaaatgcaagtagttttccacagggctggagtttgggataccaatatccttcatcacaaccacgagctaaacaacagatgccattctggatggctccctaggaaacagtggaacagagttttgaccctcagtgactcttcttagcaataatgcatgcatttgatttaacaagactctggggcctgtgctgggaaccatctggacctttgcagaagttagagattcagtgcccccctttcttaaaggggttccttaacaaccacaaaaatccttatttctgcagtggcatagaatctgttaaaatttaattagaatcacaaatttatctcagaagctttttaacagttggtgaaatgtgcttgtccaacaaagcatcctaacagggtcgttcccatacacatttgacctggtcagccttttccaggtgaatagccccagttctgacataaagaaagttttatttgtattttactactgtttggtcaattttgatatataactggttacaaacagagccttactatttattagtggggaaatgattttaagaccgtccttttcagtatttaattctgacagatctgcatccctgttttgttttggattatttctgttttggaaaatgctgtctcatttaaaactgttggatatagctggatcctggataggaaaatgaaattattttttcattgtgttttttaattggggtgatccaaagctggcaccttcaggcacattggtctcatagccattactgtttttattgcccttctaagatcctgtcttcagctgggtcagagaaaacttcttgactaaaactggtcagaactcatcacagaaatgaaatacagtggtctctctctcccagaactggttgcagctaaaacagagagatctgactgctggctataggattttggacttaatgactgaaattgcaaattgtcctttttcttggcattacagattttgccaaaataactttttgtatcaaatattgatgtgtgaaagtgaaggagctagtctgctgaaccaggaatagtttgagatattgaactgtcatttttgcacatttgaatactttgcaggctggctttgtataaacttatcctctggtttcctatatgttgtaaatatttagaccataatttcattataaataaatctataaatattcaaaaaaaaaaaaaaa

SEQ ID NO: 368 - DNA, 13126 bp, Homo Sapiens
ggggggtacccaacctatacgcagacccattgagcagccagactgccctaaacagggctatggagtccttgtcccttctaagagctgtggacaccttgcctccagttcccctcacagtcctttcttccttctgcagtgatcactgagtacctgtgtgaatgccaacaagaaaaataaaaccacagtttggattcaggaaaggttgcaccaccatcaggtcttgaagggagcttcggctggggcatctccctgagaagcagcatggagcagcctaacagtaaaggctatagcctgggaaggacccctcagggcccagagtgcagcagtgctcctgcagtccaagtggggacccacaggggcctagagtataacccggggaagattcttccaggatcagactatgggttgggaaatcctccagcccttgaccccaagctcccacatttacccctgcccccggccccacccacactctcagacttggggcagccacggaagtcacccctgacaggcactgataagaagtacccgctgatgaagcagcgtgggttctactccgacatcctcagccctggaaccttagatcaacttggggaggtatgtcgtggcccccgaatgagccagaacctcctgcggcaggctgaccttgacaagttcaccccaagagtcggaagctttgaggttcctgaagacttccaggagcgcatggagcagcagtgcatcgggtccaccacccggctgctcgcccagactgacttcccactgcaggcctacgagcccaagatgcaggtgcctttccaggtgctgccaggccagcatcctcgcaagattgagatcgagaggaggaaacagcagtacctgagcctggacattgagcagttgctgttcagccagggcatcgactccaacaagctcatgcccaggcacctggaccaccagcacccccaaaccatcgaacagggccatgacccaatcttccccatctacctcccactgaaggtatttgacaatgaggactttgactgccggactcccagagagtggatcaacatgggcttggagccagggtctctggacaggaaacctgtcccgggaaaagccctcttgcccactgatgacttcctggggcatgaggaccccaagagtcagaagctgaagtacaaatggtgcgaggtcggcgtcctggactacgacgaggagaagaagctatacctggtacacaagacagacgagaaaggcctggtgcgagatgagatggggaggcccatcctgaatgcaggggtcaccactgaaggaaggccaccccttcaggtctgtcagtactgggtgccacggatccagcttctcttctgcgctgaggacccttgcatgttcgcacaacgtgtggtccaggccaacgccctgcgcaagaacacggaagcactgctgctctacaacttgtatgtggactgcatgccctctgacggccagcatgtcatcagtgaacagagcctgagcaagatcaagcagtgggccctgagcacgcctcggatgcgcaaaggcccctcggttctagagcacctcagcagtcttgccagagaagtgagcctggactatgagcgcagcatgaacaagatcaactttgaccacgttgtctcttccaagcccgagaccttctcctacgtcaccctccccaagaaggaggaggagcaggtgcctgagcgagggctggtgagtgtccccaagtaccacttctgggagcagaaggaggacttcactttcgtgtccctgctcacacggccagaggtcatcacggccctcagcaaggtgagggccgagtgcaacaaggtgaccgccatgtccctgttccactcgagcctctccaagtacagccacctggaggaatttgagcagatccagtcacagaccttctcccaggtgcagatgttcctcaaggacagctggatcagctcgctaaaggtggccatgcgcagcagcctgcgcgacatgagcaagggctggtacaacctctacgagaccaactgggaggtgtacctcatgtccaagctgcgcaagctgatggagctggtgaagtacatgctgcaggacacactgcgcttcctggtgcaggactcacttgccagcttctcacagttcatcagcgacacctgttgcagcgtgctcaactgcaccgatgacatggtctggggtgacgacttaattaacagcccctacaggccccggaagaatcccctgttcatcatggacctggtgctggacagctctggggtgcactatagcaccccactggagcagtttgaggcatctctgctgaacctcttcgacaagggcatcctggccacccatgccgtgccccagctggagaagctggtgatggaggacatcttcatcagcggtgaccccctgctggagtccgtgggccttcatgagccactggtggaagagctacgggccaccattgccagtgccgtgtccaaggccatgatcccactgcaggcctacgccaaggagtaccgaaagtacctggagctgaacaacaatgacattgcctcctttctcaaaacctaccagacgcagggcctgttggcccaggaggtgcgggaggtagtgctcacccacctgcgggagaaggagatcctggacagctcgctgcccagcagcatcatcattgggcctttctacatcaacaccgacaatgtcaagcagagcctgtccaagaaacgcaaggccctggccacttccgtgctggacatccttgccaagaacctgcataaggaggtggatagcatctgcgaggagttccgcagcatcagccgcaagatctatgagaagcccaacagcattgaggagctggctgagctgcgagagtggatgaagggcatcccggagaggctggtgggcctggaggagcggattgtgaaggtcatggatgactaccaggtcatggatgaattcctctacaacctcagctcagatgacttcaatgacaaatggattgccagcaactggccttctaagatccttgggcagatagagctggtgcagcagcagcatgtggaggatgaggagaagttccgcaaaatccagatcatggatcagaacaacttccaagagaagctggaagggctgcagctggtagtagctggcttctccatccatgtggagatttcacgtgcacacgagatcgccaacgaggtgcggcgtgtcaagaagcagctgaaggactgccagcagctggccatgctctacaacaaccgcgagcgcatcttcagcttgcccatcaccaattatgacaagctctccaggatggtgaaggagttccaaccctacctggacctttggaccacagcgtctgactggctgcgctggtcggagagctggatgaatgaccccctctctgccatcgatgctgagcagctggagaagaacgtggttgaagccttcaagaccatgcacaagtgcgtgaagcagtttaaggacatgccagcctgccaggaagtggccttggacatccgggcccgcatcgaggagttcaaaccatacatcccactgatccaggggctgcgcaaccctggcatgcggatccggcactgggagacactgtccaaccagatcaacatcaatgtcaggcccaaggccaacctgacctttgctcgctgcctggagatgaacctgcaggaccatatcgagagcatcagcaaggtggctgaggtggctggcaaggagtacgccatcgagcaggcactggacaagatggagaaggagtggtcgaccatcctgttcaatgtactgccctacaaggcgacagacacctacatcctgaagagcccggacgaggcctcacagctgctggacgaccacatcgtcatgacccagaatatgtcattttcaccctacaagaagccctttgagcagcgcatcaactcctgggagaacaaactgaagctgacccaggaggttctggaggagtggctgaactgtcagcggtcctggctctacctggagcccatctttagctctgaggacatcaaccagcagctgcctgtggagagcaagcgctaccagaccatggagcggatctggaagaagatcatgaagaatgcctacgagaaccgggaggtgatcaatgtgtgttccgacctgagaatgctggacagcctgcgggactgcaacaagattctggacctggtgcagaagggcctcagcgagtatctggagaccaagaggagcgccttccccagattctacttcctgtcagatgatgaactactagagatcttgtcgcagacaaaggaccccacggccgtgcagccacacctgcgcaagtgcttcgagaacatcgctcggctgctattccaggaggacctggagatcacgcacatgtactcagccgagggggaggaggtacagttgtgcttctccatctacccctccagcaacgtggaggactggctgcgggaggtggagcgcagcatgaaggccagtgtgcacgacatcattgagaaggccatcagggcctaccccacgatgcccaggacccagtgggttctgaactggcctggccaggtgaccatcgctgggtgccagacctactggaccatggaggtggcagaggctctggaggccggcaacctcagaagccaactgttcccccagctctgccagcagctcagtgatctggtggcccttgtgcgggggaagctgtcccgcatgcagcgggcagtgctgtcagcgctaatcgtcattgaggtccatgccaaggacgtggtgagcaagctaatccaggagaacgtggtcagcgtgaatgacttccagtggatctcacagctgaggtactactggacaaataatgacctgtatatccgtgctgtgaatgctgagttcatctatggctatgagtacctgggcaacagtgggaggctggtgatcacgcccctcaccgacaggtgctacctgacactgaccggagctctgcacctcaagtttgggggtgccccagctggcccagctggcacaggcaaaactgagaccaccaaagacctgggtaaggccttggccatacagaccgttgtgttcaactgctctgaccagctcgacttcatggccatgggcaagttcttcaagggcctggccagtgctggggcctgggcctgcttcgacgagttcaatcgcatcgacatcgaggtgctgtctgtggtggcgcagcagatcaccaccatccagaaggcgcagcagcagcgggtggaacgcttcatgtttgagggtgtggagatcccactggtgccatcctgcgcagtgtttatcaccatgaacccgggctacgctggccgcacggagctgcctgacaatctgaaggcgctcttccgacccgtggccatgatggttccagattacgccatgatcactgagatctccctctattcctttggctttaatgaggccagtgtgctggctaagaagatcacaaccaccttcaagctgtcttctgagcagctcagctcccaggatcactatgacttcgggatgagagccgtgaaaactgtgatctcggctgctgggaacctcaagcgagaaaaccccagcatgaatgaggagctgatctgcctccgggccatccgtgatgtgaacgtgcccaagttcctgcaggaggacctcaagctcttctctggcatcgtgtccgacctgtttcccaccatcaaggaggaggacacggactacggcatcctggatgaggccatccgcgaggcctgcaggaacagcaacctcaaggatgtggagggcttcctgacaaagtgcatccagctctacgagaccacggtggtacgacacggcctcatgctcgtcgggcccacaggctccggcaagagtacttgttacagagtcctggcagctgccatgacgtcactgaaagggcagccatccatcagtggtggcatgtacgaggctgtcaactactacgtgctcaaccccaagtccatcacgatgggccagctgtacggggagtttgacctcctcacccatgagtggacagacgggatattctcctcgttcatccgggcgggggccatcacctccgacaccaacaagaagtggtacatgttcgatgggccggtggatgccatctggattgagaacatgaacacggtgctggatgacaacaagaagctgtgcctcagctctggggagatcatcaagctcacagaggcaatgaccatgatgttcgaggtgcaagacctggcggtggcttcaccagctacagtctcccgctgtggcatggtgtacctggagcccagcatcctggggctcatgcccttcatcgagtgctggctgaggaagctgcctcccttgctgaagccctatgaggagcatttcaaggccctctttgtcagcttcctggaggaatccatctccttcgttcggtcctcagtgaaggaggtgatcgcctcaaccaactgcaacctgaccatgagcctcctcaagctgctggactgcttcttcaagccctttctgcctagagagggcctcaagaaaataccctctgaaaagctgagtcgcatcgtagagttgatcgagccctggttcatcttctccctgatctggagcgtgggtgccactggggacagcagtggccgcaccagtttcagccactggctaaggctcaagatggagaacgaacagctgactctgcttttcccagaagaggggctggtgttcgattacaggctggaggacgcgggcatcagtggcaccaacgacagtgaggatgaagaggaggaatacaagcaggttgcctgggtgaagtggatggactcctcagctccattcaccatggtaccagacaccaactactgcaacatcattgtgcccaccatggacaccgtgcagatgtcccatttactggacatgctgctcaccaacaagaagcccgtgctgtgcattgggccaacaggcacggggaagacgctcaccatctctgacaagctcctcaagaacctggcactggattacatcagccacttcctcaccttctcagcccgcacttcagccaaccagacccaggacttcattgacagcaagctggacaagaggcggaagggtgtgtttggaccacctctggggcgcaactttatcttcttcatcgatgacctgaacatgccggccctggagacctacggtgcacagccacccatcgagctgttgcgccagtggatggaccacggcggctggtacgaccgcaagatcattggtgccttcaagaacctagtggacatcaactttgtctgtgccatgggccccccgggtggaggcaggaacaccgtcaccccgcggctgatgcgtcacttcaactacctgtctttcgctgagatggacgaggtcagcaagaaacgcatcttctccaccatcctgggcaactggttggatggactccttggagaaaaaagctaccgggagcgtgtgcctggggccccccacattgcccacttcacggagccccttgtggaagccaccatcatggtgtatgcaaccatcacctcccagctgctgcccactccagccaagtcccactacaccttcaacctgagggacctctccaaggtcttccaaggcatgctcatggctgacccggccaaggtcgaggaccaagtgcagctgctgcgactgtggtatcacgagaactgccgcgtgttccgggaccgactggtgaatgaggaggaccgcagctggttcgaccagctcctcaagcgctgcatggagcagtgggaggtgaccttcaacaaggtctgccccttccagcccattctttacggggacttcatgtcaccaggctccgatgtcaagtcctacgagctcatcaccagtgagagtaagatgatgcaggtgatagaggagtacatagaggactacaaccagatcaacacggccaagctgaagctggtcctcttcatggacgccatgagccacatctgtcgcatcagccgcaccctacgccaggcgctgggcaatgcactcctgctgggcgtgggtggcagcggccgcagctccctcacaaggctcgcctcgcacatggccgagtacgagtgcttccagattgaactatccaagaactacggcatgtccgagtggcgagatgatgtgaagaaggtcctgctcaaggcgggcctacagaacctacccatcaccttcctcttctcagacacccagatcaagaacgaatccttcctggaagatatcaacaacgtcctaaactctggtgacattcccaatctgtatactgcggacgagcaggaccagatcgtcagcaccatgcggccctatatccaggagcagggcctacagcccaccaaggccaacctcatggctgcttacacagggcgtgtgcgcagcaacatccacatggtgctgtgcatgagccccatcggagaggtcttccgagctcgtctgaggcagtttccctccctggtcaactgctgtaccatcgactggtttaacgagtggccggcagaagccctgaagtctgtggccaccgtgttcctcaatgagatcccagaactggaatcctcccaggaagaaatccaaggactgatccaggtctgtgtgtacatccaccagtcggtgtccaagaagtgcatcgagtacctggcagagctgacccgccacaactatgtgacccccaagagctacttggagctgcttcatattttctccatcctcatcgggcagaagaaactggagctgaaaactgccaagaaccgcatgaagagcggcctcgacaagctgctgcgcacttctgaggatgtagccaagatgcaggaggacctggagagtatgcaccccctgctggaggaggctgccaaggacaccatgctcaccatggagcagatcaaggtggatacggccatcgccgaggagacccggaattcagtgcagacagaggagatcaaagccaatgagaaggccaagaaggcacaagctattgctgacgatgcccagaaggacctggacgaggcgttgccagccctggatgcggctctggccagcctgcgcaacctcaacaagaacgatgtgaccgaggtacgtgccatgcagcggccacccccgggtgtgaaactggtcatagaagctgtgtgcattatgaaaggcatcaagcccaagaaggtgcctggagaaaagccaggcaccaaggtggatgactactgggagcctggcaaggggctgctgcaggacccgggccacttccttgagagcctcttcaagtttgacaaggacaacattggggatgtggtgatcaaagccatccagccgtacatcgataatgaagagttccagccagccaccattgccaaggtgtccaaggcttgcacctccatctgccagtgggtgcgcgccatgcacaagtaccactttgtggccaaggccgtggagcccaagcggcaagccctgctggaggcccaggatgacctgggggtgacacagaggatcctggatgaggcaaaacagcgccttcgtgaggtggaggacggcatcgccacaatgcaggctaagtaccgggaatgcattaccaagaaggaggagctggagctgaagtgtgagcagtgtgagcagcggctgggccgagctggcaagctcatcaacgggctgtcggatgagaaggtgcgctggcaggagacggtggagaacctgcagtacatgctcaacaacatctccggcgatgtcctggtggccgctggctttgtggcctacctgggccccttcacgggccagtaccgcacggtgctctacgacagctgggtcaagcagctcaggagccacaatgtcccacacacctccgagcccacgctaatcgggacgctggggaaccctgtgaagatccgatcgtggcagatcgctggcctccccaacgacacactgtcagtggagaacggggtcatcaaccagttttcccagcgctggacccacttcattgaccctcagagccaggccaacaaatggatcaagaacatggagaaggacaatgggctggatgtgttcaagttgagtgaccgcgacttcctgcgcagcatggagaacgccatccgctttggcaagccatgtctcctggagaacgtgggcgaggagctagacccagccctggagccagtgctgctcaagcagacgtacaagcagcagggaaacacggtgctgaagctgggggacacggtgatcccctaccatgaggacttcaggatgtacatcaccaccaagctgcccaacccacactacacgcccgagatctccaccaaactcaccctcatcaacttcaccctgtcgcccagtggcctagaggaccagctactgggccaggtagtggcagaggagcgacccgacctggaggaggccaagaaccagctgattatcagtaatgccaagatgcgccaggagctgaaggacattgaggaccagatcctgtaccggctcagctcctccgagggcaaccctgtagatgacatggaactcatcaaggtgctggaagcctccaagatgaaggctgctgagatccaggccaaagtcaggattgcagagcagacggagaaggacatcgacctgacgcgcatggagtacatacccgtggccatccgcacccagatcctcttcttctgtgtgtccgacctggccaacgtggaccccatgtaccagtactcccttgagtggtttctcaacatcttcctctcgggcatcgccaactcagagagagcagacaacctgaagaagcgcatctccaacatcaaccgctacctgacctacagcctctacagcaacgtctgccgcagcctctttgagaagcacaagctgatgtttgccttcctgctgtgtgttcgcatcatgatgaacgagggcaaaatcaaccagagtgagtggcgatacctcctgtctgggggctccatctcgatcatgactgagaatccggcaccggactggctgtcagaccgggcttggcgagacatcctagcactctcgaacctgccaaccttttcctccttctcttccgacttcgtgaagcacctctcagaattccgggtcatcttcgacagccttgagccccaccgggagcctttgcctggcatctgggaccagtacctagaccagttccagaagctgctagtcctccgctgcctgcgtggggacaaggttaccaacgccatgcaggactttgtggccaccaacctggagccacgcttcattgaaccccagacagccaatctgtcagtggtgttcaaagactccaactccaccacacccctcatctttgtgctgtcacccggcacagaccctgctgccgacctctacaagtttgccgaagaaatgaagttctccaaaaagctctctgccatctccctgggccaggggcagggccctcgggcagaagccatgatgcgcagctccatagagaggggcaaatgggtcttcttccagaactgccacctggcaccaagctggatgccagccctagaacgcctcatcgagcacatcaaccccgacaaggtacacagggacttccgcctctggctcaccagcctgcccagcaacaagttcccagtgtccatcctgcagaacggctccaagatgaccattgagccgccacgcggtgtcagggccaacctgctgaagtcctatagtagccttggtgaagacttcctcaactcctgccacaaggtgatggagttcaagtctctgctgctgtctctgtgcttgttccatgggaacgccctggagcgccgtaagtttgggcccctgggcttcaacatcccctatgagttcacggatggagatctgcgcatctgcatcagccagctcaagatgttcctggacgaatatgatgacatcccctacaaggtcctcaagtacacggcaggggagatcaattacgggggccgtgtcactgatgactgggaccggcgctgcatcatgaacatcttggaggacttctacaaccctgacgtgctctcccctgagcacagctacagcgcctcgggcatctaccaccagatcccgcctacctacgacctccacggctacctctcctacatcaagagcctcccactcaatgatatgcctgagatctttggcctgcatgacaatgccaacatcacctttgcccagaacgagacgttcgccctcctgggcaccatcatccagctgcaacccaaatcatcttctgcaggcagccagggccgggaggagatagtggaggacgtcacccaaaacattctgctcaaggtgcctgagcctatcaacttgcaatgggtgatggccaagtacccagtgctgtatgaggaatcaatgaacacagtactagtacaagaggtcattaggtacaatcggctgctgcaggtgatcacacagacactgcaagacctactcaaggcactcaaggggctggtagtgatgtcctctcagctggagctgatggctgccagcctgtacaacaatactgtgcctgagctctggagtgccaaggcctacccatcgctcaagcctctgtcatcatgggtcatggacctgctgcaacgcctggactttctgcaggcctggatccaagatggcatcccagctgtcttctggatcagtggattcttcttcccccaggctttcttaacaggcactctgcagaattttgcccgcaaatttgtcatctccattgacaccatctcctttgatttcaaggtgatgtttgaggcaccatcagagttaacacaaagaccccaagtagggtgctatatccatggattattcctggaaggtgcccgctgggatccagaggccttccagctggctgagtctcagcccaaggagctgtacacagagatggccgttatctggctcttgccaacacccaaccgcaaggcccaggaccaggacttttacctgtgccccatctacaagacactgactcgtgctggaacactatcaaccacaggacactctaccaactatgtcattgctgtggagatccccacccatcagccccagcgacactggataaagcgtggtgtggccctcatctgtgccctggactactagactcagacagaagggctggggccattaaagctgaattttctaagcagtccaaaaaaaaaaaaaaaaa

SEQ ID NO: 369 - DNA, 6054 bp, Homo Sapiens
attccccctcctcccccgggagcggcggcggcggccgggccggggccccagcgcgggccgggagggggcacggcggaggccacggaggcaggcgcgggagaagaccgcgctccgcttcccgggccgcgccgacctgctcggcggcctgcccgcccgcgcccaggggccccgaacggtggggccgggcaggcggctgaggcctgtcccctcagttcccaggtgccatgaggaagcctcgtcggaagtcccggcagaatgccgagggccggcgttccccgtccccctacagtctcaagtgctcacccacccgggagaccctgacatatgcccaggcccagcggattgtcgaggtagacattgatggacgcctgcatcgtatcagcatctatgacccactcaaaatcattactgaagatgagctaactgcccaggatatcaccgaatgcaatagtaacaaggaaaacagtgaacagcctcagttccctggcaagtccaagaaaccctcatccaagggcaaaaagaaggaatcctgctccaagcatgcatctggtacttccttccacctcccacagcccagcttccgtatggtggactcaggcatccagccagaagcacccccgctgcctgctgcctactaccgctacattgagaagccacctgaagacctggatgcagaggtagagtatgacatggatgaggaggaccttgcctggctggacatggtgaatgaaaaacggcgagtagatgggcacagtttggtgtctgcagatacctttgagctgctggtagaccggcttgagaaagagtcatacttggagagtcgcagcagtggggcccaacagtcactcatcgatgaagacgctttctgctgtgtgtgcctggatgatgaatgtcacaatagcaatgttattctcttctgtgacatctgcaacctggctgtacaccaggagtgctatggcgtcccatacatccctgagggccagtggctatgccgctgctgcctgcagtctccctcccggcctgtggattgcatcctttgccccaataagggtggcgccttcaaacagaccagtgatgggcactgggcccatgtggtgtgtgccatctggatccctgaagtctgctttgctaacaccgtgttcttggaacctattgagggcattgacaatatcccgcctgcccgctggaaactaacctgctatatctgcaagcagaaagggctaggtgcagccatccagtgccataaggtgaactgctacacagcattccatgtgacatgtgcacagcgggctgggctcttcatgaagattgagcccatgcgcgaaaccagcctcaatggcaccatctttacagtgcgcaagactgcctactgtgaggcccactcgccaccaggtgcggccactgctaggaggaagggcgactcccctagaagcatcagtgagactggcgatgaggaagggctgaaggagggtgatggagaggaggaagaagaggaagaggtggaggaagaagagcaggaagctcaaggcggggtgagtggctccctcaagggagtgcccaagaaaagcaagatgagtttgaagcagaagatcaagaaggagccagaggaagcaggccaagacacaccctccactctccccatgcttgctgtcccacagataccctcttacaggttgaacaagatctgtagtggtctctcctttcagaggaaaaaccagtttatgcagcggcttcacaattattggctgttgaagcggcaggcacggaatggtgtccctcttatccggcgcttgcactcccatctgcagtcccaaagaaacgctgagcagcgagagcaggatgagaagacaagtgcagtgaaggaggagctgaagtattggcagaagctccggcatgacttggagcgggcgcggctgctgattgagctgattcggaagagagagaagctcaaacgagagcaggtcaaagtccagcaggctgccatggagctggagctgatgccattcaatgttctgttgaggacaacactggacctgctgcaggagaaggatcctgcacacatcttcgcagaaccagtcaacttgagtgaggttccagattacctggaattcatatccaagccaatggatttttctactatgaggcggaagctggagtcccacctgtaccgcaccttggaggagtttgaggaggactttaaccttatagttaccaactgcatgaagtataatgctaaagacacaattttccaccgagcagctgtccgcctgcgggacctgggaggggccatcctacggcacgcccggcggcaggcagagaacatcggctatgaccccgagaggggcactcacctgcccgagtcacccaaattggaagacttttaccgcttctcctgggaagacgtggacaacatcctcatcccagagaaccgggcccatttgtccccagaggtgcagctgaaggagctgctggagaaactggacctggtgagcgccatgcggtccagtggggcccgcacccgtcgtgtccgcctgctacgccgggagatcaatgcccttcggcagaagctggcacagccaccaccaccacagccaccatcactcaacaagacagtatccaatggggagctgccagcagggccccagggggatgcagctgtgctggagcaggccttgcaggaggagccagaagacgatggggacagagatgactccaaactgcctcctccgccaaccctggagcccactgggcctgcaccttccttgtctgagcaagaatcccccccggagccccctactctgaaacccattaatgatagcaaacctccaagcaggttcctaaagcccagaaaggtggaagaagatgagctcttggaaaaatcaccactgcagctagggaatgagcctttgcaacgcttgctcagtgacaatggcatcaacagactatccctcatggcccctgacaccccggccggtaccccacttagtggtgtgggtcgccgcacatcagtcctcttcaagaaggccaagaatggggttaagctacagagaagcccagacagggtcctggagaatggcgaggaccatggtgtggcaggctctcctgcctctccagccagcatcgaggaagagcgccactcccggaagcggccaaggagcaggagctgtagtgagagcgaaggggagaggtccccccagcaggaggaagagacaggcatgaccaacggctttggaaaacacaccgaaagcgggtctgactctgaatgtagtttgggtctcagtggtggactggcatttgaagcttgcagtggtctgacgccccccaaacgcagccgtgggaagccagccctgtctcgagtgcccttcctggaaggtgtgaacggagactctgactacaatggctcaggcagaagcctcctgctgccctttgaagaccgcggagacctggagcccttggagctggtgtgggccaagtgccgaggctacccctcctaccctgccttgatcatcgatcccaagatgccccgggagggcctcctgcacaatggcgttcccatccctgtccccccgctggacgtgctgaagctgggagagcagaaacaggcagaggctggagagaagctcttccttgtcctcttctttgacaacaagcgcacctggcagtggcttccaagggacaaagtcctgcccttgggtgtggaagacaccgtggacaagctcaagatgctggaaggccgcaagaccagcatccgcaagtcagtgcaggtggcctatgaccgtgcgatgatccacctgagcagagtccgggggccccactccttcgtcacttccagctacctgtaagggcagggctgggcctgcatccgcttgccctgcctccatcccgcagggcacagagaagcctcttctgcccctgccagatgtatggccggcagcttccccctctcatggtaggccagggactgggctttctccccactaagggcaaggccccagttttgaccaatcgcatggttctcctggcaggcctgctgtgtgccaaaaactcccacccaaggtccctcaggggatatttcactgaagaaccagttagaagtagaaacagctgtggggcttgggcccagcttaggagattgcccagatggcaagaggtcctgggctccttcttgaggggctgcctggcccgctccatcctactcccactaactacacctcagggcgggtgaggttccgacactgatcccagagatgccgtggatacgccagggtcccagggggaatctccccaagctcacactctctcccgcttatcgcctattctcacacctcttctcggtcccatcttctgcacccattgcccagtcttgctttctctttcccatattccttttctttttctcttgtgccaaactgacagaaaccgtcaccacactggtctttttctttaatgtctcattccccttgaggccagctgctatgccaggtggtgtctctgccaggctcctcaggcccagacagaggccagcccacaacctatgaccccctcccccaggacaccacctcccacccacagaccttccctttagctgttgacacaacttcccagctctgcaagtgtgccccctggatcaaggcgggtcccctcttgtttttttctttgctgccacgaggtggtccaagccttcagggtgggctcctatcaggctgggtgtgcgagtgtccatctgtccacatggatgtcgagggtggtttgtgtggagctgtgctcgtcagctgggtctgccctcttcccccttttctccttcttctctcctcatggactttttctgcaattgcagtcttaagcttcactctccaccacctggatggcatggcgcctgccaccaaacatcttcctggcctgcgctctgccctgccctgcctagcctctgctactcccacttcccaactccagggaatgcattacttttatttcaaaccctctgcctccttccttctttctcttcaaccccctccccaccttcaccttctcaaaaatggaaggaaaaaaaaactgtgaatggggaatgctgactgacaaaccaacacaactttcagaggcttcagtgtctgttctctggacatttcttttcacctcctgagcaccaaagtcgcagggccagttgcaggccgctgattgccatgttgatttttaacctgatattctttttaattgttttaaatttttcataggggagttttggacaaaacagtcactggggagatcactgccatttttacacacttgactttttaaaaatacaaccaaccaaccaccacaacttcttatacatttgggacatgagccagagtttaaaagggaaccaacaaaacactataacttaaaaggatggggttttggattttgtataataataaaaacaatacagcatatggctagggaaggacatggtgtatataattgtaaaatactgttctaaattattcaggcctatagtttccattactggagtcctccattgtgtggccacacagtgtcgttgatttaaaggagccagtgcttcccctctccccaggtagttggtcagctgtggactctgtgacctttgtctaaacctgtgttgtaagatcttgggacttcctctctttctatgtctatctcttccccccaacactttctcttcttagtctctctctttatttttcaatctctgaatattttagtctctctctgagtctcattttttaaaatgctcttttagaacgggaaacggctcagatcctgctgtggcacggggcctatgtgtctctgtcgcgtctgctgtgaagcacatgatgctctatttattgtagagagtgactttatttgctttctagaattgtttataacagatggtataagagaggtaataaacagagaaaaatctatgcttgtaaagaatacaaaagttaattttacctactataatatgactgtctgaaacttattttctctctgagaaataaatgttctaatgggcagtaaaaaaaaaaaaaaaaaaaaaaaaaaaaaaaa

SEQ ID NO: 370 - DNA, 6477 bp, Homo Sapiens
aaccggcgcgcgcgtaggggctgggaggccggcgcgcagatctggcggtgagcgctgccgccccggggcccccagccatgtcggccgaggagatggtgcagatccgcctggaggaccgctgctacccggtgagcaagaggaagctcatcgagcagagcgactacttccgcgccctctaccgctccggcatgcgcgaggccctgagccaggaggccggcggcccggaggtgcagcagctgcgcggcctcagcgcgccgggcctgcggctggtgctggacttcatcaacgccggcggggcccgcgaaggctggctcctgggcccgcgcggggaaaagggcggcggggtggacgaggacgaggagatggatgaggtgagcctgctgtccgagctggtggaggcggcctccttcctgcaggtcacgtccctgctgcagctgctgctgtcccaggtgcggctcaataactgcctggagatgtaccgcctggcgcaggtgtacgggctgcccgacctgcaggaggcctgcctgcgcttcatggtcgtccacttccacgaggtgctgtgcaagccccagttccacctcctggggtctcctccccaagctccaggggatgtcagcctgaagcagaggctgagggaggcccggatgactgggactcctgtcctcgtggccctcggggacttcctggggggacccctggcccctcacccctaccagggggagcccccgtccatgctcaggtacgaggagatgactgagcgttggttcccgctggccaacaaccttcctcccgacctggtcaatgtcaggggctatgggtctgccatcctggacaactacctcttcatagtgggcgggtacaggatcactagccaggagatctccgctgcgcattcctacaaccccagcaccaacgagtggctccaggtggcctccatgaaccagaagaggtctaacttcaaacttgtggctgttaattcaaaactctatgccatcggagggcaggccgtttctaacgttgagtgttacaaccccgagcaggatgcgtggaattttgtggcgcccttacccaatcctctggctgagttctctgcctgtgagtgtaagggaaaaatttatgtcattggaggatacactaccagagaccggaacatgaacattttgcagtactgcccctcttccgacatgtggacgctctttgaaacatgtgacgtccacattcgcaagcagcagatggtgtctgtggaagagaccatctacatcgtgggggggtgtctccacgagctggggcccaaccgcaggagcagccagagcgaggacatgctcaccgtgcagtcctacaacaccgtcacccgccagtggctctacctcaaggagaacacgtccaaatcgggtcttaacttgacttgtgcgctccataacgacggcatctacatcatgagcagagacgtcaccctgtcgaccagcttggaacaccgagtgttcctcaagtacaacatcttttcagatagttgggaagcatttcggcgttttccagcttttggacataacttgctggtttcttctctttatctgcccaataaagcagaaacatgactgaattgaattggtagatgaaaaaaacctggttcaagttttttttaaaatgtggtgtcccattccaagggagaccaattcctaaagggtaaagaagggttaaagtaggtcacatatatacagtagcagctgtaaataagcttacttgaactaattacttgaaaactggtggaaaaaagagaccaactttgttattttttaaattattgatttttaaattatgggagcaaatccatctccaaacatgatactcttgggccaatgacggatcatcaaaatgtagattcattgtgtctgtgtggtaaagggccaaagtcaataattgggacaaatggtaaagatgattttaaaatctgttgtatttaggtcccttgacatatcattagcaccttaagtgagaggttttctttttcttatcagtgtccttgacaagcattcatattaacatattcattctctcttctccatcacccatacccacacatacatctagtatgtttagggttctgtgttcagatattttgtttgcacactactttttaggaaacttataatgatggagccctacagtgaatccttaccagtgttcagtcctccccaaaacttgcataaaaatattcttagctatttttccagccttttttgcagttacaaatgctggataaatagactgataaaacctcttattttatttatgtggcaggttgcatatttatgtggacacataggttgcactgctaggcattctgtattgttttaaagaggatatattatttagaaaaatggacatatgaatattattaaaaattgagtcttaaatttaaatgggaagggaagaaaacaccaaataagaaaaaaatttgcctttaagagttacttttgttgaatgtatttgacttagttcttattttaaggctaaaaaaactttgtcatatttaagtcggcagctttctaatttaatcttagctttgtaattcatgttttgcttttgtggactaaggtaaggacagcatttaaatatttgtgctggagtgaggggaagaagctgttacagaagtggaatggtttctggtggtatttctgaagttaggtaaagtgctttacttgccttggttgttaattgaaatagaattcagctcaagcagttgttttcagtgagtgagttaacaataaaagcttctgccaatcatagatcaacattcctcaaaaatacatacactcatacttatggaaattttattttgattgaaaacactctgaaattatctgatattttgtaatggcatcagttaaactgtgagctggattccatctttctgcagtaacagcgggcagaaccatttcagttagcatgtgcctcactttaagaaagtcctgtaggggaaaaaaaaaactgtcagagcgaattcatgcattcaacaaacacttatgagtgcctggagtatgccgtccactgtgcagatgtaggacaggggctaatcacttagagttcttcagtttattagaggagtgactacaggttttctttacaaccatggcctctagtatacttaaaataagcgtccagttataaaaagcctatttgcacaactttttgggaatacttctattaactaaaatgaggtaagccattattttggacatagaaacagatctttgtatcttgtcaccaaataatcttacctctagtctacttacaactttgtaagggtttctaagctatgcccatttattcccaaatattaagcccttaaaaaaataaaacctctgaaccaaaatcttcccaggaatagtacttaatagattttaatgttaatttatattcattgtagaattgaatttccagtgacctgtaatttcattacatatattttaaaatctatttattttagatggtgttaacttttcgttgctgaagagcttaactttttaaaggctttgtcctatacatttagaagatgagtcagttgaattagtactggacaaacagttggagattagtttgcaaataagcatatcatatcaaatacaatattccagccaaccagttaattctcttcctggttacattcattgggtctatttgcctaatgttgacaattagattcttggaccaagtgagggtgtactctgatccacaaagctcttttataaaccaggtttgaggttgtgtgtgtgtgtgggggtgtgtgtgtgtgtgtgtgtgtatgtttgcatattatagctctctttaagacagacatctaaaaagattttggttattctgggctgccagcagtacgtgggaaaggtggaatgtgcaataggaacagatctgtgcattttgtgacatcgtccttcctgctgtgcacatcagctgtgatgacattttgagggtagttttaatttagctcggttctcttgttggtgccagtattacattgaagactacctatgatagaggcaatgttgctttgaaaatctcccttcaggcggaggttgcagtgagccgagattgtgccattgcactccagcctgggcgacagtgcaagactctgtctccaaaaaaaaaaaaagaaaaaagaaaatcccccttcatcccccaggactgtcctttactctttgatagtatccctctattttcttcccaattctctaaatgctttatcattttttcctgagatgcttctgagggatgctgacctcccactatggggaaaagggttgcttggaggacctggggtggcagccccccgaccagaagcaccctattttatagatagcagtctgaatggtagagagtcctgtgtgtgggttgttagaaggttggttcttcctgttattctctctggctttcctttcaacccacttattttcagaggcctctccccttagcatcctttaaaaggttttctgatgaatgtgtgaaagagttgattatttcaacagtattggttaagtcacaacgacgaagtgctgagaaggttatgggtaccaggaagaaacaaacagaagtcttaagattagaatgagaaccaaagagaatttaaccctgccatttttttttttttaacaccaagatcctaagtaattccaaatgccttagatatcaatgaaagctacacaccattgagatgggcaaaattctttctctacaaagggagtaatcaagtaaatacctgttctctttcaatggactgttgcctattgagcattgtggatgatgtgttttcagatttccaggtgaagttctgaccctacctgtttggccaaagacgtaaattgagaggaaaggccttggtcttcctgatcaaccagcatttaacgaacagtggcttaatgcagatcactcaagaggcagcatagcaatgtaaaaggaatataagtaggtgttggatgcctttttcctagaccaggaatggggaatatataacacctgtgccaccgctcttttaaggaggcattatgaatgagtgcagcattcctgtcctctgtgccaggatttggtcttagaatccatgtcagattggtgcttccagacatctattcccagtccatcagagtgaaatgaaggctatttgccatccctgccttagacagaggagtgaaagaattaagtgggtagacaccaaccaaaatgactttgaaagcagtgagctgattgagctccagttctgtggttaccagaaatactgagtgtctgtcatgtgcaagacaatgctaagaacagaatacagacataaataagtcacggcccatgaccttgaagagcttacggccttataaagaggttcactgtaattgtcttcaccagggcgtccttctcaaagatgcccacttttgtctggcacattggggctcggtggtctggtggtcccttcggtcttggccctatctgtcctttgtttttgtgatttactaacaatcatcacgaaccagttttgtttttcttttaaatttgaacatcacatcttgtgttttagttttttgctctatgatttttttctcactgcttttcagtcttctctgtacttcatttttgtgaaaaagtgaaaatcacatataatctttatttaaaaatgctcaccaagcactgcagactttggagttagggattcagcagcttgttccagtgaaaaggaggagtgaagctggggaagttagtatctaagaggggcaagctgattgcatgtgcatttatacctatgcctttaaaacattcccataaaaagtattaataaagaaatttccattccacactagtactgatgaaaaggtggttgattttgccttgtgataattatcaaaggatagtttttcatccttagattttattcacatgagagattttttttattttctctgttgacttaggaacacatcataaattcacaccaactgacacgttgctgacgtctgtacttgacataaccatttttattcatacaggaagcattaaatataaaagatggtcagttttgaagagcaaagggtgctgaaatgacttgtacggttggctggtgctttctcaaatggattgccatagttcattactagtaaagaaaaggaaaatgtgatttacgttgtcatttttcctattaaaaaaaacccttaagaatggggcacttgagctgtccctgcaatgttttcatatctagtagtcattttagggaaagtgataatctgtagaatgaatagttatgttttgatatgactgatactttctttgttaaaaggttgtattaagtcttcaatttcaagtctagcttaaaagtgtaaacattatgtgattcatttgaatacaagaatgcctatgaaatacccactataacagcattccttttgtgtttagaactatagaagaaaatgtcttcaaataaagtagttttcagtcaaaaaaaaa

SEQ ID NO: 371 - DNA, 3061 bp, Homo Sapiens
gtctcgcgggagcgctgctggcggtcgggcgctcgggcggccctggccggggagacgagttgcatgtgttggttcagctggcgatagcggcgggagcggagccggcggggcctgtgcgaccgcctgggtttgtgaaatggctgctgacatttctgaatccagcggggctgactgcaaaggagacccaaggaacagtgccaagttagatgccgattacccacttcgagtcctttattgtggagtctgttcattaccaacagagtactgtgaatatatgcctgatgttgctaaatgtagacaatggttagagaagaattttccaaatgaatttgcaaaacttactgtagaaaattcacccaaacaagaagctggaattagtgagggtcaaggaacagcaggggaagaagaggagaagaaaaaacagaagagaggtggaaggggtcaaataaaacaaaaaaagaagaccgtaccacaaaaggttactatagccaaaattcccagagcaaagaagaaatatgtgacaagagtatgtggccttgcaacttttgaaattgatcttaaagaagcacaaagattttttgctcaaaaattctcctgtggtgcctcagtaacaggggaggatgaaattatcattcagggagattttacagatgacataattgatgtcattcaggaaaaatggccagaggtagatgatgacagcatcgaagatcttggagaagtaaagaagtgaatttgaaaatttgtctgtatttaatggcctgaactgagagttgatatggccaaagggagagaggccttttaaaatatatatatatatacacatatatatgtatatatacacatatatgtatgtatacacatatacacatgtatatatacatgtgtgtatgtatacatgtatatatatatacatacacatatatgtatacatatatacacatatatgtatacatatatacacatatgtatacatatatatatattctacagtaaaactgtagactgtcctcgtccttggcattttcactgttctgtacaaggctgcttgtttttttattgccaaagtcaaataaacgggagactgtcatgctcatgcatgaatagaatttagtcaaataaaaaattttggtcatttggtactgactttctctctctctctctctctcttttttttttttgacagagtctcgcactgttgcctgggctggaatgcagtggtgcgatctcggctcactgcaacctccgcctcccgggttcaagtgattctcctgcctcagcctcccaagtaggtgggattacaggcgcccgccaccacgcccagctaatttttgtatttttagtagagatggggtttcactatgttggccaggctggtctcgaactcctgacctcgtgattggcccacctcagcctcccaaagtgctggtattacagatgtgagccaccgcacccagcctgagtttctctttctctctttttaactttattttttgaaaaacccggtagactttttgtggggagcatttttgttgataattttactgatctaaagctgagtgattttttaaaagaatttgaatttggcttcctcaccagtaatatgtctccttgcttctttgatgtgatagttttgagatgggtgagaatctaatagatctgtggttgaatttgctgtgttgttatgaagtccaccctgtgggcacaataacataactgttggtaggagttgtttgagctattctggagattatttggtaaagtatactaaaagccttaaaaccatgtatgtgcgctgtttgaaccagtaagccacttctttgacattagaagacattagaagaaataatcagccttgcataaaacttatggatgaaagtattcatcacaatattatttataataaaaaattgcaaatgttataaatgaacaattgggaaatggttaaagaagtgatggtgcattgtgtggtagaatattatgcatatgtttaaagaatcatattttctaagattatttggaagcatgtttggtaatgtcaagtggagtaccccagatacattttagacatttatcgtcatcatctgctctgagtggaaggccgttcagagaggctagaggttcttattctggctataaattatgtgagtaaaattgtgctaaccagttaaaagtactgtacacccatgctcaatatatagtcctggaaatagcaattgaaacatgtcttctcacaagagaaaatgacagttttaatgatgtatttgatgaatttaaactttaagtcaggtgctgcaaattggaaagaagacttgtggtgttttaagttgctgtggacacttttaagaaacttagaacccatggaacccttgtttatcgccatgcaaattacaatcttgaatgagtgttttttaaaaataaagtattagaaaaatgtgtagtaaagatgtaaaattaaaaaatggaattctccattaactgtggattttactaaatagaattactggtgaagcagatttatccatcgagactatctggtatgcgttatgtatgtagtctgttgctgctgaaagatgtctgtgtgcctgtatcaacatgtgacttcatgtaaagtttctttgtgttcacagttcttagcaaatgcagttacaatccatagatagccagcagtggatgttactccaggaaaatgcaggattaaaattgtccttgtgtataacgtgtgaatcatttttttaaactgaaatttaaaatgcaacatagtttaatctctgattaaaatgtactaatagggccaagctgctttgatgcatggctataatcccagccgaggtgggaggatcacttgagtccaggttcaagactagcctgggcaacatggcaagaccctgtccctataaaaaatacaaaaattagccaggcatggtggcgtgcgcctgcagtcccagctacttgggaggctgagttgggaggatcacttgagcctgggaggttgaggctgcagtgaactgagatcacgacactgcactccagcctgggcaacagtaaaacctggtctcca

SEQ ID NO: 372 - DNA, 5394 bp, Homo Sapiens
atctggaggaggcgcagggaacctggagagggtccagccctcagtgccccggccagaggcgggaaggggctctagagcttcgggaggcaagatgacttctctgccccaagcttggaacagctaaagggaaaaacagtgcaagatgagaacaacaaaggtctacaaactcgtcatccacaagaagggctttgggggcagtgatgatgagctagttgtgaaccccaaagtgttccctcacatcaagcttggagacattgtagagattgcacaccccaacgatgaatacagccctctgcttttgcaggtcaagtctcttaaggaagatttacagaaggaaactatcagtgtggaccagactgtgactcaagtgttccggctgagaccttatcaggatgtctatgttaatgtcgtagaccctaaggatgtgacccttgacctagtggaattaacttttaaggatcagtatattggccgtggggatatgtggcgactaaagaaaagtttggtcagcacatgtgcctatatcacccagaaggtggagtttgctggcatcagagcacaggctggtgaactgtgggttaagaatgagaaggtcatgtgtggctacatcagtgaagataccagggtggtgtttcgttctacgtcggctatggtttacatatttattcagatgagctgtgaaatgtgggattttgatatttatggggatttgtattttgagaaagctgtgaatggtttccttgctgatctatttaccaagtggaaggagaagaactgtagtcatgaagtgacagtggtcctgttttctagaactttctatgatgcaaaatctgttgatgaatttcctgaaataaaccgagcctcaattcgacaggatcacaaggggagattctatgaagacttttacaaagtggtggtgcagaatgagagaagagaagaatggacttcacttctcgtaaccattaaaaaactcttcatccagtatccagtgttggtgcgactggaacaggcagagggctttcctcaaggagataattctacctcagcacaaggaaactacctggaggccatcaatctgtcattcaatgtgtttgataagcactacatcaaccgcaactttgaccgaactgggcagatgtcagtggtgatcacgcccggggtgggtgtctttgaagtggaccgcctactcatgatcctgaccaagcagcggatgatagataatggaattggtgtggatttggtgtgcatgggagagcaaccgttacatgctgtcccattgttcaagctccataatcggagtgctccccgtgattctcgtctgggcgatgactataatatccctcactggataaaccacagtttctacacatccaaaagccagctcttttgtaatagtttcaccccacgaataaaactggcaggaaagaagcccgcctctgagaaagcaaaaaatggccgtgatacatctctcgggagtccaaaagaatctgagaacgcccttcccatccaagtagattatgacgcctatgacgctcaagtgttcaggctgcccggcccatcccgggcccagtgcctcaccacctgcagatctgtgcgagagcgagagagtcacagtcgaaagagtgccagctcctgtgatgtttcatccagcccttccctaccaagccgcacactgcccactgaggaagtgaggagccaggcttctgacgacagctccctaggcaagagtgccaacatcctgatgatcccacacccccacctgcaccagtatgaagtcagcagctccttgggatacaccagcactcgagatgtcctggagaacatgatggagccaccacagcgagactccagtgcaccagggaggtttcacgttggcagtgcagaatccatgctgcatgttcgacctggtggatacacgccccagagagcactgattaaccccttcgctccctctcggatgcccatgaagcttacgtccaacagaaggcgctggatgcacacttttcctgtggggccatccggagaagccatccagatccaccaccagacccgacagaatatggcggagctacaaggcagcgggcagagggatccaactcactcctctgcagagctgctggagttagcatatcatgaagctgctggaaggcacagcaattcccgccagcctggtgacggcatgtccttcttgaacttcagtggaacagaggagctttctgtcggcctgcttagcaacagtggtgcaggtatgaatcctaggacccagaataaggattctctagaggacagtgtttctacctctccagacccaatgccaggcttctgttgcacagttggagtggactggaagtctctcactactccggcgtgcctcccccttaccaccgactacttccctgaccgccagggcctgcagaatgactacacagagggctgttatgatctccttccagaagcagacatcgacaggagggacgaagatggtgtgcagatgacagcccagcaggtatttgaagagtttatttgccaacgtctcatgcagggctaccaaatcatagtgcagcccaagacacagaaacccaatcctgctgtcccgcccccgctgagcagtagcccactctatagccgaggccttgtgtcccgaaaccgccctgaggaggaggaccagtattggctgagtatgggcagaacgttccacaaagtgacgctgaaggataagatgatcacagtgacgcgataccttcccaagtatccttatgaatctgcccagatccactacacctacagcctctgtccttcccactcagactcagagttcgtctcctgctgggtggaattctcccacgaacggctggaggagtacaagtggaattacttagatcagtatatctgttctgccggctctgaagacttcagcttaattgagtccctgaagttctggaggacccgcttcctgctgctgccagcctgtgtcaccgccaccaagcgcatcacggagggggaggcccactgcgacatctatggggacaggccccgtgcagacgaggacgagtggcaactcctggatggttttgtccgctttgtggagggcttgaatcgcattcgcaggcggcatcgctcggatcgcatgatgcggaaagggaccgccatgaaaggcttgcagatgactgggcccatttccacgcattctctggagtcaactgcacccccagtggggaagaagggaacctcagctctctctgccctgttggagatggaggccagtcagaagtgcctgggagaacagcaggcagctgtgcatggtgggaagagctccgcccagtcagccgagagcagcagcgttgccatgactcccacctacatggacagcccacgaaaggtatctgtggaccaaacagccactcctatgttggacggcaccagtttgggcatatgcacaggccaatccatggacagaggcaacagccagacctttgggaactcccagaacataggagaacagggctactcctccacaaactccagtgacagcagctctcagcagctggtggcaagctccttgacctcatcctctaccctgacagagatcctggaagccatgaagcacccctcgacaggagtccagctgctctctgaacagaagggcctctcaccgtactgcttcatcagcgcggaggtggtacactggttggtgaaccacgtggaggggatccagacacaggcgatggccattgacatcatgcagaaaatgctggaagagcagctcatcacacatgcatctggcgaagcctggcggaccttcatctacggcttctatttctacaagatagtaacggacaaagagcccgaccgagtggccatgcagcagcccgccaccacctggcacacagcaggagtggacgacttcgccagcttccagcgcaagtggtttgaggtggcctttgtggcagaagagctcgtgcactctgagattcctgcctttctcctgccctggctgcctagccggccagcctcctatgcaagtaggcacagctcctttagccgaagttttggaggacggagccaggcggcagcacttttagctgccactgtcccagagcagaggactgtgaccctggatgttgacgtgaacaaccgcacagaccggctggagtggtgcagctgttattaccatggcaacttttctctgaatgcagcctttgagatcaagctgcactggatggcggtgaccgcagcagtactcttcgagatggtccaaggttggcatcggaaagccacctcctgtggcttcttgttagtcccagttttggaggggccttttgcactgcccagttacctgtatggcgacccccttcgtgcccagctcttcatcccactcaacatcagctgcttgctcaaggagggcagcgagcacctgtttgatagctttgaacccgaaacgtactgggatcgaatgcacctcttccaggaagccattgcacacaggtttgggtttgtacaagataaatattctgcctctgcttttaacttccctgctgagaacaagcctcagtatatccacgttacaggaacagtgtttctgcagctgccctactccaagcgcaagttctcagggcagcagcggcggcggcggaactccaccagctccaccaaccagaacatgttctgcgaggagcgggtcggctacaactgggcctacaacaccatgctcaccaaaacatggcgctccagcgccacaggggatgaaaagtttgctgatcggctgctgaaggacttcacggacttctgcatcaaccgtgacaaccggctggtcacgttctggacaagttgcctggagaagatgcatgccagtgccccgtgaggccaggctgcacctgtgctgggggaaggtgggtgagccactgccctcaaacccggggcggaggattccaggcaggctctaggagtcaggtgtccgtttgctgctatcagtgagtgggggccattgttttttgtttgtttgtttgtttgtttgtttgtttttggcccccacgacaagtcttctactctagaagaaagactttggaagcagctgctgctgctgccaccactcctgtcagcaagtgctcagagcaggtgggaggcacagattgtccgtgggagggctccagtgtctgggaagagggcaggcggcccccatgaatgtcctcggaagggggtggctcctggtagcatccttttccttcaccatctatgggatattaggggcagaatctgccacttcttgcccaggagtgtgcacagatgtaagataattttgtgaaataatgtaccatagactctcaccaactgtatatacctgtacatatcagaagcaaataaagagctccacgtgcatcaaaaaaaaaaaaaaaa

SEQ ID NO: 373 - DNA, 2830 bp, Homo Sapiens
gactcaccctgggccgggggtgaggcttggactgtttctttttccaaaagaggagctcaaaagagaaagttcatctagaaatctcaaagccatgtctcaggatgaactagagtatgcccttacagggatcagtgtcattcaaggatgtgactgtggacttcacccaggaggagtggcagcaactagaccctgctcagaaggcgctttacagggatgtgatgttggaaaactattgccacttcgtatctgtggggtttcacatggctaagcctgatatgatccgcaagttggaacaaggagaagagctatggacacagagaatttttccaagttacagctacctagaagaagatgggaaaactgaagatgtcttagtgaagttcaaagaataccaagacaggcattctagacccctcatattcatcaaccacaaaaaactaattaaggagagaagtaatatttatggtaaaacatttactctaggcaagaaccgtatttcaaaaacaatactatgtgaatataaacctgatggaaaagttttgaaaaatatttcagaactagtcattagaaatataagccccataaaagagaagtttggtgacagtactggatgggagaaatcactcctcaataccaagcatgagaaaattcatcctgcagtgaatctccataaacaaacagaaagagttctcagtggtaaacaggagcttattcagcatcagaaggttcaagctccagagcaaccatttgaccataatgaatgtgaaaaatccttcctgatgaaaggaatgctatttacacatactagagctcacagaggagaaagaacctttgaatacaataaagatggaattgccttcatagaaaagtcaagcctcagtgtccatccaagtaatcttatggaaaagaagccctctgcctacaacaaatatgggaaattcctctgcagaaagcctgtttttattatgcctcagagacctcaaacagaagagaaaccctttcactgtccttactgtgggaataactttagaaggaagtcatacctcattgaacatcagcgaattcacacaggtgaaaaaccttatgtttgcaatcaatgtggaaaggccttccgtcagaagacagccctcacccttcatgagaaaacacatatagaggggaaaccctttatttgtatcgattgtgggaagtccttccgccagaaggccaccctcactagacatcacaaaacacatacgggggagaaagcctatgaatgtcctcagtgtggaagtgcctttaggaagaagtcatacctcattgatcaccagagaactcacacaggagagaaaccgtatcagtgtaatgagtgtgggaaggcatttatccagaagacaaccctcactgttcatcagagaactcacacaggagagaaaccctatatttgcaatgaatgtgggaagtccttctgccaaaagacaaccctcactctccaccagagaattcacacgggggaaaaaccctatatttgtaatgaatgtgggaagtccttccgccagaaggcaatcctcactgttcatcacagaatacatacaggagaaaaatccaatgggtgtcctcagtgtgggaaagccttcagtaggaaatcaaacctcattcgccatcagaaaactcacacaggcgagaaaccatatgaatgtaaacagtgtgggaagttcttcagttgtaagtcaaacctcattgtccatcagaaaactcacaaggtagaaaccacgggaattcagtaagtaatgtggctttttttgtaaaaaaatgttaagtcatagtaaaccctgtagatgatgttgcttgcaagcgtaatatccaacagtttaaggtactataccacatggtaacctactgtttgccagcctgtaaaacacacacacacacacacacacacacacaaatattattagacaaattagatgacaaaaatcattaagaagtccaaactttttttttattactagcttcagcagacaaaaacttcctctgtcaaggtgttataaacatttaaaatcacattttccatttccatacatatctttttgttcatcagtaataactagttggccaactgactgtggtccatggactacacagtgagtagaggttctttaaaagaaggaggtatgaactgtatttctcattgcaaatacaaaataaaaattagttgttacctcctcacagttgaccatgattctgacttctaacattacaaattagtttttactattataaacctttctataaattggattatatatcatgtattctttcatatacagcttattaccttcatcatgtccgtgagtctaatcattagtacgtgtggcagaagtttatttatttttatccagtatagaattcaattatatgattatatcacaatttatccattctgctgttgatggacttttacattgtttacagcttagggtcataataaatcatgcttctgagaacatacttgtcttggtgtacatacatgtatttctcttgtgtatatacttaggagtggaatcgctgggtcttagagcatgtgtgtattcagtcagatactggcagacaattcagaactttcaccacatgagataattgacactgaagggaaacagctataaattttatcaatatggtgctggttcaaaccagagaattcatgctgcagggaaactcaatcaatgttattgtgaaaactgggaatgtgaatgtaatatatgtagaaaaacatttagccacagcccaaatcttccaggcaaatgtaataaacgtgacattgccgttagccaaaaaaaaaaaaaaaaaa

SEQ ID NO: 374 - DNA, 1439 bp, Homo Sapiens
tgcggcggcgagggaggaggaagaagcggaggaggcggctcccgcgctcgcagggccgtgccacctgcccgcccgcccgctcgctcgctcgcccgccgcgccgcgctgccgaccgccagcatgctgccgagagtgggctgccccgcgctgccgctgccgccgccgccgctgctgccgctgctgccgctgctgctgctgctactgggcgcgagtggcggcggcggcggggcgcgcgcggaggtgctgttccgctgcccgccctgcacacccgagcgcctggccgcctgcgggcccccgccggttgcgccgcccgccgcggtggccgcagtggccggaggcgcccgcatgccatgcgcggagctcgtccgggagccgggctgcggctgctgctcggtgtgcgcccggctggagggcgaggcgtgcggcgtctacaccccgcgctgcggccaggggctgcgctgctatccccacccgggctccgagctgcccctgcaggcgctggtcatgggcgagggcacttgtgagaagcgccgggacgccgagtatggcgccagcccggagcaggttgcagacaatggcgatgaccactcagaaggaggcctggtggagaaccacgtggacagcaccatgaacatgttgggcgggggaggcagtgctggccggaagcccctcaagtcgggtatgaaggagctggccgtgttccgggagaaggtcactgagcagcaccggcagatgggcaagggtggcaagcatcaccttggcctggaggagcccaagaagctgcgaccaccccctgccaggactccctgccaacaggaactggaccaggtcctggagcggatctccaccatgcgccttccggatgagcggggccctctggagcacctctactccctgcacatccccaactgtgacaagcatggcctgtacaacctcaaacagtgcaagatgtctctgaacgggcagcgtggggagtgctggtgtgtgaaccccaacaccgggaagctgatccagggagcccccaccatccggggggaccccgagtgtcatctcttctacaatgagcagcaggaggctcgcggggtgcacacccagcggatgcagtagaccgcagccagccggtgcctggcgcccctgccccccgcccctctccaaacaccggcagaaaacggagagtgcttgggtggtgggtgctggaggattttccagttctgacacacgtatttatatttggaaagagaccagcaccgagctcggcacctccccggcctctctcttcccagctgcagatgccacacctgctccttcttgctttccccgggggaggaagggggttgtggtcggggagctggggtacaggtttggggagggggaagagaaatttttatttttgaacccctgtgtcccttttgcataagattaaaggaaggaaaagtaaa

SEQ ID NO: 375 - DNA, 1102 bp, Homo Sapiens
actggtgacgtagatctcatgtgaccaggagtcgacgtgtgcagaagtcctggtaatctggtccttgttcccgtctggataccagcttccttcagcagcgcaggcggtggtccctgaggcccgtggaaggagtcaaacttgcgggaattttgcagtttatctgcagggctgttgtttccagcaagacccaaagctagaaaaggaggaggaagaaactgacccgatcagtgccagaagtcattgtattcaaagaagaataagcaagaaagaaaagaaggaaggaagagaggtagacagatacaagatgaaatcctgtcaaaaaatggaaggaaaaccagaaaatgagagtgaaccaaagcatgaggaagagccaaagcctgaggaaaagccagaagaggaggagaagctagaggaggaggccaaagcaaaaggaacttttagagaaaggctgattcaatctctccaggagtttaaagaagatatacacaacaggcatttaagcaatgaagatatgtttagagaagtggatgaaatagatgagataaggagagtcagaaacaaacttatagtgatgcgttggaaggttaatcgaaaccatccttacccctatttaatgtagtttaccttgatttttatctgatattaacaataccatatagcttgctttttattagcatttcctgatattcctttgtccatatttctacttataacctgttgctattaatggttttagatgtatctcttgttatctgcatctcattgtttattgtattttgaaccaatctacaagtctctgtcttttaataaaagaactttacacatttgtaaaaaagaggttcttggtaagatataaaatggaaaaaggctaagtaatatgtgaatatcatatttttgaaaggtaaaaagtacatttgtatattacatatatggacataacttgtgaaggatgaaagaaagtacagcctctcggtggtgggattatgaatgatttttctccttttgcttgtttgtattttctatattcctaaaattaacacacattattattgctagaataataaaagttttataaaaaagaagcaacaaaaaaaaaaaaaaa

SEQ ID NO: 376 - DNA, 4302 bp, Homo Sapiens
agcaagctgagctcagagcgaagctggcgagccaaggagataaagaaccctcggtggggatgcccagagggtgcatgctccacgcccctcgaaaccgattctcattgctgctgctgcaaagcaacccgaagtgcgccacctacccgactgaggctgcgcaagccccggggtctgggcggggtggtcctcgtgcgcgccgcgtcgccgtggagacgagggcgggcccgcgcgagactggcgtctagaggcgcgcgaagcgctgaggcgggcgtggaccgcgcgggagttaagaagcaggtcccggatcgccgtataccgccgggttttctcccaacgtcaggcccgatggctcggcttccccagttagaaggggaagataaaagactttgattcatgaagaatctgctcactgagaagtgtatatcaagccacaatttccatcaaaaagtgattaagcagagaatggagaagaaggttgattccaggtattttaaggatggtgcagttaagaaaccttattctgcaaagacactgtccaacaagaagtcttctgcatcctttgggatccggagggagttacctagtaccagtcatctagtgcagtatcgtggcacacatacttgtacccgacagggccggttaagagaactgcgcatcagatgcgtggccagaaagttcttatatttatggattcgaatgacttttggaagagtatttccctctaaagccagattttactatgagcagcgattactacggaaggtcttcgaagaatggaaagaggagtggtgggttttccagcacgagtggaaactctgtgttcgagctgactgtcactacaggtattacctgtacaacctgatgttccagacgtggaagacctatgtgcgtcagcagcaggagatgaggaacaagtacattagagccgaggttcatgatgcaaagcaaaagatgcgacaggcctggaagtcctggttgatctacgtggttgttcgtaggaccaaacttcagatgcagactacagctctggagtttaggcaacggattatcttacgggtgtggtggagcacgtggaggcagcgactaggacaggtccgtgtgagccgtgccctccatgcctctgctttgaagcacagggccctgagcctccaggtgcaggcttggtcacagtggcgggaacagctcctgtatgtccagaaggagaaacaaaaggttgtctctgcagtgaaacatcatcagcactggcaaaaacggagatttctaaaggcctggcttgaatacctgcaagtccgcagagtgaagagacagcagaatgagatggctgagcgattccatcatgtcactgtgctccagatatacttctgtgactggcagcaggcctgggagcggagggagagcttgtacgctcaccatgcccaggtggagaaactggccaggaagatggccctgcggcgcgcctttactcactggaaacactacatgctgctgtgtgcagaagaagctgcccagtttgagatggcagaagagcaccacaggcacagccagctgtatttttgctttagagccctaaaagacaatgtgacccacgctcatctccagcaaataagaaggaatcttgctcaccagcagcatggtgtcacgctgctgcacaggttctggaacctctggcggtctcagattgagcagaaaaaggaaagagagctgctccccttactgcatgctgcctgggaccactacagaatagcactgctgtgcaaatgtatcgaattgtggctacagtatactcagaagaggcggtacaagcagctgctacaggccagagcggatggtcatttccagcagagagccctgcctgctgccttccacacatggaacagactctggcgatggcgccaccaggaaaatgtcctcagtgcaagagcaacacgtttccacagggagacattagagaagcaagtattttctctctggaggcagaagatgtttcagcatcgagaaaaccgcctggcagagagaatggccatccttcacgcagagcgacagcttctgtataggtcttggttcatgtggcaccagcaggcagcagcacgtcaccaggagcaggagtggcaaacagtggcctgtgcccaccaccgccacgggcggctcaagaaagctttctgcctctggagggaaagtgcccaagggctcagaacagagaggacgggcagggtgcgggcagcagaattccacatggcccagctcctgcgttgggcctggagccagtggagggagtgcctggccctgcggggagcggagcggcagaagctgatgcgagcagacctgcaccaccagcacagcgtgctgcacagggcgctgcaggcatgggtgacttaccagggcagggtgcgaagcatcctccgggaggtggcagccagggagagccagcacaacaggcagctgctgcgcggggcattacgtcgctggaaagagaacaccatggcccgagtggatgaagccaaaaaaacctttcaagcaagtactcattacagaaggaccatatgttccaaggtcctggtccagtggcgggaagctgtgtcagtgcagatgtattaccgacagcaggaggactgtgccatctgggaggcccagaaggtgctggacaggggctgtctgcggacctggtttcagcgctggtgggactgcagccggaggtcagcccagcagagactgcagctggagagggcagtgcaacaccaccaccggcagctgctgctggaggggctggcccggtggaagacgcaccatctgcagtgtgtcaggaagaggctcctgcacaggcagagcacccaactgctggcacagagactcagccggacctgcttccgccagtggagacaacagctggcagccaggaggcaggagcagcgggcgacagtgcgggccctgtggttctgggccttctcgctgcaggcaaaggtgtgggccacgtggctggcctttgtactggaaaggaggagaaagaaggcgcggctgcagtgggcgctccaggcctaccaggggcagctcctccaggagggtgccacgcggctcctgcgctttgcagccagcatgaaggcctcccggcagcagctgcaggcccagcagcaggtccaggcggctcacagtctccatcgtgccgtccgccgctgtgccacgctctggaaacagaaagtgctgggccggggcgggaagcctcagcccctggcagccatcgcacccagcaggaaagtgacgtttgagggtccccttctcaaccgcattgctgctggggctggggatggcacccttgagaccaagaggccacaggcttctcggcctctgggagctctgggccgcctggctgctgaggagccccacgccctggagctcaacactgcccactcagcgaggaagcagccgcgacgcccacacttcctgttggagcctgcgcagagccagaggcctcagaagccacaggaacatggcctaggcatggctcagccagcagccccctccctgacgcggcccttcctggcagaggccccgacagcactggtcccacacagccccctgcctggggccctgtcaagcgcccctggcccgaagcagcccccgacggcaagcacaggcccggagctgctgctgctgcctctttcctccttcatgccctgcggggcggctgcaccagccagggtgtcagcacagcgggctactcctagggataagcccccggtcccctcatccctggccagtgtccctgacccccatctactccttcctggggacttctcagccaccagggctgggcctggactttcaactgcaggcagcctggaccttgaggctgaacttgaggagatccagcagcaactactgcactaccagaccaccaagcagaacctctggtcctgtcggcggcaagcgagcagcctgcgcaggtggctggagctgaacagagaggagccggggcctgaggaccaggaagtagagcagcaggtgcagaaagagctggaacaggtggaaatgcagatccagctgctggcagaggagctccaggctcagcgccagcccattggcgcctgcgttgcccgcatccaggccctgcggcaggccctgtgctagcgtgttcgcaccaggaacgcaggtgctgggctgtcggggaggcctcaggccacctccaggaacagaacacagttttaagtttgattttttttatttcaaaatgctttgcaattaaatgaattactgttcaaaaaaaaaaaaaaaaaaaaaaaaaaaaaaaaaaaaaaaaaaaaaaaaaaa

SEQ ID NO: 377 - DNA, 1435 bp, Homo Sapiens
atccccttacatcctcctaggacccggtcggtagtcgtcgccccagcccgccgggggcgcagcgcccgagccgcggccctcgagacgggaccgagagcatcatgggcagcactgtcccgcgctccgcctccgtgctgcttctgctgctgctcctgcgccgggccgagcagccctgcggggccgagctcaccttcgagctgccggacaacgccaagcagtgcttccacgaggaggtggagcagggcgtgaagttctccctggattaccaggtcatcactggaggccactacgatgttgactgctatgtagaggacccccaggggaacaccatctacagagaaacgaagaagcagtacgacagcttcacgtaccgggctgaagtcaagggcgtttatcagttttgcttcagtaatgagttttccaccttctctcacaagaccgtctactttgactttcaagtgggcgatgagcctcccattctcccagacatggggaacagggtcacagctctcacccagatggagtccgcctgcgtgaccatccatgaggctctgaaaacggtgattgactcccagacgcattaccggctgcgggaggcccaggaccgggcccgagcggaagaccttaatagccgagtctcttactggtctgttggcgagacgattgccctgttcgtggtcagcttcagtcaggtgctactgttgaaaagcttcttcacagaaaaacgacccatcagcagggcagtccactcctagccccggcatcctgctctagggcccctcatgccccaggctggagcagctctcctaggtcacagcctgctgggctgggtcgcgtagcccagggtggaggcagaacgatgctgctgtggtagccctttgcctttcatgcccatgcttgattcttgcacctcagcagctgaaggtctcagagaccagtaatcagaaggcatccgactgcattaagtgtgcagcgctgaaaagacatttacaactaggccagggattagccactgtgggagggtggacaggcaatggttcagtggcctggctgttggcaggaactccaagtgcccaggcctcttgggcagcttagggccctgcctctgtttcatgatgcatgggtcatttgtcttgggtgtcctatcccatatggagaagaaaggggctctaagttctggctcttctttctttggggttctctgtacctgaggaaaccaggccctgggtgactttgcagatctgctcaccctcggtgagcaacagtgtcagccatgcaagcaggacagaatggtgactgggtgcccttggtgagctgtgtatttcctaggaggtagaaaactgtgggaaactgtggctaataaaaactaagtgtgagcgtcctggagaaaaaaaaaaaaaaaaaaaaaaaaaaaaaaaaaaaaaaaaaaaaaaaa

SEQ ID NO: 378 - DNA, 8826 bp, Homo Sapiens
gagtctttgaggacacagcctcgctggaggcagtttctggtgccagtgacggggtggcccgtgagctgatgacgaggactggcttttaatccttggtggtgattaagagaaagcttattggggcctgggagcagctccccgccgacccccaccaccatgtcgggatccacacagcctgtggcacagacgtggagggccactgagccccgctacccgccccacagcctttcctacccagtgcagatcgcccggacgcacacggacgtcgggctcctggagtaccagcaccactcccgcgactatgcctcccacctgtcgcccggctccatcatccagccccagcggcggaggccctccctgctgtctgagttccagcccgggaatgaacggtcccaggagctccacctgcggccagagtcccactcatacctgcccgagctggggaagtcagagatggagttcattgaaagcaagcgccctcggctagagctgctgcctgaccccctgctgcgaccgtcacccctgctggccacgggccagcctgcgggatctgaagacctcaccaaggaccgtagcctgacgggcaagctggaaccggtgtctccccccagccccccgcacactgaccctgagctggagctggtgccgccacggctgtccaaggaggagctgatccagaacatggaccgcgtggaccgagagatcaccatggtagagcagcagatctctaagctgaagaagaagcagcaacagctggaggaggaggctgccaagccgcccgagcctgagaagcccgtgtcaccgccgcccatcgagtcgaagcaccgcagcctggtgcagatcatctacgacgagaaccggaagaaggctgaagctgcacatcggattctggaaggcctggggccccaggtggagctgccgctgtacaaccagccctccgacacccggcagtatcatgagaacatcaaaataaaccaggcgatgcggaagaagctaatcttgtacttcaagaggaggaatcacgctcggaaacaatgggagcagaagttctgccagcgctatgaccagctcatggaggcctgggagaagaaggtggagcgcatcgagaacaacccccggcggcgggccaaggagagcaaggtgcgcgagtactacgagaagcagttccctgagatccgcaagcagcgcgagctgcaggagcgcatgcagagcagggtgggccagcggggcagtgggctgtccatgtcggccgcccgcagcgagcacgaggtgtcagagatcatcgatggcctctcagagcaggagaacctggagaagcagatgcgccagctggccgtgatcccgcccatgctgtacgacgctgaccagcagcgcatcaagttcatcaacatgaacgggcttatggccgaccccatgaaggtgtacaaagaccgccaggtcatgaacatgtggagtgagcaggagaaggagaccttccgggagaagttcatgcagcatcccaagaactttggcctgatcgcatcattcctggagaggaagacagtggctgagtgcgtcctctattactacctgactaagaagaatgagaactataagagcctggtgagacggagctatcggcgccgcggcaagagccagcagcagcaacaacagcagcagcagcagcagcagcagcagcagcagcagcccatgccccgcagcagccaggaggagaaagatgagaaggagaaggaaaaggaggcggagaaggaggaggagaagccggaggtggagaacgacaaggaagacctcctcaaggagaagacagacgacacctcaggggaggacaacgacgagaaggaggctgtggcctccaaaggccgcaaaactgccaacagccagggaagacgcaaaggccgcatcacccgctcaatggctaatgaggccaacagcgaggaggccatcaccccccagcagagcgccgagctggcctccatggagctgaatgagagttctcgctggacagaagaagaaatggaaacagccaagaaaggtctcctggaacacggccgcaactggtcggccatcgcccggatggtgggctccaagactgtgtcgcagtgtaagaacttctacttcaactacaagaagaggcagaacctcgatgagatcttgcagcagcacaagctgaagatggagaaggagaggaacgcgcggaggaagaagaagaaagcgccggcggcggccagcgaggaggctgcattcccgcccgtggtggaggatgaggagatggaggcgtcgggcgtgagcggaaatgaggaggagatggtggaggaggctgaagccttacatgcctctgggaatgaggtgcccagaggggaatgcagtggcccagccactgtcaacaacagctcagacaccgagagcatcccctctcctcacactgaggccgccaaggacacagggcagaatgggcccaagcccccagccaccctgggcgccgacgggccacccccagggccacccaccccaccaccggaggacatcccggcccccactgagcccaccccggcctctgaagccaccggagcccctacgcccccaccagcacccccatcgccctctgcacctcctcctgtggtccccaaggaggagaaggaggaggagaccgcagcagcgcccccagtggaggagggggaggagcagaagccccccgcggctgaggagctggcagtggacacagggaaggccgaggagcccgtcaagagcgagtgcacggaggaagccgaggaggggccggccaagggcaaggacgcggaggccgctgaggccacggccgagggggcgctcaaggcagagaagaaggagggcgggagcggcagggccaccacagccaagagctcgggcgccccccaggacagcgactccagtgctacctgcagtgcagacgaggtggatgaggccgagggcggcgacaagaaccggctgctgtccccaaggcccagcctcctcaccccgactggcgacccccgggccaatgcctcaccccagaagccactggacctgaagcagctgaagcagcgagcggctgccatcccccccatcgtcaccaaagtccatgagcccccccgggaggacgcagctcccaccaagccagctcccccagccccaccgccaccgcaaaacctgcagccggagagcgacgcccctcagcagcctggcagcagcccccggggcaagagcaggagcccggcaccccccgccgacaaggaggcagagaagcctgtgttcttcccagccttcgcagccgaggcccagaagctgcctggggaccccccttgctggacttccggcctgcccttccccgtgcccccccgtgaggtgatcaaggcctccccgcatgccccggacccctcagccttctcctacgctccacctggtcacccactgcccctgggcctccatgacactgcccggcccgtcctgccgcgcccacccaccatctccaacccgcctcccctcatctcctctgccaagcaccccagcgtcctcgagaggcaaataggtgccatctcccaaggaatgtcggtccagctccacgtcccgtactcagagcatgccaaggccccggtgggccctgtcaccatggggctgcccctgcccatggaccccaaaaagctggcacccttcagcggagtgaagcaggagcagctgtccccacggggccaggctgggccaccggagagcctgggggtgcccacagcccaggaggcgtccgtgctgagagggacagctctgggctcagttccgggcggaagcatcaccaaaggcattcccagcacacgggtgccctcggacagcgccatcacataccgcggctccatcacccacggcacgccagctgacgtcctgtacaagggcaccatcaccaggatcatcggcgaggacagcccgagtcgcttggaccgcggccgggaggacagcctgcccaagggccacgtcatctacgaaggcaagaagggccacgtcttgtcctatgagggtggcatgtctgtgacccagtgctccaaggaggacggcagaagcagctcaggacccccccatgagacggccgcccccaagcgcacctatgacatgatggagggccgcgtgggcagagccatctcctcagccagcatcgaaggtctcatgggccgtgccatcccgccggagcgacacagcccccaccacctcaaagagcagcaccacatccgcgggtccatcacacaagggatccctcggtcctacgtggaggcacaggaggactacctgcgtcgggaggccaagctcctaaagcgggagggcacgcctccgcccccaccgccctcacgggacctgaccgaggcctacaagacgcaggccctgggccccctgaagctgaagccggcccatgagggcctggtggccacggtgaaggaggcgggccgctccatccatgagatcccgcgcgaggagctgcggcacacgcccgagctgcccctggccccgcggccgctcaaggagggctccatcacgcagggcaccccgctcaagtacgacaccggcgcgtccaccactggctccaaaaagcacgacgtacgctccctcatcggcagccccggccggacgttcccacccgtgcacccgctggatgtgatggccgacgcccgggcactggaacgtgcctgctacgaggagagcctgaagagccggccagggaccgccagcagctcggggggctccattgcgcgcggcgccccggtcattgtgcctgagctgggtaagccgcggcagagccccctgacctatgaggaccacggggcaccctttgccggccacctcccacgaggttcgcccgtgaccacgcgggagcccacgccgcgcctgcaggagggcagcctttcgtccagcaaggcatcccaggaccgaaagctgacgtcgacgcctcgtgagatcgccaagtccccgcacagcaccgtgcccgagcaccacccacaccccatctcgccctatgagcacctgcttcggggcgtgagtggcgtggacctgtatcgcagccacatccccctggccttcgaccccacctccataccccgcggcatccctctggacgcagccgctgcctactacctgccccgacacctggcccccaaccccacctacccgcacctgtacccaccctacctcatccgcggctaccccgacacggcggcgctggagaaccggcagaccatcatcaatgactacatcacctcgcagcagatgcaccacaacgcggccaccgccatggcccagcgagctgatatgctgaggggcctctcgccccgcgagtcctcgctggcactcaactacgctgcgggtccccgaggcatcatcgacctgtcccaagtgccacacctgcctgtgctcgtgcccccgacaccaggcaccccagccaccgccatggaccgccttgcctacctccccaccgcgccccagcccttcagcagccgccacagcagctccccactctccccaggaggtccaacacacttgacaaaaccaaccaccacgtcctcgtccgagcgggagcgagaccgggatcgagagcgggaccgggatcgggagcgggaaaagtccatcctcacgtccaccacgacggtggagcacgcacccatctggagacctggtacagagcagagcagcggcagcagcggcagcagcggcgggggtgggggcagcagcagccgccccgcctcccactcccatgcccaccagcactcgcccatctcccctcggacccaggatgccctccagcagagacccagtgtgcttcacaacacaggcatgaagggtatcatcaccgctgtggagcccagcacgcccacggtcctgaggtccacctccacctcctcacccgttcgcccggctgccacattcccacctgccacccactgcccactgggcggcaccctcgatggggtctaccctaccctcatggagcccgtcttgctgcccaaggaggccccccgggtcgcccggccagagcggccccgagcagacaccggccatgccttcctcgccaagcccccagcccgctccgggctggagcccgcctcctcccccagcaagggctcggagccccggcccctagtgcctcctgtctctggccacgccaccatcgcccgcacccctgcgaagaacctcgcacctcaccacgccagcccggacccgccggcgccacctgcctcggcctcggacccgcaccgggaaaagactcaaagtaaacccttttccatccaggaactggaactccgttctctgggttaccacggcagcagctacagccccgaaggggtggagcccgtcagccctgtgagctcacccagtctgacccacgacaaggggctccccaagcacctggaagagctcgacaagagccacctggagggggagctgcggcccaagcagccaggccccgtgaagcttggcggggaggccgcccacctcccacacctgcggccgctgcctgagagccagccctcgtccagcccgctgctccagaccgccccaggggtcaaaggtcaccagcgggtggtcaccctggcccagcacatcagtgaggtcatcacacaggactacacccggcaccacccacagcagctcagcgcacccctgcccgcccccctctactccttccctggggccagctgccccgtcctggacctccgccgcccacccagtgacctctacctcccgcccccggaccatggtgccccggcccgtggctccccccacagcgaagggggcaagaggtctccagagccaaacaagacgtcggtcttgggtggtggtgaggacggtattgaacctgtgtccccaccggagggcatgacggagccagggcactcccggagtgctgtgtacccgctgctgtaccgggatggggaacagacggagcccagcaggatgggctccaagtctccaggcaacaccagccagccgccagccttcttcagcaagctgaccgagagcaactccgccatggtcaagtccaagaagcaagagatcaacaagaagctgaacacccacaaccggaatgagcctgaatacaatatcagccagcctgggacggagatcttcaatatgcccgccatcaccggaacaggccttatgacctatagaagccaggcggtgcaggaacatgccagcaccaacatggggctggaggccataattagaaaggcactcatgggtaaatatgaccagtgggaagagtccccgccgctcagcgccaatgcttttaaccctctgaatgccagtgccagcctgcccgctgctatgcccataaccgctgctgacggacggagtgaccacacactcacctcgccaggtggcggcgggaaggccaaggtctctggcagacccagcagccgaaaagccaagtccccggccccgggcctggcatctggggaccggccaccctctgtctcctcagtgcactcggagggagactgcaaccgccggacgccgctcaccaaccgcgtgtgggaggacaggccctcgtccgcaggttccacgccattcccctacaaccccctgatcatgcggctgcaggcgggtgtcatggcttccccacccccaccgggcctccccgcgggcagcgggcccctcgctggcccccaccacgcctgggacgaggagcccaagccactgctctgctcgcagtacgagacactctccgacagcgagtgactcagaacagggcgggggggggggcggtgtcaggtcccagcgagccacaggaacggccctgcaggagcagggcggctgccgactcccccaaccaaggaaggagcccctgagtccgcctgcgcctccatccatctgtccgtccagagccggcatccttgcctgcggctgccgactcccccaaccaaggaaggagcccctgagtccgcctgcgcctccatccatctgtccgtccagagccggcatccttgcctgtctaaagccttaactaagactcccgccccgggctggccctgtgcagaccttactcaggggatgtttacctggtgctcgggaagggaggggaaggggccggggagggggcacggcaggcgtgtggcagccacacgcaggcggccagggcggccagggacccaaagcaggatgaccacgcacctccacgccactgcctcccccgaatgcatttggaaccaaagtctaaactgagctcgcagcccccgcgccctccctccgcctcccatcccgcttagcgctctggacagatggacgcaggccctgtccagcccccagtgcgctcgttccggtccccacagactgccccagccaacgagattgctggaaaccaagtcaggccaggtgggcggacaaaagggccaggtgcggcctggggggaacggatgctccgaggactggactgtttttttcacacatcgttgccgcagcggtgggaaggaaaggcagatgtaaatgatgtgttggtttacagggtatatttttgataccttcaatgaattaattcagatgttttacgcaaggaaggacttacccagtattactgctgctgtgcttttgatctctgcttaccgttcaagaggcgtgtgcaggccgacagtcggtgaccccatcactcgcaggaccaagggggcggggactgctggctcacgccccgctgtgtcctccctccctcccttccttgggcagaatgaattcgatgcgtattctgtggccgccatctgcgcagggtggtggtattctgtcatttacacacgtcgttctaattaaaaagcgaattatactccaaaaaaaaaaaaaaaaaaa

SEQ ID NO: 379 - DNA, 6040 bp, Homo Sapiens
actttccacgggtgaggcctggagaacgggtggacgtgcaggccagaacccgggacccacccggctgagcccccagactctccgctgcccacgaccctcggagtggcaccctctcctggccgtctcctctcgtgggtcccgaagaacgggtgcaaagccgagttcgtccgctgtactgcgcgggcgcgcgtttcgttcttcggttttgccacggttctgtgactccctaaaggttgagggctactgaattagaagaaacgccgagctggcttctggtgggctgccgggcgccgggcagcgtgcttggactggggagggcagggcgtgtttactctgagtagagcaaccgcaagacctcctttaaaaaataccagttctgagcttcggcattggagaggccgcctgtcattcagcctcttcggaccctctctcactccctgtcttccggagcgtgagtgaagcccgggtgaggtgttttcccacacgccgggggcccggagctgagaaggggcatggccagcatcacgcagctgttcgacgacctgtgtgaggccctcctgccggctgccaagactcacctgggccagcgcagtgtgaaccggaagagggcaaagcggagcctcaagaaggtggcctacaatgctcttttcacaaatctttttcaagatgagactcaacagctgcagcctgacatgtcaaaactaccagcgagaaacaagatcctcatgttgtcctttgacttgagagtgggtggcctgggccccaaggccgaccgtttggaggagcttgtggaggagctggaagcagccccttgctgtccgcttttggaggtggggtctgttttggacctcctggttcagctggcagggagtggtccccctcaagttctgccgagaaaacgagactacttccttaacaacaagcatgtggggagaaacgttccgtacagcggctatgattgcgacgacctgagtgtgtttgagatggacgttcagtctctgatctccagagaagagtgtttgtgtcacagcatgatccaggaaacacttcaggttatggaggctgctccaggcactggcctgcccaccgtcgggctcttctcatttggtgacccttgtggtgacaggttcgagagagacacccgggtctcgctcttcggggcccttgtgcacagccgcacttatgacatggacgtccgactgggcctgccccccgtgccagacaatgcggacctctctgggctggctattaaggtcccaccgagtgtggatcagtgggaagacgaaggattccagtcagcgtccaacttgactcctgattcccagtctgagcccagcgtgaccccagacgtggacctgtgggaagccgcacttacctatgaggccagcaagcggaggtgctgggagcgagttggctgcccccctggccacagagaggagccttacctgacggaggcgggaagggacgctttcgacaagttctgcaggctccaccaaggggagctccagctgcttgctgggggcgtcctacaggccccgcagcccgtgctggtgaaggagtgcgagctggtgaaagacgtgctgaacgtcttgattggggtcgtgtctgccacgttttcgctctgccagccggcccaggcctttgtggtgaagcggggcgtccacgtgtcaggagcgtctcccgagagcatcagcagcctgctctcggaagtggccgagtatgggacctgctacacgcgcctgagtcatttctctctgcagcccgtcctggactctttgtacagcaagggcctcgtgttccaggccttcaccagtggcctgaggaggtacctgcagtattaccgggcctgcgtcctttccactccgcccaccctgagcctcctcaccattggttttctcttcaagaaacttggccggcagctcaggtacctggccgagctctgtggcgttggcgctgtgctcccgggcacctgtggaggaggccccagggccgcgtttcccaccggcgtgaagctgctgtcctacctctaccaggaggctctgcacaactgcagcaacgagcactaccctgtactgctgtccctgctgaagaccagctgcgagccctacacccggttcatccacgactgggtgtacagcggggtgttcagagacgcttatggcgagttcatgattcaggtgaaccacgagtacctcagcttccgagataagttgtactggacacatggctacgtgctcatctccaaagaggtggaggactgtgttcccgtgtttctgaagcacattgcccacgacatatacgtctgcggaaagaccattaacctgctgaagctctgctgcccccggcattacctctgttggtccgacgtccctgtcccccggatctcggtgattttctcccttgaggagttgaaggagattgagaaggactgtgccgtctacgttgggcgcatggagagggtggcccgccacagctctgtcagcaaggaggagaaggaattacgtatggaaattgcaaaacaagaattaatcgctcatgcccgggaagcagcatccagggtcctgagtgcactgagtgaccggcagatgtcagaacggatggccttggatgcccggaagcgtgagcagtttcagaggctgaaagaacaatttgtgaaggaccaggagcgacgccaggcggccaggcaggaggagctggatgatgacttcagctacgcccgtgaactccgagacagggagagaaggctgaagtccctggaggaggagctggagaggaaggcgaggcaggcactggtcgaccactacagcaagctctctgcagaggcagctcgtcgggagcagaaggcactgtggagaatccagaggcaccgactggagagtgcacggcttcgttttctcttagaagatgagaaacacattcaggagatgctgaaagcagtgtctgaggctcaccagccccaggagccgccagacgtcctcttgagcgtgcacccccaggtcacgtctccgggccctgagcacccagagggaggccaaggctgtgattctgggtctgcagagcaacactcgcctgcctgggatggctggaacaggccaggcctgctgaccccacagccccttaagcctctagcagtgggggctggtggcagggggctgcagcaggcggagggggccagacccttctctgacagcctcagcattggagacttcctacctgtgggcccaggggctgagccgtccgtgcagactggcatggtccctctcctggaggtggcgctgcagaccattaacttggacctgcccccctcagctcctggggaggcacccgcagcagccagcactcagccctccaggccacaggagtacgactttagtactgtcctgaggccagctgtggccacctcacctgcaccagggcccctgcaggctgcagagtgcagcttgggcagctcagggctacagctgtgggaggacagttgtgggaagatggatgcctgtggctccgcctcgcgggagactctgctcccctcacacccacccaggcgtgctgctctggaggaggggagcagccagcccacagagcggctctttgggcaggtgtcagggggtggtcttcccacaggggactacgcttctgaaatagctcccacccggccacggtggaacacccacgggcacgtgtctgacgccagcatcagggtcggggagaatgtgtcagatgtggctcccacccagccacggtggaacacccacggacacgtatccaatgccagcatcagcttaggggagtctgtgtcagatgtggctcccactcggccacggtggaacatccatggacatgtgtccaacgccagcatcagggtcggggagaatgtgtcagatgtggctcccaccaggccacggtggaatacccacgggcacgtgtccaacgccagcatcagggttggggagaacgtgtcggacgtggctcccacccggccacggtggaacacccatggacacgtgtccgatgccagcatcagcttgggggagtctgtgtcagacatggctcccgcccggccacggtggaacacccatggacacgtgtctgatgccagcatcagcttgggggagtctgtgtcagacatggctcccacccggccacggtggaacacccacggacatgtgtctgacaccagcatcagggttggggagaacgtatcggacgtggctcccatccggtcacggtgcaacacccatggacacgtgtccgacgccagcatcagcttgggggagcctgtgtcggatgtggtttccacccggccacggtggaacacccatgtacccatccctccgccccacatggtgctgggggctctctcaccagaagctgagcccaacacacccaggccccaacagagcccccctggccacacgtcccagtcagcgctcagcctgggagcacagagcactgtgctggactgtgggccacggctgcctgtagaagtggggccatctctgtcctcccccagctcgggctgcggggaggggagcatcagcgtgggggagaacgtgtcagacgtggctcccacccaaccatggtggcccaacaccccgggagacagtgtctctgaagaactaggccctgggaggagcggggacactgaggacctctctccaaattggcctctcaactcacaggaagacacagctgcccagagcagcccaggccgtggtgaggaggcggaggcatcggcggcggaggctcagggtggggagcaggcctacctggcaggcctggcagggcagtaccacttggagcggtacccggacagttacgagtccatgtccgagccgcccattgctcatcttttgcgccccgtgcttccccgggccttcgccttccccgtggacccccaggtccagtctgccgctgatgagactgctgtgcagctgagcgagttgctgacgctgcccgtgctcatgaagcgctccatcacggcaccgctggccgcccacatctccttggtgaacaaggccgctgtcgactacttcttcgtggagctgcacctggaggcgcactatgaggcactgcggcacttcctgctgatggaggacggcgagttcgcccagtccctcagcgacctgctctttgagaagcttggagctgggcaaacgcccggagagctgctcaacccgctggtgctgaactctgtgctgagcaaggccctgcagtgcagcctgcatggggacaccccgcacgcctccaacctctccctcgctctcaagtacctgcccgaggtgtttgcccccaacgccccggatgtgctgagctgcctggagctcaggtacaaggtggactggcctctcaacattgtcatcaccgagggctgcctgagcaagtacagcggcgtcttctccttcctgctgcagctgaagctcatgatgtgggcgctcaaggacgtctgcttccacctcaagcgcacagccctgctgagccacatggccggctctgtgcagttccgtcagctgcagctgttcaagcacgagatgcagcatttcgtgaaggtcatccagggctacatcgccaaccagatcctgcacgtcacctggtgcgagttcagggccaggttggccaccgtgggcgacctggaggagatccagcgtgcgcacgcagagtacctgcacaaggccgtcttcaggggcctgctcacggagaaggcggcgcccgtcatgaacgtcatccacagcatcttcagcctcgtgctcaagttccgcagccagctcatctcccaggcctgggggccccctgggggcccgcggggtgcagagcaccccaactttgcactcatgcagcagtcctacaacaccttcaagtactactcccactttctcttcaaagtggtgaccaagctggtgaaccgcggctaccagccccacctggaggactttctgctgcgcatcaacttcaacaactactaccaggacgcctgaggctgctctgcgggggacgtgcacaataaaggtgttctcggaccctgaaaaaaaaaaaaaaaaaaaaa

SEQ ID NO: 380 - DNA, 6393 bp, Homo Sapiens
gtacaactcggacttgctgttgctcgagccgcgtctgcacgggtctcggaccgagcggagctcgcagcctcggtcccggagcccaccttcgcctcgcccttgcccagcctgcggtgatggaggcggccaccacactgcacccaggcccgcgcccggcgctgcccctcgggggcccgggcccgctgggcgagttcctgcctccacccgagtgcccggtcttcgaacccagctgggaagagttcgcggaccccttcgctttcatccacaagatccggcccatagccgagcagactggcatctgtaaggtgcggccgccgccggattggcagccaccatttgcatgtgatgttgataaacttcattttacgccacgtatccagagactgaatgaattggaggcccaaactcgtgtaaaattgaatttcttggaccagattgcaaagtactgggagttacagggaagtactctgaaaattccacatgtggagaggaagatcttggacttatttcagcttaataagttagttgcagaagaaggtggatttgcagttgtttgcaaggatagaaaatggaccaaaattgctaccaagatggggtttgctcctggcaaagcagtgggctcacatatcagagggcattatgaacgaattctcaacccctacaacttattcctgtccggagacagcctaaggtgtttgcagaagccaaacctgaccacagacactaaggacaaggagtacaaaccccatgatattccccagaggcagtctgtgcagccttcggaaacgtgccccccagcccgacgagcaaaacgcatgagagcagaggccatgaatattaaaatagaacccgaggagacaacggaagccagaactcataatctgagacgtcgaatgggttgtccaactccaaaatgtgaaaatgagaaagaaatgaagagtagcatcaagcaagaacctattgagaggaaagattatattgtagaaaatgagaaggaaaagcccaagagtcgatctaaaaaagccaccaatgctgtggacctgtatgtctgtcttttatgtggcagtggcaatgatgaagaccggctactgttgtgtgatggctgtgatgacagttaccataccttttgcttgatcccacctctccatgatgttcccaagggagactggaggtgtcctaagtgtttggctcaggaatgtagtaagccacaagaagcatttggctttgaacaagcagccagggactataccctccgtacttttggggaaatggcagatgcgttcaaatctgattacttcaacatgccagtccatatggtccccacagagcttgttgagaaagaattttggagactagtaagcactattgaggaggatgtcacagtggaatatggagctgacattgcctcaaaggaatttggcagtggctttcctgtccgagatgggaaaatcaaactctcacctgaggaagaggagtatcttgatagtggctggaatttgaacaacatgccagtgatggagcagtctgtccttgcacatattactgctgatatatgtggcatgaaacttccttggttgtatgtgggaatgtgcttttcttcattctgttggcacattgaagaccactggagctattcaattaactacttgcactggggtgagccaaaaacctggtatggagtcccagggtatgctgctgagcagctagaaaatgtaatgaagaaactagctccagaactctttgtgtcccagccggatctcctccatcagcttgtgaccatcatgaaccccaataccctgatgactcatgaagtgcctgtttaccgaactaatcagtgtgctggggagtttgtgattacatttccaagagcctaccacagtggttttaaccagggttttaattttgctgaggctgttaacttctgcactgttgattggctgccattaggccgacagtgtgtggagcattatcgcttgcttcatcgatattgtgtgttttcccacgatgagatgatctgcaagatggcttccaaggctgatgtattagatgttgtagtggcttcaactgttcagaaagacatggccattatgattgaggatgagaaagctttaagagaaactgtccgtaaattgggagtgattgattcggaaagaatggattttgagctgttgccagatgatgaacgtcagtgtgtaaaatgcaaaactacatgcttcatgtctgccatctcctgttcttgtaaacctggccttcttgtttgcctgcatcatgtaaaagaattgtgttcctgtcctccttacaaatataaattgcggtataggtacacgctggatgatctctaccctatgatgaatgcattgaagcttcgagcagaatcttacaacgaatgggccttgaatgtgaatgaagctttggaggcaaagatcaacaagaagaaaagccttgtcagcttcaaggctttaattgaagaatctgaaatgaagaaattcccagacaatgatcttttgcgacaccttcgcctagtcacacaggatgcagagaagtgtgcctctgttgcgcagcagttgcttaatggcaaaaggcaaactagatatcgatctggtggagggaaatcccaaaatcagttgacagtgaatgagctccggcagtttgtaacacagctgtatgctcttccatgtgtcctcagtcagacaccattactaaaggatctcttgaatcgtgtagaagattttcaacagcatagtcagaaactactctctgaggaaacgcctagtgctgcggagctgcaggacttgctagatgtcagctttgaatttgatgttgaacttccacagcttgctgagatgcgtatccgtttggaacaagcccgttggctagaagaggtgcagcaagcttgcctagaccccagctcccttactttagatgatatgagacgtctcatagacctaggggtagggctggccccgtattcagcagtggagaaagctatggcccggctgcaggaactgctcacagtgtcagagcactgggacgacaaagccaagagtctcctcaaggccaggccacgacattcattgaatagccttgctacggcagtaaaggaaatcgaagagatccctgcatatctgcccaatggtgcggctctgaaagactcagtgcagagagccagagactggcttcaggatgtagagggcctgcaggctggaggacgtgtgccagtgttagacacactcatagaacttgttacacgaggccgatctatccccgtacatctgaattctttgccaagactggaaaccctagtagctgaggttcaggcttggaaagaatgtgctgttaatacattcttgactgagaattctccatattctctcttagaggtgctgtgtcctcgatgtgatattggccttttgggattgaaaaggaagcagagaaagttaaaggagcccttgccaaatggaaagaaaaaaagcaccaaattagagagtctgagtgacctggagagagctttaactgaaagcaaggagactgcttcagctatggcaactcttggggaagctcgcctaagggaaatggaagccttgcagtctctcagactcgccaatgaagggaaattgctgtcgcctctccaagatgtggatataaaaatctgcctatgtcagaaggccccagctgcccctatgattcaatgtgaactctgcagggatgctttccacaccagttgtgtggcggtacccagtatttcacagggcctgcgaatctggctttgtccccattgtcggaggtcagagaaacctccattagagaaaattctgcccctgctcgcctcccttcagcgtatccgagttcgccttcctgagggagatgcacttcgatatatgattgaaagaaccgtgaactggcagcacagagcccagcaactgctttcgtcagggaatcttaaatttgtgcaagatcgagtgggctcaggactgttatatagcagatggcaagcctcagcaggacaggtgtcagacacaaacaaggtatctcaacctcctggcacaacatcattttctttgcctgatgactgggacaacagaacctcatatttgcactcccccttctcaactggacgaagttgtatccccctccatggtgttagtccagaagtgaatgaactattgatggaagcccagctgctccaggtatcccttcctgaaattcaggaactttaccagactttacttgcaaagccaagccctgctcagcagactgaccgaagctcaccagtgagacccagcagtgagaagaatgactgttgccgagggaagcgagatggaattaacagtcttgagagaaaactgaagagacgcctggaaagagagggcctctccagtgagcggtgggaacgagttaagaaaatgcggacccccaaaaagaagaaaatcaaactgagccaccccaaggacatgaacaatttcaagttagagagagagcgtagctatgaattagttcgttctgctgaaactcattccctgccctcagacacatcctattccgaacaggaagactctgaggatgaagatgccatctgcccagctgtgagctgcctgcagccagaaggagatgaggtggactgggtccagtgtgatggcagctgcaatcagtggtttcatcaggtctgtgttggtgtctccccagagatggcagagaaagaagactacatctgtgtgcgctgtactgtgaaggacgcaccaagccgaaagtaaaaacacaaaaacagatacccccctacttaatgtaattcaggactccaaccaagaggatttcttcaaatctcagcaaagctacaggactggtactcaagccagcctgtaaacggtgctatttctattccttatgggatcatttttccaggactctttgaagaaaagaaaaaacaactaaaaaaatttttgacactttttgtattttttccttaagagctatttgtggttgttgaggtttgaaaagctgactgttttttttgcaggggttcccaccaatttggaaggcattgaagcttgcaccttttcatgtacagcattaaaattttacctctctctgggatttaccagcttaagagtccaactcacttccagtgcccaaaagggcacccaccagaaattccagtaaatcctcatttgaggaagctctcccttgtttactctgttaccacattggggaaatttttaagtttttcactttgggagtttttgtttgtttcttcttttcctttatccacttttcttcttcctggtagactaggtttatttatctgagcaataacttctatgttggtttcagtggctggaattaaaacaaaacaaaacaaacttccaaacagtgtgttggtgctttagcgattgattgatgtacagaacacaaatgtctagtttctagtgtcactgatgaactagtgatgtagaaaagagacttctctgtaagtaattgccacagctgtattttggctttctccctgtcccttcctttctcccctattttttggtagcttgtatcaaatgttacagtttatattgtggaataaatccttcgtcctaacataacactaaatgctgattatttagagccattagagcacagcttcttctgcccctctactgttgcacagccagaaggggctgcttgcttttgcctctgcccaaccaggttgcagtagcagtggatgttagcctgcaaacaacattaggggattcttcttttgtgtcctgctctgtttggtgggccatatgcctacagccctcactaacaaagaacccctctgtcttcaaggactagaacctatctttaaagccgtgctcttttaaaataagctttctcagaatgttggcaaatcacttcaatcctcaaatcagtcttccttgtggaatgctgcctttattatatttgaattgacaggggaacttggtttagggttaagacgttggaaggaaatctaaggaaaattaatcctcacagaggtccgggtttagtatatgtcttgagaggagacttgtgaattcccagactctgcctcctggtttcctttctcatttctttctaactgtagctatcattactggctgtggatagcccatagctattttccttgcttttcttttttaaaggggtctgttctgcagtggagaagacattctggtgaccagacttttgcttaccttttcctattctgttgccaatttttgttttccccacattctatagccataaacctgaagatgagtaaaactggtgggtctttaataaaacaacaacaaaaacagcagtttgtgatatagcagaggtttaaatgtaccctccccttttatgcacttcaaataattaaatctctttaagaatgaaaaaaaaaaa

SEQ ID NO: 381 - DNA, 2816 bp, Homo Sapiens
cgccgcgggccgggcgcggggaggtgtcatgcgccggaacctgcgcttggggccaagctctggagctgacgcgcaggggcaaggcgccccgcgtcccggactggcggctccgcgcatgctcctcccaccggcgtcgcaggcctcgagaggctccggaagtactgggtgcagcctgatggcgcaggaggtagacacggcacagggcgccgagatgcggcggggcgcgggcgcggctcggggacgcgcttcctggtgctgggccctggcgctgctttggctcgcggtggttccgggctggtcccgggtctcgggcatcccctcccggcgccactggccggtgccctacaagcgctttgacttccgtccaaaacctgatccttattgtcaagctaagtatactttctgtccaactggctcacctatcccagttatggagggtgatgatgacattgaagtttttcgattacaagccccagtatgggaatttaaatatggagacctcctgggacacttgaaaattatgcatgatgccattggattcagaagtacattaactggcaagaactacacaatggaatggtatgaacttttccaacttggcaactgtacatttccccatctccgacctgaaatggatgcccctttctggtgtaatcaaggcgctgcctgcttttttgagggaattgatgatgttcactggaaggaaaatgggacattagttcaagtagcaactatatcaggaaacatgttcaaccaaatggcaaagtgggtgaaacaggacaatgaaacaggaatttattatgagacatggaatgtaaaagccagcccagaaaagggggcagagacatggtttgattcctacgactgttccaaatttgtgttaaggacctttaacaagttggctgaatttggagcagagttcaagaacatagaaaccaactatacaagaatatttctttacagtggagaacctacttatctgggaaatgaaacatctgtttttgggccaacaggaaacaagactcttggtttagccataaaaagattttattaccccttcaaaccacatttgccaactaaagaatttctgttgagtctcttgcaaatttttgatgcagtgattgtgcacaaacagttctatttgttttataattttgaatattggtttttacctatgaaattcccttttattaaaataacatatgaagaaatccctttacctatcagaaacaaaacactctctggtttataaaacaccttaattctactgctcttttttctccaatcaccagcatctgtttttcagggggtgattttacttttgtgaattccttagcctttcttccttggtgcataaagttaaaatgcacatcagcagaattgctgcatattaacatctcaggactcttctcttgtaaagaagctgaaattcgtactatattggccaaagtgagcgagttaggtgatcttggtttcaatttccgagcctttgttaatatggagaattatggttcatatcagttatgtaggacctttggacccagggtcctacagatagatatggtgtgcccagattttaaaaataccttcaaaaataaaaaatacattcagtgacattttcatggtgggagctcttctttctgatatggcagttacactttttcacttaagtgctttagtttagactaactttacaacttctataacttttggaaccaagtttagtatagtctgattacattccattcacctaactttagacattcgtttagacaccataactggagtgattgtgcttctagatgtggcaaatccagtgttaacacatatttctggctgagattttggaactagctagtaactggcttgtgttctttaagcatactaacatcactaaatcttaggatttaggattgctgtaaagatgtaagttgtgtatgtttggcaggtcacattgaatggcagtgataatgattaatcaaagaacaaatgtcatccttgatcttgcctaatgtagtttatgtgccaaactttccagggttttgtagtcacctagattttaagctgatagcatagtgcttcagcggttcttctaaccggggtatgcaggaacatggctgcagacacgtttgggtaaacaggcaccttctgacttcttcattgtttcctgtagttctccctcttcccacaaagctgtcagcgcagtggaagaggttgcacttctccgagagaggacaggtttctgttaagatcaccaagtagctgtgctttaattagagccagacaagctttcaaggtcctttaagtatttgatgatcaactgaacacgtttctattcaaggagaaaacaccattcagtaagaagatggagtagatatcagataaaacaattcacgtttaatatgtaaatgtaccaattatgtgattcagtttcaactttcaagtacttcctgagaggttagtacattattattgagctctcacagaaagcttaatcatagatataattaacctgatccaaatgagtaaagtggaccttagaaaggctaagtgatctttctctggctatccagctagtagtaatgaagtcaggtcttgaaccccggttctgctgactgaattggatgcactatagtacaggcttttagcaccgaagtgtggtcctcagaccagtgcctgccaaccagatgttactggtctgtgaggaaataagtacagatactgacaggaagcttttataaacaatttattggagtgtttttgtttctgttgggtctaattaaaaaaattggagcttgtaaaaaaaaaaaaaaaaa

SEQ ID NO: 382 - DNA, 713 bp, Homo Sapiens
atggaagactaccaggctgcggaggagactgcttttgttgttgatgaagtgagcaacattgtaaaagaggctatagaaagcgcaattggtggtaacgcttatcaacacagcaaagtgaaccagtggaccacaaatgtagtagaacaaactttaagccaactcaccaagctgggaaaaccatttaaatacatcgtgacctgtgtaattatgcagaagaatggagctggattacacacagcaagttcctgcttctgggacagctctactgacgggagctgcactgtgcgatgggagaataagaccatgtactgcatcgtcagtgccttcggactgtctatttgacctgcagtccagcctatggcctttctccttttgtctctagttcatcctctaaccaccagccatgaattcagtgaactcttttctcattctctttgttttgtggcactttcacaatgtagaggaaaaaaccaaatgaccgcactgtgatgtgaatggcaccgaagtcagatgagtatccctgtaggtcacctgcagcctgcgttgccacttgtcttaactctgaatatttcatttcaaaggtgctaaaatctgaaatctgctagtgtgaaacttgctctactctctgaaatgattcaaatacactaattttccatactttatacttttgttagaataaattattcaaatctaaaaaaaaaaaaaaaaaaact

SEQ ID NO: 383 - DNA, 1940 bp, Homo Sapiens
gcggttcggcgcggaaagcgggaggtggaggggcggcttggggcaagcgcgcgcgcgcagtgcagaagccagccccccgcggctgaggtactcaaggtgcccaaaggcggggtagtgacctcgcgcgtgcgctgtgcccgcggcagcgccgggtcctagtgtgtgggttgttgttggcaccgcacggcgcgtgcgcagtgaggacggcggagggatttgcggccgggacccaccccctgctccagtcgctatcggaggccgcgcgggtggctgagcagcggcctggtgcgctcgcttagcgggcgacggaatcagacggacgtggacgcccccggagtggaagccgaagcaggagttgttgttgctgaggggctgccgcagccgccgcgagcctccggacagacgccagagcgaggagggcgctacgcgacttggcaagatgacccagttcctgccgcccaaccttctggccctctttgccccccgtgaccctattccatacctgccacccctggagaaactgccacatgaaaaacaccacaatcaaccttattgtggcattgcgccgtacattcgagagtttgaggaccctcgagatgcccctcctccaactcgtgctgaaacccgagaggagcgcatggagaggaaaagacgggaaaagattgagcggcgacagcaagaagtggagacagagcttaaaatgtgggaccctcacaatgatcccaatgctcagggggatgccttcaagactctcttcgtggcgagagtgaattatgacacaacagaatccaagctccggagagagtttgaggtgtacggacctatcaaaagaatacacatggtctacagtaagcggtcaggaaagccccgtggctatgccttcatcgagtacgaacacgagcgagacatgcactccgcttacaaacacgcagatggcaagaagattgatggcaggagggtccttgtggacgtggagaggggccgaaccgtgaagggctggaggccccggcggctaggaggaggcctcggtggtaccagaagaggaggggctgatgtgaacatccggcattcaggccgcgatgacacctcccgctacgatgagaggcccggcccctccccgcttccgcacagggaccgggaccgggaccgtgagcgggagcgcagagagcggagccgggagcgagacaaggagcgagaacggcgacgctcccgctcccgggaccggcggaggcgctcacggagtcgcgacaaggaggagcggaggcgctccagggagcggagcaaggacaaggaccgggaccggaagcggcgaagcagccggagtcgggagcgggcccggcgggagcgggagcgcaaggaggagctgcgtggcggcggtggcgacatggcggagccctccgaggcgggtgacgcgccccctgatgatgggcctccaggggagctcgggcctgacggccctgacggtccagaggaaaagggccgggatcgtgaccgggagcgacggcggagccaccggagcgagcgcgagcggcgccgggaccgggatcgtgaccgtgaccgtgaccgcgagcacaaacggggggagcggggcagtgagcggggcagggatgaggcccgaggtgggggcggtggccaggacaacgggctggagggtctgggcaacgacagccgagacatgtacatggagtctgagggcggcgacggctacctggctccggagaatgggtatttgatggaggctgcgccggagtgaagaggtcgtcctctccatctgctgtgtttggacgcgttcctgcccagccccttgctgtcatcccctcccccaaccttggccacttgagtttgtcctccaagggtaggtgtctcatttgttctggccccttggatttaaaaataaaattaatttcctgttgatagtgggcaaaaaaaaaaaaaaaaaa

SEQ ID NO: 384 - DNA, 1383 bp, Homo Sapiens
gccgaagcggcgggatgagcggagccggcgtgggcggggcgtccgaggagagccaggccatgcaggcccacgtgtctattatcctcccagtccacaacgctgaaccgtggctggacgaatgtttgaggtctgttttgcaacaggactttgaaggtaccatggagctgtctgttttcaatgatgccagtaaggacaagtctggggctatcattgaaaaatggagagtgaagctggaagattctggtgtccacgtgatcattggggggcacgattctccctctcctagaggcgtcggatacgctaaaaatcaagcagttgcccagagctcagggtcttacctttgctttttggattcggatgacgtcatgatgccccagcgggtgaggctgcaacacgaggctgccgttcagcacccgtcgagcatcattggttgcagagtgaggagagatccccctaactccaccgaacgatacacacgttggatcaaccagctgacgccggagcagctcctaacccaggttttcacctcaaatggccccacggtgatcatgcccacctggttctgctcgcgagcgtggttctcccacgtgggcccctttaacgagggaggtcagggcgtcccggaggacctgctgttcttctacgagcacctcaggaagggcggcggcgtcatccgcgtggaccagagtctcctgctgtatcgccaccacccacaggcggccacgcactgcgtcctcgagacgaccatctggacccaccgcgtccgcttcctggaagagcaggccctgccccgctgggcggccttcaccatctggaacgctggcaagcaggggcgccggctgtaccgcagcttgactgccggcagccagcgcaaggtggtggcattctgtgacgtggacgagaacaagatcaggaaaggcttctattgccacgaggactctcaggaaagacccaagccccgaatccccatcctgcacttccgagccgcccggccacccttcgtcatctgcgtgaagctggacctcacagggggcgcctttgaggacaacctgaggtcactgcacttgcaggagggccaggacttccttcacttcagctgacggacccatggcagctgctcccagtgcatcccaggccagcaggagctttgtgagctgcaggcatggcgatggtgcgcctgttccacacccagcaggcgcaaccagagtctcgtgtgtgccgaccacaggagccaagccttttccactgtgtggactcatgtggccaaggctaggcctggtcacccaggaccctcaccacgtgaccccagccaatcgggacagttcaaggaggaggagacccctattacacaggttggaataaaatatttaaatctcgtaaaaa

SEQ ID NO: 385 - DNA, 2463 bp, Homo Sapiens
gtcctgtttctctccctgttgtccctgcctctttttccttcccgccgtgccccgcggccgggccggggcagccgggaagcgggtggggtggtgtgttacccagtagctcctgggacatcgctcgggtacgctccacgccgtcgcagccactgctgtggtcgccggtcggccgaggggccgcgatactggttgcccgcggtgtaagcagaattcgacgtgtatcgctgccgtcaagatggaggggcctttgtccgtgttcggtgaccgcagcactggggaaacgatccgctcccaaaacgttatggctgcagcttcgattgccaatattgtaaaaagttctcttggtccagttggcttggataaaatgttggtggatgatattggtgatgtaaccattactaacgatggtgcaaccatcctgaagttactggaggtagaacatcctgcagctaaagttctttgtgagctggctgatctgcaagacaaagaagttggagatggaactacttcagtggttattattgcagcagaactcctaaaaaatgcagatgaattagtcaaacagaaaattcatcccacatcagttattagtggctatcgacttgcttgcaaggaagcagtgcgttatatcaatgaaaacctaattgttaacacagatgaactgggaagagattgcctgattaatgctgctaagacatccatgtcttccaaaatcattggaataaatggtgatttctttgctaacatggtagtagatgctgtacttgctattaaatacacagacataagaggccagccacgctatccagtcaactctgttaatattttgaaagcccatgggagaagtcaaatggagagtatgctcatcagtggctatgcactcaactgtgtggtgggatcccagggcatgcccaagagaatcgtaaatgcaaaaattgcttgccttgacttcagcctgcaaaaaacaaaaatgaagcttggtgtacaggtggtcattacagaccctgaaaaactggaccaaattagacagagagaatcagatatcaccaaggagagaattcagaagatcctggcaactggtgccaatgttattctaaccactggtggaattgatgatatgtgtctgaagtattttgtggaggctggtgctatggcagttagaagagttttaaaaagggaccttaaacgcattgccaaagcttctggagcaactattctgtcaaccctggccaatttggaaggtgaagaaacttttgaagctgcaatgttgggacaggcagaagaagtggtacaggagagaatttgtgatgatgagctgatcttaatcaaaaatactaaggctcgtacgtctgcatcgattatcttacgtggggcaaatgatttcatgtgtgatgagatggagcgctctttacatgatgcactttgtgtagtgaagagagttttggagtcaaaatctgtggttcccggtgggggtgctgtagaagcagccctttccatataccttgaaaactatgcaaccagcatggggtctcgggaacagcttgcgattgcagagtttgcaagatcacttcttgttattcccaatacactagcagttaatgctgcccaggactccacagatctggttgcaaaattaagagcttttcataatgaggcccaggttaacccagaacgtaaaaatctaaaatggattggtcttgatttgagcaatggtaaacctcgagacaacaaacaagcaggggtgtttgaaccaaccatagttaaagttaagagtttgaaatttgcaacagaagctgcaatcaccattcttcgaattgatgatcttattaaattacatccagaaagtaaagatgataaacatggaagttatgaagatgctgttcactctggagcccttaatgattgatctgatgttccttttatttataacaatgttaaatgcaattgtcttgtaccttgagttgagtattacacattaaagtaaagtacaagctgtaaacttgggtttttgtgatgtaggaaatggtttccatctgtactttggtcctctgatttcacatattgcaacctagtactttattagtttaaaaagaaattgaggttgttcaaagtttaagcaattcattctctctgaacacacattgctattcccatcccacccccaatgcacagggctgcaacaccacgacttctgcccattctctccagtgtgtgtaacagggtcacaagaattcgacagccagatgctccaagagggtggcccaaggctatagcccctccttcaatattgacctaacgggggagaaaagatttagattgtttattcttctgtggacacagtttaaaatcttaaacttgtctttttcctcttaatgtatcagcatgctaccctttcaaactcaaattttcattttaactgcttaggaataaatttacacctttgtgaaaattcaaaaaaaaaaa

SEQ ID NO: 386 - DNA, 8461 bp, Homo Sapiens
ggagagaccgggaacggggagcgcggctgccagcacccctgagccgccgccggaccctccgtcgccccgggccgccccccgccccctgcggtccccggtgtgtccgtctcgggacggttcgattccctccagagccggggaagggacggggggggcccagaggagggggcctcgggcgccccgcctgcgcctgctgcccccgccccggcggcgatgcgctcctggccgtgacccccgctgggggcgggggccggggtccatgcgcggagtccccacccggcccggcgcctgccgctgacggcggcgggggtgggggggcgcgcgcctggcctcctgcccaccccctggcgtcaacaccgcgggccgtcaggggctgcggccccgggctgcgccctcccccgcggccaggctctggagggacccaggagctgccgccggcctcagcccatggcccggaggtatgatgagctgccgcactacccaggcatcgtggatggccccgcagccctggctagcttcccagagacagtgcccgcagtaccagggccctatggcccgcaccggcctccccagcccctgcccccaggcttggacagcgacggcctgaagagggagaaggatgagatctatggacacccgctcttccccctcttggccctggtctttgagaaatgtgaactggctacatgctctccccgtgacggggccggagctgggctggggacaccccctggaggtgacgtctgctcctctgattccttcaacgaggacatcgctgcctttgccaagcaggttcgctctgagaggcccctcttctcctccaacccagaactggacaatctgatgatccaggccatccaggtgctgcggttccacctgctggagctggagaaggtccacgacctgtgcgacaacttctgtcaccgctacatcacctgcctcaagggaaagatgcccatcgacctggtcatcgaggatcgggacggcggctgcagggaggacttcgaggactacccagcctcctgccccagcctcccagaccagaataatatgtggattcgagaccatgaggatagtgggtctgtacatttggggaccccaggtccatccagtgggggcctggcctcccagagtggggacaactccagtgaccaaggagacgggctggacaccagcgtggcctctcccagttctggtggagaagatgaggacttggaccaggagcgacggcgaaacaagaagagggggatcttccccaaggtggccaccaacatcatgcgagcctggttgttccagcacctctcgagacgctcagaagcgccggttctcccagacgtctgcctgggcctgggctccccatcccccggaccccggtgggccagaccttggggttcagactgcggccggccaggcaggcagagtgactcttgctggtggctgcagcacccgtacccctcggaggagcagaagaaacagctggcgcaggacacggggctcaccatcctgcaagtcaacaactggttcattaacgcccggagacgcatcgtgcaacctatgatcgatcaatccaaccgcacagggcagggtgcagccttcagcccagagggccagcccatcgggggctataccgagacgcagccacacgtggccgtccggcctccgggatcagtggggatgagtttgaacttggaaggagaatggcattatctatagaggctgatgcaggagagacccagcctccggctgtgacccccagcctcacacctgcccggcttccagcccagacaccagccagccagtggcgttcctggctcctcgggattttccttttcctccgaagctgctgattcatccccaggctggagtcaggctcagctgtggggctgggagcatgggctctcaggctgctgctgagtggaggaactgggcctcctgggaggtgtcctccagcctctctggatgctccatggggtgcttcaaggatgaccgcatcgtcttctggacttggatgttctccacctacttcatggagaaatgggctccccggcaggacgacatgcttttctatgtgcgccggaagctggcgtactccggcagcgaaagcggtgcagacgggaggaaggcagctgagcctgaggtggaggtggaggtgtaccggcgggactccaagaagctgccaggcctgggagaccctgacatcgactgggaggagagcgtctgcctgaatctcatcctgcagaagctggactacatggtgacctgtgcggtgtgcacacgtgctgacggcggggacattcacatccataagaagaaatctcagcaagtgttcgcgtcccccagtaaacaccccatggacagcaagggggaggagtccaagatcagctaccccaacatcttcttcatgattgacagcttcgaggaggtgttcagcgacatgaccgtaggggaaggagagatggtctgtgtggagctggtggctagtgacaaaaccaacacgttccagggggtcatctttcagggctccatccgctacgaggcgctcaagaaggtgtatgacaaccgggtgagcgtggccgcccgcatggcacagaagatgtcgtttggcttctacaagtacagcaacatggagtttgtgcgcatgaagggcccccagggcaagggccacgccgagatggcggtcagccgagtgtctacaggtgacacatccccctgtgggactgaagaggactccagcccagcttcgcccatgcacgagcgggtgacctccttcagcacaccccccaccccagaacggaacaaccggcctgccttcttctccccatccctcaagaggaaggtgccccggaaccggatcgctgagatgaagaagtcgcactcggccaacgacagcgaggagttcttccgggaggacgacggtggagccgatctgcacaatgcaaccaacctgcggtctcggtccctgtcgggcacaggacggtccctggtcgggtcctggctgaagctgaacagagcagatggaaacttccttctctatgcacacttaacctacgtcacgttgccgctgcatcggattttaacagacatcctggaagttcggcagaagcccatcctgatgacctagccgcgtgcggagcctgcgcagagccccggccgggcccagccctcggagtgctgccaagtgcctacctgtccaccgccaccggggtctgcgatggcacgccagtgctggagccgcagccaggcgaggccactcgactcccggggccggggccgactccacgaacaccagcccaaactgaagtgcctcttccctcccctgctggcgctgctccgccctgtgccccccgcccatcgccccccacccatctctggagagccctctgcacccaaagaggactagagatgccgagcggccatgagagagagcggaaggagcagctgatgcccagagcggggccagagcggcgggtctatgttcacgtccccccagcagcaggcggaaccacccagccagggcactcagtgcattggactgtccacatgttcttgaggaaagccggtggaagattctggaatgccgtgcggatgaacttcagcacccgagtcagtcccagctcatcctccccagtttaccactttgttctaataggagatgggaacacgagaagtttgatggctttgccctgggctgggaatacctcacccacgcccagttccagaaaggcctccagctgagcagacggccccgatcccgccagaacggccttttgcttccagccaaagaacaccgccaacacgcacacctccaacctgggacatcccacgctgggcctcgcacggaggaacctgcagaatttggattctgagggtagtcgggaggcctcggtagccaggcagaacaggatatctgccaaagggtgtctgatgtggggtggggctggcatcctcccaggaaggttctaggtgggaccccgtcttctgggggcgggggtgtcttttcatcttccctggtttcctagaactcacttcctttgacggcgtgtgttggtcccatctctcagaccagctcactgaggcagaggagttgctcagaggctcacatgggcacccccattggttcgtgtgagcagctgcccagccccaggcctgccctcggcctggtccagcatgaaggcgtttccatctgcaaggatgcacggtaccctccccgagagcaggcctgtcccctacccaactgggaataaactggaagctgggtctctttgttgctatgtttttttgtttgaagttcccaggaatatttgaggggttccggtgatgtgtttagggatcttctctgtgggggaaaaggaagaggagggtcttgttctcccatctgtttattctttgggctctgggaacaggggactactttggggctttctccagacttttgtatgttgttattaaaagcgagctattgcatttcattctgcctcagtttgcccacctgtgaaatggggctgataccacctacctcactgaagtcccagggttcaagtgtgtggctgggtcagggcgtggtcacccgtcattctgcataggtcgggttggatgttagactcctgggatgccctcctccccctcgccctttgtaataacctaatctgagaccgtgcttggtggggggatgtgaactttctctctcccccagcagtgtctgctcaggcctgacagctcagctctgcacgatttcatgttcctaaacccatgtcttagggcagcacagagccaggtcatgtcatgccccaaagtgtggggacagagcctcagggagccccgagcatggtccagccccatttgagtgctctccggggatgccaaatgctgcttccaagtttgagtccatgtggctaaaatacacccatttcttcaggaactcttcccctggttgttctggggatcttgggagaaacacagccctgacagctcgtccgtgggaagatgaggcagtccaggttgtgaggagcacagcggcccgccctctgttctcagaggtgaggggcgggagaaggttgtctcctctggggccagcatttggccaagctcggaggcttggccagcactgctggatggctcagagcaagctgggctccccgtctgtaagatggcaaaaatgctgcccccctcacagggtgaccatgaggaccagtcacagtgatgtgtgaaagggctcgctggtcacagaaacgtgtacaaatcatgctattttagagatcagccctcaatttgtaaggcatgtgaacagggcacgcggtgggctggtggtttcatagccgacacacagcgcctaccatgtgcagctgcctgtccgaccccatcttacagacgagaaaaccagcacacaggcaccaaggaactgtccggaactaacagcaggggccggcgatgggagtcaaacccaggcacgcggcctggcctgcatgctgagccacatggtgctgtccggacagatggacagacactcggtggagtctgcctttctcaggccctaaatccctctccaaagggtacttgcgatgccggatttaaaacttgctcagagccacttagccacttgagaaccagacagtaaggtgttactcccaggtttgtttttccaaagtaacagatgacatgtggaataaagtaatagagtaacaagtggcagggccagaaccagggtccccaaagtcctggtgttggcacatttgtacttcttgtaagaccatctttaatttttctgggaacacacctgccttttgtgtaatgcggggaagactaatgcatggtgacacctagttttcctcaacaggacacttgatcccaaaacccctttaagaccttaggtttcctcagcggaaaactgtactttaatcccaaaccccctttaagacatattggggctgggcgcagtggctcacgcctgtaatcccagcactttgggaggctgagatgggtggatcacctgagatcaggagttcaagaccagcctgactaacatgctgaaaccccatgtctactaaagatagaaaaattagctggacatggtggcaggcacctgtaatcccagctactcggaaggctgaggaaggagaatcacttgaacctagtaggcagaggttgcagtgagccgagatcacgccattgcattctagcctgggcaacgagagcgaaactctgtctcaaaaaaaaaaaaaaaaaaaaaaaaaaaaaaaaaaaaaaagatacattggtctttaaacccaaaccccctttaaggcatgttggtctcaaggggatttgggattgaagcacagctttctgttgaggaaacctaggtgtcactttttagaacattaaaaagaaagttgtagggtgggcttttccatttaaaggaatgtgatgatcctaggttctgatgagtgataggtggtctccgtttataccctttcttcttttggcacctgtaagttccggtagtggccatcttacattctcatgtcctgctggaagtgcctagttgcctgcaaagccagctaaggcttattatttcaaaagaagattatttaaaacatgagtgacaggtagtcagaagagaacaaaaggacgcaagatactctatagccaagtcagcttggaggcaggatgggttgctgagtgaagtcgccgctcacttttggattcttatggactgtgagttagtcttccctctacacggagtcacaggaagggtataaatgcatgttcctgaggtgccctcccccaaagaatgtacctgcactcaaaccaggatctgtttttgctgttttaatcataaatagactagttagtagaagacttttgaagaacaaagtaaaacttttttttttcattaaaagatgtcccagaggaaaggccctgtgcagccagtatattctaatgactgcctggaccatgtcctaatatggtggttttaagttgttggccaaaatcctttaaagacatacgaaacatctgccaactttttagcgaacttaacaggtttcactgacgttttcctcaatttttgaatttaggtgggatttgctttcatgtcctgtttcaaaaaccaagtgtctcttgacagcccactggttcttcctgtcctcttgctctagtctgtatcagaaagcagaatgactgtacttttgttttacaaacaaccacctgataggacggacactccacgagataaggaaaggcacgtgcccttgagcttgaatggaagcagcctctggagggggcagccactgcccttcgagggagagcagctcttcagcagtggccagagtgccacgtgactctgcagatgacccctgggagccgggtgatgggcacctgctggggcttttgttttttctttttcactggctggcttgatcctcagtggcaaaaggacccctgagccccttctccgagccctggagcactcctcgggacaccgagtggcctcagggctgggttcagagctcctcccgcagggggagcctcagaagtggaggcagctgctgatgggtgagtttacaacttcttatcctgcctaaggcgagtaggcgtttttattccgtttccagtccttgagctcagcagatcaaaataacagtgaccctgcaaccccacagagcccgcgacacgctcgctttcttccccgccctgcccctttagtccccgctctggaaggccaggcagtttaggtgtaaataggtatcttttatggtttccaaatgaattatttgtgtgagagtaattaaatctgtaagaaaacctgttgagattcttcactatgaattatgacttctacaacatgtattttagcaaaaacacgatgctggcctccactggatagctcagtatgctgattgccagtgatagttctgtacgcgttaccaacagcgtctttattaaccctcttccacatccagtggaaatcattgctaggcggtatttgttggttggctgttagctttgctttatgatttcatgtttcttttaaaggttgttttgcatgttgaatattaaattttttttttctgtgtcctctggttcccgcctggtcctccagcttcaggaccccacctccaaaggcccctctgctcaatgcctacctccctagggccctgctgggacatgggggcctgagtgcccatccaagggctctcaaggacaccggcaaggcctccaggccctgagccccacttctgccttcacctctgcctgggacccgagctgggctcctgggccttggtccccagaagatggcggctagggcctcgccgccaggacagagaagggacggggtggctgggcagtcagggaaggagggtcgcccggatccgacattttggagagattccttcactctcctgtcccccctacctcccttctctaatttcttcttttttttaatgataaagtcttaaaaacacgaaaaaaaaaaaaaaaa

SEQ ID NO: 387 - DNA, 6287 bp, Homo Sapiens
ccggcttccagcccagacaccagccagccagtggcgttcctggctcctcgggattttccttttcctccgaagctgctgattcatccccaggctggagtcaggctcagctgtggggctgggagcatgggctctcaggctgctgctgagtggaggaactgggcctcctgggaggtgtcctccagcctctctggatgctccatggggtgcttcaaggatgaccgcatcgtcttctggacttggatgttctccacctacttcatggagaaatgggctccccggcaggacgacatgcttttctatgtgcgccggaagctggcgtactccggcagcgaaagcggtgcagacgggaggaaggcagctgagcctgaggtggaggtggaggtgtaccggcgggactccaagaagctgccaggcctgggagaccctgacatcgactgggaggagagcgtctgcctgaatctcatcctgcagaagctggactacatggtgacctgtgcggtgtgcacacgtgctgacggcggggacattcacatccataagaagaaatctcagcaagtgttcgcgtcccccagtaaacaccccatggacagcaagggggaggagtccaagatcagctaccccaacatcttcttcatgattgacagcttcgaggaggtgttcagcgacatgaccgtaggggaaggagagatggtctgtgtggagctggtggctagtgacaaaaccaacacgttccagggggtcatctttcagggctccatccgctacgaggcgctcaagaaggtgtatgacaaccgggtgagcgtggccgcccgcatggcacagaagatgtcgtttggcttctacaagtacagcaacatggagtttgtgcgcatgaagggcccccagggcaagggccacgccgagatggcggtcagccgagtgtctacaggtgacacatccccctgtgggactgaagaggactccagcccagcttcgcccatgcacgagcgggtgacctccttcagcacaccccccaccccagaacggaacaaccggcctgccttcttctccccatccctcaagaggaaggtgccccggaaccggatcgctgagatgaagaagtcgcactcggccaacgacagcgaggagttcttccgggaggacgacggtggagccgatctgcacaatgcaaccaacctgcggtctcggtccctgtcgggcacaggacggtccctggtcgggtcctggctgaagctgaacagagcagatggaaacttccttctctatgcacacttaacctacgtcacgttgccgctgcatcggattttaacagacatcctggaagttcggcagaagcccatcctgatgacctagccgcgtgcggagcctgcgcagagccccggccgggcccagccctcggagtgctgccaagtgcctacctgtccaccgccaccggggtctgcgatggcacgccagtgctggagccgcagccaggcgaggccactcgactcccggggccggggccgactccacgaacaccagcccaaactgaagtgcctcttccctcccctgctggcgctgctccgccctgtgccccccgcccatcgccccccacccatctctggagagccctctgcacccaaagaggactagagatgccgagcggccatgagagagagcggaaggagcagctgatgcccagagcggggccagagcggcgggtctatgttcacgtccccccagcagcaggcggaaccacccagccagggcactcagtgcattggactgtccacatgttcttgaggaaagccggtggaagattctggaatgccgtgcggatgaacttcagcacccgagtcagtcccagctcatcctccccagtttaccactttgttctaataggagatgggaacacgagaagtttgatggctttgccctgggctgggaatacctcacccacgcccagttccagaaaggcctccagctgagcagacggccccgatcccgccagaacggccttttgcttccagccaaagaacaccgccaacacgcacacctccaacctgggacatcccacgctgggcctcgcacggaggaacctgcagaatttggattctgagggtagtcgggaggcctcggtagccaggcagaacaggatatctgccaaagggtgtctgatgtggggtggggctggcatcctcccaggaaggttctaggtgggaccccgtcttctgggggcgggggtgtcttttcatcttccctggtttcctagaactcacttcctttgacggcgtgtgttggtcccatctctcagaccagctcactgaggcagaggagttgctcagaggctcacatgggcacccccattggttcgtgtgagcagctgcccagccccaggcctgccctcggcctggtccagcatgaaggcgtttccatctgcaaggatgcacggtaccctccccgagagcaggcctgtcccctacccaactgggaataaactggaagctgggtctctttgttgctatgtttttttgtttgaagttcccaggaatatttgaggggttccggtgatgtgtttagggatcttctctgtgggggaaaaggaagaggagggtcttgttctcccatctgtttattctttgggctctgggaacaggggactactttggggctttctccagacttttgtatgttgttattaaaagcgagctattgcatttcattctgcctcagtttgcccacctgtgaaatggggctgataccacctacctcactgaagtcccagggttcaagtgtgtggctgggtcagggcgtggtcacccgtcattctgcataggtcgggttggatgttagactcctgggatgccctcctccccctcgccctttgtaataacctaatctgagaccgtgcttggtggggggatgtgaactttctctctcccccagcagtgtctgctcaggcctgacagctcagctctgcacgatttcatgttcctaaacccatgtcttagggcagcacagagccaggtcatgtcatgccccaaagtgtggggacagagcctcagggagccccgagcatggtccagccccatttgagtgctctccggggatgccaaatgctgcttccaagtttgagtccatgtggctaaaatacacccatttcttcaggaactcttcccctggttgttctggggatcttgggagaaacacagccctgacagctcgtccgtgggaagatgaggcagtccaggttgtgaggagcacagcggcccgccctctgttctcagaggtgaggggcgggagaaggttgtctcctctggggccagcatttggccaagctcggaggcttggccagcactgctggatggctcagagcaagctgggctccccgtctgtaagatggcaaaaatgctgcccccctcacagggtgaccatgaggaccagtcacagtgatgtgtgaaagggctcgctggtcacagaaacgtgtacaaatcatgctattttagagatcagccctcaatttgtaaggcatgtgaacagggcacgcggtgggctggtggtttcatagccgacacacagcgcctaccatgtgcagctgcctgtccgaccccatcttacagacgagaaaaccagcacacaggcaccaaggaactgtccggaactaacagcaggggccggcgatgggagtcaaacccaggcacgcggcctggcctgcatgctgagccacatggtgctgtccggacagatggacagacactcggtggagtctgcctttctcaggccctaaatccctctccaaagggtacttgcgatgccggatttaaaacttgctcagagccacttagccacttgagaaccagacagtaaggtgttactcccaggtttgtttttccaaagtaacagatgacatgtggaataaagtaatagagtaacaagtggcagggccagaaccagggtccccaaagtcctggtgttggcacatttgtacttcttgtaagaccatctttaatttttctgggaacacacctgccttttgtgtaatgcggggaagactaatgcatggtgacacctagttttcctcaacaggacacttgatcccaaaacccctttaagaccttaggtttcctcagcggaaaactgtactttaatcccaaaccccctttaagacatattggggctgggcgcagtggctcacgcctgtaatcccagcactttgggaggctgagatgggtggatcacctgagatcaggagttcaagaccagcctgactaacatgctgaaaccccatgtctactaaagatagaaaaattagctggacatggtggcaggcacctgtaatcccagctactcggaaggctgaggaaggagaatcacttgaacctagtaggcagaggttgcagtgagccgagatcacgccattgcattctagcctgggcaacgagagcgaaactctgtctcaaaaaaaaaaaaaaaaaaaaaaaaaaaaaaaaaaaaaaagatacattggtctttaaacccaaaccccctttaaggcatgttggtctcaaggggatttgggattgaagcacagctttctgttgaggaaacctaggtgtcactttttagaacattaaaaagaaagttgtagggtgggcttttccatttaaaggaatgtgatgatcctaggttctgatgagtgataggtggtctccgtttataccctttcttcttttggcacctgtaagttccggtagtggccatcttacattctcatgtcctgctggaagtgcctagttgcctgcaaagccagctaaggcttattatttcaaaagaagattatttaaaacatgagtgacaggtagtcagaagagaacaaaaggacgcaagatactctatagccaagtcagcttggaggcaggatgggttgctgagtgaagtcgccgctcacttttggattcttatggactgtgagttagtcttccctctacacggagtcacaggaagggtataaatgcatgttcctgaggtgccctcccccaaagaatgtacctgcactcaaaccaggatctgtttttgctgttttaatcataaatagactagttagtagaagacttttgaagaacaaagtaaaacttttttttttcattaaaagatgtcccagaggaaaggccctgtgcagccagtatattctaatgactgcctggaccatgtcctaatatggtggttttaagttgttggccaaaatcctttaaagacatacgaaacatctgccaactttttagcgaacttaacaggtttcactgacgttttcctcaatttttgaatttaggtgggatttgctttcatgtcctgtttcaaaaaccaagtgtctcttgacagcccactggttcttcctgtcctcttgctctagtctgtatcagaaagcagaatgactgtacttttgttttacaaacaaccacctgataggacggacactccacgagataaggaaaggcacgtgcccttgagcttgaatggaagcagcctctggagggggcagccactgcccttcgagggagagcagctcttcagcagtggccagagtgccacgtgactctgcagatgacccctgggagccgggtgatgggcacctgctggggcttttgttttttctttttcactggctggcttgatcctcagtggcaaaaggacccctgagccccttctccgagccctggagcactcctcgggacaccgagtggcctcagggctgggttcagagctcctcccgcagggggagcctcagaagtggaggcagctgctgatgggtgagtttacaacttcttatcctgcctaaggcgagtaggcgtttttattccgtttccagtccttgagctcagcagatcaaaataacagtgaccctgcaaccccacagagcccgcgacacgctcgctttcttccccgccctgcccctttagtccccgctctggaaggccaggcagtttaggtgtaaataggtatcttttatggtttccaaatgaattatttgtgtgagagtaattaaatctgtaagaaaacctgttgagattcttcactatgaattatgacttctacaacatgtattttagcaaaaacacgatgctggcctccactggatagctcagtatgctgattgccagtgatagttctgtacgcgttaccaacagcgtctttattaaccctcttccacatccagtggaaatcattgctaggcggtatttgttggttggctgttagctttgctttatgatttcatgtttcttttaaaggttgttttgcatgttgaatattaaattttttttttctgtgtc

SEQ ID NO: 388 - DNA, 1833 bp, Homo Sapiens
tgcgcgccgcccggccaggcccgcaaagaggcctccgagcgccatggctgcgcccccggcccgcgcggacgctgatccttcgcccacgtcgccacctacggcccgagacacaccaggccggcaggctgagaaaagcgagaccgcgtgcgaggaccgcagcaatgcagagtccctggacaggctcctgccacctgtgggcactgggcgctctccccggaagcggaccaccagccagtgcaagtcagagcctcccctgctgcgtacaagcaagcgtaccatctacaccgccgggcggccgccctggtacaatgaacacggcacgcaatccaaagaggccttcgccatcggcttgggaggcggcagtgcctctgggaagaccactgtggccagaatgatcatcgaggccctggatgtgccctgggtggtcttgctgtccatggactccttctacaaggtgctgactgagcagcagcaggaacaggccgcacacaacaacttcaacttcgaccacccagatgcctttgacttcgacctcatcatttccaccctcaagaagctgaagcaggggaagagtgtcaaggtgcccatttatgacttcaccacgcacagccggaagaaggactggaaaacactgtatggtgcaaacgtcatcatctttgagggcatcatggcctttgctgacaagacactgttggagctcctggacatgaagatctttgtggacacagactccgacatccgcctggtacggcggctgcgccgggacatcagtgagcgcggccgggacatcgagggtgtcatcaagcagtacaacaagtttgtcaagccctccttcgaccagtacatccagcccaccatgcgcctggcagacatcgtggtccccagagggagcggcaacacggtggccatcgacctgattgtgcagcacgtgcacagccagctggaggagcgtgaactcagcgtcagggctgcgctggcctcggcacaccagtgccacccgctgccccggacgctgagcgtcctgaagagcacgccgcaggtacggggcatgcacaccatcatcagggacaaggagaccagtcgcgacgagttcatcttctactccaagagactgatgcggctgctcatcgagcacgcgctctccttcctgccctttcaggactgcgtcgtacagaccccgcaggggcaggactatgcgggcaagtgctatgcggggaagcagatcaccggtgtgtccattctgcgcgccggtgaaaccatggagcccgcgctgcgcgctgtgtgcaaagacgtgcgcatcggcaccatcctcatccagaccaaccagcttaccggggagcccgagctccactacctgaggctgcccaaggacatcagcgatgaccacgtgatcctcatggactgcaccgtgtccacgggcgcggcggccatgatggcagtgcgcgtgctcctggaccacgacgtgcctgaggacaagatctttttgctgtcgctgctcatggcagagatgggcgtgcactcagtggcctatgcatttccgcgagtgagaatcatcaccacggcggtggacaagcgggtcaatgaccttttccgcatcatcccaggcattgggaactttggcgaccgctactttgggacagacgcggtccccgatggcagtgacgaggaggaagtggcctacacgggttagctgcccagtgagccatcccgtccccaccaccctcctcctgcctcctgacccaggactgctgaatacaaagatgttaatttttaaaatgttactagtataatttattctatgcattttataaaataaataaagctttagaaaaa

SEQ ID NO: 389 - DNA, 4287 bp, Homo Sapiens
gaaaaagatggcgccccgcgcccggggggccccttcctgagcgccccggcccctccctccgccgcctccccctcctccccgcggcgcccccgccccgccccgcccccgccgagaccccgaccccggccccacgggcggacactcggccgggcagccgcgggccgagcgcagccgcctccgccaccgatgcgcctggtggccagactccaagtgggaccggcggacacgcagcctcgcgtgtcaggggaagctgatggagaatcgagctctggatccagggactcgggactcctatggtgccaccagccacctccccaacaagggggccctggcgaaggtcaagaacaacttcaaagacttgatgtccaaactgacggagggccagtatgtgctgtgccggtggacagatggcctgtactacctcgggaagatcaagagggtcagcagctctaagcaaagctgcctcgtgactttcgaagataattccaaatactgggtcctatggaaggacatacagcatgccggtgttccaggagaggagcccaagtgcaacatctgcctagggaagacatcagggccgctgaatgagatcctcatctgcgggaagtgtggcctgggttaccaccagcagtgccacatccccatagcgggcagtgctgaccagcccctgctcacaccttggttctgccgacgctgcatcttcgcactggctgtgcggaaaggcggcgcgctgaagaagggcgccatcgccaggacgctgcaggccgtgaagatggtgctgtcctaccagcccgaggagctcgagtgggactcgccccatcgcaccaaccagcagcaatgctactgctactgcggcgggcccggagaatggtacctgcggatgctgcaatgttaccggtgcaggcagtggttccacgaggcctgcacccagtgcctcaatgagcccatgatgtttggagaccggttttacctgttcttctgctccgtgtgtaaccagggcccagagtacatcgagaggctgcccctgcgatgggtggatgtggttcacctggccctctataatctgggggtacagagcaagaagaagtactttgactttgaggagattctggcctttgtcaaccaccactgggagctcctgcagcttggcaagctcaccagcaccccagtgacagatcgaggaccacatctcctcaacgctctgaacagttataaaagccggttcctctgcggcaaggagatcaagaagaagaagtgcatcttccgcctgcgcatccgcgtcccacccaacccgccagggaagctgctgcctgacaaaggactgctgccaaatgagaacagcgcctcctctgagctgcgtaagagaggaaagagcaagcctggtttgttgcctcacgaattccagcagcagaaaaggcgagtttatagaagaaaaagatcaaagtttttgctggaagatgctattcccagtagtgacttcacctcagcctggagcaccaaccaccacctggctagcatatttgacttcacgctggatgaaattcaaagtttaaaaagtgccagctcaggccagaccttcttctcagatgtcgactccaccgacgctgccagcacctctggctctgcctccaccagcctctcctatgactccagatggacagtgggcagccgaaagaggaagctggcagccaaggcatacatgcccctgcgggcaaagcggtgggcagctgagctggatggacgctgcccctcggacagcagtgcagagggggcttcagtccccgagcggccagacgaaggcattgacagccacacatttgagagcatcagtgaagatgactcatccctgtcccacctcaagtcatctatcaccaactactttggtgcagctgggcggttggcctgtggggagaagtaccaggtgttggctcggagggtcacacctgagggcaaggttcagtacctggtggagtgggaagggaccaccccttactgactagcccccgggggtgccaggggtcctgaaaaccaaaggaggagcagcagaagccataggctccccagctttctccaggctggggtgggagaaggaagcaggacagagctgcaagtgcctggcagaatgccctgcctgcctgcctgccaggccaaggcctgcgtctctctgctgtaccagctctgttccagggcctcctcaggctcgttacccctgtgcctgtgtctctacacactccacaccccctcaaactctgtttatctgttctctgaccttgtgtcccctgcgctgggacccttcctcctgaggcccaggtctttgtccccagttgtgtgccttgacctctctcgcccctttctgggtgtgttcgcacatcctgtgtgtgcacagctgtccctccactggatccccttcacacgtgacccgtggggcagccagtcctcccagggactacataacaggcacctttgagagagcatgggagaaggtggataagaggatgctgctcagtgcttttctcttccactttcctgccactccccactaccctcggagagaggtggtgggatgggagagagcccctgtgaaagcctgtgaggatctgaagagtaaagggctgggtctgcctcagaaggcaccagcaccagggcccaggtattaaggctgagagtgaaggctgccaatgtcagctttggaggtcccagaagtcttctgttctctggcctcaccccctcagtcgccatagagctgggcctggccttgctggaatggaggcatccttccaaacctgggggacgggggtggggggtggtagtggtgggagggaaaccatgtcttgctaaacctgtttctggtgcctcccatccccagacccaccagacaccacacagcagacaatacacacccactcgcacaagcttccatccacatgtgttgtactttcagctctaggcatgcagacaaccccacacggccacaccaccacatgcccaagtgtacacacacagagccacaccgtccctctgggcctgctggctcctcccttggctttcccttggcccacttccagggcccaggtgctgcaactaaatgtgaaagctcagtggccgctccttctttcagcccatcaaccagcattggtcccatagggaagcacaggggactcaccctctttcatatcccttgccctgccctgaaatggacaatcactttttgggataggttgaaatttttaaagagcctgcatcatttggttccctcaaagggaagcccttgccagtgggggtttgaaagagaatttttggaaccaacattcaaattctgcctcatctggagggaaaccaaaattgggagggggaagaggacccctgatgttttgctgcttccagagatattagaaactgactcacttgattggaaaatggacaaaagtgccttgacgtggagggtgggcaccagatggggaccagccttgccaactgctgctgtggcctccagcttggctggttttgcaggccgccagcaggaaggcgaaggtggtagtacagcaagaggcactggcggggcagcaggcctgcaggagctgtttttccattgctaggcctgacccctctctacctgtgagcgttcagggggtccctgagatagtttagatgcccccccatcttagacctcagctcccacagtgccttttaagggggacctcacctcctgtgcacagcccacccactttcctctgcttccctggcacagcccaggcatagacgagctggcgttggacccagttcttcccccttttcagccccacagctgctgccacaggggccaactagggccaggtggaaggggagctgagaagccaacccctagcccaggggtgctgtgggaactgggatccaatttgtagcttcctgcctggcttcagagagcccagcaaccttctaggcctgctttccagacttctgagatagcctgggatgagcaatcctgttatagtacatctggaccttccctacctgggctctggggaggctgtgggcctggagagggaaaaggagggagggggtgtctgcaccacctgggaagatagcacaaggcctaatgaggtcaccctgactccccaccccagcatttcattcataccagataatagctgcattactgccaactgaccttataaccctctgcaccttcaaaaagattcatggtttttaattgctgcttttaataacatttgttaaagttataattaatgtgtctgatttatgatttaaaacctccctttgaacaat

SEQ ID NO: 390 - DNA, 1892 bp, Homo Sapiens
caagcttctgggtatttctattgcgcgaggcattgtgggttgctgggcggcccggtctcggagaagaggggagagtggcgggccgctgaataagcttccaaaatgatgcccacaccagttatcctattgaaagaggggactgatagctcccaaggcatcccccagcttgtgagtaacatcagtgcctgccaggtgattgctgaggctgtaagaactaccctgggtccccgtggcatggacaagcttattgtagatggcagaggcaaagcaacaatttctaatgatggggccacaattctgaaacttcttgatgttgtccatcctgcagcaaagactttggtagacattgccaaatcccaagatgctgaggtgggtgatggcaccacctcagtgaccttgctggctgcagagtttctgaagcaggtgaaaccctatgtggaggaaggtttacacccccagatcatcattcgagctttccgcacagccacccagctggcagttaacaagatcaaagagattgctgtgaccgtgaagaaggcagataaagtggagcagaggaagctgctggaaaagtgtgccatgaccgctctgagctccaagctgatctcccagcagaaagctttctttgctaagatggtggtggatgcagtgatgatgctcgatgatttgctgcagcttaaaatgattggaatcaagaaggtacagggtggagccctcgaggattctcagctggtagctggtgttgcattcaagaagactttctcttacgctgggtttgaaatgcaacccaaaaagtaccacaatcccaagattgcccttttgaatgtcgagctcgagttgaaagctgagaaagacaatgctgagataagagtccacacagttgaggattatcaggcaattgttgatgctgagtggaacattctctatgacaagttagagaagatccatcattctggagccaaagttgtcttgtccaaactccccattggggatgtggccacccagtactttgctgacagggacatgttctgtgctggccgagtacctgaggaggatctgaagaggacaatgatggcctgtggaggctcaatccagaccagtgtgaatgctctgtcagcagatgtgctgggtcgatgccaggtgtttgaagagacccagattggaggcgagaggtacaatttttttactggctgccccaaggccaagacatgcaccttcattctccgtggcggcgccgagcagtttatggaggagacagagcggtccctgcatgatgccatcatgatcgtcaggagggccatcaagaatgattcagtggtggctggtggcggggccattgagatggaactctccaagtacctgcgggattactcaaggactattccaggaaaacagcagctgttgattggggcatatgccaaggccttggagattatcccacgccagctgtgtgacaatgctggctttgatgccacaaacattctcaacaagctgcgggctcggcatgcccaggggggtacatggtatggagtagacatcaacaacgaggacattgctgacaactttgaagctttcgtgtgggagccagctatggtgcggatcaatgcgctgacagcagcctctgaggctgcgtgcctgatcgtgtctgtagatgaaaccatcaagaacccccgctcgactgtggatgctcccacagcagcaggccggggccgtggtcgtggccgcccccactgagaggcaccccacccatcacatggctggctggctgctgggtgcacttaccctccttggcttggttacttcattttacaaggaaggggtagtaattggcccactctcttcttactggaggctatttaaataaaatgtaagacttcagataactttgtaaa

SEQ ID NO: 391 - DNA, 5281 bp, Homo Sapiens
gggacccagaacctcggacgagcggcgggcacccgcgagcggacggcggccgcgtagtgagcaatggcctgagcccccatggctgcccctcaggacctggacatcgctgtgtggctggccacggtgcacctggagcagtatgcagacacgttccgacggcatggcctggctacagcaggtgcagcccggggcctgggccacgaggagttgaagcagttgggcatcagcgccacagggcaccggaaacgcattctacgcctgctacagacaggcaccgaagagggctccctggatcccaaatcagatagtgccatggaaccatcccccagcccagccccgcaagcccagccccctaagcccgtgccgaagcccaggaccgtgtttggtggactcagtggccctgccaccactcagagacctgggctgagcccagccctcgggggaccaggagtgtccaggagcccagagcccagcccaaggcctcctcctctccccacttcctcctctgagcagtcttcagccctaaatactgtggagatgatgcctaattccatctacttcggcctggactcaagaggcagggcacaggcagctcaggacaaggccccagacagctcccaaatctctgcccccacccctgccctcaggcccacaacaggcacagtgcacatcatggatcctggttgcctgtactatggtgtccaacctgtggggactccaggagcccccgacagaagagagagcagaggtgtttgtcagggcagggctgaacacaggctcagcagacaggatctggaggcacgggaggatgctggctatgccagccttgagctacctggagactccaccctcttatcgcccaccctggaaacagaggagaccagtgatgacctcatttcaccctatgccagcttctccttcacggcagaccgcctcacgcccctgctcagtggctggctagacaagctctcccctcagggaaactatgtcttccagagacgctttgtgcagttcaatgggaggagtctgatgtactttggcagtgacaaggaccccttccctaagggtgtgatacctttgactgccattgagatgacccgcagcagcaaggacaacaagttccaggtcatcaccggccagagggtgttcgtgttccgcacagagagcgaggctcagcgggacatgtggtgctccacgctgcagtcctgtctgaaggagcagcgcctcctgggccacccccggcccccccaaccaccccgacccctccgcacgggcatgctggagctgcgtggacacaaggccaaggtgtttgctgccttgagccctggagagctggcactgtacaagagtgagcaggccttctctctgggcatcgggatctgcttcatcgaactgcagggctgcagcgtccgggagaccaagagtcgaagctttgacctgctcacaccccatcgctgcttcagcttcacagccgagtctgggggtgctcggcagagctgggcggccgctctgcaggaagcagtaaccgagaccctgtctgactacgaggtggctgagaagatctggtctaatcgggccaaccggcagtgtgcggactgtgggtcctcccgcccagattgggctgctgtcaatttgggggtggtcatctgcaagcagtgtgcaggtcagcaccgggccctgggttctgggatctccaaggtgcagagcctgaagctggacacgagtgtctggagtaatgagatagtacagttattcattgtcctgggaaatgatcgtgccaaccgcttctgggcagggaccctacccccaggtgagggactacatccagatgcgacccctggcccccggggagagttcatctcccgaaagtaccgtctgggtctcttccggaagccccaccctcagtacccagatcatagccagcttctccaggcactgtgtgcagctgtggcaagacccaacctgctgaagaacatgacccagctcctctgtgttgaggcctttgaaggcgaggagccctggttccccccagcccctgatggcagctgccctggcctcttgccctcagacccctcccctggtgtgtacaatgaggtggtggtgcgtgctacttacagcggcttcctgtactgcagtcccgtcagcaacaaagctggaccctcaccccctcgcaggggccgggatgctcccccgcgcctttggtgtgtgctgggagcagctctggaaatgtttgcatcggaaaacagccctgaacccctcagcctcatacagccccaggatattgtatgtctgggtgtgagccccccacccactgacccaggtgacaggttccccttttcctttgagctcatcctcgctggggggaggatccagcattttggcacagatggagctgacagtctggaggcctggactagtgctgtgggcaagtggttctccccgctgagctgccaccagctgctgggccccgggctgctgcggctgggccgcctatggctgcggtccccctcccatacagccccggcccctggtctctggctgtcagggtttggcctccttcgtggtgaccacctcttcctgtgctcagcgccgggcccaggccccccagcccctgaggacatggtgcatctgcggcggctacaggagatcagtgtggtttctgcagctgacaccccagataagaaagagcatttggtcctggtggagacaggaaggaccctgtatctgcaaggagagggccggctggacttcacggcatggaacgcagccattgggggcgcggctggtgggggcggcacagggctgcaggagcagcagatgagccggggtgacatccccatcatcgtggatgcctgcatcagttttgttacccagcatgggctccggctggaaggtgtataccggaaagggggcgctcgtgcccgcagcctgagactcctggctgagttccgtcgggatgcccggtcggtgaagctccgaccaggggagcactttgtggaggatgtcactgacacactcaaacgcttctttcgtgagctcgatgaccctgtgacctctgcacggttgctgcctcgctggagggaggctgctgagctgccccagaagaatcagcgcctggagaaatataaagatgtgattggctgcctgccgcgggtcaaccgccgcacactggccaccctcattgggcatctctatcgggtgcagaaatgtgcggctctaaaccagatgtgcacgcggaacttggctctgctgtttgcacccagcgtgttccagacggatgggcgaggggagcacgaggtgcgagtgctgcaagagctcattgatggctacatctctgtctttgatatcgattctgaccaggtagctcagattgacttggaggtcagtcttatcaccacctggaaggacgtgcagctgtctcaggctggagacctcatcatggaagtttatatagagcagcagctcccagacaactgtgtcaccctgaaggtgtccccaaccctgactgctgaggagctgactaaccaggtactggagatgcgggggacagcagctgggatggacttgtgggtgacttttgagattcgcgagcatggggagctggagcggccactgcatcccaaggaaaaggtcttagagcaggctttacaatggtgccagctcccagagccctgctcagcttccctgctcttgaaaaaagtccccctggcccaagctggctgcctcttcacaggtatccgacgtgagagcccacgggtggggctgttgcggtgtcgtgaggagccacctcgcttgctgggaagccgcttccaggagaggttctttctgctgcgtggccgctgcctgctgctgctcaaggagaagaaaagctctaaaccagaacgggagtggcctttggaaggtgccaaggtctacctgggaatccgcaagaagttaaagcccccaacaccgtggggcttcacattgatactagagaagatgcacctctacttgtcctgcactgacgaggatgaaatgtgggattggaccaccagcatccttaaagcccagcacgatgaccagcagccagtggtcttacgacgccattcctcctctgaccttgcccgtcagaagtttggcactatgcctttgctgcctatccgtggggatgacagtggagccaccctcctctctgccaatcagaccctgcggcgactacacaaccggaggaccctgtccatgttctttccaatgaagtcatcccaggggtctgtggaggagcaagaggagctggaggagcctgtgtacgaggagccagtgtatgaggaagtaggggccttccctgagttgatccaggacacttctacctccttctccaccacacgggagtggacagtgaagccagagaaccccctcaccagccagaagtcattggatcaaccctttctctccaagtcaagcacccttggccaggaggagaggccacctgagccccctccaggccccccttcaaagagcagtccccaggcacgggggtccctagaggaacagctgctccaggagctcagcagcctcatcctgaggaaaggagagaccactgcaggcctgggaagtccttcccagccatccagcccccaatcccccagccccactggccttccaacacagacacctggcttccccacccaacccccatgcacttccagtccaccctccagccagcccctcacatgaccctaggaccagcagtctgagagggtaggtaccagaagacccagaaactcttatcgtggcactgttgcagcttcctctgccctggctggaaagactccagaatccagtgtggtgctgtggaaggagcactggactaaaggcttcagtggctgcgtgtcccaggacaggtcatggcccctctctgggcccagcccatttatctataccatgaggtaactgaagtaaggagagcagtgaatgtcaaactgtgtttcttagagccataagccccacatattatccctgaacaagggcagctcctgctttatatatttgatacgtaggggttccatgagagattttgggttttaaaggaatggttttactgcattaaagaaaaaaaatgctttggaaaccagaggcctgggtgatgttaaagtctatcctgtcccacttcctacattctgggactaccgtgaagcctggagtagggagagcgagtttgggagctgggactcggggagtcaaaaatagatgagtaattgtcaataaacctgggaaccaaaagacaaaaaaaaaaaaaaaaaaa

SEQ ID NO: 392 - DNA, 1833 bp, Homo Sapiens
cgctccccgaaagtggctgcaagccggccgcccactgtcagggttggggggacagagaaagtgatgtgcgccttctaaagcctcgcccagcgccgccgaagcagcttcacctctccaactttctcccaccgactgcttgtcttgaccctgccctccaccctccccagagccacttcgggtgcgcgctcttgggtaaagggggggtcaccggctgtctgggatggcttccaattttaatgacatagtgaagcaagggtacgtgaggatccggagcagacgcctcgggatttatcagcgatgctggttagtattcaagaaagcttcaagcaaaggtccaaaaagactggagaaattttctgatgaacgtgctgcatatttcaggtgttatcataaggttacagaactcaataatgtgaagaacgtagctcgattgccaaaaagcaccaagaaacatgccatagggatttatttcaatgacgatacctccaagacttttgcttgcgaatcagatcttgaggctgatgagtggtgcaaagtactccagatggagtgtgtaggaacacggatcaatgacatcagccttggagagcctgacttactggccactggggttgagagagaacagagtgagagattcaatgtgtatttgatgccatctcctaacttagatgtacatggcgaatgtgccttgcagattacatatgagtatatctgtctttgggacgtccagaatcccagagtcaaactcatctcttggccgctaagcgccctgcggcggtatggacgtgatactacgtggttcacttttgaggcagggaggatgtgtgagactggtgaagggctgtttatctttcagacccgagacggggaggccatctatcagaaagtccactctgctgccttggccatagccgagcagcacgagcgcttgctacagagtgtgaaaaactcgatgctccagatgaagatgagtgagcgggccgcctcgctgagcaccatggtgcccctgcctcgcagcgcctactggcagcacatcacacggcagcacagcacgggacagctctaccgcttgcaagatgtttccagccctctgaagcttcatcgaacagagacttttccagcctacagatctgagcactgacagtaactgccaagaattgttaacacacttgtgatgtgtcagccacagattcacccaggaggtcacagaatgacagcaagggaaatgacgaccaagagaagaagcttaaagtcctggctaattgtgtggtcattggaaaactctgcaatacaataattttctttattttctttttcttttttaaattcttagtgtaattgaaacgtgctctatagatattgactctgtgttccctcttttacagctggacagaaagaagtcaatgtcacgaaatgattttctattgtagatactttgtcccttgcacttctctgaatctgtccttttgtggattcttgtgattttccttccaagtgtttcagttgtatgacagtcagtattgacaataaaatggcttttaattatttgttatttgtttacaccctattcctcagttattattactgtggttctgattaactactggaaattatatttgattatatcaccaattagttaaatcagtgcttcgactcactcttatctgttctgttcaaaactatttgttcaaagaacccgttagtgttgtttacagggttacagtttctctcacatgctttcctcacccctttacccccctttttgaaagcctttattttgttcggagtctcttcataaaacatttgaaaataaaagatcattcttcacccata

SEQ ID NO: 393 - DNA, 1642 bp, Homo Sapiens
gctctgcgttgggccagcccctcacagctggtttcttaccacgtattgcgcaagcggaatctatgcctgttacccacactccctgcgcccccgcaccccgctcctgtgcgcaagtcggaatataaaaccgcggaggagtgagctcttggggtgtccagttggttgccgcggcagtctctccgagcagcgcatttgtcttctaggctgcttggttcgtgcctccgagaaaggggtctcctgctgccagctaagtgtgggagaacttgtgcacgtatctcccctccgaatcccaacgatgggtaacgccagctttggctccaaggaacagaagctgctgaagcggttgcggcttctgcccgccctgcttatcctccgcgccttcaagccccacaggaagatcagagattaccgcgtcgtggtagtcggcaccgctggtgtggggaaaagtacgctgctgcacaagtgggcgagcggcaacttccgtcatgagtacctgccgaccattgaaaatacctactgccagttgctgggctgcagccacggtgtgctttccctgcacatcaccgacagcaagagtggcgacggcaaccgcgctctgcagcgccacgttatagcccggggccacgccttcgtcctggtctactcagtcaccaagaaggaaaccctggaagagctgaaggccttctatgagctgatctgcaagatcaaaggtaacaacctgcataagttccccatcgtgctggtgggcaataaaagtgatgacacccaccgggaggtggccctgaatgatggtgccacctgtgcgatggagtggaattgcgccttcatggagatttcagccaagaccgatgtgaatgtgcaggagctgttccacatgctgctgaattacaagaaaaagcccaccaccggcctccaggagcccgagaagaaatcccagatgcccaacaccactgagaagctgcttgacaagtgcataatcatgtgagccctgggccttaagagccagctcttcctatcctgtagcgtgtagaaaacgtggactcatttcactatgttacatgtacatggttgattttgtgctgttgtttggactgtaacatccatgttgtcaatacgtataccttgtaagtggataacttttctttttcccaggccagagaattcaaattgttaaaacattggcatttgaagaggagaacaaaatgtagcatgatgtatttaaagtaaggcctttagtaatgaatgtaatgagagaaaatgttttgaaaagaacaaaacatcaaaatgaatagaaagaaaaattggaaggcgtccttttggtaacccgattattgtgtattacctttaaatatttcacatcctgtaagtgcttaatcatatcttttaattgtgtatttaagaaaagtgttttcacaacaaaagcttttgataaattgctgcgtgacatatactaaataaaaaaatgaatatgttgatcattaggggtgtgggagcagagaaaattgtgaaagtgactctcactaaagatgttagtagtttctcatgtcatttaaaaatgtttgagtattctgcatagcagtttgtaaaagtgtaacagcttattgacttaataaagcttttcctgcatgcaaaaaaaaaaaaa

SEQ ID NO: 394 - DNA, 2096 bp, Homo Sapiens
ggccgttcttgcgtagggggcgggactaaggctgtcaattggtctgtttttgtgccgatcaatgagatgggtgcggtgattggcgactaccttgagagtagcgggttgaggtgtaagccctgaggaggcagcgttttctgggcttctgtctggttctctctctccagaaggttctgccggttcccccagctctgggtacccggctctgcatcgcgtcgccatgatgggccatcgtccagtgctcgtgctcagccagaacacaaagcgtgaatccggaagaaaagttcaatctggaaacatcaatgctgccaagactattgcagatatcatccgaacatgtttgggacccaagtccatgatgaagatgcttttggacccaatgggaggcattgtgatgaccaatgatggcaatgccattcttcgagagattcaagtccagcatccagcggccaagtccatgatcgaaattagccggacccaggatgaagaggttggagatgggaccacatcagtaattattcttgcaggggaaatgctgtctgtagctgagcacttcctggagcagcagatgcacccaacagtggtgatcagtgcttaccgcaaggcattggatgatatgatcagcaccctaaagaaaataagtatcccagtcgacatcagtgacagtgatatgatgctgaacatcatcaacagctctattactaccaaagccatcagtcggtggtcatctttggcttgcaacattgccctggatgctgtcaagatggtacagtttgaggagaatggtcggaaagagattgacataaaaaaatatgcaagagtggaaaagatacctggaggcatcattgaagactcctgtgtcttgcgtggagtcatgattaacaaggatgtgacccatccacgtatgcggcgctatatcaagaaccctcgcattgtgctgctggattcttctctggaatacaagaaaggagaaagccagactgacattgagattacacgagaggaggacttcacccgaattctccagatggaggaagagtacatccagcagctctgtgaggacattatccaactgaagcccgatgtggtcatcactgaaaagggcatctcagatttagctcagcactaccttatgcgggccaatatcacagccatccgcagagtccggaagacagacaataatcgcattgctagagcctgtggggcccggatagtcagccgaccagaggaactgagagaagatgatgttggaacaggagcaggcctgttggaaatcaagaaaattggagatgaatactttactttcatcactgactgcaaagaccccaaggcctgcaccattctcctccggggggctagcaaagagattctctcggaagtagaacgcaacctccaggatgccatgcaagtgtgtcgcaatgttctcctggaccctcagctggtgccagggggtggggcctccgagatggctgtggcccatgccttgacagaaaaatccaaggccatgactggtgtggaacaatggccatacagggctgttgcccaggccctagaggtcattcctcgtaccctgatccagaactgtggggccagcaccatccgtctacttacctcccttcgggccaagcacacccaggagaactgtgagacctggggtgtaaatggtgagacgggtactttggtggacatgaaggaactgggcatatgggagccattggctgtgaagctgcagacttataagacagcagtggagacggcagttctgctactgcgaattgatgacatcgtttcaggccacaaaaagaaaggcgatgaccagagccggcaaggcggggctcctgatgctggccaggagtgagtgctaggcaaggctacttcaatgcacagaaccagcagagtctccccttttcctgagccagagtgccaggaacactgtggacgtctttgttcagaagggatcaggttggggggcagcccccagtccctttctgtcccagctcagttttccaaaagacactgacatgtaattcttctctattgtaaggtttccatttagtttgcttccgatgattaaatctaagtcatttgagaaagtt

SEQ ID NO: 395 - DNA, 4407 bp, Homo Sapiens
ttccggcgtgcctacgcctcctcttgcgctgtcctgttaatggcgggcagtagccgctgaggggattgcagataaccgcttcccgcacggggaaagtctaccctgcctgccactttctgctcgccgtcagcgccggagctcgccagcatgtctgtggtaccgcccaatcgctcgcagaccggctggccccggggggtcactcagttcggcaacaagtacatccagcagacgaagcccctcaccctggagcgcaccatcaacctgtaccctcttaccaattatacttttggtacaaaagagcccctctacgagaaggacagctctgttgcagccagatttcagcgcatgagggaagaatttgataaaattggaatgaggaggactgtagaaggggttctgattgtacatgagcaccggctaccccatgtgttactgctgcagctgggaacaactttcttcaaactacctggtggtgaacttaacccaggagaagatgaagttgaaggactaaaacgcttaatgacagagatactgggtcgtcaggatggagttttgcaagactgggtcattgacgattgcattggtaactggtggagaccaaattttgaacctcctcagtatccatatattcctgcacatattacaaagcctaaggaacataagaagttgtttctggttcagcttcaagaaaaagccttgtttgcagtccctaaaaattacaagctggtagctgcaccattgtttgaattgtatgacaatgcaccaggatatggacccatcatttctagtctccctcagctgttgagcaggttcaattttatttacaactgaattcctgcgcagtggagaagtaaaagaagccgcttgtctctgtgagcacagctatatacagtgtagaataaatgtggtagaaaagtttttttggttttatctcttttgcgatccctaaattgccacctttctattgtttgaatagtaaaattaatatgaagaactagatagtggtgtaaacaaatgtgataatgtttatttactttcggttctgctcatacttttttgtacaacattaaagaaaatggactttttttattttaatttctcattaaacttctaaaattcttataggtgaggatcatttttccccccaccttaggatggtgaatgttgcaacacaatgacaggtttaagtcagtcaagtttattggacccttgctttgataccattcttgggcacatactccaagattgtattagatttttgtgatgaagagcttccattacttctgaaaactatatttatctgagtgagtccaaggtgcaactcctaaatgaattgtgttgcagagaactcccagtataattcactgaccagtacattttataaccatccaggccttggtttgcaagcaacagaccttaaacatacaggaaactattaaaattggctcgatcagtagtcataggaattggtataagaagagactcatttagagctcagagttttcttcacataatgggggtattaattatttgtgctgttgcgaaattatgtgtcttattcttaaagccatggtaaaaatagggatctgtgaaggaaatttctaaaattggatgtattaggttttgaactctgagattgcacaaatattcaattaacttgaagttgtgtacatagagaagaaaatttggttttagcaaatgacagagccttcaaaaatatttttggaataatgtgaatcaaccgaaaactgggggcaaggcagaggacaggttttctcaggttaagagaaaaacgaaattttaaaaactttaaaaaatactgataaattcggatcaaatttgggggaataaaaaatattagagcaaaggagtttgctggttgtgtcattatttaatgatcaaagtatagcatgtatgccttattacagacttgttgactataggcttaatgtaaaaaggaatcttgccagatgtagctacttaaggaaaaaagggtttttaatagaaatgaacttttgattagtatggtgccagtcacagggctattttcctgaatattgggtgatgtcaaaggtatatgatacttgaggaaatcaggccaagtgtagctgagcaattaataaacactcaagtttttttagttggggtcatgtcaaaccctcacatggtggttaagtagtgactaactgtgcatgtccttcatggtaggtgagcaccagtctccatgatcaaaaatgccccagtttcctttgaaaaagccactagttctgtgaattgtccttttccctcctgcccctaacagtcctacccctctagcctacattagcatatttctcatgtaatgtattttgctggtaagctcatccattagctgcgtccttcagctattcctttagattggaggaagtggatatgaagatggattgattcagctcaccttccatgattgcttttgagggaaaagctacagtggccacatttcagatgttcacttttgcaatttgtggagggtggagagaggtagacttttgttgtgtgttttataaagtactctcagtaaggagtgtttgagttgaagagtcatctgattcgaggccactcatgttctttgtaacttaaactttgaccaagaaattcttcacttctcacttcttcacttcttcccaatatacagtaagtacgtgagccagtcatccatacactaaggcctagttgagaaaaacctttgattcaggatggctgggttactaaccttgaaatgtaagagatctggttttgaatgtaaaagttgcaacacacaaacggaagtcttaaaaactttttgctctggtcagttacaggtggatccccaataatctgtttttggttttctgatggaaataatagaattaggggaaatcaaatctggttggtaggtgtctacagtattagaagagggtataagggcactgtttaacactaagttctaatacttccagaaactgtgcattccagatctacatactaaatgctcttatcattttgaaatgggctcttgattaatagacccatattttttagtggcttctatgttgtatatttgtctaaaatgaaagctcttttgcgttctaaaactacaatatatgtcatcttattttccctgagtatccaagtatagtgcagattctatgtaaaactactaaatgacactggaatatgtttagtagattagggggaaaaactataaaggtttatacaattgtttgtagttacatttaggatggacttatccctttggagaagagtgaagtttgttttttcgccatgtgatgaagaccactgtgattttttaaaaaagtagataatacttaaaatggcgtaataattctgcacttgaatttgtactgttaacagcacatttggaagattttaaaactttttattgtcttataaatagcattcacttattattttggatatttaagggttccattaagttaacactgtatttggacaaagtgtgaccaaattagccagtctgttttcttccatgtttaattagaagtgagaggtagaagtacttcaaattcaacaggccagcaagcaatcggcttaaaattccctttcttaaatgttgtgctcttatgttctcggctttttaatgactttatttttacagtacttgttcagtcacttgagatgaaatgcttggggtagcttttccatcctcaaacttaatgtttttactagttcatagtgtttggaacagtatatgccaatcactgagactgcatcagagtttgcaattttgtatgtttcattgccaaagaaggcttagtggttgttgactgtagtataagtcagctttctgtagcataagatttgattttcccatacttacttcacttgttatacatcactgattatttgggttaaactggactcatttcaagcagtttgcttttgttcaaatcgtgatgagaaacctaatactgtaatttgatttgagccataaaacacattttaatattagcttgtattatagttattaagcttgtttttgtggaaaaaaacttactaaaacctaggtaactctagattaggccagttcaggtgtattttgtatcttagtaatggatcatatcgtaaaaatagagataagttgggaagatatattgattatgctgttctgttgagggaaaggtcatgtatttagaaatttaaacttttggttattgtgttcacatcatagtattcaagcatcatttatagtttggttttgagaacttttctggtattacgtttatggcaaatgtataaaagaaacaagttttggttatatttttatatttgtaaagtaagtttggttaaagtgatcactgttctttttttattttattgtcatttcaataaaaaatatttgaaaga

SEQ ID NO: 396 - DNA, 3880 bp, Homo Sapiens
aggactcccagacccctcaccttctgcctcccctggtcgcgtccgggtccttgcggagctaactagctcgccacgacgtcaagaacgacgtaacgtcaggccgctgtgggctctgggaattgtagtccagagctagatcggccacggacagaatggcgttctcttatctctgagtcggggcctggctcgttttgacatttttgcgcccacgagtcttcggagagggcgtcgccactccagaccttccagcaagcttgaagtcatctgacgctaaaggactacttacctcaagagctccatcgtcacagaaggaggcggccaagttcgcggggggaggggaggagacagagagtcgaccagtaaagcctcaagggaaatgtagtccaaggcctgagaagcgacgttgctggtaatagaaggtaattcagtaccagcctgggcctggccgcggtgaccgaggcgggccgcgtcgcggagacttctgggagtgcttcctcgctctccgagtgcgcaagcgcagcgcaccgagtggacattttggtctttgtccgcgggtcagtacggcccctgggtccacgtggcgcgaaagtaggaggaagacataggccaaggagccagacttcctgtgttaactccttcctctgccactttttaccttggggacctcagttaatatgatcctctgttgaagcaagaagacaaactgtatggtggagaaagaagtgggaaggatctgcgcggaagaagcctgagaagatgatgcacagatagagaggcaccaggacttgagaggcaccaggacttgggaggcatgttgatccatctccaggaaagactgagaaaaagagcgttgaatataagaaaaaatacttcctctgttctcagatcgtatttgttttaaggccacacctttttgaagttttcagtttgaaacacaacctggactgaaatcatgagggaggttgtgtaggaaagaatcatcaagggacttagttgggagcttctctaccacagcttactccttatggtattaaccccctttaagtgtaaatgtctttggtttaaaacgtttgtacctcatctgttaccagagtgttcatactggagagaaaccctatgaatttactgaatgtgggggaactgttactcatatgttgcatttcgtcgaacgtgcaagtcatgctgaagagaaaccctgtgcttctaaggagtattgacaagcccttagctagatgacaatctcattgagaagcagaaaattcatgctggagagaaactagtgaaggtagcaatacttcattgaatattagaaaatttttctagagagaaagcattgaatatactgagtatgataacatttcctctcaaaccttatcccttactctgcatttgggagatcatacacagagaagccttataaatgtaagagatgtggaaatatcttcagccaaaagtaaatcctcactcatcaagaaatttttactggagagaaaccttgtgaatgtgggaaagcttccattcagatgtcacacctcagccagcagagaatttacagtggggaaaacccctttgcctgtaaggtatgtggaaaagtcttcagccacaaatcaaacctcactgagcatgagcattttcacacgagagagaaaccttttgaatgtaacgagtgtggaaaagcctttagccaaaagcagtatgtcattaaacatcagaacacccatactggcgagaagcttttcgaatgtaatgaatgtggaaaatcatttagccagaaggaaaacctccttacgcaccagaaaattcacactggagaaaaaccttttgagtgtaaagattgcgggaaagctttcattcagaagtcaaacctcatcagacaccagagaactcacacaggagagaagccctttgtatgtaaggagtgtggaaaaaccttcagtggcaaatccaaccttactgagcatgagaaaatccatattggagagaagccttttaaatgtagtgaatgtggaacagcctttggccagaagaagtacctcataaaacatcagaacattcacactggagagaaaccctatgaatgtaacgaatgtggaaaagccttctctcagcgaacatcacttattgtacatgtgaggattcattcaggtgataaaccttacgaatgcaatgtttgtggaaaagccttctctcagagctcatctctcactgtgcatgtgagaagccatacaggggagaagccctatggttgtaatgaatgtgggaaagctttctctcagttctcaacccttgctctgcatttgagaatacacacaggtaagaagccttatcagtgcagtgaatgtgggaaagctttcagccagaagtcacaccacattagacaccagaaaattcatactcactaaaaaccccatgaaagccttgaaagtgggaaagctttcattagaaatttgcacctcatcatgccccagaaataatccttctgaagcaaagcaccacgaatgaggttaactttaacaagtactaaaaacttaagggacaccagaaaatttgtactgaagagaaagacatgcatatgattaaaaccctgtgtccaacagagaaacctgcagcagagataatggtgaaagtttaggcacattttcactaaaagtgggaacagaaaatggaggcctgttttttattgctaccaccatagatctggagatcttcgccagtaacaagaaaaattaagttgtaaatattggaaaggaacagacaaaaatagatgacatggtcatctacaactaatattaagactcctgtggtattgattgagcagagcagaagagatttcaaaaaaagacctatgcatttattagaatttggaatatgatacaagtggcatcaggaaatgaggaaataatggaactattttttttaagtggaggtagtttgttctccaagggggaaaaatagaccatgaactatacacaaaagtgaatccagagattaaaaacagaaatatggaaaagctatgtactaaaatgcatatgaccttgggaatagggaaacattccttggaacaatttgagaaatacttagcggttctacttatgagtatgaatgctcaggaaatacgcactaggatatttactgtggcttgatttgtagtagccaaaaattagaaacaactgagaaagcccatcacgaacaatatgggaaattcttatgtaatactatatatctgtaaaatgcaacaaatgaaatccacatgtattaacagaaagatcccagaattgttgaggggggatcaagttgcagaatgatacagatagtacaatgacttttttgtaaatttgaattaaaagtttcctcataaaactcagtactatctattggtaatggatgcatatatgtatgtacatgtttttgaaacggattggaaggatacagaccaaactcttgatagtggtcacctgtgaagagtggagaagggaaaataatgagtgtgggaggtgggatgggtattggttaaaggggacttcagctttttatataaacatccacttctctttcaaaagacttcaagtaaatataagaagatactgattgattctggattgtggtatagggatatcttgtcttattttttgtacttttctgtatttttaaaatttctcaaaataggaatgggagtgaggatgggaatgctgtatctgtggaagtcatgttatactggattcatttccaattaaatactaaacattttatagaaaatatttctaaaattttatcacggatgaatggatggacttgctctctatgtaatatgaaattaatctattttattaaaatttaaaaggacagcacaatccaaaaaaaaaaaaaaaaaaaaaaaaaa

SEQ ID NO: 397 - DNA, 1235 bp, Homo Sapiens
accgaccggatacacgggtagggcttccgctttacccgtctccctcctggcgcttgtcctcctctcccagtcggcaccacagcggtggctgccgggcgtggtgtcggtgggtcggttggtttttgtctcaccgttggtgtccgtgccgttcagttgcccgccatggctgagctggatccgttcggcgcccctgccggcgcccctggcggtcccgcgctggggaacggagtggccggcgccggcgaagaagacccggctgcggccttcttggcgcagcaagagagcgagattgcgggcatcgagaacgacgaggccttcgccatcctggacggcggcgcccccgggccccagccgcacggcgagccgccggggggtccggatgctgttgatggagtaatgaatggtgaatactaccaggaaagtaatggtccaacagacagttatgcagctatttcacaagtggatcgattgcagtcagagcctgaaagtatccgtaaatggagagaagaacaaatggaacgcttggaagcccttgatgccaattctcggaagcaagaagcagagtggaaagaaaaggcaataaaggagctagaagaatggtatgcaagacaggacgagcagctacagaaaacaaaagcaaacaacagggtggcagatgaagctttctacaaacaacccttcgctgacgtgattggttatgtcacaaacataaaccatccttgctacagcctagaacaggcagcagaagaagcctttgtaaatgacattgacgagtcgtccccaggcactgagtgggaacgggtggcccggctgtgtgactttaaccccaagtctagcaagcaggccaaagatgtctcccgcatgcgctcagtcctcatctccctcaagcaggccccgctggtgcactgaagagccaccctgtggaaacactacatctgcaatatcttaatcctactcagtgaagctcttcacagtcattggattaattatgttgagttcttttggaccaaacctttttgtctttagagttgttcattgtttgtgattgcatgtttccttccttcaactgtgttctccctggcattcagagaggagggagaggaggaagaggaaggggagggaagcttcccaagagtagcctcaacctgtgcttctgtgcattattctgagaataaatttctgtttcaaactgtaaaaaaaaaaaaaaaaaaaaaaaaaaaaaaaaaaaaaaaaaa

SEQ ID NO: 398 - DNA, 7152 bp, Homo Sapiens
taagctactgcacactaaacagtgagagagcttttccctgcagtcttgttgaagcaccccgggttttttgctcattgttggtgggtgcattttaattttttcattccctggactatgggttatgatatccatactcactgaagacaaaaagccaccttttctgcgtcttggtggcatgcatgtgtctcatcatcctttcaaacttgtggtggaacagggttttcttccctgtctgtgtattttgagccagcacagttaccaaaattgaacttgtctttcgcttgtgagcggttgtggtcattgtgagggcgggtcatgaggaggctgtagccaaggacgaggtgtgtgcggctgttgcctggacgtttgtccaatccacgttgacatttgagggatcacagcgtgtgaaaatgaactcagaggagaattggtgaattcctatccagtgggcatcttcaaaccctggtcgacggcggaagaatatcaggtcctgagatcacccacccggcgcggcaacagtgcagagtggccacatctggtggaagaagaaaaaaatgtagttattgaattcaatcaagtgtttgcatctttcaagctatcaacaaaattccatcaagaaaggttccagttggtctcacagacgtatggatatccgaggagccacctaaagatggagaaatcaaggcatagagagattaagtgactttgccacagtcacaagctggagaggaccaggagtagagcttagagcgagcccctgactctgggcctgcgtcctgccaggagtcacgctgcctccgttcctaggagagaagacttcctgtaagatggaggtggacaccgaggagaagcggcatcgcacgcggtccaaaggggttcgagttcccgtggaaccagccatacaagagctgttcagctgtcccacccctggctgtgacggcagtggtcatgtcagtggcaaatatgcaagacacagaagtgtatatggttgtcccttggcgaaaaaaagaaaaacacaagataaacagccccaggaacctgctcctaaacgaaagccatttgccgtgaaagcagacagctcctcagtggatgagtgtgacgacagtgatgggactgaggacatggatgagaaggaggaggatgagggggaggagtactccgaggacaatgacgagccaggggatgaggacgaggaggacgaggagggggaccgggaggaggaggaggagatcgaggaggaggatgaggacgatgacgaggatggagaagatgtggaggatgaagaagaggaagaggaggaggaggaggaggaggaagaggaagaagaaaacgaagaccatcaaatgaattgtcacaatactcgaataatgcaagacacagaaaaggatgataacaataatgacgaatatgacaattacgatgaactggtggccaagtcattgttaaacctcggcaaaatcgctgaggatgcagcctaccgggccaggactgagtcagaaatgaacagcaatacctccaatagtctggaagacgatagtgacaaaaacgaaaacctgggtcggaaaagtgagttgagtttagacttagacagtgatgttgttagagaaacagtggactcccttaaactattagcccaaggacacggtgttgtgctctcagaaaacatgaatgacagaaattatgcagacagcatgtcgcagcaagacagtagaaatatgaattacgtcatgttggggaagcccatgaacaacggactcatggaaaagatggtggaggagagcgatgaggaggtgtgtctgagcagtctggagtgtttgaggaatcagtgcttcgacctggccaggaagctcagtgagaccaacccgcaggagaggaatccgcagcagaacatgaacatccgtcagcatgtccggccagaagaggacttccccggaaggacgccggacagaaactactcggacatgctgaacctcatgcggctggaggagcagttgagcccccggtcgagagtgtttgccagctgtgcgaaggaggatgggtgtcatgagcgggacgacgataccacctctgtgaactcggacaggtctgaagaggtgttcgacatgaccaaggggaacctgaccctgctggagaaagccatcgctttggaaacggaaagagcaaaggccatgagggagaagatggccatggaagctgggaggagggacaatatgaggtcatatgaggaccagtctccgagacaacttcccggggaggacagaaagcctaaatccagtgacagccatgtcaaaaagccatactatgatccctcaagaacagaaaagaaagagagcaagtgtccaacccccgggtgtgatggaaccggccacgtaactgggctgtacccacatcaccgcagcctgtccggatgcccgcacaaagatagggtccctccagaaatccttgccatgcatgaaagtgtcctcaagtgccccactccgggctgcacggggcgcgggcatgtcaacagcaacaggaactcccaccgaagcctctccggatgcccgatcgctgcagcagagaaactggccaaggcacaggaaaagcaccagagctgcgacgtgtccaagtccagccaggcctcggaccgcgtgctcaggccaatgtgctttgtgaagcagctggagattcctcagtatggctacagaaacaatgtccccacaactacgccgcgttccaacctggccaaggagctcgagaaatattccaagacctcgtttgaatacaacagttacgacaaccatacttatggcaagcgagccatagctcccaaggtgcaaaccagggatatatcccccaaaggatatgatgatgcgaagcggtactgcaaggaccccagccccagcagcagcagcaccagcagctacgcgcccagcagcagcagcaacctgagctgcggcgggggcagcagcgccagcagcacgtgcagcaagagcagcttcgactacacgcacgacatggaggcggcccacatggcggccaccgccatcctcaacctgtccacgcgctgccgcgagatgccgcagaacctgagcaccaagccgcaggacctgtgcgccacgcggaaccctgacatggaggtggatgagaacgggaccctggacctcagcatgaacaagcagaggccgcgggacagctgctgccccatcctgacccctctggagcccatgtccccccagcagcaggcagtgatgaacaaccggtgtttccagctgggcgagggcgactgctgggacttgcccgtagactacaccaaaatgaaaccccggaggatagacgaggacgagtccaaagacattactccagaagacttggacccattccaggaggctctagaagaaagacggtatcccggggaggtgaccatcccaagtcccaaacccaagtaccctcagtgcaaggagagcaaaaaggacttaataactctgtctggctgccccctggcggacaaaagcattcgaagtatgctggccaccagctcccaagaactcaagtgccccacgcctggctgtgatggttctggacatatcaccggcaattatgcttctcatcggagcctttcaggttgcccaagagcaaagaaaagtggtatcaggatagcacagagcaaagaagataaagaagatcaagaacccatcaggtgtccggtccccgggtgcgacggccagggccacatcactgggaagtacgcgtcccatcgcagcgcctccgggtgccccttggcggccaagaggcagaaagacgggtacctgaatggctcccagttctcctggaagtcggtcaagacggaaggcatgtcctgccccacgccaggatgcgacggctcaggccacgtcagcggcagcttcctcacacaccgcagcttgtcaggatgcccgagagccacgtcagcgatgaagaaggcaaagctttctggagagcagatgctgaccatcaaacagcgggccagcaacggtatagaaaatgatgaagaaatcaaacagttagatgaagaaatcaaggagctaaatgaatccaattcccagatggaagccgatatgattaaactcagaactcagattaccacgatggagagcaacctgaagaccatcgaagaggagaacaaagtgattgagcagcagaacgagtctctcctccacgagctggcgaacctgagccagtctctgatccacagcctggctaacatccagctgccgcacatggatccaatcaatgaacaaaattttgatgcttacgtgactactttgacggaaatgtatacaaatcaagatcgttatcagagtccagaaaataaagccctactggaaaatataaagcaggctgtgagaggaattcaggtctgaacagctgctgtagtgatgaaactcttgcttaaaaaggatgcctcttgttttttgctgctgtaacttaccagaaagtgttctatatttatttctgtttgaatttgaaacagtgttatgcttacaagacttcataatgattttatgtcttgctttaaagatagtacctgcagaatagtttttgaatacacccacattttgtacgtttccatgtaagctgacatagtgttctgccatgtaatgtttatagctgctgatgtatgcacatttgggggtatatctatttctgaagaggtaagctgatcaaaataaatagagtgtaaattctttttaatgctttagtgattaaatgttttagtattttgaactgaaatggacacacaaacacacacacgcacacacagacccacagctttgaatgatcatgttgtggctgagcagccgctttttagacgttatcattttgcctcatgttggaggactttatggaatttaagaaatacattttgtgtgcatattgtttcatagcaagaattcgttgcaaaaatgctttatttttgaacaatgcttggaaatattatgtgacttttttgtttgtttgttttaggaggatggtgtatggtgggggcaataaatgaggttttttgcattccaaggaaatggcatatggattaactgtaagaaatgaaataagtaatttattgtaagacaacatcaagccatggaaacttggcagaagattcaaagcagcttaaacagcacttttaaattaactcctaagcgttacatggttgtgactatggaaactccagttaagacaggatcttatcagaggtggacaacgtgaagatttccttttccattttcaataaactttggaacaaccttctcgtatctcccctagagtttcgtgcccctctgaactgtctgttattgcaatgtagtttatcaacagaatttgtgtgttttcgatttaagctaaaagataatttaagaacatttatttccccttttcactttaaaaaattatgattattcctattattgttatgaaccttcttattttacatttgagggataaaggcaaatgatttgtgagtcttctagttactggaccgagttttctgctggatctggtgggaaggcagctcggtaaagtttccctcctgctccccccgcccgactttgactctgaatcagcatttggtcctattcagaggactcttaccacgacgtttctgttctacacttgggtggagaccagttgaccatagagcatttgcagagcctcattgtttgatttcttgtgactattctaagaatgaatgcaatcagattttaaaagtaactaaatatacttcagcacttttttgctttaaactagatcatcttagacttgtttataccttccagatttgattgttttactcccaatgactgcactatatgtatgcataagaccacttttgagcgctgtgttcccccttctgagtagtcctttgacgacgtgttgtgttttctgatgttgacttgagttccatttagtagcatctcttccttccatgtcttgatgttatgcaggaagtacagacgtactttaaatttttgttatgaaataaaaaaaagatgggttttgtaaaaataaaaaaaaaatatttttagcagaacaggacttacagggtcattgtccccacaatgtgccagtcgactatttgcacttaccttgtcctatatatccgtacggaggtgtgcaattcctcgtgtcagtagccttgtgacactgaacctggatggattatagaggagccctcacggctgatcaataatgttgcaaagggagactacagggatctcacgacgaatattctgatacaatactcaacctcggtatatatatatgtgtataaatatatgtatatcccagcggcactttatactgttcactgtacaaaagcttacagttttccacaaggactttaataactagctgggaaaagacgatgtaattatttcggggctctgcggaaccttctctgtacagcgccccctttctgttgtgctattggttgcagctgccatgctcagaatgcgttttgagagctgaagcaaggtgcttgcagtcacctgaggccgtccgtgtggcccagggccccagctgcctttagggcccccattgttcataacagcatatgcatttccccaccgcgttgtgtctgcagcttctttgccaatatagtaatgcttttagtagagtactagatagtatcagttttggattcttattgttatcacctatgtacaatggaaagggattttaagcacaaacctgctgctcatctaacgttggtacataatctcaaatcaaaagttatctgtgactattatatagggatcacaaaagtgtcacatattagaatgctgacctttcatatggattattgtgagtcatcagagtttattataacttattgttcatattcatttctaagttaatttaagtaatcatttattaagacagaattttgtataaactatttattgtgctctctgtggaactgaagtttgatttatttttgtactacacggcatgggtttgttgacactttaattttgctataaatgtgtggaatcacaagttgctgtgatacttcatttttaaattgtgaactttgtacaaattttgtcatgctggatgttaacacatcttactctaaataaacaaggtgttgccacatttgtagcacgaaggatctctaaaaaaaaaaaaaaaaaa

SEQ ID NO: 399 - DNA, 3319 bp, Homo Sapiens
aaccggaaggggggctgtgaggacgtgttccgaggaagccagagccggagccgtggcctgcggggccggcgacatggatcccctgttccagcaaacgcacaagcaggtccacgagatccagtcttgcatgggacgcctggagacggcagacaagcagtctgtgcacatagtagaaaacgaaatccaagcaagcatagaccagatattcagccgtctagaacgtctggagattttgtccagcaaggagccccctaacaaaaggcaaaatgccagacttcgggttgaccagttaaagtatgatgtccagcacctgcagactgcgctcagaaacttccagcatcggcgccatgcaagggagcagcaggagagacagcgagaagagcttctgtctcgaaccttcaccactaacgactctgacaccaccataccaatggacgaatcactgcagtttaactcctccctccagaaagttcacaacggcatggatgacctcattttagatgggcacaatattttagatggactgaggacccagagactgaccttgaaggggactcagaagaagatccttgacattgccaacatgctgggcttgtccaacacagtgatgcggctcatcgagaagcgggctttccaggacaagtactttatgataggtgggatgctgctgacctgtgtggtcatgttcctcgtggtgcagtacctgacatgagccagccacgctcagtggctgaacagcattcccacagcctgcaagtgtgtgtgtgtgtgaaagagagaggggggcccagaggccgccttttgaaatgtttgcctgtctgaactgtgaagacacttgggagtgattgtggtctaatttccaacctgctctgttttctgtgacatcttggagggggagctagtgccaccaccatgcgcggtgcttaggaaatgaaagaagtcccgggtctgtctctctcactctcgctctcactgggggagggaaagaatggctttggtggctttgttcacatagctgatgcgtgccctgggaaggtgtccacagtgagccctgtgtgcaggactgtccacacggttcacaccttgtcaccatcaggcctttctggctcctgatagggtggagcaaaagtggaaaggaaaggaaagaggccttttctcacagccattatattaaatagtaggtcgattcacatcctcgtgctcctggccaccctcccctgtgcctcagtgacatgtagatgactgactgccaatacttgtcaccattccctggaagcagctacctaggggaaacaagatgtagtgctattgccgataacaagtaagattttccacactacagctgggtgtttctcttttctaaagtgaggccagtgttatttcccgggagtgttcagtcttgaccctagtcactgattttttctagttgttaatagagtggttggcttttaaggttcagagactgtggcttggcacctgcgcccaggctttgtgggcctttgccccttagaaagtagctgtaggcaaagatttgtgattttccaattacagtctcagctctagttttagtatctctaattctttggttcccttctcttccctgaaatatattagcacctgccagccaggccctcattttgcccagccagtgtgggcagatcccaccgtggagacatctgtagtgtgtatgtccttgtaacactctgttttcagggactacaacctttttccttctgtgaccagccccggattcaggctgtactaataccaggtatattgtggaatttagtataaaggccaatctgtcctgaagtccatctaatgtggtgaatcactgaaagtctcagaaagacctggttagtgtatgttctcatttaccacaggcctaccagccctgggcacagcagcttcatggcaagacataaaatgacactcaaaatccttcagatctggaaaccggctcagtattaaccctacctttggttgtcctgccctacctgctctgttagtttcttgttgcttgaactgtcttctgtcttatttcccttcctttctgtgttcctcttcacctctcttgttcccctccccgctgctctgtagtcatgttggtcctttcaggcacctctgtggcatagctcccctttggtaagttttcttaattgtcatagattaactgagtttcctggatgctaatttcacactttcggttggaggagatctccattgttcctacccctccgggccaaatgggccccaggtttccaaggaaggagcaatctgtgactcctaaaatgggttggggccctgccagagttaaagcagtgactggagggtggactggggggttgcagcatctttagacctagatctgtctaactctggggaggcacattgacatttccattacacacagcactgctgcggtgccagggacctagcgcaggacttttggtaatccataaaatggattctgagactgcgacggcaaggctgtcctgtcccccaggcacccaaggatcctgccagacagcacactttggaggaaggtctgcagggagcagctgagccatttgttcttgaactctgggaggcagaagtccccgcacccatcatgcgtggactgataggacatcttttcgtggtgtgcaccagtgctttccacacttgacagtggttggctttgatgaaccctcatgctgcaccttcagagccagtcctctagtttggaataaaaattgcagaggtggtttttgggtctttaccacctgcggctggtggacagcagccagtgtgtctggacacccaggggcattgagactgcatgttgtcacatgaccacttctcttcacacatctgctttcagtgcctggtgaaaaatagaccttggcctaacagtgtgactctctccaccgcctcagtgtagggaagggtccaggccagggaaggagcaccctctagtggaggcgggggtgaattcttaggtcgagctgatgcaagaaactccggtagccagcctctgtgaccttgtacatgagtttggtgtgcctattgtgatttaaaacaggtgggttatcaagaggaacttgagatctctttattacatggacatttacttcagggggaccactgtaagaaaagccaaactccaagaccaagtaagttagaggagtcttgattttttagacttcactgcggagttctgtacaccctttgccctgatgaatttgaatgggtttgatttgcaaatttggatttacacccattgttttggaagcacatcagctgaataaagttgaggtttattttatttagaaaatca

SEQ ID NO: 400 - DNA, 3163 bp, Homo Sapiens
gccgcctggcgcccgcccgagctgccgccttgtcgagctgagtccgcgctcccgcccaggcggcggccgacgcgacgccccgagcgcccggccccgccgccgcggcccggcagactgcctctgtcaccgggtccctccacccttgtctcctgtgcggccagcgtcagagccatggcgacggaggagaagaagcccgagaccgaggccgccagagcacagccaaccccttcgtcatccgccactcagagcaagcctacacctgtgaagccaaactatgctctaaagttcacccttgctggccacaccaaagcagtgtcctccgtgaaattcagcccgaatggagagtggctggcaagttcatctgctgataaacttattaaaatttggggcgcgtatgatgggaaatttgagaaaaccatatctggtcacaagctgggaatatccgatgtagcctggtcgtcagattctaaccttcttgtttctgcctcagatgacaaaaccttgaagatatgggacgtgagctcgggcaagtgtctgaaaaccctgaagggacacagtaattatgtcttttgctgcaacttcaatccccagtccaaccttattgtctcaggatcctttgacgaaagcgtgaggatatgggatgtgaaaacagggaagtgcctcaagactttgccagctcactcggatccagtctcggccgttcattttaatcgtgatggatccttgatagtttcaagtagctatgatggtctctgtcgcatctgggacaccgcctcaggccagtgcctgaagacgctcatcgatgacgacaacccccccgtgtcttttgtgaagttctccccgaacggcaaatacatcctggccgccacgctggacaacactctgaagctctgggactacagcaaggggaagtgcctgaagacgtacactggccacaagaatgagaaatactgcatatttgccaatttctctgttactggtgggaagtggattgtgtctggctcagaggataaccttgtttacatctggaaccttcagacgaaagagattgtacagaaactacaaggccacacagatgtcgtgatctcaacagcttgtcacccaacagaaaacatcatcgcctctgctgcgctagaaaatgacaaaacaattaaactgtggaagagtgactgctaagtccctttgctcctgcccgcgagagactgtcgggaagttgacccggattggcaagaaacagggtgtcttggaggtggtcccccagatctgcgcctgggggtcaggacagggcctgatttgagcctcctctctgaagatgatttggccgagcggaaggtgtggaccaccggaaagttcttaaaagttgctggtgacatttcttgccaattctaacactgtctagggaagagttcctagtctattgtgttcaaacagagtcaacaaaagtttttaattttttattacagaagggtgaagttcaatttaacatgcgttgtgttttttcagtaaacgttctgtatctttttgatattccatgacccagtgcacgctgtggcctgtcaccgccaccgtggccccgccagctggcctcccctttggcccacgccggccgcccccattctctgctgcgtagatgccctggcccagggccctgactcctccattcccgccagtagctgttcctagtgtattttcgtctttctggaaaacagcattgagtggttgttttctgtgtaaagagccgtttgtgtcttgggagtttgtggcccacatgccgatagcacggtcatcgcacatgactctcccgtttgtctcagtgtccctgcaacaagcagcaccgcagactgtaataaaaggtggggttttgtgaatggttgtggcaagtgcgtccttgtgaagctcgtctccatgtggctttcttggagaaaggctcccctggggcaagagggtggaaggtttctttggacaggaggtgctgaggctggctgcacctgctctctgaagacgccttcctctctaggttcattgttcagtgttgctgggggcggggaacgggggtggggaggttcttagttgcgaaggagccaagctcctgatggacttgcgttgggatgtgggggacacctgtggcatggtaaggctccctgagtcccttactccaggtcagatgccagtgggactcatgcgccctatgagggctgcagggccagtgctgcccctcggactcctcgaggggttgggtgctaagcgcgagcctcgccgtccctgctggagccctcgcctgcctgcccctctgcctgtgctcctggcagtgtggcttcccggtgctcacctgcacagcagttaacagcagaggccgagcgggagcctctggggagcgaggctgaaacctgaacctgcccatggagacagttgtggtgagggttgccacacacagtgagggcggagcagggtggctgagggcacaggtgcctgggtctgtcccacggggcagggctttggggctgtgatgctctgggaagccagcttgggtcctgggtctacagagggccctggccccggagcccagccagctctgcctctctcagggcctggagtcctgggggagctcagccagctctgcctttctcagggcctggagtcctggatgaatcctgcaggtttttggttgcaccggcccagggaggaagcggggggtttgtcaggtgggctctcctggaggtcctcgagtggcaggggtgaggaggggattatctgaggcatctggagatgtatatcctgtggtttcccctgcccctctgtttccgatgaggtgtacggatgagtgacctgcactaagaagtgagttgccacagtgaaaatgggttggtttttgtcttcgacgctcagggtctgggcgcctcgcatttgcagtctgttgtgacagacacggggagctccgcgtgccagcctgtggctgccctgctgtgggggtcctggggccggcgaggccccttcagtcttgttctggggggacggcccactccggggagggggtgtgctgtgctgagcgctgtatccctgaatatagtttattttttctacatttgaattctgttgtagatttatgtaaaaatacattctttttgaaaataaaaattttcatgtcttctaatttaaaaaaaaa

SEQ ID NO: 401 - DNA, 2034 bp, Homo Sapiens
gggggagcgaagccacggttgccgggaagcgcgggccacccctccctccctctcattcttcgtcctcccctcgcgcgccacccgtttttcctctttctccgttaataacggctgggtggctgggggaggagggaaggtggctccggcggagtctgggcgggcgcctcccactcagccgccagtcgccgtgggagccggaggatggcggcggtaacagcggccgccggagaggaggcggtggggaggcccggggcgccaagcgcgacggcagaaagcggcagcggcccgtcatggcgcaccgaaaccagcggcagtcgcacggccacctgagtcgccccttcctgctggagccagcgaggggtgcctgcagccgggacaccttcctctccgcgtctcctcgtctcccgcgcccgcgtcaggccgccagccttgcccaccgccccgagaagagcgcgccgggcgccgactgcccctcggggcgccgagcggcggccctggacgtgcgggggcctctctgggccggccgcggcgcctcggccctgccctctagctcccgcgttcgctcctaccctcttggctctcggggcacagcgcgcggcccggtccggagcagggcggacaggagcgccaggcagagcggcctggccgccgctaacggcgcacgcgcgcgtactcggctcggatctaccttccagtagcagcggagtggccaatgggaccgggaccagggctgggggccggggggccgccgccgcggggaggttcccggctcaggtgcccagcgctcaccagcccagcgcctcgggcggcgccgcggtggccccggcagccccgcgcagctgtttcctggggggcgtggcgtcgggggcccgcgcggcgcagtcctccttcagcatcccgaacagcagcagcggtccgcaggactcgcaggactcggtgcacagcagccctgaggatggcggcggcggcggccagcaccggccggtgggcgggagccccggcgggccgcgcctggtgatcggctccttaccagctcacctctcaccgcgcatgtttggaggtacggacccctctccacgcgcccgcgctcggttctcccgcggctgcacgtgggccgtggccgccggctatttttaccgttctccttttctccttccgccggggcgccgggggctgcttcccggcccagcccgccaggggctgcttcccggcccagcccgcgccggtctccatcctgggaagaaacccggcacgtaacacctgcggtgtcgctgccgcgtagacacgtggttttgtttttaaacatcgtgagcacccacacctcagcgggtactcagtagagatagtctattttccagtgagttgactggagcaaatgttgttttacagcaaacccacgaaatagcccttgtggttgtggcttttagtaccaggaagtcaggaggagacggttgctaaatgtagttctatctggggactcgagtggggcacaatttttaaaagccaaaagtcagagggtctcaaatgaactctgagttaccatctttggaccgacttttaatataaagctgtaatccttaaatctgtgtcagtagtcccacttactatgtcactttaattggatgaatgcgttaatgaaaagtttgttttcaaacctcactaaactgctacttaagatcacagttaatgtgagtcctgcttaatttggaaagcatttaaaaaatggaaaagtttcttagggaagtaaaaattttgcaactctgcctacaaggtacagtaattggctaggttcttttgaagagcagtgttgactagagttaaggaaaagtcagttgtgaaaaatggacatttttaatagcaaaatgatgtgctttactgtagaaacaggaggaagggtgcattatcctggggaaaatgaattcttcagttatgttttatgctgctctactttattgcaaaacgctaatattaaatgaatcaagaccacctccccttcccgctttatgaaaataaatagaagtatagaagataagc

SEQ ID NO: 402 - DNA, 1497 bp, Homo Sapiens
gagcgagcgcgcaacggcggcgacggcggcgaccccaccgcgcatcctgccaggcctccggcgcccagcgccccacgcgcccccgcgcccccgcgcccccgcgcccctttcttcgcgcccccgcccctcggcccgccaggcccccttgccggccacccgccaggccccgcgccggcccgcccgccgcccaggaccggcccgcgccccgcaggccgcccgccgcccgcgccgccatgggagtggagggctgcaccaagtgcatcaagtacctgctcttcgtcttcaatttcgtcttctggctggctggaggcgtgatcctgggtgtggccctgtggctccgccatgacccgcagaccaccaacctcctgtatctggagctgggagacaagcccgcgcccaacaccttctatgtaggcatctacatcctcatcgctgtgggcgctgtcatgatgttcgttggcttcctgggctgctacggggccatccaggaatcccagtgcctgctggggacgttcttcacctgcctggtcatcctgtttgcctgtgaggtggccgccggcatctggggctttgtcaacaaggaccagatcgccaaggatgtgaagcagttctatgaccaggccctacagcaggccgtggtggatgatgacgccaacaacgccaaggctgtggtgaagaccttccacgagacgcttgactgctgtggctccagcacactgactgctttgaccacctcagtgctcaagaacaatttgtgtccctcgggcagcaacatcatcagcaacctcttcaaggaggactgccaccagaagatcgatgacctcttctccgggaagctgtacctcatcggcattgctgccatcgtggtcgctgtgatcatgatcttcgagatgatcctgagcatggtgctgtgctgtggcatccggaacagctccgtgtactgaggccccgcagctctggccacagggacctctgcagtgccccctaagtgacccggacacttccgagggggccatcaccgcctgtgtatataacgtttccggtattactctgctacacgtagcctttttacttttggggttttgtttttgttctgaactttcctgttaccttttcagggctgacgtcacatgtaggtggcgtgtatgagtggagacgggcctgggtcttggggactggagggcaggggtccttctgccctggggtcccagggtgctctgcctgctcagccaggcctctcctgggagccactcgcccagagactcagcttggccaacttggggggctgtgtccacccagcccgcccgtcctgtgggctgcacagctcaccttgttccctcctgccccggttcgagagccgagtctgtgggcactctctgccttcatgcacctgtcctttctaacacgtcgccttcaactgtaatcacaacatcctgactccgtcatttaataaagaaggaacatcaggcatgctaccaggcctgtgcagtccctcag

SEQ ID NO: 403 - DNA, 1303 bp, Homo Sapiens
agcagcgggcgcgctcataaagggcacagccgagggtacgtggatcgcggtgcggagactgaggttagaaggcacaggtggcgagatgagccgggtaccagcgttcctgagcgcggccgaggtggaggaacacctccgcagctccagcctcctcatcccgcctctagagacggccctggccaacttctccagcggtcccgaaggaggggtcatgcagcccgtgcgcaccgtggtgccggtgaccaagcacaggggctacctgggggtcatgcccgcctacagtgctgcagaggatgcactgaccaccaagttggtcaccttctacgaggaccgcggcatcacctcggtcgtcccttcccaccaggctactgtgctactctttgagcccagcaatggcaccctgctggcggtcatggatggaaatgtcataactgcaaagagaacagctgcagtttctgccattgccaccaagtttctgaaacctcccagcagtgaagtgctgtgcatccttggggctggggtccaggcctacagccattatgagatcttcacagagcagttctcctttaaggaggtgaggatatggaaccgcaccaaagaaaatgcagagaagtttgcagacacagtgcaaggagaggtacgggtctgttcttcggtccaggaggctgtggcaggtgcagatgtgatcatcacagtcaccctggcaacagagcccattttgtttggtgaatgggtgaagccaggggctcacatcaatgctgttggagccagcagacctgactggagagaactggatgatgagctcatgaaagaagctgtgctgtacgtggattcccaggaggctgccctgaaggagtctggagatgtcctgctgtcaggggccgagatctttgctgagctgggagaagtgattaagggagtgaaaccagcccactgtgagaagaccaccgtgttcaagtctttgggaatggcagtggaagacacagttgcagccaaactcatctatgattcctggtcatctggtaaataaaacaaaggaacttgatgttgagatggatgcttgaggaatattgctgctggttctcataatttctagagtaaatgagggagtccagtccccagtgaactctccttttgtgcttatcatgttttaccttaaatgctgagatcctcatttatgtttgtagttggaaagcaaagctaggtagccatttcttctgttctaccaagttataatagcattcatttccctttatatttccctgaaataaagcacattccaattgtgcaaaaaaaaaaaaaa

SEQ ID NO: 404 - DNA, 1831 bp, Homo Sapiens
cgcgccgcttccggtctgcagccttgtagtggggctggagcagagcctgccgcgaacccccggagcccacgatccctcgtgccatccctcgaatccaccagcacgagcgtcccacccgcgcctgggaccatggccactgactcatgggccctggcggtggacgagcaggaagctgcggctgagtcgttgagcaacttgcatcttaaggaagagaaaatcaaaccagataccaatggtgctgttgtcaagaccaatgccaatgcagagaagacagatgaagaagagaaagaggacagagctgcccagtccttactcaacaagctgatcagaagcaaccttgttgataacacaaaccaagtggaagtcctgcagcgggatccaaactcccctctgtactcggtgaagtcttttgaagagcttcggctgaaaccacagcttctccaaggagtctatgccatgggtttcaatcgtccatccaagatacaagagaacgcattgccactgatgcttgctgagcccccacagaacttaattgcccaatctcagtctggtactggtaaaacagctgccttcgtgctggccatgcttagccaagtagaacctgcaaacaaatacccccagtgtctatgtctctccccaacgtatgagctcgccctccaaacaggaaaagtgattgaacaaatgggcaaattttaccctgaactgaagctagcttatgctgttcgaggcaataaattggaaagaggccagaagatcagtgagcagattgtcattggcacccctgggactgtgctggactggtgctccaagctcaagttcattgatcccaagaaaatcaaggtgtttgttctggatgaggctgatgtcatgatagccactcagggccaccaagatcagagcatccgcatccagaggatgctgcccaggaactgccagatgctgcttttctccgccacctttgaagactctgtgtggaagtttgcccagaaagtggtcccagacccaaacgttatcaaactgaagcgtgaggaagagaccctggacaccatcaagcagtactatgtcctgtgcagcagcagagacgagaagttccaggccttgtgtaacctctacggggccatcaccattgctcaagccatgatcttctgccatactcgcaaaacagctagttggctggcagcagagctctcaaaagaaggccaccaggtggctctgctgagtggggagatgatggtggaacagagggctgcagtgattgagcgcttccgagagggcaaagagaaggttttggtgaccaccaacgtgtgtgcccgcggcattgatgttgaacaagtgtctgtcgtcatcaactttgatcttcccgtggacaaggacgggaatcctgacaatgagacctacctgcaccggatcgggcgcacgggccgctttggcaagaggggcctggcagtgaacatggtggacagcaagcacagcatgaacatcctgaacagaatccaggagcattttaataagaagatagaaagattggacacagatgatttggacgagattgagaaaatagccaactgagaagctccaccagccactgatgccagccctggcactgcccctgcacaggagacaagtgcgttcagggcacaggccccgacatcaccccaaggacaacggcacaagtagagagaaactacctacctcacttcaaattatgtttggacttgacaaaaatgtatgcaaatgatgggggatggtagaaaaaaattatttacacaaccttggaagattaggcatgaatacacagagatttaccttttggaaaaaaaaaaaaaaaaaa

SEQ ID NO: 405 - DNA, 3418 bp, Homo Sapiens
ggcagggttgggggctccctaggcgccaggcaggtgggctcaagggtgaggctgttttttttgttttgttttttgtttttgagacggagtctcgctctgtcgcccaggctggagtgcagtggcgtgatcttggctcactgcaacctccgcctctcgggttcaagcgattctcctgcctcagcttcctgagtagctgggattacaggtgcgcaccaccatgcccggctaacttttgtatttttagtagagatggggtttcaccatgttggtcaggctggtctcgaactcctgacctagtgatctgccctcctcagcctcccaacgtactgggattacaggcgtgagccaccgcgcccggcctgaggctggtattaagaagtgaagtgggacccaggtggaggtaaggaagagtctggtggggagttatctcagaagtgaggccagcacaggctgagtgcagccccagggtgagaaggtgcccaccgagaggactctgcagtgaggccctaggccacgtccgaggggtgcctccgatgggggaagcccctccctgggggtcaccggagccatgctgtcccgcaagggcatcatccccgaggaatacgtgctgacacgcctggcagaggaccctgccaagcccaggtaccgtgcccgccagcggagggcccgctttgtgtccaagaaaggcaactgcaacgtggcccacaagaacatccgggagcagggccgcttcctgcaggacgtgttcaccacgctggtggacctcaagtggccacacacattgctcatcttcaccatgtccttcctgtgcagctggctgctcttcgccatggcctggtggctcatcgccttcgcccacggtgacctggcccccagcgagggcactgctgagccctgtgtcaccagcatccactccttctcgtctgccttccttttctccattgaggtccaagtgactattggctttggggggcgcatggtgactgaggagtgcccactggccatcctgatcctcatcgtgcagaacatcgtggggctcatgatcaacgccatcatgcttggctgcatcttcatgaagactgcccaagcccaccgcagggctgagaccctcatcttcagcaagcatgcggtgatcgccctgcgccacggccgcctctgcttcatgctacgtgtgggtgacctccgcaagagcatgatcatcagcgccaccatccacatgcaggtggtacgcaagaccaccagccccgagggcgaggtggtgcccctccaccaggtggacatccccatggagaacggcgtgggtggcaacagcatcttcctggtggccccgctgatcatctaccatgtcattgatgccaacagcccactctacgacctggcacccagcgacctgcaccaccaccaggacctcgagatcatcgtcatcctggaaggcgtggtggaaaccacgggcatcaccacccaggcccgcacctcctacctggccgatgagatcctgtggggccagcgctttgtgcccattgtagctgaggaggacggacgttactctgtggactactccaagtttggcaacaccgtcaaagtgcccacaccactctgcacggcccgccagcttgatgaggaccacagcctactggaagctctgaccctcgcctcagcccgcgggcccctgcgcaagcgcagcgtgcccatggccaaggccaagcccaagttcagcatctctccagattccctgtcctgagccatggtctctcgggccccccacacgcgtgtgtacacacggaccatgtggtatgtagcccggccagggcctggtgtgaggctgggccagcctcagctcagcctccccctgctgctcatccagggtgttacaaggcacttgtcactatgctatttctggcctcagcaggaacctgtactgggttatttttgtccctgctcctcccaacccaattcaggactggctcacccctctcccccgcccaaggctgcagaggctgtgggaggtactgggccctagagctgtgcgtccagccagtcctgggtccccacgattgaccagccacactctgggccggtggctggggaagaacaatccccgagggctgctgctttgcgtctgtggctccaagaagtgcctgtggtcaggccccagctctacttggtccctgaaaaagcacctggctaagggctgggcctggccagcagggagggcagttgatgagagagggtgttcccgctggagggttggtgctgtggagcctacaccggcagggacagcctggggctgacagggctcccctccgagggccagtttcaggtctggaaggggaggaagcaggggaaggtgacctgaggaggctcggctttgtagagccccgctcaggcacagggaggaggagatgccagggctcctgccttttgccacatcggcctcgtgcagtgagggctctgtgggctggggctgctgcccctgcctacctcctgcctgtccccagaggctgaggagagggggtactgtgcccaccacacatgattaggcctcagacccaactctggtcctggctccacaacagtggctgccactcactttgtccagaaggtggcttgggggtggatatctttgggttgctggaaaaggtgtgggaaggttcaggatggtgggagggactgaggtccctgaggtgaagaggcccttggtcctgacgggtttgacccgtgcctggacccttggagcagtgttgtgtgaacttgcctagaactctgccttctccgttgtcaataaagcctccccctcatgacctaaactctgggcttttcttgctggggaggcagcaagcatgctggtgggaagggaggcagggactggcagctgccacccccttcaagaggcgccatagaccctagcggggagggcaggggagggacggaaggctggcacctcttccaccagttcagggggactttcccctctcctgtctcaggtggcccagccctgtcagcctgtctggccaactcagcctttgggcactcaccaggctttgcagccctgggctctgtctctactcccagggacctgctggaaggctggagtgcccagggagaggtatagaggtgtcataggcattagtgtagtaattggagcactaactctcgagccaactgcctgggttcgaatcctggctctagctgtatgacttttgtcaagtaacttagcctctctgtgtctcagttgcctcttctataacatggatgctaatagtacctacctcatagaattgttttggaagtaaatgaaaaatatgtaaaatgctgaagtgcctggtctacagtaagtgctcaataaatgttaactattgtgattgctgctgaatcagctacatgctgaggaaacggccaaacaagtgttaaaaaaaaa

SEQ ID NO: 406 - DNA, 2011 bp, Homo Sapiens
gccacacggtctttgagctgagtcgaggtggaccctttgaacgcagtcgccctacagccgctgattccccccgcatcgcctcccgtggaagcccaggcccgcttcgcagctttctccctttgtctcataaccatgtccaccaacgagaatgctaatacaccagctgcccgtcttcacagattcaagaacaagggaaaagacagtacagaaatgaggcgtcgcagaatagaggtcaatgtggagctgaggaaagctaagaaggatgaccagatgctgaagaggagaaatgtaagctcatttcctgatgatgctacttctccgctgcaggaaaaccgcaacaaccagggcactgtaaattggtctgttgatgacattgtcaaaggcataaatagcagcaatgtggaaaatcagctccaagctactcaagctgccaggaaactactttccagagaaaaacagccccccatagacaacataatccgggctggtttgattccgaaatttgtgtccttcttgggcagaactgattgtagtcccattcagtttgaatctgcttgggcactcactaacattgcttctgggacatcagaacaaaccaaggctgtggtagatggaggtgccatcccagcattcatttctctgttggcatctccccatgctcacatcagtgaacaagctgtctgggctctaggaaacattgcaggtgatggctcagtgttccgagacttggttattaagtacggtgcagttgacccactgttggctctccttgcagttcctgatatgtcatctttagcatgtggctacttacgtaatcttacctggacactttctaatctttgccgcaacaagaatcctgcacccccgatagatgctgttgagcagattcttcctaccttagttcggctcctgcatcatgatgatccagaagtattagcagatacctgctgggctatttcctaccttactgatggtccaaatgaacgaattggcatggtggtgaaaacaggagttgtgccccaacttgtgaagcttctaggagcttctgaattgccaattgtgactcctgccctaagagccatagggaatattgtcactggtacagatgaacagactcaggttgtgattgatgcaggagcactcgccgtctttcccagcctgctcaccaaccccaaaactaacattcagaaggaagctacgtggacaatgtcaaacatcacagccggccgccaggaccagatacagcaagttgtgaatcatggattagtcccattccttgtcagtgttctctctaaggcagattttaagacacaaaaggaagctgtgtgggccgtgaccaactataccagtggtggaacagttgaacagattgtgtaccttgttcactgtggcataatagaaccgttgatgaacctcttaactgcaaaagataccaagattattctggttatcctggatgccatttcaaatatctttcaggctgctgagaaactaggtgaaactgagaaacttagtataatgattgaagaatgtggaggcttagacaaaattgaagctctacaaaaccatgaaaatgagtctgtgtataaggcttcgttaagcttaattgagaagtatttctctgtagaggaagaggaagatcaaaacgttgtaccagaaactacctctgaaggctacactttccaagttcaggatggggctcctgggacctttaacttttagatcatgtagctgagacataaatttgttgtgtactacgtttggtattttgtcttattgtttctctactaagaactctttcttaaatgtggtttgttactgtagcactttttacactgaaactatacttgaacagttccaactgtacatacatactgtatgaagcttgtcctctgactaggtttctaatttctatgtggaatttcctatcttgcagcatcctgtaaataaacattcaagtccacccttttcttgacttcaaaaaaaaaaaaaaaaaaaaaaaaaaaaaaaa

SEQ ID NO: 407 - DNA, 2252 bp, Homo Sapiens
ataaatatcagagtgtgctgctgtggctttgtggagctgccagagtaaagcaaagagaaaggaagcaggcccgttggaagtggttgtctacttgcaatatgtgctctgggctggacgcggtggctcacgcttgtaatcccagcactttgggaggccaaggcaggcggatcacgaggacaaccccagcaatgtggagaagcctggggcttgccctggctctctgtctcctcccatcgggaggaacagagagccaggaccaaagctccttatgtaagcaacccccagcctggagcataagagatcaagatccaatgctaaactccaatggttcagtgactgtggttgctcttcttcaagccagctgatacctgtgcatactgcaggcatctaaattagaagacctgcgagtaaaactgaagaaagaaggatattctaatatttcttatattgttgttaatcatcaaggaatctcttctcgattaaaatacacacatcttaagaataaggtttcagagcatattcctgtttatcaacaagaagaaaaccaaacagatgtctggactcttttaaatggaagcaaagatgacttcctcatatatgatagatgtggccgtcttgtatatcatcttggtttgcctttttccttcctaactttcccatatgtagaagaagccattaagattgcttactgtgaaaagaaatgtggaaactgctctctcacgactctcaaagatgaagacttttgtaaacgtgtatctttggctactgtggataaaacagttgaaactccatcgcctcattaccatcatgagcatcatcacaatcatggacatcagcaccttggcagcagtgagctttcagagaatcagcaaccaggagcaccaaatgctcctactcatcctgctcctccaggccttcatcaccaccataagcacaagggtcagcataggcagggtcacccagagaaccgagatatgccagcaagtgaagatttacaagatttacaaaagaagctctgtcgaaagagatgtataaatcaattactctgtaaattgcccacagattcagagttggctcctaggagctgatgctgccattgtcgacatctgatatttgaaaaaacagggtctgcaatcacctgacagtgtaaagaaaacctcccatctttatgtagctgacagggacttcgggcagaggagaacataactgaatcttgtcagtgacgtttgcctccagctgcctgacaaataagtcagcagcttatacccacagaagccagtgccagttgacgctgaaagaatcaggcaaaaaagtgagaatgaccttcaaactaaatatttaaaataggacatactccccaatttagtctagacacaatttcatttccagcatttttataaactaccaaattagtgaaccaaaaatagaaattagatttgtgcaaacatggagaaatctactgaattggcttccagattttaaattttatgtcatagaaatattgactcaaaccatattttttatgatggagcaactgaaaggtgattgcagcttttggttaatatgtctttttttttctttttccagtgttctatttgctttaatgagaatagaaacgtaaactatgacctaggggtttctgttggataattagcagtttagaatggaggaagaacaacaaagacatgctttccatttttttctttacttatctctcaaaacaatattactttgtcttttcaatcttctacttttaactaataaaataagtggattttgtattttaagatccagaaatacttaacacgtgaatattttgctaaaaaagcatatataactattttaaatatccatttatcttttgtatatctaagactcatcctgatttttactatcacacatgaataaagcctttgtatctttctttctctaatgttgtatcatactcttctaaaacttgagtggctgtcttaaaagatataaggggaaagataatattgtctgtctctatattgcttagtaagtatttccatagtcaatgatggtttaataggtaaaccaaaccctataaacctgacctcctttatggttaatactattaagcaagaatgcagtacagaattggatacagtacggatttgtccaaataaattcaataaaaaccttaaagctgaaaaaaaaaaaaaaaaaaaaaaaaaaaaaaaaaaaaaaaaaaaaaaaaaaaaaaaaaaaaaaaaaaaaaaaaaaaaaaa

SEQ ID NO: 408 - DNA, 2303 bp, Homo Sapiens
ggggaagggaaaagcgagagcggggcaaggcggaagaggaagcggggcggaagggaagcccgggccgcagacggcgaaggaggcagccgggccgggggctgacgcgggagcgagggcatgcccaagggaggaagcagagggaggcagaagcgtggaggaaggggcgagaggcatcgtcaagggagtcgaggggagcgcaggggccgggaaggaggcacaaggaagagagtatgggaagaaggaggaatggagggtcagggctaggcggcgggagggcgccaggccgggaagagcacagggacgagggggtcaggcttgggccgacatcgcggggacaggggtggccatggcggcggcggccggggaggaggaggaggaggaggaggcggctcgggagtcggctgcccgcccggccgcggggcctgcgctctggcgcctgccggaggagctgctgctgctcatctgctcctacctggacatgcgggccctcggccgcctggcccaggtgtgccgctggctgcggcgcttcaccagctgcgatctgctctggcgccggatagcccgggcctcgctcaactccggcttcacgcggctcggcaccgacctgatgaccagtgtcccagtgaaggaacgagtgaaggtgtctcagaactggagactggggcgctgccgagaggggattctgctgaagtggagatgcagtcagatgccctggatgcagctagaggatgattctctgtacatatcccaggctaatttcatcctggcctaccagttccgtccagatggtgccagcttgaatcgtcggcctctgggagtctttgctgggcatgatgaggacgtttgccactttgtgctggccaactcgcatattgttagtgcaggaggggatgggaagattggcattcataagattcacagcaccttcactgtcaagtactcggctcatgaacaggaggtgaactgtgtggattgcaaagggggcatcattgtgagtggctccagggacaggacggccaaggtgtggcctttggcctcaggccggctggggcagtgcttacacaccatccagactgaagaccgagtctggtccattgctatcagcccattactcagctcttttgtgacagggacggcttgttgcgggcacttctcacccctgagaatctgggacctcaacagtgggcagctgatgacacacttgggcagtgactttcccccaggggctggggtgctggatgtcatgtatgagtcccctttcacactgctgtcctgtggctatgacacctatgttcgctactgggacctccgcaccagcgtccggaaatgtgtcatggagtgggaggagccccacgacagcaccctgtactgcctgcagacagatggcaaccacctgctggccacaggttcctcctactacggtgttgtacggctgtgggaccggcgtcaaagggcctgcctgcacgccttcccgctgacgtcgactcccctcagcagccctgtgtactgcctgcgtctcaccaccaagcatctctatgctgccctgtcttacaacctccacgtcctggattttcaaaacccatgaccgtcagggccacccctgcctctgggccagggaaaccagctactcagggacttctcttgcctggagggtgcagtgatagctcctcctcactgccccactgtgctcctgggcctgtgaccccagtgctcaggcaccttgcactagaggcttctgactcctgggactttggagcttaccagagatgcagtccctcccaggaacctgttggagaggcaggacctgctgctttagagtgcggctgaacccgggccttgcgtccctgtttggccagagcaaggatctggcctggagaggcccatcctataccccttattagagccatgacagcctacagagtgaggtgaggtgctcccaccttcccagatggttcctttctgccccttcctggaaggaaaggtgaggctgccaatagcctcctggcaccagccagacctcacccttgaccaacctctcggggctgggggttcattcctggggcactgtggcctggttttgctttgaaaccaagaaagagcaaagggaacccagcagttctgagtgagttctgagccagccctacctcaggctggctgttgagacatgctacaattttcatttttgtaaaaataaagcttgattgttcacagaaaaaaaaaaaaaaaaaaaaaaaaaaaaaaaaaaaaaaaaaaaaaaaaaaaaaaaaaaaaaaaaaaaaaaaaaaaaaaaaaaaaaaaaaaaa

SEQ ID NO: 409 - DNA, 2096 bp, Homo Sapiens; identical to SEQ ID NO: 394

SEQ ID NO: 410 - DNA, 2851 bp, Homo Sapiens
agccaatgggagttcaggaggcggagcgcctgtgggagccctggagggaactttcccagtccccgaggcggatcgggtgttgcatccatggagcgagctgagagctcgagtacagaacctgctaaggccatcaaacctattgatcggaagtcagtccatcagatttgctctgggcaggtggtactgagtctaagcactgcggtaaaggagttagtagaaaacagtctggatgctggtgccactaatattgatctaaagcttaaggactatggagtggatcttattgaagtttcagacaatggatgtggggtagaagaagaaaacttcgaaggcttaactctgaaacatcacacatctaagattcaagagtttgccgacctaactcaggttgaaacttttggctttcggggggaagctctgagctcactttgtgcactgagcgatgtcaccatttctacctgccacgcatcggcgaaggttggaactcgactgatgtttgatcacaatgggaaaattatccagaaaaccccctacccccgccccagagggaccacagtcagcgtgcagcagttattttccacactacctgtgcgccataaggaatttcaaaggaatattaagaaggagtatgccaaaatggtccaggtcttacatgcatactgtatcatttcagcaggcatccgtgtaagttgcaccaatcagcttggacaaggaaaacgacagcctgtggtatgcacaggtggaagccccagcataaaggaaaatatcggctctgtgtttgggcagaagcagttgcaaagcctcattccttttgttcagctgccccctagtgactccgtgtgtgaagagtacggtttgagctgttccgatgctctgcataatcttttttacatctcaggtttcatttcacaatgcacgcatggagttggaaggagttcaacagacagacagtttttctttatcaaccggcggccttgtgacccagcaaaggtctgcagactcgtgaatgaggtctaccacatgtataatcgacaccagtatccatttgttgttcttaacatttctgttgattcagaatgcgttgatatcaatgttactccagataaaaggcaaattttgctacaagaggaaaagcttttgttggcagttttaaagacctctttgataggaatgtttgatagtgatgtcaacaagctaaatgtcagtcagcagccactgctggatgttgaaggtaacttaataaaaatgcatgcagcggatttggaaaagcccatggtagaaaagcaggatcaatccccttcattaaggactggagaagaaaaaaaagacgtgtccatttccagactgcgagaggccttttctcttcgtcacacaacagagaacaagcctcacagcccaaagactccagaaccaagaaggagccctctaggacagaaaaggggtatgctgtcttctagcacttcaggtgccatctctgacaaaggcgtcctgagacctcagaaagaggcagtgagttccagtcacggacccagtgaccctacggacagagcggaggtggagaaggactcggggcacggcagcacttccgtggattctgaggggttcagcatcccagacacgggcagtcactgcagcagcgagtatgcggccagctccccaggggacaggggctcgcaggaacatgtggactctcaggagaaagcgcctgaaactgacgactctttttcagatgtggactgccattcaaaccaggaagataccggatgtaaatttcgagttttgcctcagccaactaatctcgcaaccccaaacacaaagcgttttaaaaaagaagaaattctttccagttctgacatttgtcaaaagttagtaaatactcaggacatgtcagcctctcaggttgatgtagctgtgaaaattaataagaaagttgtgcccctggacttttctatgagttctttagctaaacgaataaagcagttacatcatgaagcacagcaaagtgaaggggaacagaattacaggaagtttagggcaaagatttgtcctggagaaaatcaagcagccgaagatgaactaagaaaagagataagtaaaacgatgtttgcagaaatggaaatcattggtcagtttaacctgggatttataataaccaaactgaatgaggatatcttcatagtggaccagcatgccacggacgagaagtataacttcgagatgctgcagcagcacaccgtgctccaggggcagaggctcatagcacctcagactctcaacttaactgctgttaatgaagctgttctgatagaaaatctggaaatatttagaaagaatggctttgattttgttatcgatgaaaatgctccagtcactgaaagggctaaactgatttccttgccaactagtaaaaactggaccttcggaccccaggacgtcgatgaactgatcttcatgctgagcgacagccctggggtcatgtgccggccttcccgagtcaagcagatgtttgcctccagagcctgccggaagtcggtgatgattgggactgctcttaacacaagcgagatgaagaaactgatcacccacatgggggagatggaccacccctggaactgtccccatggaaggccaaccatgagacacatcgccaacctgggtgtcatttctcagaactgaccgtagtcactgtatggaataattggttttatcgcagatttttatgttttgaaagacagagtcttcactaaccttttttgttttaaaatgaacctgctacttaaaaaaaatacacatcacacccatttaaaagtgatcttgagaaccttttcaaaccagaaaaaaaaaaaaaaaa

SEQ ID NO: 411 - DNA, 2769 bp, Homo Sapiens
cgacgccaaggggagggggctgacctgtgcttggtccaccccaggtaggggctgagagaggcttgaggtggaagtgggggtcgggcactctgacctggtcgaggaggggctagggtttgaaccggggacagagtctaggtgagctggggcttgggagctattagcgtagaggatccgggttcggttgctctggcgagggctccagcatcacaggcggcggctgcgggcgcagagcggagatgcagcggcttggggccaccctgctgtgcctgctgctggcggcggcggtccccacggcccccgcgcccgctccgacggcgacctcggctccagtcaagcccggcccggctctcagctacccgcaggaggaggccaccctcaatgagatgttccgcgaggttgaggaactgatggaggacacgcagcacaaattgcgcagcgcggtggaagagatggaggcagaagaagctgctgctaaagcatcatcagaagtgaacctggcaaacttacctcccagctatcacaatgagaccaacacagacacgaaggttggaaataataccatccatgtgcaccgagaaattcacaagataaccaacaaccagactggacaaatggtcttttcagagacagttatcacatctgtgggagacgaagaaggcagaaggagccacgagtgcatcatcgacgaggactgtgggcccagcatgtactgccagtttgccagcttccagtacacctgccagccatgccggggccagaggatgctctgcacccgggacagtgagtgctgtggagaccagctgtgtgtctggggtcactgcaccaaaatggccaccaggggcagcaatgggaccatctgtgacaaccagagggactgccagccggggctgtgctgtgccttccagagaggcctgctgttccctgtgtgcacacccctgcccgtggagggcgagctttgccatgaccccgccagccggcttctggacctcatcacctgggagctagagcctgatggagccttggaccgatgcccttgtgccagtggcctcctctgccagccccacagccacagcctggtgtatgtgtgcaagccgaccttcgtggggagccgtgaccaagatggggagatcctgctgcccagagaggtccccgatgagtatgaagttggcagcttcatggaggaggtgcgccaggagctggaggacctggagaggagcctgactgaagagatggcgctgagggagcctgcggctgccgccgctgcactgctgggaggggaagagatttagatctggaccaggctgtgggtagatgtgcaatagaaatagctaatttatttccccaggtgtgtgctttaggcgtgggctgaccaggcttcttcctacatcttcttcccagtaagtttcccctctggcttgacagcatgaggtgttgtgcatttgttcagctcccccaggctgttctccaggcttcacagtctggtgcttgggagagtcaggcagggttaaactgcaggagcagtttgccacccctgtccagattattggctgctttgcctctaccagttggcagacagccgtttgttctacatggctttgataattgtttgaggggaggagatggaaacaatgtggagtctccctctgattggttttggggaaatgtggagaagagtgccctgctttgcaaacatcaacctggcaaaaatgcaacaaatgaattttccacgcagttctttccatgggcataggtaagctgtgccttcagctgttgcagatgaaatgttctgttcaccctgcattacatgtgtttattcatccagcagtgttgctcagctcctacctctgtgccagggcagcattttcatatccaagatcaattccctctctcagcacagcctggggagggggtcattgttctcctcgtccatcagggatctcagaggctcagagactgcaagctgcttgcccaagtcacacagctagtgaagaccagagcagtttcatctggttgtgactctaagctcagtgctctctccactaccccacaccagccttggtgccaccaaaagtgctccccaaaaggaaggagaatgggatttttcttttgaggcatgcacatctggaattaaggtcaaactaattctcacatccctctaaaagtaaactactgttaggaacagcagtgttctcacagtgtggggcagccgtccttctaatgaagacaatgatattgacactgtccctctttggcagttgcattagtaactttgaaaggtatatgactgagcgtagcatacaggttaacctgcagaaacagtacttaggtaattgtagggcgaggattataaatgaaatttgcaaaatcacttagcagcaactgaagacaattatcaaccacgtggagaaaatcaaaccgagcagggctgtgtgaaacatggttgtaatatgcgactgcgaacactgaactctacgccactccacaaatgatgttttcaggtgtcatggactgttgccaccatgtattcatccagagttcttaaagtttaaagttgcacatgattgtataagcatgctttctttgagttttaaattatgtataaacataagttgcatttagaaatcaagcataaatcacttcaactgctcttctgtagttcttggatttcttttcccttttgactttgaataaatgtaaaatcctttcagccagaaaaagtaaaatagaaacaacctgtattaaaaatcttccatagaaaaaaaaaaa

SEQ ID NO: 412 - DNA, 5252 bp, Homo Sapiens
aggcggggccaagatggcggcgcagcgcgcggcgggggcgacgggcggcgggggccggggggcggtgggacgttgaccccgccccctgctgctgctagtctgcgccgggcggcggtggcggcggagacccgaacatggcgaccgcgcgcaccttcgggcccgagcgggaagccgagccggccaaggaagcgcgcgtcgtgggctcggagcttgtggacacttatacggtttacatcatccaggtcactgatggcagccatgagtggacagtaaagcaccgctacagcgacttccatgacctgcatgaaaagctcgttgcagagagaaagattgataaaaatctgcttccgcccaaaaagataattgggaaaaactcaagaagcttggtggagaagagggagaaggatctggaggtctacctccagaagctcctggctgccttccctggcgtgacccccagagtactggcccacttcttgcattttcacttctatgagataaatggcatcaccgcggcactggctgaagagctctttgagaaaggagaacagctcctgggggccggcgaggtctttgccattggacccctgcagctgtatgccgtcacggagcagctgcagcagggaaagcccacgtgcgccagtggggatgccaagaccgacctcgggcacatcctggacttcacctgtcgccttaagtaccttaaggtttctggcacagaaggaccttttgggaccagcaacattcaggagcagctcctgccgttcgacctatcaatattcaagtccctgcatcaggtggagataagtcactgtgatgctaagcacatcagagggctggtcgcatcgaagcccaccttagccacgctgagtgtccgcttctcagcaacctcgatgaaggaagtccttgttcctgaagcctcagaatttgatgagtgggagcctgaaggcacaaccctagaaggccctgtgactgccgtcatccccacttggcaggcattgaccacgcttgacctgagccacaacagcatctccgagatcgacgagtctgtgaaactgatcccaaagattgagttcctggacctgagtcacaatggattgctggttgtggacaatctgcagcacctgtataaccttgtgcatctggacctgtcctacaacaagctctcctccttggaagggcttcacaccaagctggggaacatcaagaccttaaacctggcaggcaacctcctagagagtctgagtggcctgcacaagctctactcactggtcaacctggatctccgggacaacaggatcgaacagatggaggaggtccggagcataggcagcctcccgtgtctggagcacgtgtctctgctgaacaaccctctgagcatcatccccgactaccggaccaaggtgctggctcagttcggagagagggcctcagaggtctgtctggatgacacagtgaccacagagaaggagctggacactgtggaagtgctgaaagcaattcagaaagccaaggaggtcaagtccaaactgagcaacccagagaagaagggtggtgaagactcccggctctcagctgccccctgcatcagacccagcagctcccctcccactgtggctcccgcatctgcctccctgccccagcccatcctctctaaccaaggaatcatgttcgttcaggaggaggccctggccagcagcctctcgtccactgacagtctgactcccgagcaccagcccattgcccagggatgttctgattccttggagtccatccctgcgggacaggcagcttccgatgatttaagggacgtgccaggagctgttggtggtgcaagcccagaacatgccgagccggaggtccaggtggtgccggggtctggccagatcatcttcctgcccttcacctgcattggctacacggccaccaatcaggacttcatccagcgcctgagcacactgatccggcaggccatcgagcggcagctgcctgcctggatcgaggctgccaaccagcgggaggagggccagggtgaacagggcgaggaggaggatgaggaggaggaagaagaggaggacgtggctgagaaccgctactttgaaatggggcccccagacgtggaggaggaggagggaggaggccagggggaggaagaggaggaggaagaggaggatgaagaggccgaggaggagcgcctggctctggaatgggccctgggcgcggacgaggacttcctgctggagcacatccgcatcctcaaggtgctgtggtgcttcctgatccatgtgcagggcagtatccgccagttcgccgcctgccttgtgctcaccgacttcggcatcgcagtcttcgagatcccgcaccaggagtctcggggcagcagccagcacatcctctcctccctgcgctttgtcttttgcttcccgcatggcgacctcaccgagtttggcttcctcatgccggagctgtgtctggtgctcaaggtacggcacagtgagaacacgctcttcattatctcggacgccgccaacctgcacgagttccacgcggacctgcgctcatgctttgcaccccagcacatggccatgctgtgtagccccatcctctacggcagccacaccagcctgcaggagttcctgcgccagctgctcaccttctacaaggtggctggcggctgccaggagcgcagccagggctgcttccccgtctacctggtctacagtgacaagcgcatggtgcagacggccgccggggactactcaggcaacatcgagtgggccagctgcacactctgttcagccgtgcggcgctcctgctgcgcgccctctgaggccgtcaagtccgccgccatcccctactggctgttgctcacgccccagcacctcaacgtcatcaaggccgacttcaaccccatgcccaaccgtggcacccacaactgtcgcaaccgcaacagcttcaagctcagccgtgtgccgctctccaccgtgctgctggaccccacacgcagctgtacccagcctcggggcgcctttgctgatggccacgtgctagagctgctcgtggggtaccgctttgtcactgccatcttcgtgctgccccacgagaagttccacttcctgcgcgtctacaaccagctgcgggcctcgctgcaggacctgaagactgtggtcatcgccaagacccccgggacgggaggcagcccccagggctcctttgcggatggccagcctgccgagcgcagggccagcaatgaccagcgtccccaggaggtcccagcagaggctctggccccggccccagcggaagtcccagctccagcccctgcagcagcctcagcctcaggcccagcgaagactccggccccagcagaggcctcaacttcagctttggtcccagaggagacgccagtggaagctccagccccacccccagccgaggcccctgcccagtacccgagtgagcacctcatccaggccacctcggaggagaatcagatcccctcgcacttgcctgcctgcccgtcgctccggcacgtcgccagcctgcggggcagcgccatcatcgagctcttccacagcagcattgctgaggttgaaaacgaggagctgaggcacctcatgtggtcctcggtggtgttctaccagaccccagggctggaggtgactgcctgcgtgctgctctccaccaaggctgtgtactttgtgctccacgacggcctccgccgctacttctcagagccactgcaggatttctggcatcagaaaaacaccgactacaacaacagccctttccacatctcccagtgcttcgtgctaaagcttagtgacctgcagtcagtcaatgtggggcttttcgaccagcatttccggctgacgggttccaccccgatgcaggtggtcacgtgcttgacgcgggacagctacctgacgcactgcttcctccagcacctcatggtcgtgctgtcctctctggaacgcacgccctcgccggagcctgttgacaaggacttctactccgagtttgggaacaagaccacagggaagatggagaactacgagctgatccactctagtcgcgtcaagtttacctaccccagtgaggaggagattggggacctgacgttcactgtggcccaaaagatggctgagccagagaaggccccagccctcagcatcctgctgtacgtgcaggccttccaggtgggcatgccaccccctgggtgctgcaggggccccctgcgccccaagacactcctgctcaccagctccgagatcttcctcctggatgaggactgtgtccactacccactgcccgagtttgccaaagagccgccgcagagagacaggtaccggctggacgatggccgccgcgtccgggacctggaccgagtgctcatgggctaccagacctacccgcaggccctcaccctcgtcttcgatgacgtgcaaggtcatgacctcatgggcagtgtcaccctggaccactttggggaggtgccaggtggcccggctagagccagccagggccgtgaagtccagtggcaggtgtttgtccccagtgctgagagcagagagaagctcatctcgctgttggctcgccagtgggaggccctgtgtggccgtgagctgcctgtcgagctcaccggctagcccaggccacagccagcctgtcgtgtccagcctgacgcctactggggcagggcagcaggcttttgtgttctctaaaaatgttttatcctccctttggtaccttaatttgactgtcctcgcagagaatgtgaacatgtgtgtgtgttgtgttaattctttctcatgttgggagtgagaatgccgggcccctcagggctgtcggtgtgctgtcagcctcccacaggtggtacagccgtgcacaccagtgtcgtgtctgctgttgtgggaccgttgttaacacgtgacactgtgggtctgactttctcttctacacgtcctttcctgaagtgtcgagtccagtcctttgttgctgttgctgttgctgttgctgttgctgttgctgttggcatcttgctgctaatcctgaggctggtagcagaatgcacattggaagctcccaccccatattgttcttcaaagtggaggtctcccctgatccagacaagtgggagagcccgtgggggcaggggacctggagctgccagcaccaagcgtgattcctgctgcctgtattctctattccaataaagcagagtttgacaccgtctgcaaaaaaaaaaaaaa

SEQ ID NO: 413 - DNA, 4678 bp, Homo Sapiens
gcacacagagcagcataaagcccagttgctttgggaagtgtttgggaccagatggattgtagggagtagggtacaatacagtctgttctcctccagctccttctttctgcaacatggggaagaacaaactccttcatccaagtctggttcttctcctcttggtcctcctgcccacagacgcctcagtctctggaaaaccgcagtatatggttctggtcccctccctgctccacactgagaccactgagaagggctgtgtccttctgagctacctgaatgagacagtgactgtaagtgcttccttggagtctgtcaggggaaacaggagcctcttcactgacctggaggcggagaatgacgtactccactgtgtcgccttcgctgtcccaaagtcttcatccaatgaggaggtaatgttcctcactgtccaagtgaaaggaccaacccaagaatttaagaagcggaccacagtgatggttaagaacgaggacagtctggtctttgtccagacagacaaatcaatctacaaaccagggcagacagtgaaatttcgtgttgtctccatggatgaaaactttcaccccctgaatgagttgattccactagtatacattcaggatcccaaaggaaatcgcatcgcacaatggcagagtttccagttagagggtggcctcaagcaattttcttttcccctctcatcagagcccttccagggctcctacaaggtggtggtacagaagaaatcaggtggaaggacagagcaccctttcaccgtggaggaatttgttcttcccaagtttgaagtacaagtaacagtgccaaagataatcaccatcttggaagaagagatgaatgtatcagtgtgtggcctatacacatatgggaagcctgtccctggacatgtgactgtgagcatttgcagaaagtatagtgacgcttccgactgccacggtgaagattcacaggctttctgtgagaaattcagtggacagctaaacagccatggctgcttctatcagcaagtaaaaaccaaggtcttccagctgaagaggaaggagtatgaaatgaaacttcacactgaggcccagatccaagaagaaggaacagtggtggaattgactggaaggcagtccagtgaaatcacaagaaccataaccaaactctcatttgtgaaagtggactcacactttcgacagggaattcccttctttgggcaggtgcgcctagtagatgggaaaggcgtccctataccaaataaagtcatattcatcagaggaaatgaagcaaactattactccaatgctaccacggatgagcatggccttgtacagttctctatcaacaccaccaatgttatgggtacctctcttactgttagggtcaattacaaggatcgtagtccctgttacggctaccagtgggtgtcagaagaacacgaagaggcacatcacactgcttatcttgtgttctccccaagcaagagctttgtccaccttgagcccatgtctcatgaactaccctgtggccatactcagacagtccaggcacattatattctgaatggaggcaccctgctggggctgaagaagctctccttctattatctgataatggcaaagggaggcattgtccgaactgggactcatggactgcttgtgaagcaggaagacatgaagggccatttttccatctcaatccctgtgaagtcagacattgctcctgtcgctcggttgctcatctatgctgttttacctaccggggacgtgattggggattctgcaaaatatgatgttgaaaattgtctggccaacaaggtggatttgagcttcagcccatcacaaagtctcccagcctcacacgcccacctgcgagtcacagcggctcctcagtccgtctgcgccctccgtgctgtggaccaaagcgtgctgctcatgaagcctgatgctgagctctcggcgtcctcggtttacaacctgctaccagaaaaggacctcactggcttccctgggcctttgaatgaccaggacgatgaagactgcatcaatcgtcataatgtctatattaatggaatcacatatactccagtatcaagtacaaatgaaaaggatatgtacagcttcctagaggacatgggcttaaaggcattcaccaactcaaagattcgtaaacccaaaatgtgtccacagcttcaacagtatgaaatgcatggacctgaaggtctacgtgtaggtttttatgagtcagatgtaatgggaagaggccatgcacgcctggtgcatgttgaagagcctcacacggagaccgtacgaaagtacttccctgagacatggatctgggatttggtggtggtaaactcagcaggtgtggctgaggtaggagtaacagtccctgacaccatcaccgagtggaaggcaggggccttctgcctgtctgaagatgctggacttggtatctcttccactgcctctctccgagccttccagcccttctttgtggagctcacaatgccttactctgtgattcgtggagaggccttcacactcaaggccacggtcctaaactaccttcccaaatgcatccgggtcagtgtgcagctggaagcctctcccgccttcctagctgtcccagtggagaaggaacaagcgcctcactgcatctgtgcaaacgggcggcaaactgtgtcctgggcagtaaccccaaagtcattaggaaatgtgaatttcactgtgagcgcagaggcactagagtctcaagagctgtgtgggactgaggtgccttcagttcctgaacacggaaggaaagacacagtcatcaagcctctgttggttgaacctgaaggactagagaaggaaacaacattcaactccctactttgtccatcaggtggtgaggtttctgaagaattatccctgaaactgccaccaaatgtggtagaagaatctgcccgagcttctgtctcagttttgggagacatattaggctctgccatgcaaaacacacaaaatcttctccagatgccctatggctgtggagagcagaatatggtcctctttgctcctaacatctatgtactggattatctaaatgaaacacagcagcttactccagagatcaagtccaaggccattggctatctcaacactggttaccagagacagttgaactacaaacactatgatggctcctacagcacctttggggagcgatatggcaggaaccagggcaacacctggctcacagcctttgttctgaagacttttgcccaagctcgagcctacatcttcatcgatgaagcacacattacccaagccctcatatggctctcccagaggcagaaggacaatggctgtttcaggagctctgggtcactgctcaacaatgccataaagggaggagtagaagatgaagtgaccctctccgcctatatcaccatcgcccttctggagattcctctcacagtcactcaccctgttgtccgcaatgccctgttttgcctggagtcagcctggaagacagcacaagaaggggaccatggcagccatgtatataccaaagcactgctggcctatgcttttgccctggcaggtaaccaggacaagaggaaggaagtactcaagtcacttaatgaggaagctgtgaagaaagacaactctgtccattgggagcgccctcagaaacccaaggcaccagtggggcatttttacgaaccccaggctccctctgctgaggtggagatgacatcctatgtgctcctcgcttatctcacggcccagccagccccaacctcggaggacctgacctctgcaaccaacatcgtgaagtggatcacgaagcagcagaatgcccagggcggtttctcctccacccaggacacagtggtggctctccatgctctgtccaaatatggagcagccacatttaccaggactgggaaggctgcacaggtgactatccagtcttcagggacattttccagcaaattccaagtggacaacaacaaccgcctgttactgcagcaggtctcattgccagagctgcctggggaatacagcatgaaagtgacaggagaaggatgtgtctacctccagacatccttgaaatacaatattctcccagaaaaggaagagttcccctttgctttaggagtgcagactctgcctcaaacttgtgatgaacccaaagcccacaccagcttccaaatctccctaagtgtcagttacacagggagccgctctgcctccaacatggcgatcgttgatgtgaagatggtctctggcttcattcccctgaagccaacagtgaaaatgcttgaaagatctaaccatgtgagccggacagaagtcagcagcaaccatgtcttgatttaccttgataaggtgtcaaatcagacactgagcttgttcttcacggttctgcaagatgtcccagtaagagatctgaaaccagccatagtgaaagtctatgattactacgagacggatgagtttgcaattgctgagtacaatgctccttgcagcaaagatcttggaaatgcttgaagaccacaaggctgaaaagtgctttgctggagtcctgttctcagagctccacagaagacacgtgtttttgtatctttaaagacttgatgaataaacactttttctggtcaatgtcaaaaaaaaaaaaaaaaaaaaaaaaa

SEQ ID NO: 414 - DNA, 1712 bp, Homo Sapiens
cgaaatcggctggtttatattggcgcggcccagacggcagaggtctctgcggcgcggtcctcggagacacgcggcggtgtcctgtgttggccatggccgactacctgattagtgggggcacgtcctacgtgccagacgacggactcacagcacagcagctcttcaactgcggagacggcctcacctacaatgactttctcattctccctgggtacatcgacttcactgcagaccaggtggacctgacttctgctctgaccaagaaaatcactcttaagaccccactggtttcctctcccatggacacagtcacagaggctgggatggccatagcaatggcgcttacaggcggtattggcttcatccaccacaactgtacacctgaattccaggccaatgaagttcggaaagtgaagaaatatgaacagggattcatcacagaccctgtggtcctcagccccaaggatcgcgtgcgggatgtttttgaggccaaggcccggcatggtttctgcggtatcccaatcacagacacaggccggatggggagccgcttggtgggcatcatctcctccagggacattgattttctcaaagaggaggaacatgactgtttcttggaagagataatgacaaagagggaagacttggtggtagcccctgcaggcatcacactgaaggaggcaaatgaaattctgcagcgcagcaagaagggaaagttgcccattgtaaatgaagatgatgagcttgtggccatcattgcccggacagacctgaagaagaatcgggactacccactagcctccaaagatgccaagaaacagctgctgtgtggggcagccattggcactcatgaggatgacaagtataggctggacttgctcgcccaggctggtgtggatgtagtggttttggactcttcccagggaaattccatcttccagatcaatatgatcaagtacatcaaagacaaataccctaatctccaagtcattggaggcaatgtggtcactgctgcccaggccaagaacctcattgatgcaggtgtggatgccctgcgggtgggcatgggaagtggctccatctgcattacgcaggaagtgctggcctgtgggcggccccaagcaacagcagtgtacaaggtgtcagagtatgcacggcgctttggtgttccggtcattgctgatggaggaatccaaaatgtgggtcatattgcgaaagccttggcccttggggcctccacagtcatgatgggctctctcctggctgccaccactgaggcccctggtgaatacttcttttccgatgggatccggctaaagaaatatcgcggtatgggttctctcgatgccatggacaagcacctcagcagccagaacagatatttcagtgaagctgacaaaatcaaagtggcccagggagtgtctggtgctgtgcaggacaaagggtcaatccacaaatttgtcccttacctgattgctggcatccaacactcatgccaggacattggtgccaagagcttgacccaagtccgagccatgatgtactctggggagcttaagtttgagaagagaacgtcctcagcccaggtggaaggtggcgtccatagcctccattcgtatgagaagcggcttttctgaaaagggatccagcacacctcctcggtttttttttcaataaaagtttagaaagaaaaaaaaaaaaaaaaaaaaaaa

SEQ ID NO: 415 - DNA, 1568 bp, Homo Sapiens
gccccgccgagagcgtgaactatcgctgcggaggggcagacctggaccggtggaaggccgggcggaagtgcgcgcctggggccgccttggttaccgcgttttccgctcctcgctacgtcatcgttgtgagcccgctatcagcggccagcgcgggcgcggccggagaccgtggggcccccggttgccgccccctcgggagccaccatgttggtgataccccccggactgagcgaggaagaggaggctctgcagaagaaattcaacaagctcaagaaaaagaaaaaggcattgctggctctgaagaagcaaagtagcagcagcacaaccagccaaggtggtgtcaaacgctcactatcagagcagcctgtcatggacacagccacagcaacagagcaggcaaagcagctggtgaagtcaggagccatcagtgccatcaaggctgagaccaagaactcaggcttcaagcgttctcgaacccttgaggggaagttaaaggaccccgagaagggaccagtccccactttccagccgttccagaggagcatatctgctgatgatgacctgcaagagtcatccagacgtccccagaggaaatctctgtatgagagctttgtgtcttctagtgatcgacttcgagaactaggaccagatggagaagaggcagagggcccaggggctggtgatggtccccctcgaagctttgactggggctatgaagaacgcagtggtgcccactcctcagcctcccctccccgaagccgcagccgggaccgcagccatgagaggaaccgggacagagaccgagatcgggagcgggatcgagaccgggatcgagacagagacagagagcgggacagggatcgggatcgggatcgagatcgagaccgggaacgggacagggatcgggagcgggatcgagaccgagaccgagagggtcctttccgcaggtcggattcattccctgaacggcgagcccctaggaaagggaatactctctatgtatatggagaagacatgacacccacccttctccgtggggccttctctccttttggaaacatcattgacctctccatggacccacccagaaactgtgccttcgtcacctatgaaaagatggagtcagcagatcaggccgttgctgagctcaacgggacccaggtggagtctgtacagctcaaagtcaacatagcccgaaaacagcccatgctggatgccgctactggcaagtctgtctggggctccctcgctgtccagaacagccctaagggttgccaccgggacaagaggacccagattgtctacagtgatgacgtctacaaggaaaaccttgtggatggcttctagggaacagagctggattccttgtgcctcatatgccccaatgctggtctcagtaaaacactgaggtggaagcttacacatctccctcagcctctggtttttcagcacttgggattggggttaaacctttaaaaacggctgtcaggtttgatctcagtgtaacaacatggccagtgcctgttccccactcccttgccccaaaaggatctggaacacaaaaaaaa

SEQ ID NO: 416 - DNA, 793 bp, Homo Sapiens
ctccgccccctcccactctctctttccggtgtggagtctggagacgacgtgcaggtaggaggcccgggcgcgacaatcggggggcatcctgcggcgaggggaccctgtggggcttgggacgagagacgggggtctttccgtgggaaccgagctaggtgccgggcaagagacgcgcggctggcccacctggatcctggccaactcgggattgagttcgttcctggtctcagaaggcccgttttgctttcagggaggagcttgtgaagtaaggaaatggcacctcgaaaggggaaggaaaagaaggaagaacaggtcatcagcctcggacctcaggtggctgaaggagagaatgtatttggtgtctgccatatctttgcatccttcaatgacacttttgtccatgtcactgatctttctggcaaggaaaccatctgccgtgtgactggtgggatgaaggtaaaggcagaccgagatgaatcctcaccatatgctgctatgttggctgcccaggatgtggcccagaggtgcaaggagctgggtatcaccgccctacacatcaaactccgggccacaggaggaaataggaccaagacccctggacctggggcccagtcggccctcagagcccttgcccgctcgggtatgaagatcgggcggattgaggatgtcacccccatcccctctgacagcactcgcaggaaggggggtcgccgtggtcgccgtctgtgaacaagattcctcaaaatattttctgttaataaattgccttcatgtaaactgtttcaaaaaaaaa

SEQ ID NO: 417 - DNA, 748 bp, Homo Sapiens
gcagataatgggaggagccgggcccgagcgagctctttcctttcgctgctgcggccgcagccatgagtatgctcaggcttcagaagaggctcgcctctagtgtcctccgctgtggcaagaagaaggtctggttagaccccaatgagaccaatgaaatcgccaatgccaactcccgtcagcagatccggaagctcatcaaagatgggctgatcatccgcaagcctgtgacggtccattcccgggctcgatgccggaaaaacaccttggcccgccggaagggcaggcacatgggcataggtaagcggaagggtacagccaatgcccgaatgccagagaaggtcacatggatgaggagaatgaggattttgcgccggctgctcagaagataccgtgaatctaagaagatcgatcgccacatgtatcacagcctgtacctgaaggtgaaggggaatgtgttcaaaaacaagcggattctcatggaacacatccacaagctgaaggcagacaaggcccgcaagaagctcctggctgaccaggctgaggcccgcaggtctaagaccaaggaagcacgcaagcgccgtgaagagcgcctccaggccaagaaggaggagatcatcaagactttatccaaggaggaagagaccaagaaataaaacctcccactttgtctgtacatactggcctctgtgattacatagatcagccattaaaataaaacaagccttaatctgcaaaaaaaaaaaaaaaa

SEQ ID NO: 418 - DNA, 862 bp, Homo Sapiens
cttggcggtgacgcacggccctcacgtgaccgggagctgcagagctacgcagccttcggtgcagtcgtcactcgtgtctcgctaccagctccccgctgccctgcgctcggcgggctggcatccggcccgggggaaagcggaccagcccttctgcaggtctgcggggccaagtgtcccggcggcgcacctcgtggcgagaatcgggagaaggaggagactacaaggataggcccaggagtaatggagtccaaagagaaacgagcagtaaacagtctcagcatggaaaatgccaaccaagaaaatgaagaaaaggagcaagttgctaataaaggggagcccttggccctccctttggatgctggtgaatactgtgtgcctagaggaaatcgtaggcggttccgcgttaggcagcccatcctgcagtatagatgggatatgatgcataggcttggagaaccacaggcaaggatgagagaagagaatatggaaaggattggggaggaggtgagacagctgatggaaaagctgagggaaaagcagttgagtcatagtctgcgggcagtcagcactgacccccctcaccatgaccatcatgatgagttttgccttatgccctgaatcctgatggtttccctaaagttattacggaaacagacccctgctttcgaatttacatgttcatgatgtgcccttgttgtaaacctttacctgtcacttgtttacgtgggtctcctattaccagcttctaattgaatattgtgtttttgaaccagtctgtaagatttttgttagcagaagaattttacctattgcatggaaagatgctcattatagtgaagttaataaagcacctttaaaaagc

SEQ ID NO: 419 - DNA, 1928 bp, Homo Sapiens
ccggctagtctttggccgccgccgaaccccgcgcgccactcgctcgctcagagggaggagaaagtggcgagttccggatccctgcctagcgcggcccaacctttactccagagatcatggctgccgaggatgtggtggcgactggcgccgacccaagcgatctggagagcggcgggctgctgcatgagattttcacgtcgccgctcaacctgctgctgcttggcctctgcatcttcctgctctacaagatcgtgcgcggggaccagccggcggccagcggcgacagcgacgacgacgagccgccccctctgccccgcctcaagcggcgcgacttcacccccgccgagctgcggcgcttcgacggcgtccaggacccgcgcatactcatggccatcaacggcaaggtgttcgatgtgaccaaaggccgcaaattctacgggcccgaggggccgtatggggtctttgctggaagagatgcatccaggggccttgccacattttgcctggataaggaagcactgaaggatgagtacgatgacctttctgacctcactgctgcccagcaggagactctgagtgactgggagtctcagttcactttcaagtatcatcacgtgggcaaactgctgaaggagggggaggagcccactgtgtactcagatgaggaagaaccaaaagatgagagtgcccggaaaaatgattaaagcattcagtggaagtatatctatttttgtattttgcaaaatcatttgtaacagtccactctgtctttaaaacatagtgattacaatatttagaaagttttgagcacttgctataagttttttaattaacatcactagtgacactaataaaattaacttcttagaatgcatgatgtgtttgtgtgtcacaaatccagaaagtgaactgcagtgctgtaatacacatgttaatactgtttttcttctatctgtagttagtacaggatgaatttaaatgtgtttttcctgagagacaaggaagacttgggtatttcccaaaacaggtaaaaatcttaaatgtgcaccaagagcaaaggatcaacttttagtcatgatgttctgtaaagacaacaaatccctttttttttctcaattgacttaactgcatgatttctgttttatctacctctaaagcaaatctgcagtgttccaaagactttggtatggattaagcgctgtccagtaacaaaatgaaatctcaaaacagagctcagctgcaaaaaagcatattttctgtgtttctggactgcactgttgtccttgccctcacatagacactcagacaccctcacaaacacagtagtctatagttaggattaaaataggatctgaacattcaaaagaaagctttggaaaaaaagagctggctggcctaaaaacctaaatatatgatgaagattgtaggactgtcttcccaagccccatgttcatggtggggcaatggttatttggttattttactcaattggttactctcatttgaaatgagggagggacatacagaataggaacaggtgtttgctctcctaagagccttcatgcacacccctgaaccacgaggaaacagtacagtcgctagtcaagtggtttttaaagtaaagtatattcataaggtaacagttattctgttgttataaaactatacccactgcaaaagtagtagtcaagtgtctaggtctttgatattgctcttttggttaacactaagcttaagtagactatacagttgtatgaatttgtaaaagtatatgaacacctagtgagatttcaaacttgtaattgtggttaaatagtcattgtattttcttgtgaactgtgttttatgattttacctcaaatcagaaaacaaaatgatgtgctttggtcagttaataaaaatggttttacccactaaaaaaaaaaaaa

SEQ ID NO: 420 - DNA, 3589 bp, Homo Sapiens
cgcggacccggccggcccaggcccgcgcccgccgcggccctgagaggccccggcaggtcccggcccggcggcggcagccatggccggggggccgggcccgggggagcccgcagcccccggcgcccagcacttcttgtacgaggtgccgccctgggtcatgtgccgcttctacaaagtgatggacgccctggagcccgccgactggtgccagttcgccgccctgatcgtgcgcgaccagaccgagctgcggctgtgcgagcgctccgggcagcgcacggccagcgtcctgtggccctggatcaaccgcaacgcccgtgtggccgacctcgtgcacatcctcacgcacctgcagctgctccgtgcgcgggacatcatcacagcctggcaccctcccgccccgcttccgtccccaggcaccactgccccgaggcccagcagcatccctgcacccgccgaggccgaggcctggagcccccggaagttgccatcctcagcctccaccttcctctccccagcttttccaggctcccagacccattcagggcctgagctcggcctggtcccaagccctgcttccctgtggcctccaccgccatctccagccccttcttctaccaagccaggcccagagagctcagtgtccctcctgcagggagcccgcccctttccgttttgctggcccctctgtgagatttcccggggcacccacaacttctcggaggagctcaagatcggggagggtggctttgggtgcgtgtaccgggcggtgatgaggaacacggtgtatgctgtgaagaggctgaaggagaacgctgacctggagtggactgcagtgaagcagagcttcctgaccgaggtggagcagctgtccaggtttcgtcacccaaacattgtggactttgctggctactgtgctcagaacggcttctactgcctggtgtacggcttcctgcccaacggctccctggaggaccgtctccactgccagacccaggcctgcccacctctctcctggcctcagcgactggacatccttctgggtacagcccgggcaattcagtttctacatcaggacagccccagcctcatccatggagacatcaagagttccaacgtccttctggatgagaggctgacacccaagctgggagactttggcctggcccggttcagccgctttgccgggtccagccccagccagagcagcatggtggcccggacacagacagtgcggggcaccctggcctacctgcccgaggagtacatcaagacgggaaggctggctgtggacacggacaccttcagctttggggtggtagtgctagagaccttggctggtcagagggctgtgaagacgcacggtgccaggaccaagtatctgaaagacctggtggaagaggaggctgaggaggctggagtggctttgagaagcacccagagcacactgcaagcaggtctggctgcagatgcctgggctgctcccatcgccatgcagatctacaagaagcacctggaccccaggcccgggccctgcccacctgagctgggcctgggcctgggccagctggcctgctgctgcctgcaccgccgggccaaaaggaggcctcctatgacccaggtgtacgagaggctagagaagctgcaggcagtggtggcgggggtgcccgggcattcggaggccgccagctgcatccccccttccccgcaggagaactcctacgtgtccagcactggcagagcccacagtggggctgctccatggcagcccctggcagcgccatcaggagccagtgcccaggcagcagagcagctgcagagaggccccaaccagcccgtggagagtgacgagagcctaggcggcctctctgctgccctgcgctcctggcacttgactccaagctgccctctggacccagcacccctcagggaggccggctgtcctcagggggacacggcaggagaatcgagctgggggagtggcccaggatcccggcccacagccgtggaaggactggcccttggcagctctgcatcatcgtcgtcagagccaccgcagattatcatcaaccctgcccgacagaagatggtccagaagctggccctgtacgaggatggggccctggacagcctgcagctgctgtcgtccagctccctcccaggcttgggcctggaacaggacaggcaggggcccgaagaaagtgatgaatttcagagctgatgtgttcacctgggcagatcccccaaatccggaagtcaaagttctcatggtcagaagttctcatggtgcacgagtcctcagcactctgccggcagtgggggtgggggcccatgcccgcgggggagagaaggaggtggccctgctgttctaggctctgtgggcataggcaggcagagtggaaccctgcctccatgccagcatctgggggcaaggaaggctggcatcatccagtgaggaggctggcgcatgttgggaggctgctggctgcacagacccgtgaggggaggagaggggctgctgtgcaggggtgtggagtagggagctggctcccctgagagccatgcagggcgtctgcagcccaggcctctggcagcagctctttgcccatctctttggacagtggccaccctgcacaatggggccgacgaggcctagggccctcctacctgcttacaatttggaaaagtgtggccgggtgcggtggctcacgcctgtaatcccagcactttgggaggccaaggcaggaggatcgctggagcccagtaggtcaagaccagccagggcaacatgatgagaccctgtctctgccaaaaaattttttaaactattagcctggcgtggtagcgcacgcctgtggtcccagctgctggggaggctgaagtaggaggatcatttatgcttgggaggtcgaggctgcagtgagtcatgattgtatgactgcactccagcctgggtgacagagcaagaccctgtttcaaaaagaaaaaccctgggaaaagtgaagtatggctgtaagtctcatggttcagtcctagcaagaagcgagaattctgagatcctccagaaagtcgagcagcacccacctccaacctcgggccagtgtcttcaggctttactggggacctgcgagctggcctaatgtggtggcctgcaagccaggccatccctgggcgccacagacgagctccgagccaggtcaggcttcggaggccacaagctcagcctcaggcccaggcactgattgtggcagaggggccactacccaaggtctagctaggcccaagacctagttacccagacagtgagaagcccctggaaggcagaaaagttgggagcatggcagacagggaagggaaacattttcagggaaaagacatgtatcacatgtcttcagaagcaagtcaggtttcatgtaaccgagtgtcctcttgcgtgtccaaaagtagcccagggctgtagcacaggcttcacagtgattttgtgttcagccgtgagtcacactacatgcccccgtgaagctgggcattggtgacgtccaggttgtccttgagtaataaaaacgtatgttgcaataaaaaaaaaaaaaaaaaa

SEQ ID NO: 421 - DNA, 5462 bp, Homo Sapiens
gaaccggtagtccgcggtggcgcggtccgcccctcacctggccagcggcgggcgctgaggggcccaatgggagccgcggcctggccgccccgccccgcgcctccggacgtctgtgccgggacaaggccgccgctggtgccgggtccttgaggagagcgcctcccgtccgaggccagccgcctctgtcagccgtccgcgcgggccgggtctgaagcgccgccgggacggcgaagagccgcggccgccgcggagaaggaggcagcgcaggaggccggagcggccgccgcgcccgagcacatggcgtccatcttactgaggagctgccgcggccgggcgcccgcccgcctcccgccgccgcctcggtacaccgtcccgcggggtagtccaggggatcctgctcatctcagctgtgccagcaccctggggttgaggaactgcctgaatgttccatttggctgctgcactcccatccaccctgtgtacacatcctccagaggcgatcacctcggctgttgggctctgaggcccgagtgccttcgcatagtgtcgagagcgccatggacctctacctctgtgggttttgtggctgtgggacctcagtgccttcctgtgcgtggctggcactcttcgcgccctgttcgcgatgactcggtagtagagaagtccctcaagtccttgaaggacaagaacaagaagctggaggaaggcggcccggtgtacagcccccccgcagaggtggtggtgaagaagtccctggggcagcgggtgctggacgagctgaagcactactaccatggcttccgcctgctatggatcgacaccaagatcgcggcacgcatgctctggcgcatcctcaacggccacagcctgacccgccgggagcgcaggcagtttctccggatctgcgctgacctcttccgcctggtgccgttccttgtgttcgtggtggtgccgttcatggagtttctgctgcctgttgctgtgaagctcttccccaacatgttgccatccacatttgagactcagtcactcaaggaggagaggctgaagaaggagcttcgggtcaagctggagctggccaagttcctccaggacaccatcgaggagatggccttgaagaacaaggcagccaagggcagcgccaccaaagacttctctgtgtttttccagaagatccgggaaacaggggagaggcccagcaatgaggaaatcatgcgtttttccaaattatttgaggatgagctgaccctggacaacctgacacggccgcagctggtggccctgtgcaagctgctggagctacagtccatcggcaccaacaacttcctgcgcttccagcttaccatgcggctgcgctccataaaggcagacgacaagctgattgctgaggaaggggtggacagcctgaatgtcaaggagctgcaggcagcgtgtcgggcacgaggcatgcgggccctgggcgtcacggaagaccgcctgaggggtcagctgaagcagtggctggacctgcacctgcatcaggagatccccacatcgctgctcatcctgtcccgggccatgtacctcccggacaccctctctccagccgaccagctcaagtccacactgcagaccctcccagagattgtggcaaaggaagcacaggtgaaagtggccgaggtggagggcgagcaggtggacaacaaggccaagctggaggccacgctgcaggaggaggcggccatccagcaggagcaccgtgagaaggagctgcagaagcgctcggaggtggcgaaggattttgagcccgaacgtgtggtagctgctccccaaaggccggggaccgagccacagccagaaatgcctgacacagtcctgcagtcagagaccttgaaggacactgccccggtgctggagggcttgaaggaggaagagatcacgaaggaggaaatcgacatcctcagcgatgcctgctctaagctgcaggagcagaagaagtcactcaccaaggagaaggaggagctggagctgctgaaggaggatgtgcaggactacagcgaggacttgcaggagatcaagaaggaactttcaaagactggtgaagaaaagtacgtggaagaatctaaagccagcaagagattgacaaaaagggtgcagcaaatgatcgggcagatcgatggcttgatctcgcagctggagatggaccagcaggctggcaagctggccccggccaacggcatgcccacgggggagaacgtcatcagtgtcgctgagctcatcaacgccatgaagcaagtcaagcacattcccgaaagcaagctcaccagcctggccgcagcactggatgaaaacaaggatggcaaggtcaacatcgacgacctcgtcaaggtgattgagctggtggacaaagaagatgttcacatctccaccagccaggtggctgagattgtagcaacactggaaaaagaggagaaggtggaggagaaggagaaggccaaagagaaggcagagaaggaggtcgcagaggtgaagagctagaaccactggcctgggcacctgtcctcctgctgtgccgtcaccctggcaagggccgtgagggcgattgctttgtggtgattctcagtggctcatctaatattttggctggaataaatcagagacttccataatcaagtaaattttaattttcatcattccacggagattcagtctgtctggaatcccggaacccctccacagaatcgtgtctggatccacactgtggtgtggctgccacggcctcctggctccagaggcagctgggctgggccaaggcaggaaggcgcccccatgtgtgtggcctcagtctcagcatctgactgtgctgccctgtccccagggaagagaatgaggaccacgtggactccgcccacacagagctggctgctgtgcccaccctcaggggcgtcaggagacacagcctggcctcctcagggctgaagatgcctccattcgcctgtggaccttgatttctagatttcagtgtcaatagacctgtcttcctgcacactttcagttggatgtgggtcattgtggagacagaggtgtctgccatctctgtggcctctggagagtgacgtctccctgctgggagtgctggttctcacgtgcggtttcccttgtgtatcggagctctttctcggctttctatttcccccagttctttaagcagtcaattggcacagagtttcccacgggggctgcagtggattcactgtgtcagggatgagcctggcttgggggttggtggggctctgaagcgcatttggggttctttgtagcttctaatgtgaggtttgagtccagtgcgcccacagcagcatgcccttctcaccccttgcagtgttgcaggctcaggcccctgggctccttcagcaagcaggctagtcaatgaggcatgaggatccggcacagggcatcccctggggcttcaagggcaatacccccgtgcttagggtttgccctgtgccctctgggtggggtggcctccccgcactcggcagcatggccaggctggccagggcgtgggcaggtggtgtcctgtggcacctccatcctcctgcccagccggctgtgtcacactcatctttttaaggtcaggttggttcctggcaaaaatgtacctccaggggcctccaagcataggatttggaagacaggaacggcacaggcgtccaggaaagcagctgcactcagacaatgccttctccattacttgaagcttctttctgttcagccattaaagaaacttgacaaaataggaacaggagatatttctcaattgtaaacctttgtgcagggacagttggcttccagaggctttcagctttcagttatttgagaagtttgttttagatccttaactaatatttatgaattctctcaccctgtgtaagtagcctggtgttcgtttgtccaagtgtacttacccttgagaacaagtcttgcagttgccaggtgtgtgcagacgcctctcctgtgagcggcatcgcgggcccagtcagctgccccggctctcatcctcgtcctcactgccttggctgagcactgttgacgtgaacagccactgcaacaggcagcccatcccactgtcccctctgccctggactccgcatggcctccaaaagccagcttgccctccgggtgctgcaggggctttgcaggtggggaaggctctggtgggtgcctttggtggcttccgtgacatcagccgtgctctgatgcaggcttgctccctcgtcattctccctcgtcattctccctcatcgttctgtgtgcatttttctctatgtcctgacctttcttcttgcacctaaaagtggtgtctgggtgcaaatgtaagcagtggtggatccagaaatatgagctttgtgtaataagcttcttaaaacagtcctttcttacacctgcccagggccagaccctcggtcttggcctttttcaggagctaggatatctgcgcctggtgaaaatgaaacgaattcctgatttaggaattcagtgtttcctcctcactccagctaagcactcacttttttttttttttttttttttttttgatacagagtctcgctctgtcacccaggctggagtgcagtggtgcgatctcggctcactgcaagctccacctcccgggttcaagcgattcttctgcctcagcctcctgagtaattgggattacaggcatgcgccaccatgcccagctaatttttttttttttttttgagacagagtcttgctctgtctcccaggctggagtgcaatggcgtgatctcggctcactgccagctccgcttcctgggttcacgccattctcctgcctcagcctcccgagtagccaggactacaagcacccgccaccacacctggctaatttttttgtatttttattagagacagtgttttaccgtgttagccaggatggtctcgatctcctgacttcgtgatctactcacctcggcctcccaaagtgctgggattacgggcaagtttttattagagatggggtttcatcatgttggtcaggctggtcttcaactcctgacctcaggtgatccacccgcctcagcctcccaaagtgctgggattacaggcatgagccaccgcgcccggcctgaactctcagttctaacgcagggattcaggaattgggctttcagactccttctgcagtgtcacagtccagactttttttaaatgaaggacaccccgcagtggctcacagtgggtcccagggctagcaggagcgtgctggggagccggctctgtctttgttcgcagtgggtcccggtgctggcaggagtgtgctggtgagccggctctgtctttgtaaatccttcaggggtcctacggctgactccaccggacagcccgtcctgggccgtgttaagcaccttttgtagaaatcgtatttttattaaaacatcaaatctgtgttcctgtaa

SEQ ID NO: 422 - DNA, 3474 bp, Homo Sapiens
gcgccagcttggagagccagccccatcggggttccccgccgccggaagcggaaatagcaccgggcgccgccacagtagctgtaactgccaccgcgatgccgaaggcgcccaagcagcagccgccggagcccgagtggatcggggacggagagagcacgagcccatcagacaaagtggtgaagaaagggaagaaggacaagaagatcaaaaaaacgttctttgaagagctggcagtagaagataaacaggctggggaagaagagaaagtgctcaaggagaaggagcagcagcagcagcaacagcaacagcagcaaaaaaaaaagcgagatacccgaaaaggcaggcggaagaaggatgtggatgatgatggagaagagaaagagctcatggagcgtcttaagaagctctcagtgccaaccagtgatgaggaggatgaagtacccgccccaaaaccccgcggagggaagaaaaccaagggtggtaatgtttttgcagccctgattcaggatcagagtgaggaagaggaggaggaagaaaaacatcctcctaagcctgccaagccggagaagaatcggatcaataaggccgtatctgaggaacagcagcctgcactcaagggcaaaaagggaaaggaagagaagtcaaaagggaaggctaagcctcaaaataaattcgctgctctggacaatgaagaggaggataaagaagaagaaattataaaggaaaaggagcctcccaaacaagggaaggagaaggccaagaaggcagagcagggttcagaggaagaaggagaaggggaagaagaggaggaggaaggaggagagtctaaggcagatgatccctatgctcatcttagcaaaaaggagaagaaaaagctgaaaaaacagatggagtatgagcgccaagtggcttcattaaaagcagccaatgcagctgaaaatgacttctccgtgtcccaggcggagatgtcctcccgccaagccatgttagaaaatgcatctgacatcaagctggagaagttcagcatctccgctcatggcaaggagctgttcgtcaatgcagacctgtacattgtagccggccgccgctacgggctggtaggacccaatggcaagggcaagaccacactcctcaagcacattgccaaccgagccctgagcatccctcccaacattgatgtgttgctgtgtgagcaggaggtggtagcagatgagacaccagcagtccaggctgttcttcgagctgacaccaagcgattgaagctgctggaagaggagcggcggcttcagggacagctggaacaaggggatgacacagctgctgagaggctagagaaggtgtatgaggaattgcgggccactggggcggcagctgcagaggccaaagcacggcggatcctggctggcctgggctttgaccctgaaatgcagaatcgacccacacagaagttctcagggggctggcgcatgcgtgtctccctggccagggcactgttcatggagcccacactgctgatgctggatgagcccaccaaccacctggacctcaacgctgtcatctggcttaataactacctccagggctggcggaagaccttgctgatcgtctcccatgaccagggcttcttggatgatgtctgcactgatatcatccacctcgatgcccagcggctccactactataggggcaattacatgaccttcaaaaagatgtaccagcagaagcagaaagaactgctgaaacagtatgagaagcaagagaaaaagctgaaggagctgaaggcaggcgggaagtccaccaagcaggcggaaaaacaaacgaaggaagccctgactcggaagcagcagaaatgccgacggaaaaaccaagatgaggaatcccaggaggcccctgagctcctgaagcgccctaaggagtacactgtgcgcttcacttttccagaccccccaccactcagccctccagtgctgggtctgcatggtgtgacattcggctaccagggacagaaaccactctttaagaacttggattttggcatcgacatggattcaaggatttgcattgtgggccctaatggtgtggggaagagtacgctactcctgctgctgactggcaagctgacaccgacccatggggaaatgagaaagaaccaccggctgaaaattggcttcttcaaccagcagtatgcagagcagctgcgcatggaggagacgcccactgagtacctgcagcggggcttcaacctgccctaccaggatgcccgcaagtgcctgggccgcttcggcctggagagtcacgcccacaccatccagatctgcaaactctctggtggtcagaaggcgcgagttgtgtttgctgagctggcctgtcgggaacctgatgtcctcatcttggacgagccaaccaataacctggacatagagtctattgatgctctaggggaggccatcaatgaatacaagggtgctgtgatcgttgtcagccatgatgcccgactcatcacagaaaccaattgccagctgtgggtggtggaggagcagagtgttagccaaatcgatggtgactttgaagactacaagcgggaggtgttggaggccctgggtgaagtcatggtcagccggccccgagagtgagctttccttcccagaagtctcccgagagacatatttgtgtggcctagaagtcctctgtggtctcccctcctctgaagactgcctctggcctgcagctgacctggcaaccattcaggcacatgaaggtggagtgtgaccttgatgtgaccgggatcccactctgattgcatccatttctctgaaagacttgtttgttctgcttctcttcatataactgagctggccttatccttggcatccccctaaacaaacaagaggtgaccaccttattgtgaggttccatccagccaagtttatgtggcctattgtctcaggactctcatcactcagaagcctgcctctgatttaccctacagcttcaggcccagctgccccccagtctttgggtggtgctgttcttttctggtggatttaatgctgactcactggtacaaacagctgttgaagctcagagctggaggtgagcttctgaggcctttgccattatccagcccaagatttggtgcctgcagcctcttgtctggttgaggacttggggcaggaaaggaatgctgctgaacttgaatttccctttacaaggggaagaaataaaggaaaggagttgctgccgacctgtcactgtttggagattgatgggagttggaactgttctcagtcttgatttgctttattcagttttctagcagcttttaatagtcccctcttccccactaaatggatcttgtttgcagtcttgctgacagtgtttgctgtttaaggatcataggattcctttcccccaacccttcacgcaaggaaaaagcaaagtgattcataccttctatcttggaaaaaaaaaaaa

SEQ ID NO: 423 - DNA, 2573 bp, Homo Sapiens
atgacgacatggtcgtaaatccgccatcttcctgcggcgcgttgcgacatggagggcgcgatggcagtgcgggtgacggccgctcatacggcagaagcccaggccgaagccgggcgggaagcgggcgagggtgcagttgcggcggtggcggcggccttggcccccagcggcttcctcggcctcccggcgcccttcagcgaggaagatgaggacgatgtgcacagatgcggccgctgccaggcagagttcaccgccttggaggattttgttcagcacaagattcagaaggcctgccagcgggcccctccggaggccctgcctgccacccctgccaccacagcgttgctgggccaggaggtggtgccggcagcaccaggcccagaggagcccatcactgtggcccacatcgtggtggaggcggcctctctggcagcagacatcagccacgcatctgaccttgttggtggtgggcacatcaaagaggtcatcgtggctgctgaggcggagctgggagacggtgagatggccgaggccccgggcagcccccgccagcaggggctggggctcgcaggggagggtgagcaggcccaggtgaagctactggtgaacaaggatggccgctatgtgtgtgcgctgtgccacaagaccttcaagacgggcagcatcctcaaggcccacatggtcactcacagcagccgcaaggaccacgagtgcaagctctgtggggcctccttccgcaccaagggctcactcatccggcaccaccggcggcacacggatgagcgcccctacaagtgctccaagtgtggaaagagcttccgggagtcgggtgcactgacccggcacctcaagtctctcaccccctgcacagagaaaatccgcttcagtgtgagcaaggacgtggttgtcagcaaagaggacgcacgtgcaggttctggagctggagctgccggcttggggacagccacatcatcggtgacaggcgagcctatagagacttcacccgtgattcacctggtgacagatgccaagggcaccgtcatccacgaagtccacgtccagatgcaggagctgtccctgggcatgaaagccctggccccagagccccccgtctcccaggagctcccctgctccagcgagggcagccgtgagaacctgctgcaccaggccatgcagaactccggcatcgtccttgagcgcgctgctggggaggagggtgccctggagccagctcctgctgccgggtccagtccccagcccctggcagtggcagccccgcagctgccggtactggaagtgcagccgctggagacacaggtggccagcgaggcctcagcggtgcccaggacccacccatgtcctcagtgcagtgagaccttcccgacagcagccaccctggaggcccacaagaggggccacaccgggccgaggccgttcgcctgcgcgcagtgtggcaaggccttccccaaggcctacctgctcaagaagcaccaggaggtgcacgtgcgtgagcgccgcttccgctgtggcgactgcgggaagctctacaagaccattgcccatgtgcgtggccaccggcgcgtccactcagacgagcggccctacccttgtcccaagtgtggcaagcgctacaagactaagaacgcacagcaggtgcacttcaggacacacctggaggagaagccgcacgtgtgccagttctgcagccgtggcttccgagagaagggctcactggtgcggcacgtgcgacaccacacaggcgagaagccgttcaagtgctacaagtgcggccgtggcttcgccgagcacggcacgctgaaccggcacctgcgcaccaaagggggctgcctgctggaggtggaggagttgctggtgtctgaggacagccccgcggcagccaccaccgtcctcacggaagacccgcacacagtgttggtggagttctcgtccgtggtagctgacacccaggagtatatcatcgaggccactgcggacgatgcggagaccagtgaggccacggagatcatcgagggcacccagacagaggtggacagccacatcatgaaggtggtgcagcagatcgtgcaccaggctagcgccggccaccagatcatcgtgcagaacgtcaccatggacgaggagacggcgctgggcccagaggcggctgccgccgacaccatcaccatcgccacccccgagagcctgacagagcaggtggccatgacgctggcctcggccatcagcgagggcactgtgcttgccgcccgggcagggacaagtggcactgaacaggccactgtgaccatggtgtcatcagaggacatcgagatcctggagcatgcaggcgagctggtcatcgcctcgccggagggccagctggaggtgcagacggtcatcgtctagcatgaggtctgcggggtcctggccgggcagggacagggcagaggactctgagcgccccacccatgcctgcctggcctggtagagaagatggcacaggatggaggcgccccaagacggacagtgtacataagagtttcttgttgctttacaataaaacatgagaacctgca

SEQ ID NO: 424 - DNA, 1155 bp, Homo Sapiens
cgcctgtcttttccgtgctacctgcagaggggtccatacggcgttgttctggattcccgtcgtaacttaaagggaaattttcacaatgtccggagcccttgatgtcctgcaaatgaaggaggaggatgtccttaagttccttgcagcaggaacccacttaggtggcaccaatcttgacttccagatggaacagtacatctataaaaggaaaagtgatggcatctatatcataaatctcaagaggacctgggagaagcttctgctggcagctcgtgcaattgttgccattgaaaaccctgctgatgtcagtgttatatcctccaggaatactggccagagggctgtgctgaagtttgctgctgccactggagccactccaattgctggccgcttcactcctggaaccttcactaaccagatccaggcagccttccgggagccacggcttcttgtggttactgaccccagggctgaccaccagcctctcacggaggcatcttatgttaacctacctaccattgcgctgtgtaacacagattctcctctgcgctatgtggacattgccatcccatgcaacaacaagggagctcactcagtgggtttgatgtggtggatgctggctcgggaagttctgcgcatgcgtggcaccatttcccgtgaacacccatgggaggtcatgcctgatctgtacttctacagagatcctgaagagattgaaaaagaagagcaggctgctgctgagaaggcagtgaccaaggaggaatttcagggtgaatggactgctcccgctcctgagttcactgctactcagcctgaggttgcagactggtctgaaggtgtacaggtgccctctgtgcctattcagcaattccctactgaagactggagcgctcagcctgccacggaagactggtctgcagctcccactgctcaggccactgaatgggtaggagcaaccactgactggtcttaagctgttcttgcataggctcttaagcagcatggaaaaatggttgatggaaaataaacatcagtttctaaaagttgtcttcatttagtttgctttttactccagatcagaatacctgggattgcatatcaaagcataataataaatacatgtctcgacatgagttgtacttctaaaaaaaaaaa

SEQ ID NO: 425 - DNA, 4822 bp, Homo Sapiens
ccccaaaaggagcataaaccagggactttgatatcatgcagcagaagaccaaattatttctccaagctttgaagtatagtattcctcaccttggaaaatgcatgcagaaacagcatttgaatcactataacttcgctgatcattgttacaatagaataaaattgaaaaaatatcacctaaccaagtgtcttcagaataaacccaagatatcagagttagcaagaaacatcccaagtcggagcttctcatgtaaggatcttcagcctgttaaacaagaaaacgaaaaaccccttccagaaaacatggatgcatttgaaaaagtgagaacaaaattagaaacacagccacaagaagaatatgaaatcatcaatgtggaagttaaacatggtggttttgtttattaccaagaaggttgttgcttggttcgttccaaagatgaagaagcagacaatgataattatgaagttttattcaatttggaggaacttaagttagaccagcccttcattgattgtatcagagttgctccagatgaaaaatatgtggctgccaagataagaactgaagattctgaagcatctacctgtgtaattataaagctcagcgatcagcccgtaatggaagcttctttcccgaatgtgtccagttttgaatgggtaaaggacgaggaagatgaagatgttttattctacaccttccagaggaaccttcgctgtcatgacgtatatcgagccacttttggtgataacaaacgtaatgaacgcttttacacagaaaaagacccaagctactttgttttcctttatcttacaaaagacagtcgtttcctcaccataaatattatgaacaagactacttctgaagtgtggttgatagatggcctgagcccttgggacccaccagtacttatccagaagcgaatacatggggtcctttactatgttgaacacagagatgatgaattatacattctcactaatgttggagaacctacagaatttaagctaatgagaacagcggctgatacccctgcaattatgaattgggatttattttttacaatgaagagaaatacaaaagtgatagacttggacatgtttaaggatcactgtgttctatttctgaagcacagcaatctcctttatgttaatgtgattggtctggctgatgattcagttcggtctctaaagctccctccttgggcctgtggattcataatggatacaaattctgacccaaagaactgcccctttcaactttgctctccaatacgtcccccaaaatattacacatacaagtttgcagaaggcaaactgtttgaggaaactgggcatgaagacccaatcacaaagactagtcgcgttttacgtctagaagccaaaagcaaggatggaaaattagtgccaatgactgttttccacaaaactgactctgaggacttgcagaagaaacctctcttggtacatgtatatggagcttatggaatggatttgaaaatgaatttcaggcctgagaggcgggtcctggtggatgatggatggatattagcatactgccatgttcgaggtggtggtgagttaggcctccagtggcacgctgatggccgcctaactaaaaaactcaatggccttgctgatttagaggcttgcattaagacgcttcatggccaaggcttttctcagccaagtctaacaaccctgactgctttcagtgctggaggggtgcttgcaggagcattgtgtaattctaatccagagctggtgagagcggtgactttggaggcacctttcttggatgttctcaacaccatgatggacactacacttcctctgacattagaagaattagaagaatgggggaatccttcatctgatgaaaaacacaagaactacataaaacgttactgtccctatcaaaatattaaacctcagcattatccttcaattcacataacggcatatgaaaacgatgaacgggtacctctgaaaggaattgtaagttatactgagaaactcaaggaagccatcgcggagcatgctaaggacacaggtgaaggctatcagacccctaatattattctagatattcagcctggaggcaatcatgtaattgaggattctcacaaaaagattacagcccaaattaaattcctgtacgaggaacttggacttgacagcaccagtgttttcgaggatcttaagaaatacctgaaattctgaaacactgcattcaactgggaattggaaacacactgaaatatttcatagtcttacttccaattgagttagcaaaaaaaaaattaataacttgagacttttaagttattaattttttaaaatgtgcttctccatctaaattttgcttagtctacatctcacttgcttatactattctctccattgatgcacatgcccattaacctaggaaagtaattttcaaatcatgctccttagaaggatgtggagtagagggaagggaaggattggtgatagcagagctccaggcctcccttccagtcagaacagttgagcagtttacaaattagtgtcctgcctctttgctagcaaatgcttttagacactgtggcagtgagtcatcctctaatttctatgactgcattttaagggaaaagataaaattcttccccttaaaattcgttaaagtttttgaataatctggggtcctaatgtgttctggtcatccctgattgatgctatctgaataaagttataagctcctataagccataatttacttttaaacattttatttttttcaaaacatttgagaacctttcttaaagcagttacattcaagctacagaaatatcgaagaattaatgattgttcaccaagcagcatgctgtacatgaagctattacaaatgcttacaatcccactgaaatgccagtgtcttcatctcttcataaaggtgcctaacacgaggtatacagtatgttcagtacactggaatagcatgctcgattggaaacaaagcatctatctctgaaagctgtttggcgatgaaggagattcttcgtgttgtgttcaaagatgagtccctctcccttgtccagaaaaatgccacttgtatcaactttactgcctttgtcggcagaattggtacttaaccttattctcattttagcgggaaggcccgaaatcatattatgtagatttaacagtgttgattctccaaaattcagaaccacgataaagattctgtcgatgccatccagctctcttgtgtacacaacatagtggctgtcattcctcaaatggcaaaaccagcccctgttgaggagtagctcattggcatgaagtagacttaaatcttgatataacttcaaagccgatctgggctgagtcttttggacctatttttttaaaaaagtatttacgtaagtgtttgattctaagaattgtttgtaagtatttttaatatattgtaaggagttatttacccaaaacacttgctccaattttgccccttataattgccaaattgtaagcatcaataagtaggtaagaacaatttatataaaaactgatagaaatgacaaattcggggtttcggcttgtctgggagtcaataagtacgcacagtgctctgctacattgtagagtttctgtagagatcaaatttgactccactttaggagtcccaaagcaaatgtccatgtctaagatgaatatttaacttgcatagtcattctgtgctatattgtaactgccagatggccagaaagaaggcaacagtggactcagacttctgaggaatttgggtttgttcccctttgtagactaatgtgtaggttgctgttgtgcgaagatcgtgtaactttagcagacatgtatttcttgcacagctaatagaagacaaagttgaaaaaaaggatgcaaaataaaaagctgcctaaggtgaaagttagaaattgtagacttttttttaccataatagtatgtgttcattaaagatgatttgggtttattttacagctatataaaacataatttgatgatgtacttctaacctttcaagcattttctgttattgactatataatatagcctccataaatgtttttaatgacaatattctgttgaacggttgtaccatactcagccatgccctttcattttgacgatagtgtttctaatattttgtatttttattcccctccccccatttttgtattacttaagatagattatcagaaagacagttactttgtcaaagagtatgggcacttgatacataatgccaaattattcttcataagagctgttgccaaatcagtgataatgttcatttaattgtattcttgccagccatgtttactggggtgatagttgttattgtggttgttattgttctttaggggtaggttcccaatatgtggtctttaaataattatctaatggtgtttaaaaagatgtttattctgtttgtcaggtacaaagatatttatgatacatgtatgacttgtctaagttattaacattttctctagccttaggtaatgcatgaaagcacatgtttcagtgccactcacataagaagtgcccggtaagtgttagctattattgtctacttgagttactactttctaaaagtatgttgaagtctttttctgtaattgcagatttgttgattttgcatttgagtattttctatattttgaagctgttagatgcgtagtcatgatttttggtggaatgttttatcaatttttgaaaattgcctttgtctcatataatgcttttcatattgaactatattttgtctgctattaaatacttccaagcctgaaaaaaaaaaa

SEQ ID NO: 426 - DNA, 1763 bp, Homo Sapiens
cttctggtaaggaggccccgtgatcagctccagccatttgcagtcctggctatcccaggagcttacataaagggacaattggagcctgagaggtgacagtgctgacactacaaggctcggagctccgggcactcagacatcatgagttggtccttgcacccccggaatttaattctctacttctatgctcttttatttctctcttcaacatgtgtagcatatgttgctaccagagacaactgctgcatcttagatgaaagattcggtagttattgtccaactacctgtggcattgcagatttcctgtctacttatcaaaccaaagtagacaaggatctacagtctttggaagacatcttacatcaagttgaaaacaaaacatcagaagtcaaacagctgataaaagcaatccaactcacttataatcctgatgaatcatcaaaaccaaatatgatagacgctgctactttgaagtccaggaaaatgttagaagaaattatgaaatatgaagcatcgattttaacacatgactcaagtattcgatatttgcaggaaatatataattcaaataatcaaaagattgttaacctgaaagagaaggtagcccagcttgaagcacagtgccaggaaccttgcaaagacacggtgcaaatccatgatatcactgggaaagattgtcaagacattgccaataagggagctaaacagagcgggctttactttattaaacctctgaaagctaaccagcaattcttagtctactgtgaaatcgatgggtctggaaatggatggactgtgtttcagaagagacttgatggcagtgtagatttcaagaaaaactggattcaatataaagaaggatttggacatctgtctcctactggcacaacagaattttggctgggaaatgagaagattcatttgataagcacacagtctgccatcccatatgcattaagagtggaactggaagactggaatggcagaaccagtactgcagactatgccatgttcaaggtgggacctgaagctgacaagtaccgcctaacatatgcctacttcgctggtggggatgctggagatgcctttgatggctttgattttggcgatgatcctagtgacaagtttttcacatcccataatggcatgcagttcagtacctgggacaatgacaatgataagtttgaaggcaactgtgctgaacaggatggatctggttggtggatgaacaagtgtcacgctggccatctcaatggagtttattaccaaggtggcacttactcaaaagcatctactcctaatggttatgataatggcattatttgggccacttggaaaacccggtggtattccatgaagaaaaccactatgaagataatcccattcaacagactcacaattggagaaggacagcaacaccacctggggggagccaaacaggtcagaccagagcaccctgcggaaacagaatatgactcactttaccctgaggatgatttgtagaaaattaactgctaacttctattgacccacaaagtttcagaaattctctgaaagtttcttccttttttctcttactatatttattgatttcaagtcttctattaaggacatttagccttcaatggaaattaaaactcatttaggactgtatttccaaattactgatatcagagttatttaaaaattgtttatttgaggagataacatttcaactttgttcctaaatatataataataaaatgattgactttatttgcaaa

SEQ ID NO: 427 - DNA, 2206 bp, Homo Sapiens
atactttgaaaataacagctcttttttgttccctcgtgtgtctcttcccaattgtatccctattgtattttctcatagtatgtttcagcagaaatcaaggtagacgaagtaacctcttgtcctgaattttcatagttgctcattcttaataatggcagcagaagcaacaatgagagtaactacctcctcagctcaaagaaaatgaacggcaccctggaccacccagaccaaccagatcttgatgctatcaagatgtttgtgggccaggttccaaggacctggtctgaaaaggacttgcgggaactcttcgaacagtatggtgctgtgtatgaaatcaacgtcctaagggataggagccaaaacccgcctcagagcaaagggtgctgttttgttacattttacacccgtaaagctgcattagaagctcagaatgctcttcacaacatgaaagtcctcccagggatgcatcaccctatacagatgaaacctgctgacagtgagaagaacaatgcagtggaagacaggaagctgtttattggtatgatttccaagaagtgcactgaaaatgacatccgagtcatgttctcttcgtttggacagattgaagaatgccggatattgcggggacctgatggcctgagccgaggttgtgcatttgtgacttttacaacaagagccatggcacagacggctatcaaggcaatgcaccaagcacagaccatggagggttgctcatcacccatggtggtaaaatttgctgatacacagaaggacaaagaacagaagagaatggcccagcagctccagcagcagatgcagcaaatcagcgcagcatctgtgtggggaaaccttgctggtctaaatactcttggaccccagtatttagcactccttcagcagactgcctcctctgggaacctcaacaccctgagcagcctccacccaatgggagggttgaatgcaatgcagttacagaatttggctgcactagctgctgcagctagtgcagctcagaacacaccaagtggtaccaatgctctcactacatccagcagtcccctcagcgtgctcactagttcagcagggtcctcacctagctctagcagcagtaattctgtcaaccccatagcctcacttggagccctgcagacattagctggagcaacggctggcctcaatgttggctctttggcaggaatggctgctttaaatggtggcctgggcagcagtggcctttccaatggcaccgggagcaccatggaggccctcactcaggcctactcgggtatccagcaatatgctgctgctgcgctccccactctgtacaaccagaatcttctgacacagcagagtattggtgctgctggaagccagaaggaaggtccagagggagccaacctgttcatctaccacctgccccaggagtttggtgatcaggacctgctgcagatgtttatgccctttgggaatgtcgtgtctgccaaggttttcatagacaagcagacaaacctgagcaagtgttttggttttgtaagttacgacaatcctgtttcggcccaagctgccatccagtccatgaacggctttcagattggcatgaagcggcttaaagtgcagctcaaacgttcgaagaatgacagcaagccctactgagcgtgctcccctctgagactggagtgagagggtcttctgattcctgccgtttgttcatcgttgtgcctaaagcatgtcgatgtggcgtcaagtacatcgtccaaatccctgtctcttcagcttctctgatgcttgaactctcacctttgaccttgtgttgacctttgatgctgatgtgtatttttattatgtttgtttctttcttcgtttttttttctttttttctttcctttttttttccttttgtgctgccaaattggttttgctagaacgactgctgaaggggaaatatttaaacttgcatttgaatataaaaaaaatctatttttctagaacttcataagataaccacttgattttgtgattccaattctttgtaattgtcttcagagcagccctactagcacataccgcgtggtgtttgtatttctgtgaacacacagccagtccgtttctaggctttgtttctctgtgtgcttagttttaaagacaactttgaagtaaacaatgaaataaaagatgtcactaaaacctctgaaaaaaaaaaaaaaaa

SEQ ID NO: 428 - DNA, 745 bp, Homo Sapiens
gcgctgtttccgcctcttgccttcggacgccggattttgacgtgctctcgcgagatttgggtctcttcctaagccggcgctcggcaagttctcccaggagaaagccatgttcagttcgagcgccaagatcgtgaagcccaatggcgagaagccggacgagttcgagtccggcatctcccaggctcttctggagctggagatgaactcggacctcaaggctcagctcagggagctgaatattacggcagctaaggaaattgaagttggtggtggtcggaaagctatcataatctttgttcccgttcctcaactgaaatctttccagaaaatccaagtccggctagtacgcgaattggagaaaaagttcagtgggaagcatgtcgtctttatcgctcagaggagaattctgcctaagccaactcgaaaaagccgtacaaaaaataagcaaaagcgtcccaggagccgtactctgacagctgtgcacgatgccatccttgaggacttggtcttcccaagcgaaattgtgggcaagagaatccgcgtcaaactagatggcagccggctcataaaggttcatttggacaaagcacagcagaacaatgtggaacacaaggttgaaactttttctggtgtctataagaagctcacgggcaaggatgttaattttgaattcccagagtttcaattgtaaacaaaaatgactaaataaaaagtatatattcacagtaaaaaaaaaaaaaaaaaa

SEQ ID NO: 429 - DNA, 1720 bp, Homo Sapiens
actgcagggtgcgaaggggccggcgccgctgccgagttacgagtcggcgaaagcggcgggaagttcgtactgggcagaacgcgacgggtctgcggcttaggtgaaaatgcctcgtgtaaaagcagctcaagctggaagacagagctctgcaaagagacatcttgcagaacaatttgcagttggagagataataactgacatggcaaaaaaggaatggaaagtaggattacccattggccaaggaggctttggctgtatatatcttgctgatatgaattcttcagagtcagttggcagtgatgcaccttgtgttgtaaaagtggaacccagtgacaatggacctctttttactgaattaaagttctaccaacgagctgcaaaaccagagcaaattcagaaatggattcgtacccgtaagctgaagtacctgggtgttcctaagtattgggggtctggtctacatgacaaaaatggaaaaagttacaggtttatgataatggatcgctttgggagtgaccttcagaaaatatatgaagcaaatgccaaaaggttttctcggaaaactgtcttgcagctaagcttaagaattctggatattctggaatatattcacgagcatgagtatgtgcatggagatatcaaggcctcaaatcttcttctgaactacaagaatcctgaccaggtgtacttggtagattatggccttgcttatcggtactgcccagaaggagttcataaagaatacaaagaagaccccaaaagatgtcacgatggcactattgaattcacgagcatcgatgcacacaatggcgtggccccatcaagacgtggtgatttggaaatacttggttattgcatgatccaatggcttactggccatcttccttgggaggataatttgaaagatcctaaatatgttagagattccaaaattagatacagagaaaatattgcaagtttgatggacaaatgttttcctgagaaaaacaaaccaggtgaaattgccaaatacatggaaacagtgaaattactagactacactgaaaaacctctttatgaaaatttacgtgacattcttttgcaaggactaaaagctataggaagtaaggatgatggcaaattggacctcagtgttgtggagaatggaggtttgaaagcaaaaacaataacaaagaagcgaaagaaagaaattgaagaaagcaaggaacctggtgttgaagatacggaatggtcaaacacacagacagaggaggccatacagacccgttcaagaaccagaaagagagtccagaagtaattcagatgctgtgaaccagatttccttttctttgttttcttttgacttttttctccttttctatttgaactgttttattttcctgtgagtcttgcgaggtggaagtaatgattaaatactcatgtgttcagaaaacataaactttttttataaaaatattttgtacaattcattaaaggctaatttatgaaatttgaaaatcttcaggttatactccttaagttatcccaaagccgtgtgtttgtgatgttttggagtacatatatatgaaaattattatgacacgcacttttctaatcattgtacatttctcagagtggataaaaatgtttgacaaagtcctcacttttaaggaaatgcaaagcttaaaataaaactctcttttgtttgatgcaaacacacagtaaaaaaaaaaaaaaaaaa

SEQ ID NO: 430 - DNA, 603 bp, Homo Sapiens
gaaaagcggccagggtggcccctagctttccttttccggttgcggcgccgcgcggtgaggttgtctagtccacgctcggagccatgccgtccaagggcccgctgcagtctgtgcaggtcttcggacgcaagaagacagcgacagctgtggcgcactgcaaacgcggcaatggtctcatcaaggtgaacgggcggcccctggagatgattgagccgcgcacgctacagtacaagctgctggagccagttctgcttctcggcaaggagcgatttgctggtgtagacatccgtgtccgtgtaaagggtggtggtcacgtggcccagatttatgctatccgtcagtccatctccaaagccctggtggcctattaccagaaatatgtggatgaggcttccaagaaggagatcaaagacatcctcatccagtatgaccggaccctgctggtagctgaccctcgtcgctgcgagtccaaaaagtttggaggccctggtgcccgcgctcgctaccagaaatcctaccgataagcccatcgtgactcaaaactcacttgtataataaacagtttttgagggattttaaagtttcaagaaaaaaaaaaaaaaa

SEQ ID NO: 431 - DNA, 2644 bp, Homo Sapiens
gcgctcgccacgcccatgcctccgtcgctgcgcggcccaccccggatgtcagccccccgcgccgaccagaatccgtgaacatggcgaacgaggttatcaagtgcaaggctgcagttgcttgggaggctggaaagcctctctccatagaggagatagaggtggcacccccaaaggctcatgaagttcgaatcaagatcattgccactgcggtttgccacaccgatgcctataccctgagtggagctgatcctgagggttgttttccagtgatcttgggacatgaaggtgctggaattgtggaaagtgttggtgagggagttactaagctgaaggcgggtgacactgtcatcccactttacatcccacagtgtggagaatgcaaattttgtctaaatcctaaaactaacctttgccagaagataagagtcactcaagggaaaggattaatgccagatggtaccagcagatttacttgcaaaggaaagacaattttgcattacatgggaaccagcacattttctgaatacacagttgtggctgatatctctgttgctaaaatagatcctttagcacctttggataaagtctgccttctaggttgtggcatttcaaccggttatggtgctgctgtgaacactgccaagttggagcctggctctgtttgtgccgtctttggtctgggaggagtcggattggcagttatcatgggctgtaaagtggctggtgcttcccggatcattggtgtggacatcaataaagataaatttgcaagggccaaagagtttggagccactgaatgtattaaccctcaggattttagtaaacccatccaggaagtgctcattgagatgaccgatggaggagtggactattcctttgaatgtattggtaatgtgaaggtcatgagagcagcacttgaggcatgtcacaagggctggggcgtcagcgtcgtggttggagtagctgcttcaggtgaagaaattgccactcgtccattccagctggtaacaggtcgcacatggaaaggcactgcctttggaggatggaagagtgtagaaagtgtcccaaagttggtgtctgaatatatgtccaaaaagataaaagttgatgaatttgtgactcacaatctgtcttttgatgaaatcaacaaagcctttgaactgatgcattctggaaagagcattcgaactgttgtaaagatttaattcaaaagagaaaaataatgtccatcctgtcgtgatgtgataggagcagcttaacaggcagggagaagcgcctccaacctcacagcctcgtagagcttcacagctactccagaaaatagggttatgtgtgtcattcatgaatctctataatcaaggacaaggataattcagtcatgaacctgttttctggatgctcctccacataaataattgctagtttattaaggaatattttaacataataaaagtaatttctacatttgtgtggaaattgtcttgttttatgctgtcatcattgtcacggtttgtctgcccattatcttcattctgcaagggaaagggaaaggaagcagggcagtggtgggtgtctgaaacctcagaaacataacgttgaacttttaagggtctcagtccccgttgattaaagaacagatcctagccatcagtgacaaagttaatcaggacccaagtctgcttctgtgatattatcttgaagggaggtactgtgccttgttcatacctgtaccccaaattcctaggatggcatctgcccttcagggggcactaaaatgtattattgaaacagcattctgggcttaaataggtgtatgtatgtgttggttgtgactgtactatttctagtatagtgaactacatactgaatatccaagttctcagcacctacttttgtcaaatcttaacattttgccacttcgagatcacattgccattcctcccctccagaggtaacaattatccacaatttgatgtttatcattcctgtgttgttgtactttcactgtgtataacctaaaccatctactctttagtactgttttatatatttttaagcctcatacttgctcattctacagcttttttcactcattattgtataattatatctgaagctctcgttcattaattttagtcctgtgtagcagaattcaattacgggaactaccataatttatctgttctccagttgaaggcatgaagttgttgccagtttctgtattataacactgtagtggaacattcttctgcattgggctcactgcgtgttacctaagacgtatcacagaataaacacatttagccttatagacattgccaaattgctcttcaaagtaaatgtgagtttttgtgaattacatgagtatggaatggtgttttattatgactttagtttgcattttcctcaattctcgttaaatccttcattctaatggacattttattgtgaagaacctgttcatatcctgtgctcaactttgtattgaattatttttctctgaataatttttaggagttcttttattctagacatcaatcatttgtcagttttatatgttgcaaatatcttctagtctatcttgtgacttttctttttactttatggtattttgttgaataaagttttaatgtagtcacataaa

SEQ ID NO: 432 - DNA, 3325 bp, Homo Sapiens
ggggtccttggctgggcggggcttgctcgcggtggcttgtggctccttcctgcggtgcttctctctttcgctcaggcccgtggcgccgacaggatgggcaagtgtcgtggacttcgtactgctaggaagctccgtagtcaccgacgagaccagaagtggcatgataaacagtataagaaagctcatttgggcacagccctaaaggccaacccttttggaggtgcttctcatgcaaaaggaatcgtgctggaaaaagtaggagttgaagccaaacagccaaattctgccattaggaagtgtgtaagggtccagctgatcaagaatggcaagaaaatcacagcctttgtacccaatgacggttgcttgaactttattgaggaaaatgatgaagttctggttgctggatttggtcgcaaaggtcatgctgttggtgatattcctggagtccgctttaaggttgtcaaagtagccaatgtttctcttttggccctatacaaaggcaagaaggaaagaccaagatcataaatattaatggtgaaaacactgtagtaataaattttcatatgccaaaaaatgtttgtatcttactgtcccctgttctcaccacgaagatcatgttcattaccaccaccacccccccttattttttttatcctaaaccagcaaacgcaggacctgtaccaattttaggagacaataagacagggttgtttcaggattctctagagttaataacatttgtaacctggcacagtttccctcatcctgtggaataagaaaatgggatagatctggaataaatgtgcagtattgtagtattactttaagaactttaagggaacttcaaaaactcactgaaattctagtgagatactttcttttttattcttggtattttccatatcgggtgcaacacttcagttaccaaatttcattgcacatagattatcttaggtacccttggaaatgcacattcttgtatccatcttacaggggcccaagatgataaatagtaaactcaaaattgctccccactctgtttattatttaaaggtgtcaggatctgtgttgtaatgtgtctacattaatgtgtttaggagaatacaggcattggatcatttagttgatggaagtatatgccaggcaagggagataaggtatacgacaagactgatgttttcagtatcttctcatgaggttgtcagagaccttcatgtcttcaaagactagtcagcaaatgaagtggtttagtgtagagacaagattggttgtgttttgataatttaagctaggtattgagtacatgtggattttgctgtccacaaatacttgtttcagagttttcatggatacagtggcatggttgaaatgaagctgtgagccttctgctttaaatctgatgtaagaaactcctgttaacaaatagtaagtatgggttaattagccctttgatcaaagcctagctttacattgtttaggatctttggaaaacaattggtttggttgcccactttccgtaggatcaagagcagaacctttcacatggcacagaagaacccaggttgcgcttcatacctgcatattccagccttagcctgccatttctctccttggcactttgtgctccagcaacactggtctcagttggtcatcctcaaacttgggttccatatccagcctcaggacctctgttcctgttactatggttccttgcatgtcgcctgctcttactaaagagctcgtgtgttttccagcacacttcggtttatctcttgatgatgatgctagtctctccctccgcaagggcggaaaggctgcctgttggtttgtaccagtgtttcctaacgtgtagctgcagtcagtatttggctaagctgttcccaggggctcaacagatgctttcggatgagccttaactgacccaatcctttgtgatgcgggagagattgctaggcctcgctcacctggccagaaccagggaaagaggccgcggttgcagcgcgattccaggccctgggcgtcaggcgcggggtgggcagctctccccgggcggtggggcccttgtgaccgcgaggcggggcgcaccaggaagggagtgggacagcgcgggcgcccagggatgtggcctggttacctgccttctctgatacgtcaagacaccttcaacaatggcttgcagctgtaccctgttggctgcacccaggacgcccttttcactgctaagcagtcctacctgaggcccaggggctgccagattgacccataaataatctccggcgcctcagatccagaagctgctgagcctgatcttagtgccttctcctttctctgtgtggccccccagcccctttccccactgccttgtgtccaaggccctttccttcatgtatccatggaggagagacaaaaatacacatcaataaaataagatagggaatccataaatagacattcagaagtatggccaacggatttatcttaaaaccaatggaggaagaagagtttcaataaatgttgtggacttccatttgtcaaagaccaaaacaaaggaaccccaaccttacatgtaatacaaacttaactcaaaatggatcatatatctaaatgtaaaatggaaagctataaaactgaaaacagactatctttacaacctaggcgtaggtatagtttttagacattacaccaaaagcacatgccgtaaaagaaaaaatagataaattggtggatttcattaaaattaaaaaactttttctctctgaaaaatcctgttaagctgggcgctgtggttcatgcctgtaatcccagcactttgggaggctgagttgggaagaaattaatagcttgaggccaggagttcaagatcatcctgggcagcaaagtcatacactcttgagggaagagagagaccttctcatattgttttatattgttttatactcagtacctgttttaagaaaaaaacaaggaagtgaaatcaaagacaggcagcccggcaccaggcctgaaaccagccctgggcctgcctggcctaaacctagtagttaaaaatcaacttacgacttagaacctgatgttatccgtagattccaagcattgtataaaaaaattgtgaaactccctgttgtgttctgtaccagtgcatgaaacccctgtcacatatcccctagattgctcaatcaatcacgaccctttcatgtgaaatctttagtgttgtgagcccttaaaagggacagaaattgtgcacttgaggagctcagattttaaggctgtagcttgccgatgctcccagctgaataaagcccttccttctacaaaaaaaaaaaaa

SEQ ID NO: 433 - DNA, 852 bp, Homo Sapiens
gagtcacgtgatgcatgtcatggccgcctccatggcccggggaggcgtgagtgccagggttctactgcaggctgccaggggcacctggtggaacagacctgggggcacttccgggtcgggggagggggtggcgctggggacaaccagaaagtttcaagcgacaggctcgcgcccggctggagaggaggacgcgggcggcccggagcggcccggggacgtggtgaacgtggtgttcgtagaccgctcaggccagcggatcccagtgagtggcagagtcggggacaatgttcttcacctggcccagcgccacggggtggacctggaaggggcctgtgaagcctccctggcctgctccacctgccatgtgtatgtgagtgaagaccacctggatctcctgcctcctcccgaggagagggaagacgacatgctagacatggcccccctcctccaggagaactcgcggctgggctgccagattgtgctgacaccggagctggaaggagcggaattcaccctgcccaagatcaccaggaacttctacgtggatggccatgtccccaagccccactgacatgaacacctggaccattccacattgccatggccccagggcccagattgagggaatagccaggtgccagccctgcccagagtgcggacaggcccgggagagacgtggaagcccctgtgaaggacaacacccctgcttgggagagagtcccatgtccaggctctggtggggacagggcccctagtggggtggccttccccaggcccctgagaatcagggtttgagtaggagtggactcatattggagctgcaataaatcgataacacaggcaaaaaaaaaa

SEQ ID NO: 434 - DNA, 1053 bp, Homo Sapiens
gaaacccggaagtggaactctgagccattcagcgtttgggtgaagacggaggcgggttctacagagacgtaggctgtcagggagtgtttatttcgcgtccgcttctgtttctccgcgcccctgtgctgccccgactcacatactcgtccagaaccggcctcagcctctccgcgcagaagtttcccggagccatggccgagtactcctacgtgaagtctaccaagctcgtgctcaagggaaccaagacgaagagtaagaagaaaaagagcaaagataagaaaagaaaaagagaagaagatgaagaaacccagcttgatattgttggaatctggtggacagtaacaaactttggtgaaatttcaggaaccatagccattgaaatggataagggaacctatatacatgcactcgacaatggtctttttaccctgggagctccacacaaagaagttgatgagggccctagtcctccagagcagtttacggctgtcaaattatctgattccagaatcgccctgaagtctggctatggaaaatatcttggtataaattcagatggacttgttgttgggcgttcagatgcaattggaccaagagaacaatgggaaccagtctttcaaaatgggaaaatggctttgttggcctcaaatagctgctttattagatgcaatgaagcaggggacatagaagcaaaaagtaaaacagcaggagaagaagaaatgatcaagattagatcctgtgctgaaagagaaaccaagaaaaaagatgacattccagaagaagacaaaggaaatgtaaaacaatgtgaaatcaattatgtaaagaaatttcagagcttccaagaccacaaacttaaaataagtaaagaagacagtaaaattcttaaaaaggctcggaaagatggatttttgcatgagacgcttctggacaggagagccaaattgaaagccgacagatactgcaagtgactgggatttttgtttctgccttatctttctgtgtttttttctgaataaaatattcagaggaaatgcttttacagaaaaaaaaaaa

SEQ ID NO: 435 - DNA, 3701 bp, Homo Sapiens
gacccggatttaaagagacaggcgctccaaccgtcgtgggctgcccgcggcctgtaatgagcaagttccgaggcctacggtgagcgccggagccggagaggcagctatatgtctttggctttcaagatcttctttccacaaaccctccgtgcactcagccgaaaagaactgtgcctattccgaaaacatcactggcgtgatgtaagacaattcagccagtggtcagaaacagatctgcttcatggacatcccctcttcctgagaagaaagcctgttctatcattccagggaagccatctaagatcacgtgccacctaccttgttttcttgccagggttgcatgtgggactctgcagtggcccctgtgagatggctgagcaacggttctgtgtggactatgccaagcgtggcacagctggctgcaaaaaatgcaaggaaaagattgtgaagggcgtatgccgaattggcaaagtggtgcccaatcccttctcagagtctgggggtgatatgaaagagtggtaccacattaaatgcatgtttgagaaactagagcgggcccgggccaccacaaaaaaaatcgaggacctcacagagctggaaggctgggaagagctggaagataatgagaaggaacagataacccagcacattgcagatctgtcttctaaggcagcaggtacaccaaagaagaaagctgttgtccaggctaagttgacaaccactggccaggtgacttctccagtgaaaggcgcctcatttgtcaccagtaccaatccccggaaattttctggcttttcagccaagcccaacaactctggggaagccccctcgagccccacccctaagagaagtctgtcttcaagcaaatgtgaccccaggcataaggactgtctgctacgggagtttcgaaagttatgcgccatggtggccgataatcctagctacaacacgaagacccagatcatccaggacttccttcggaaaggctcagcaggagatggtttccacggtgatgtgtacctaacagtgaagctgctgctgccaggagtcattaagactgtttacaacttgaacgataagcagattgtgaagcttttcagtcgcatttttaactgcaacccagatgatatggcacgggacctagagcagggtgacgtgtcagagacaatcagagtcttctttgagcagagcaagtctttccccccagctgccaagagcctccttaccatccaggaagtggatgagttccttctgcggctgtccaagctcaccaaggaggatgagcagcaacaggccctacaggacattgcctccaggtgtacagccaatgaccttaaatgcatcatcaggttgatcaaacatgatctgaagatgaactcaggtgcaaaacatgtgttagacgcccttgaccccaatgcctatgaagccttcaaagcctcgcgcaacctgcaggatgtggtggagcgggtccttcacaacgcgcaggaggtggagaaggagccgggccagagacgagctctgagcgtccaggcctcgctgatgacacctgtgcagcccatgttggcggaggcctgcaagtccgttgagtatgcaatgaagaaatgtcccaatggcatgttctctgagatcaagtacgatggagagcgagtccaggtgcataagaatggagaccacttcagctacttcagccgcagtctcaagcccgtccttcctcacaaggtggcccactttaaggactacattccccaggcttttcctgggggccacagcatgatcttggattctgaagtgcttctgattgacaacaagacaggcaaaccactgccctttgggactctgggagtacacaagaaagcagccttccaggatgctaatgtctgcctgtttgtttttgattgtatctactttaatgatgtcagcttgatggacagacctctgtgtgagcggcggaagtttcttcatgacaacatggttgaaattccaaaccggatcatgttctcagaaatgaagcgagtcacaaaagctttggacttggctgacatgataacccgggtgatccaggagggattggaggggctggtgctgaaggatgtgaagggtacatatgagcctgggaagcggcactggctgaaagtgaagaaagactatttgaacgagggggccatggccgacacagctgacctggtggtccttggagccttctatgggcaagggagcaaaggcggcatgatgtcaatcttcctcatgggctgctacgaccctggcagccagaagtggtgcacagtcaccaagtgtgcaggaggccatgatgatgccacgcttgcccgcctgcagaatgaactagacatggtgaagatcagcaaggaccccagcaaaatacccagctggttgaaggtcaacaagatctactatcctgacttcatcgtcccagacccaaagaaagctgccgtgtgggagatcacaggggctgaattctccaaatcggaggctcatacagctgacgggatctccatccgattccctcgctgcacccgaatccgagatgataaggactggaaatctgccactaaccttccccaactcaaggaactgtaccagttgtccaaggagaaggcagacttcactgtagtggctggagatgaggggagctccactacagggggtagcagtgaagagaataagggtccctcagggtctgctgtgtcccgcaaggcccccagcaagccctcagccagtaccaagaaagcagaagggaagctgagtaactccaacagcaaagatggcaacatgcagactgcaaagccttccgctatgaaggtgggggagaagctggccacaaagtcttctccagtgaaagtaggggagaagcggaaagctgctgatgagacgctgtgccaaacaaaggtattgctggacatcttcactggggtgcggctttacttgccaccctccacaccagacttcagccgtctcagacgctactttgtggcattcgacggggacctggtacaggaatttgatatgacttcagccacgcacgtgctgggtagcagggacaagaaccctgcggcccagcaggtctccccagagtggatttgggcatgtatccggaaacggagactggtagctccctgctaggtttgctgtcttccctctccctcaggccatactctcctttaccatactactggactggactcaggctggaggcagatagacacagtatagggggaatgggcttgcttctcccaaacccaccagttctccactgtctcttctggaccaggaattagttgctgtgggtgccacagctgaagtcagtttgtcttgctggtttaaatagatctttcagagctgggtgctgggtttgccatctttttgttttctttgaaaagcagcttagttaccctttttataaataaaatatcttgcagttatctttgtcctttccccacctacacccccaataatttccctagagattaaggagtaaaggctgggctatggcagctctgtccacaaagccttctctcccatccttgcctgttcctttgtacttccaggctcattttaaagttgtatttaaaggactgccctcggaaatgcttctgtttagcggaacttgtattcagcctgacacgctttgccaggaacaaacctcatgtgaaagaaaacaaaatgaatttttttactttcttctc

SEQ ID NO: 436 - DNA, 3718 bp, Homo Sapiens
cgcctcaggtcggccgcggactacaaatggacgagagaggcggccgtccattagttagcggctccggagcaacgcagccgttgtccttgaggccgacgggcctgacgcgggcgggttgaacgcgctggtgaggcggtcacccgggctacggcggccggcagggggcagtggcggccgttgtctagggcccggaggtggggccgcgcgcctcgggcgctacgaacccggcaggcccacgcttggctgcggccgggtgcgggctgaggccatgggcgaccgcggcagctcccggcgccggaggacagggtcgcggccctcgagccacggcggcggcgggcctgcggcggcggaagaggaggtgcgggacgccgctgcgggccccgacgtgggagccgcgggggacgcgccagccccggcccccaacaaggacggagacgccggcgtgggcagcggccactgggagctgaggtgccatcgcctgcaggattctttattcagctctgacagtggcttcagcaactaccgtggcatcctgaactggtgtgtggtgatgctgatcttgagcaatgcccggttatttctggagaacctcatcaagtatggcatcctggtggaccccatccaggtggtttctctgttcctgaaggatccctatagctggcccgccccatgcctggttattgcggccaatgtctttgctgtggctgcattccaggttgagaagcgcctggcggtgggtgccctgacggagcaggcgggactgctgctgcacgtggccaacctggccaccattctgtgtttcccagcggctgtggtcttactggttgagtctatcactccagtgggctccctgctggcgctgatggcgcacaccatcctcttcctcaagctcttctcctaccgcgacgtcaactcatggtgccgcagggccagggccaaggctgcctctgcagggaagaaggccagcagtgctgctgccccgcacaccgtgagctacccggacaatctgacctaccgcgatctctactacttcctcttcgcccccaccttgtgctacgagctcaactttccccgctctccccgcatccggaagcgctttctgctgcgacggatccttgagatgctgttcttcacccagctccaggtggggctgatccagcagtggatggtccccaccatccagaactccatgaagcccttcaaggacatggactactcacgcatcatcgagcgcctcctgaagctggcggtccccaatcacctcatctggctcatcttcttctactggctcttccactcctgcctgaatgccgtggctgagctcatgcagtttggagaccgggagttctaccgggactggtggaactccgagtctgtcacctacttctggcagaactggaacatccctgtgcacaagtggtgcatcagacacttctacaagcccatgcttcgacggggcagcagcaagtggatggccaggacaggggtgttcctggcctcggccttcttccacgagtacctggtgagcgtccctctgcgaatgttccgcctctgggcgttcacgggcatgatggctcagatcccactggcctggttcgtgggccgctttttccagggcaactatggcaacgcagctgtgtggctgtcgctcatcatcggacagccaatagccgtcctcatgtacgtccacgactactacgtgctcaactatgaggccccagcggcagaggcctgagctgcacctgagggcctggcttctcactgccacctcacacccgctgccagagcccacctctcctcctaggcctcgagtgctggggatgggcctggctgcacagcatcctcctctggtcccagggaggcctctctgcccctatggggctctgtcctgcacccctcagggatggcgacagcaggccagacacagtctgatgccagctgggagtcttgctgaccctgccccgggtccgagggtgtcaataaagtgctgtccagtgacctcttcagcctgccaggggcctggggcctggtggggggtatggccacacccacaagggcgagtgccagagctgtgtggacagctgtcccaggacctgccggggagcagcagctccactgcagcagggcgggcatggccggtagggggagtgcaaggccaggcagacgcccccattccccacactcccctacctagaaaagctcagctcaggcgtcctctcctggtgctactcctgctgggtgtgcgggaatcggcactctggccctcagtgcaggatggtcaacttgcacccaccgtgctcagcttcagcttgggaagaggtcggccctgggtttgcgggaagtgggctccagccaggatggcccagggatgggcagtccacagggcctttctggtgtgggtctggtgagccgaggggctacggtacacaatggctatgtccatggctattcgccttggggcagggctcggtttggcagcctctttccttcacttggaacctgggcagccaggtgggctggtggctctcagctgccctccacgaggttggggcacccctgatccccaggcctgccttgccctctgctcttctggcaccaggctgggcagtgcagacagcgcagccctgcagccttcaggacaccttgttcccaggccctgcaatccaccaagctggatagatggggccccccttgatggtagcgggaggtcaggggtaaccccagggccctgctgctgccttaccttgctggggtgactgcttgattaaagaccccaagactggaccaggccctggtgtccccagacctgcagctatggcccaacaaggcaggtgtttgaggaggccctgcacagggtcccaggactgcaccaggggcctcatcagcaacctgctgaactggtggtgtgaggggagggtgggctcccttggtggtatcctccctctaccccagtgggggctggtgggccctgagatggaggcatctccttgggccctgctgaggatggcagtagtgggtgagctcctggtggggggatgggtgtggggccgactcctccatcccacatgggctcctgtgcctctccctatcagttggccagtggagctcgagaacaaactgttgctgccagataaagcagcaaagcctgctccactgcccagcgcaggcccccttcccttcctccaccaggctgagtggagaaccctaaagctacgggacaggctcccgttccccgtgcctacacagggtgctggctctggcagaaagacagtgtgcccgccccgcatcacctgtccgagtgcgaacaccttgggaagggggttcctggtggtcctgtgacaaccagagacccccagggccaaggtgaggcgcccacccctggtccctcaataaagaactgcaagcacatgctggtcctggggagtcgggcaggcacggagctagctgcaagcatccgtcttcccccaggaggccactgcagcccggcccttctgtgccctgggcccctcctcattgcagcaccacccaccgcaccaccctgggacagaggaaacacatggaggccatagcatagagcctgtctgtttatagatctctgcctgtcttgtccgtccatccactgtgtgtatatatctgtgtatctctgtggagcggggaacgggacagttgtgtaaaaatccaaaatacaattctgactatgaacaaaaaaaaaaaaaaa

SEQ ID NO: 437 - DNA, 6846 bp, Homo Sapiens
ctcgcgccaggcgagtctccgcgtctccctcgcgaactcggtgaaaggaattggcgccgttcgacaccaggcggatccgctctgcagcacgaacccatctccagccgcagccgcagccgccgcccgggccgaggagcagccgcagcagccgccaccagtggccgagtgagcggagccgagtttgaggcagcgcctagcggtgaatcggggccctcaccatgagttcctcgcctgttaatgtaaaaaagctgaaggtgtcggagctgaaagaggagctcaagaagcgacgcctttctgacaagggtctcaaggccgagctcatggagcgactccaggctgcgctggacgacgaggaggccgggggccgccccgccatggagcccgggaacggcagcctagacctgggcggggattccgctgggcgctcgggagcaggcctcgagcaggaggccgcggccggcggcgatgaagaggaggaggaagaggaagaggaggaggaaggaatctccgctctggacggcgaccagatggagctaggagaggagaacggggccgcgggggcggccgactcgggcccgatggaggaggaggaggccgcctcggaagacgagaacggcgacgatcagggtttccaggaaggggaagatgagctcggggacgaagaggaaggcgcgggcgacgagaacgggcacggggagcagcagcctcaaccgccggcgacgcagcagcaacagccccaacagcagcgcggggccgccaaggaggccgcggggaagagcagcggccccacctcgctgttcgcggtgacggtggcgccgcccggggcgaggcagggccagcagcaggcgggaggtaagaagaaggcggaaggcggcggaggcggcggtcgccccggggctccggcggcgggggacggcaaaacagaacagaaaggcggagataaaaagaggggtgttaaaagaccacgagaagatcatggccgtggatattttgagtacattgaagagaacaagtatagcagagccaaatctcctcagccacctgttgaagaagaagatgaacacttcgatgacacagtggtttgtcttgatacttataattgtgatctacattttaaaatatcaagagatcgtctcagtgcttcttcccttacaatggagagttttgcttttctttgggctggaggaagagcatcctatggtgtgtcaaaaggcaaagtgtgttttgagatgaaggttacagagaagatcccagtaaggcatttatatacaaaagatattgacatacatgaagttcgtattggctggtcactaactacaagtggaatgttacttggtgaagaagaattttcttatgggtattctctaaaaggaataaaaacatgcaactgtgagactgaagattatggagaaaagtttgatgaaaatgatgtgattacatgttttgctaactttgaaagtgatgaagtagaactctcgtatgctaagaatggacaagatcttggcgttgccttcaaaatcagtaaggaagttcttgctggacggccactgttcccgcatgttctctgccacaactgtgcagttgaatttaattttggtcagaaggaaaagccatattttccaatacctgaagagtatactttcatccagaacgtccccttagaggatcgagttagaggaccaaaggggcctgaagagaagaaagattgtgaagttgtgatgatgattggcttgccaggagctggaaaaactacctgggttactaaacatgcagcagaaaatccagggaaatataacattcttggcacaaatactattatggataagatgatggtggcaggttttaagaagcaaatggcagatactggaaaactgaacacactgttgcagagagccccccagtgtcttgggaaatttattgagattgctgcccgaaagaagcgaaattttattctggatcagacaaatgtgtctgctgctgcccagaggagaaaaatgtgcctgtttgcaggcttccagcgaaaagctgttgtagtttgcccaaaagatgaagactataagcaaagaacacagaagaaagcagaagtagaggggaaagacctaccagaacatgcggtcctcaaaatgaaaggaaactttaccctcccagaggtagctgagtgctttgatgaaataacctatgttgaacttcagaaggaagaagcccaaaaactcttggagcaatataaggaagaaagcaaaaaggctcttccaccagaaaagaaacagaacactggctcaaagaaaagcaataaaaataagagtggcaagaaccagtttaacagaggtggtggccatagaggacgtggaggattcaatatgcgtggtggaaatttcagaggaggagcccctgggaatcgtggcggatataataggaggggcaacatgccacagagaggtggtggcggtggaggaagtggtggaatcggctatccataccctcgtgcccctgtttttcctggccgtggtagttactcaaacagagggaactacaacagaggtggaatgcccaacagagggaactacaaccagaacttcagaggacgaggaaacaatcgtggctacaaaaatcaatctcagggctacaaccagtggcagcagggtcaattctggggtcagaagccatggagtcagcattatcaccaaggatattattgaatacccaaataaaacgaactgatacatatttctccaaaaccttcacaagaagtcgactgttttctttagtaggctaactttttaaacattccacaagaggaagtgcctgcgggttccttttttagaagctttgtgggttgattttttttcttttcttttttgtacatttttaattgcagtttaaaagtgaatcgtaagagaacctcagcattgtgcacgataagagaatgtgtcagtatttcagggttctacattttatctgtaaaatgtgacttttttttttttttatcacaacagaagtaaaatgttgctttgtacctggtgtcttttattaagaatttactccccccatttctcacagagaataacagtcgggagtcattgtcacaatataatagaaatgttagcaaccagattcatgtaaggactaagtggtcctcatgaattgcattaagactctgtactgctcatattacactccatcctctctgtagtttgctgggtagtggagggggtaagctaaatcatagtttctgacaataactgggaaggttttttcttaaaataacaatggaattggtataattgggattgaaaactaaaacttggaactaagatagagaagatggagtgtatgtagaagggctgttaaaaatgtaaaacttggttgcattatttgtggaggctcaaacttgtgaaggttaataccataatttttccatttgttctgcattttgattctgaaaagaaagctggctttgcccatttcttattaaaaaaacttgttgtaaatccagttgtctaatgggatctatatgaagttagccatgtctgtatgcccttctcccacaaaatactgtataactagtgtgcttgtagtagttaactccaccatctttgtaagctaatgaaattgtgagtcacccatttatatcttaatttttaatcatgtcagttcttgaatgggtatctccttagcctgctgatttctttttctttctaaagaaagtgggtggagaaattaatttagacgtttgtttgcaataaaaagaattcattttactcttgttttgggattctcgccatcaaggttcaaaatccctttatataactcccaagaggagaaatttattaagtgtgtgctttctggacagcttattctttactctgcatagaacatttaggttttaaaaacttaaatgtatactgacaattgatacataattatgaagtaaagttgaattcttcccttcccctcccccccagacaacttttaacatatttaatgaggggaaaaggtactggctgggagaagttaacactgagtttatcatctttacagaatgctaatgctgtcctcaactgattattttatatacatatatatgatacatgaaactctgggatcagatgcttttagaagccatcatgcaagccagtcattgatgtcactgctacacaacactgctaacttgactgtagctatgtaataacattagatcccctaattgtaattatattgggtttgcacagaacactttaatcttcccctcaccaatgtgaagtgaggaatcaggagtcaaactgtagaactaaaatttgacttcagtctagcgtttccttggtgtttttaggttgctttggtaagtttaggtttgctatatttctgattgcttagaattttgttttagccctttaaaatcagatcataaatatgaattcatacttctaaggaattttcttgctataagctggagtttaggtgatgtataggttcagttgagacatttttggaacaggcaaatccttagttaacataagatatttaacagttgaagatagtgtcatggatttttatcttttttagcaagtaatgctaagaaccactggcctgagctactactcttcagtatacattattaggattgcatagacttactagaggaacagtttcaggttttgatgctaatcagtgttgtgtcctaaagttgtcctttgtgcctttaaaaagttttggatatatcttctagtttaaaattgcttattaaggaattcattttataattgcagtgggaaagtaatggtcaagtaacactaggtagactatcatgcctgtttagcccagagaatttggggggagagagaatagataaaaatggcacccagaaaaatgttaaaatctttagtcaagactagaattaatacaattgtctacacttgtatggcagaaataaccttataaagtgtttaaggaattcagagaagggaatgtaccaaataagcaacagggagaaaattaggtaagaagtaagatacgaacgagaaacctgatttattgctcatccttcccttgcctccctaatggcaagcaaaactctgaacatctgaaaaggatgtagttctggacaaatcctgactacccagaggaaactcactgtgagattgctgttgatttgaagggtgctttcactaaggttatattttaaagtagaataacacatgctgagtgtaaactggctttggattggtcagctgcagtagtacaaaaacagcatagaatttgagaaaactaaaactgctatgagatagctatgagaaaactaaaactgctatgagatagaaatgatgtaaaattatgtggaaagttttccctcatatactcacatacagcctttgaagggctctggctctgaccggttgatggccttgagcgagatgaaatcatgaaattgagtcaaatcaatttgacattgaaatgacaagaggaaactcttaaatacataaaaacaagctctcatttgcctaggatagatactgtcttaaaaataaagactgaacctagatgttctgagcactagcaacaaggtattttaacaagtttaaaggaattctctgaaaaagttataaaattattctaggaaacataaccataatagtgttttaagggactttcacctggggattttatattcatgaacagagtgtattctgtatttaaaatgtctcatttgtgggaattggatgacatgttttttgataaatttattcacaatataaattgactttttattctaggaccatgtgaataatgggttccattgcacaaatacaaatattttaatagcttcttaggcagtggtgtagacatcttggatataaataattgtagatcttgtatatttgatttttaaaaaactagaataaacagagaggcataaacatatcttagagtccaagtggtagtgtttagcattggatataataaatggatgttttacaaagtgtttccataattctcttcctatacataaatgtcttgttttcaaaagtggatggaacttggctgggtgtggtggctcacgcctgtaatcctagcactttgggaggccaaggcgggaggatcacttgagctcaggagtttgagaccatcctgggcaacatagtgagacctggtctcttgaaaaaaaaaaagtggatggaacttgtagcagagaattttatctacttctcaacctgcttcagaatacccatttgagatgttcccctggaaagatgaacacaatactgcatctgaagccatttcttcccacctaacattcttaaaatgattagagtctaaactttgtcattcattcctaattctggagctctgaggttgaggtgttcagagtttggtgaataattgggtttaagttttaacattttagtaataataaaagcaaacacatacatgttaaggcctgacaataggttgcaatacccatgcattgggactcatacccagcataaatggtgagggactgaacattagtgctttgagcaagaattggttaactacctgagatctctaaaacagtaatttgaattactaatacataaaccacaagtctcttcgaattgttaattgcctaaatttaccctaaaacttagttaacgctgcagtgcctttattaaagcttttttttgggggggggtgtgggcacagctactccataactttaaattttaaagcatgaaggtgatctagctagtgttagtgcttgagttggtagttacataggctgctcttgaatcgtcctgttttctttgcctagtattagcaccacaggtacatatttgtaaaataagcattaaaagtactttgtccagc

SEQ ID NO: 438 - DNA, 2754 bp, Homo Sapiens
agcagcgccgcagccggacgagaaagcggaagatggcggcggcggccgggaggccgtgaggagagcggcggctgcgagggcggccgatggcggccgggaggcgccctcggacacttgcgggtcgttagggcgcgacgctgggaggcatgtcggagcacgtggagcccgcagctccggggcccgggcccaacggcggcggcggcggcccggcccccgcgcgcgggcctcgcacccccaatctcaaccccaaccccctcatcaacgtgcgcgaccggctcttccacgcgctgttcttcaagatggctgtcacctattcgcggctcttcccgcccgccttccgccgtctcttcgagttcttcgtgctgctcaaggccctgtttgtgctcttcgtcctggcctacatccacatcgtcttctcccgctcgcccatcaactgcctggagcatgtgcgtgacaagtggccgcgtgagggcatcctgcgtgtggaagtgcggcacaactcgagccgcgcgcccgtcttcctacagttctgtgacagcggcggccgcgggagcttcccgggcctggccgtggaaccaggcagcaacctggacatggaagatgaggaggaggaagagctgaccatggagatgtttgggaacagctccatcaagtttgagctggacatcgagcccaaggtgttcaagccgccgagtagcacagaggccctgaatgacagccaggagttccccttccccgagacgcccaccaaagtgtggccgcaggacgagtacatcgtggagtactcactagagtatggcttccttcgcctgtcgcaggccacccgccagcgcctgagcatccccgtcatggtggtcaccctggaccccacgcgggaccagtgcttcggggaccgcttcagccgcctgctgctggatgagttcctgggctacgatgacatcctcatgtccagcgtgaagggcctggccgagaacgaggagaacaagggcttcctgcggaatgtggtgtcgggcgagcactaccgctttgtgagcatgtggatggcgcggacgtcctacctggccgccttcgccatcatggtcatcttcacgctgagcgtgtccatgctgctgcggtactcacaccaccagatcttcgtcttcatcgtggacctgctgcagatgctggagatgaacatggccatcgccttccccgcagcgcccctgctgaccgtcatcctggccctcgtcgggatggaggccatcatgtcggagttcttcaacgacaccaccaccgccttctacatcatcctcatcgtgtggctcgcggaccagtatgacgccatctgctgccacaccagcaccagcaagcggcattggctgcggttcttctatctctaccacttcgccttctatgcctatcactaccgcttcaatgggcagtatagcagcctggccctggtcacctcctggctcttcatccagcattccatgatctacttcttccaccactacgagctgcctgccatcctgcagcaggtccgcatccaggagatgctgcttcaggcgccgccactgggccccgggacccccacggcgctgcccgatgacatgaacaacaactcgggcgccccggctacagcccctgactctgccggccagccccccgccctgggccccgtctcgcctggggccagcgggagtcccgggcctgtggcagcggcgcccagctccctggtggccgcggcagcctcagtggcagcagctgccggtggtgacctgggttggatggcagagaccgctgccatcatcacagacgcctccttcctgtccggcctgagcgcctccctcctggagcggcgtccagccagcccgctgggccctgctgggggcctcccccacgccccccaggacagtgtccccccgagtgactccgcagcttctgacacaactcccctgggggctgcggtaggcgggcctagcccggcctccatggccccaacggaggcgccctcggaggtggggtcctgagccgcacagctgagccgcctctgacccctgctggctgggcctgaccttcccgagcccgtgggggtgggggaggccagccacctccttcctctgggactgcccagcctgtgtcgggggctttcagggtttcgtggggtttgcccggaaggcggctttcctccccctggtgtgaggtcgcgcccgaggcttgtacccgctagtgaggtgtttgagctggtcagcaaggagagggggtggggttccgcggaaggttctggaggggtcttggtaggtctgcagtgaaccgtcctgaggatggagtggggtcccatggtgcaggtctctgagcaaggcggaggtgtggaggagaggccggcttggggtggggcctcgcgccctagtgccggccggcctcagcccggctctgcctggtgctccctgcagtgccttctccatggccccgccctccccgcgtgtgcgccaggcttggggtccccgggagagcagagcttgcgcctcgggcatagggacgtggggtgcaggcgccaacatcagtggcagcagccagggccgtggtccagtcccactcggggatggagtgggccggcggccaaaccagtcactcggggaggaatgcggaggagcgctcattccattctatttaattgcagtgtacaaaattgtgtttgtatatagaataaactgtctgttgacagcggcaaaaaaaaaaaaaaaaaaaaaaaaaaaaaaaaaaaaaaaaaaaaaa

SEQ ID NO: 439 - DNA, 2176 bp, Homo Sapiens
cgcgcgcggccccgcccccgaaagtcggctcggctccgctccaatcccggaagtgcgcgcggccccgcccccgccggttcgcgtctctctgctgcggcgcggggaccgctgtgctctcggaaacggggtctctgggggatccagtgacgtgcccaaccacagagaccagacccctcctcctgtagagagtggtgctgccctctcgggatgtacctgcaggtggagacccgcaccagctcccgcctccatctgaagagggctccaggcatccggtcctggtccctgctggttggaatcttgtcgattggcctggctgctgcctactacagcggagatagcctgggctggaagctcttctacgtcacaggctgcctgtttgtggctgtgcagaacttggaggactgggaggaagccatcttcgacaagagcacagggaaggttgttttgaagacgttcagcctctacaagaagctgctgactcttttcagagctggccacgaccaggtggtggtcctgctccatgatgtccgtgatgtgagcgtggaggaggagaaggtccggtacttcgggaaaggctacatggtggtgctccggcttgcgacgggcttctcccaccccctcacgcagagtgcagtcatgggccaccgcagtgatgtggaagccatcgccaagctcatcaccagcttcctggagctgcactgccttgagagccccacagagctgtctcagagcagcgacagtgaggccggtgaccctgcaagccagagctgacagccccactgtgcctgagcccgtgcaccgcccacaggacccatggcacattcccggtgtgcctgagcccgtgcaccgcccacaggacccgtggcacattcccggtgtgcctgagcccgtgcaccgcccacaggacccgtggcacattcccggtgtgcctgagcccgtgcaccgcccacaggacccgtggcacattcccggtgtgcctgagcccgtgcaccgcccacaggacccgtggccttggcttcagttggtgcctccagccgagttggcctattgcctgctcatgctgctgcttgcacactgcatgaaacagcaggccagaccaggacatccagactttctccatcgtgaggcctgggcctgcctttctgcagccggaggtctcgccagccctggactcctgctttgggccacagcaagacctcgggcgagtggagaggcggggccaggccgggcccttgtgggtgctgatgctgcatgttgtccccgacacagcgtcctctccctggtggacatccccagcggtcaggtgcttccccaagggcagtgaggggtgaacatccagggcctacctggctgtgcacgctgcagccacactgtggaagctgcccctccccgaggacccgcctcccttgctgatgccaggatctcggcgcatagaccactctgccccagcggtcgtcacagaaaggtctctctgttcctcacactcagcttcagcataagctgtgaggccagaaaaaaggtcagctcttctagtatcgtgcagtgcttaaaaaccgggagctccagccgggcgcagtggttcatgccagtaatcccagcactttcggaggccgaggtgggaggattgcttgaggccaggagttcaagaccagcctgggcaacacagcaagatcctgtctttgtaaaaaaactaaccaaacaggaaaaactgggagattttctgcagaaattgagttccagcctctctcgaacctgggaagacctggcaggagggggctgggctctcggctacagacttctccccaccccgtaggagctgaacgccaaccatcctgacccgccagtgctcttggtctcctgagtgtacccaggtcctcccaggtgcggtgtgcaccgagcgcgcctggcctgatgccctggcctgtgagctggggactcctgggccctgtgagcccctaggcggcaggcccaggaatggctgggtaggacagggaacacctttgccccacgtctggctgtgacctcggtgaaagccgacaggagagagatgggaccctcctcctcagtagtggctgccagtccctcgttgcaggacagggtcatcataaccataaataacccttcacgtgtcaaaaaaaaaaaaaaaaaaaaaaaaaaaaaaaaaaaaaaaaaaaaa

SEQ ID NO: 440 - DNA, 3254 bp, Homo Sapiens
agcaggaagctcgcgccgccgtcgccgccgccgctcagcttccccgggcgcgtccaggacccgctgcgccaggcgcgccgtccccggacccggcgtgcgtccctacgaggaaagggaccccgccgctcgagccgcctccgccagccccactgcgaggggtcccagagccagccgcgcccgccctcgcccccggccccgcagccttcccgccctgcgcgccatgaacgcccccgagcggcagccccaacccgacggcggggacgccccaggccacgagcctgggggcagcccccaagacgagcttgacttctccatcctcttcgactatgagtatttgaatccgaacgaagaagagccgaatgcacataaggtcgccagcccaccctccggacccgcataccccgatgatgtcctggactatggcctcaagccatacagcccccttgctagtctctctggcgagccccccggccgattcggagagccggatagggtagggccgcagaagtttctgagcgcggccaagccagcaggggcctcgggcctgagccctcggatcgagatcactccgtcccacgaactgatccaggcagtggggcccctccgcatgagagacgcgggcctcctggtggagcagccgcccctggccggggtggccgccagcccgaggttcaccctgcccgtgcccggcttcgagggctaccgcgagccgctttgcttgagccccgctagcagcggctcctctgccagcttcatttctgacaccttctccccctacacctcgccctgcgtctcgcccaataacggcgggcccgacgacctgtgtccgcagtttcaaaacatccctgctcattattcccccagaacctcgccaataatgtcacctcgaaccagcctcgccgaggacagctgcctgggccgccactcgcccgtgccccgtccggcctcccgctcctcatcgcctggtgccaagcggaggcattcgtgcgccgaggccttggttgccctgccgcccggagcctcaccccagcgctcccggagcccctcgccgcagccctcatctcacgtggcaccccaggaccacggctccccggctgggtacccccctgtggctggctctgccgtgatcatggatgccctgaacagcctcgccacggactcgccttgtgggatcccccccaagatgtggaagaccagccctgacccctcgccggtgtctgccgccccatccaaggccggcctgcctcgccacatctacccggccgtggagttcctggggccctgcgagcagggcgagaggagaaactcggctccagaatccatcctgctggttccgcccacttggcccaagccgctggtgcctgccattcccatctgcagcatcccagtgactgcatccctccctccacttgagtggccgctgtccagtcagtcaggctcttacgagctgcggatcgaggtgcagcccaagccacatcaccgggcccactatgagacagaaggcagccgaggggctgtcaaagctccaactggaggccaccctgtggttcagctccatggctacatggaaaacaagcctctgggacttcagatcttcattgggacagctgatgagcggatccttaagccgcacgccttctaccaggtgcaccgaatcacggggaaaactgtcaccaccaccagctatgagaagatagtgggcaacaccaaagtcctggagatacccttggagcccaaaaacaacatgagggcaaccatcgactgtgcggggatcttgaagcttagaaacgccgacattgagctgcggaaaggcgagacggacattggaagaaagaacacgcgggtgagactggttttccgagttcacatcccagagtccagtggcagaatcgtctctttacagactgcatctaaccccatcgagtgctcccagcgatctgctcacgagctgcccatggttgaaagacaagacacagacagctgcctggtctatggcggccagcaaatgatcctcacggggcagaactttacatccgagtccaaagttgtgtttactgagaagaccacagatggacagcaaatttgggagatggaagccacggtggataaggacaagagccagcccaacatgctttttgttgagatccctgaatatcggaacaagcatatccgcacacctgtaaaagtgaacttctacgtcatcaatgggaagagaaaacgaagtcagcctcagcactttacctaccacccagtcccagccatcaagacggagcccacggatgaatatgaccccactctgatctgcagccccacccatggaggcctggggagccagccttactacccccagcacccgatggtggccgagtccccctcctgcctcgtggccaccatggctccctgccagcagttccgcacggggctctcatcccctgacgcccgctaccagcaacagaacccagcggccgtactctaccagcggagcaagagcctgagccccagcctgctgggctatcagcagccggccctcatggccgccccgctgtcccttgcggacgctcaccgctctgtgctggtgcacgccggctcccagggccagagctcagccctgctccacccctctccgaccaaccagcaggcctcgcctgtgatccactactcacccaccaaccagcagctgcgctgcggaagccaccaggagttccagcacatcatgtactgcgagaatttcgcaccaggcaccaccagacctggcccgcccccggtcagtcaaggtcagaggctgagcccgggttcctaccccacagtcattcagcagcagaatgccacgagccaaagagccgccaaaaacggacccccggtcagtgaccaaaaggaagtattacctgcgggggtgaccattaaacaggagcagaacttggaccagacctacttggatgatgagctgatagacacacaccttagctggatacaaaacatattatgaaacagaatgactgtgatctttgatccgagaaatcaaagttaaagttaatgaaattatcaggaaggagttttcaggacctcctgccagaaatcagacgtaaaagaagccattatagcaagacaccttctgtatctgacccctcggagccctccacagcccctcaccttctgtctcctttcatgttcatctcccagcccggagtccacacgcggatcaatgtatgggcactaagcggactctcacttaaggagctcgccacctccctcta

SEQ ID NO: 441 - DNA, 3300 bp, Homo Sapiens
atggcagtagccccgcgactgtttggggggctctgcttccgtttccgggaccagaatccggaagtggctgttgaggggcgtcttccaatctcgcacagctgcgttggctgtagaagagaacggacggcgatggcgacggtcgcagcaaatccagctgctgctgcggcggctgtggcggcggcagcggcggtgactgaggatagagagccacagcacgaggagctgccaggcctggacagccagtggcgccagatagaaaacggcgagagtgggcgagaacgtccactgcgggccggcgaaagctggttccttgtggagaagcactggtataagcagtgggaggcatacgtgcagggaggggaccaggactccagcaccttccctggctgcatcaacaatgccacactctttcaagatgagataaactggcgcctcaaggagggactggtggaaggcgaggattatgtgctgctcccagcagctgcttggcattacctggtcagctggtatggtctagagcatggccagccacccattgaacgcaaggtcatagagctgcccaacatccagaaggtcgaagtgtacccagtagaactgctgcttgtccggcacaatgatttgggcaaatctcacactgttcagttcagccataccgattctattggcctagtattgcgcacagctcgggagcggtttctggtggagccccaggaagacactcggctttgggccaagaactcagaaggctctttggataggttgtatgacacacacatcacggttctcgatgcggcccttgagactgggcagttgatcatcatggagacccgcaagaaagatggcacttggcccagcgcacagctgcatgtcatgaacaacaacatgtcggaagaggatgaggacttcaagggtcagccaggcatctgtggcctcaccaatctgggcaacacgtgcttcatgaactcggccctgcagtgcctcagcaatgtgccacagctcaccgagtacttcctcaacaactgctacctggaggagctcaacttccgcaacccactgggcatgaagggtgagatcgcagaggcctatgcagacctggtgaagcaggcgtggtctggccaccaccgctccattgtgccacatgtgttcaagaacaaggttggccattttgcatcccaatttctgggctaccagcagcatgactctcaggagctgctgtcattcctcctggacgggctgcatgaggaccttaatcgggtgaagaagaaggagtatgtggagctgtgcgatgctgctgggcgaccggatcaggaggtggcacaggaggcatggcaaaaccacaaacggcggaacgattctgtgatcgtggacactttccacggcctcttcaagtccacgctggtgtgccccgattgtggcaatgtatctgtgaccttcgaccccttctgctacctcagtgttccactgcctatcagccacaagagggtcttggaggtcttctttatccccatggatccgcgccgcaagccagagcagcaccggctcgtggtccccaagaaaggcaagatctcggatctatgtgtggctctgtccaaacacacgggcatctcgccagagaggatgatggtggctgatgtcttcagtcaccgcttctataagctctatcagctagaggagcctctgagcagcatcttggaccgtgatgatatcttcgtctatgaggtgtcaggtcgcattgaggccattgagggctcaagagaggacatcgtggttcctgtctacctgcgggagcgcacccctgcccgtgactacaacaactcctactacggcctgatgctttttggacaccccctcctggtatcagtgccccgggaccgcttcacctgggagggcctgtataacgtcctgatgtaccggctctcacgctacgtgaccaaacccaactcagatgatgaggacgatggggatgagaaagaagatgacgaggaggataaagatgacgtccctgggccctcaactgggggcagcctccgagaccctgagccagagcaggctgggcccagctctggagtcacgaacaggtgcccgttcctcctggacaattgccttggcacatctcagtggcccccaaggcgacgacgcaagcagctgttcaccctgcagacggtgaactccaatgggaccagcgaccgcacaacctcccctgaagaagtccatgcccagccgtacattgctatcgactgggagccagagatgaagaagcgttactatgacgaggtagaggctgagggctacgtgaagcatgactgcgtcgggtacgtgatgaagaaggctcccgtgcggctgcaggagtgcattgagctcttcaccactgtggagaccctggagaaggaaaacccctggtactgcccttcctgcaagcagcaccagctggcaaccaagaagctggacctgtggatgctgccggagattctcatcatccacctgaaacgcttttcctacaccaagttctcccgagagaagctggacaccctcgtggagtttcctatccgggacctggacttctctgagtttgtcatccagccacagaatgagtcgaatccggagctgtacaaatatgacctcatcgcggtttccaaccattatgggggcatgcgtgatggacactacacaacatttgcctgcaacaaggacagcggccagtggcactactttgatgacaacagcgtctcccctgtcaatgagaatcagatcgagtccaaggcagcctatgtcctcttctaccaacgccaggacgtggcgcgacgcctgctgtccccggccggctcatctggcgccccagcctcccctgcctgcagctccccacccagctctgagttcatggatgttaattgagagccctgggtcctgccacagaaaaaaaaaaaaaaaagccctctctgcaatctcgcttctcgtgtccgccccgcttctcttattcgtgttaggtgcccccgccaggcattgcaggcttagtcgtggctactgttctcctgtgccgctgcatcgctctctcccgggaaagaacaggtcgtgtctcctcctagcagtgcgcgccccgcctgtgtttgcccttccagcagtgaccctcccttctagtctttatttatggtcgtgcccttccctctcctcagcccagagtgttctgcgtgggtggtgatgggggttcacctgaacacagagtgtattttcttattgaggccctgtaccttctgctgtgtgtgtgtatatataaagcaccagtctgctccccaaaaaaaaaaa

SEQ ID NO: 442 - DNA, 2729 bp, Homo Sapiens
gtgcgcctgcgtggaacgattctgtggcgagtgccggccgaaagctaggtccggattgcacgtggagggccgcccgaagggcactctcggacattaacccgcattctggtgggtctagaggaaattgggggacgaagagtggcagcactgacctggtctgggacgtggggagaaggtaccatggggcgcaagttggaccctacgaaggagaagcgggggccaggccgaaaggcccggaagcagaagggtgccgagacagaactcgtcagattcttgcctgcagtaagtgacgaaaattccaagaggctgtctagtcgtgctcgaaagagggcagccaagaggagattgggctctgttgaagcccctaagacaaataagtctcctgaggccaaaccattgcctggaaagctaccaaaaggagctgtccagacagctggtaagaagggaccccagtccctatttaatgctcctcgaggcaagaagcgcccagcacctggcagtgatgaggaagaggaggaggaagactctgaagaagatggtatggtgaaccacggggacctctggggctccgaggacgatgctgatacggtagatgactatggagctgactccaactctgaggatgaggaggaaggtgaagcgttgctgcccattgaaagagctgctcggaagcagaaggcccgggaagctgctgctgggatccagtggagtgaagaggagaccgaggacgaggaggaagagaaagaagtgacccctgagtcaggccccccaaaggtggaagaggcagatgggggcctgcagatcaatgtggatgaggaaccatttgtgctgccccctgctggggagatggagcaggatgcccaggctccagacctgcaacgagttcacaagcggatccaggatattgtgggaattctgcgtgattttggggctcagcgggaggaagggcggtctcgttctgaatacctgaaccggctcaagaaggatctggccatttactactcctatggagacttcctgcttggcaagctcatggacctcttccctctgtctgagctggtggagttcttagaagctaatgaggtgcctcggcccgtcaccctccggaccaataccttgaaaacccgacgccgagaccttgcacaggctctaatcaatcgtggggttaacctggatcccctgggcaagtggtcaaagactggactagtggtgtatgattcttctgtgcccattggtgctacccccgagtacctggctgggcactacatgctgcagggagcctccagcatgttgcccgtcatggccttggcaccccaggaacatgagcggatcctggacatgtgttgtgcccctggaggaaagaccagctacatggcccagctgatgaagaacacgggtgtgatccttgccaatgacgccaatgctgagcggctcaagagtgttgtgggcaacttgcatcggctgggagtcaccaacaccattatcagccactatgatgggcgccagttccccaaggtggtggggggctttgaccgagtactgctggatgctccctgcagtggcactggggtcatctccaaggatccagccgtgaagactaacaaggatgagaaggacatcctgcgctgtgctcacctccagaaggagttgctcctgagtgctattgactctgtcaatgcgacctccaagacaggaggctacctggtttactgcacctgttctatcacagtagaagagaatgagtgggtggtagactatgctctgaaaaagaggaatgtgcgactggtgcccacgggcctagactttggccaggaaggttttacccgctttcgagaaaggcgcttccaccccagtctgcgttctacccgacgcttctaccctcatacccacaatatggatgggttcttcattgccaagttcaagaaattttccaattctatccctcagtcccagacaggaaattctgaaacagccacacctacaaatgtagacttgcctcaggtcatccccaagtctgagaacagcagccagccagccaagaaagccaagggggctgcaaagacaaagcagcagctgcagaaacagcaacatcccaagaaggcctccttccagaagctgaatggcatctccaaaggggcagactcagaattgtccactgtaccttctgtcacaaagacccaagcttcctccagcttccaggatagcagtcagccagctggaaaagccgaagggatcagggagccaaaggtgactgggaagctaaagcaacgatcacctaaattacagtcctccaagaaagttgctttcctcaggcagaatgcccctcccaagggcacagacacacaaacaccggctgtgttatccccatccaagactcaggccaccctgaaacctaaggaccatcatcagccccttggaagggccaagggggttgagaagcagcagttgccagagcagccttttgagaaagctgccttccagaaacagaatgatacccccaaggggcctcagcctcccactgtgtctcccatccgttccagccgccccccaccagcaaagaggaagaaatctcagtccaggggcaacagccagctgctgctatcttagatggttgaaaactagacgggtggctcactgccattgtcaccaggttggaactcttgcctctgtgaggatgccttctctactgtgcatacccatgaaatttaatacacattttaaaacctctg

SEQ ID NO: 443 - DNA, 4465 bp, Homo Sapiens
aacgtccgcgggcgcggggtgtgtcgggtgtcgacggcggcgctttgcggccggtcgtgcgggtcgggcgcgggcgggcgcggcggcagtggcgcgcacaggtgattgactggccagctgcctgaaggagcgccaggtcctccttgctggcaggtggcgaagcccattggggcggcggtgcagaccgcggcggcggctgcggcggtctggctcgggaggcgttcctggggccaaggccatggccccgcggctgcagctggagaaggcggcctggcgctgggcggagacggtgcggcccgaggaggtgtcgcaggagcacatcgagaccgcttaccgcatctggctggagccctgcattcgcggcgtgtgcagacgaaactgcaaaggaaatccgaattgcttggttggtattggtgagcatatttggttaggagaaatagatgaaaatagttttcataacatcgatgatcccaactgtgagaggagaaaaaagaactcatttgtgggcctgactaaccttggagccacttgttatgtcaacacatttcttcaagtgtggtttctcaacttggagcttcggcaggcactctacttatgtccaagcacttgtagtgactacatgctgggagacggcatccaagaagaaaaagattatgagcctcaaacaatttgtgagcatctccagtacttgtttgccttgttgcaaaacagtaataggcgatacattgatccatcaggatttgttaaagccttgggcctggacactggacaacagcaggatgctcaagaattttcaaagctctttatgtctctattggaagatactttgtctaaacaaaagaatccagatgtgcgcaatattgttcaacagcagttctgtggagaatatgcctatgtaactgtttgcaaccagtgtggcagagagtctaagcttttgtcaaaattttatgagctggagttaaatatccaaggccacaaacagttaacagattgtatctcggaatttttgaaggaagaaaaattagaaggagacaatcgctatttttgcgagaactgtcaaagcaaacagaatgcaacaagaaagattcgacttcttagccttccttgcactctgaacttgcagctaatgcgttttgtctttgacaggcaaactggacataagaaaaagctgaatacctacattggcttctcagaaattttggatatggagccttatgtggaacataaaggtgggtcctacgtgtatgaactcagcgcagtcctcatacacagaggagtgagtgcttattctggccactacatcgcccacgtgaaagatccacagtctggtgaatggtataagtttaatgatgaagacatagaaaagatggaggggaagaaattacaactagggattgaggaagatctagcagaaccttctaagtctcagacacgtaaacccaagtgtggcaaaggaactcattgctctcgaaatgcatatatgttggtttatagactgcaaactcaagaaaagcccaacactactgttcaagttccagcctttcttcaagagctggtagatcgggataattccaaatttgaggagtggtgtattgaaatggctgagatgcgtaagcaaagtgtggataaaggaaaagcaaaacacgaagaggttaaggagctgtaccaaaggttacctgctggagctgagccctatgagtttgtctctctggaatggctgcaaaagtggttggatgaatcaacacctaccaaacctattgataatcacgcttgcctgtgttcccatgacaagcttcacccggataaaatatcaattatgaagaggatatctgaatatgcagctgacattttctatagtagatatggaggaggtccaagactaactgtgaaagccctgtgtaaggaatgtgtagtagaacgttgtcgcatattgcgtctgaagaaccaactaaatgaagattataaaactgttaataatctgctgaaagcagcagtaaagggcagcgatggattttgggtggggaagtcctccttgcggagttggcgccagctagctcttgaacagctggatgagcaagatggtgatgcagaacaaagcaacggaaagatgaacggtagcaccttaaataaagatgaatcaaaggaagaaagaaaagaagaggaggaattaaattttaatgaagatattctgtgtccacatggtgagttatgcatatctgaaaatgaaagaaggcttgtttctaaagaggcttggagcaaactgcagcagtactttccaaaggctcctgagtttccaagttacaaagagtgctgttcacagtgcaagattttagaaagagaaggggaagaaaatgaagccttacataagatgattgcaaacgagcaaaagacttctctcccaaatttgttccaggataaaaacagaccgtgtctcagtaactggccagaggatacggatgtcctctacatcgtgtctcagttctttgtagaagagtggcggaaatttgttagaaagcctacaagatgcagccctgtgtcatcagttgggaacagtgctcttttgtgtccccacgggggcctcatgtttacatttgcttccatgaccaaagaagattctaaacttatagctctcatatggcccagtgagtggcaaatgatacaaaagctctttgttgtggatcatgtaattaaaatcacgagaattgaagtgggagatgtaaacccttcagaaacacagtatatttctgagcccaaactctgtccagaatgcagagaaggcttattgtgtcagcagcagagggacctgcgtgaatacactcaagccaccatctatgtccataaagttgtggataataaaaaggtgatgaaggattcggctccggaactgaatgtgagtagttctgaaacagaggaggacaaggaagaagctaaaccagatggagaaaaagatccagattttaatcaaagcaatggtggaacaaagcggcaaaagatatcccatcaaaattatatagcctatcaaaagcaagttattcgccgaagtatgcgacatagaaaagttcgtggtgagaaagcacttctcgtttctgctaatcagacgttaaaagaattgaaaattcagatcatgcatgcattttcagttgctccttttgaccagaatttgtcaattgatggaaagattttaagtgatgactgtgccaccctaggcacccttggcgtcattcctgaatctgtcattttattgaaggctgatgaaccaattgcagattatgctgcaatggatgatgtcatgcaagtttgtatgccagaagaagggtttaaaggtactggtcttcttggacattaatctttgaatacttgctgactgctaagaaatgaccagaggggaagaggagtttgacatgttagggcattaaagcaaaggtggatttaagaattaaaccattacatgccccttccaaaaggcagaaatccattcaaacgtgactgtcccaaatgccttatgtcaaataaagcagattgcactgatggacatcagacttgaaggaaatgtttccaattttatatttaaggggggtggtgggtgggagggggcaagtaaagacggaacaagtttagtagcagtaatagtaaatcatgtttacatatgagatttatagtcgtgggaggggaataaagttctgttatatttccttgctcgagtttcataccagatgcgttggtccataaaggattgtatcaagtagatgggacaacattctgctctgaacgaaaagtaattttagagacataacctgcttaccaatgcctgtctttgattcatattctactttcaataaagcatgaaagtgaagaacttgtcctaagtgtggaaaagtgtcttcagatttagactcttctccatgtcagctgcagcgccacccgccttacacctgcccggccgtctgtctcttggtattgggtaaaggagggggcacctgcatgtctcctgcaatgagcaaggaattatgtctcatgttttgacttcagaggctttttgctttggtgcatttcagaaaggatggagaacatttattatgtgtgaaagcatcctcttccggttttgctgttattcaaaagtgggaaatgtacctggcacgtttgaaaataaaaaatctgactacctatcagaagagtaaatcagactgaagtacatttggataacacaaggtttctataaaatttgttcttcctgtcctccatgtcactgtttcttggacctcagttctctttttgaaagcattattccaaaatgccctgagagggtctcttagatcattgtttaaaaaaggaaaaaagtatatggatgtgctgtccatccaactcaggattatcattcttagcaacacgtaaccgaagcaatattcttaagaatattgaaggggtttttttaattgaacttaagactggagtttttcctttgaaa

SEQ ID NO: 444 - DNA, 3689 bp, Homo Sapiens
aagatctcataaaatctatgctgaggaatgagcgacagttcaaggaggagaagcttgcagagcagctcaagcaagctgaggagctcaggcaatataaagtcctggttcacgctcaggaacgagagctgacccagttaagggagaagttgcgggaagggagagatgcctcccgctcattgaatgagcatctccaggccctcctcactccggatgagccggacaagtcccaggggcaggacctccaagaacagctggctgaggggtgtagactggcacagcaccttgtccaaaagctcagcccagaaaatgacaacgatgacgatgaagatgttcaagttgaggtggctgagaaagtgcagaaatcgtctgcccccagggagatgcagaaggctgaagaaaaggaagtccctgaggactcactggaggaatgtgccatcacttgttcaaatagccatggcccttatgactccaaccagccacataggaaaaccaaaatcacatttgaggaagacaaagtcgactcaactctcattggctcatcctctcatgttgaatgggaggatgctgtacacattattccagaaaatgaaagtgatgatgaggaagaggaagaaaaaggaccagtgtctcccaggaatctgcaggagtctgaagaggaggaagtcccccaggagtcctgggatgaaggttattcgactctctcaattcctcctgaaatgttggcctcgtacaagtcttacagcagcacatttcactcattagaggaacagcaagtctgcatggctgttgacataggcagacatcggtgggatcaagtgaaaaaggaggaccacgaggcaacaggtcccaggctcagcagagagctgctggatgagaaagggcctgaagtcttgcaggactcactggatagatgttattcaactccttcaggttgtcttgaactgactgactcatgccagccctacagaagtgccttttacgtattggagcaacagcgtgttggcttggctgttaacatggatgaaattgaaaagtaccaagaagtggaagaagaccaagacccatcatgccccaggctcagcagggagctgctggatgagaaagagcctgaagtcttgcaggactcactgggtagatgttattcgactccttcaggttatcttgaactgcctgacttaggccagccctacagcagtgctgtttactcattggaggaacagtaccttggcttggctcttgacgtggacagaattaaaaaggaccaagaagaggaagaagaccaaggcccaccatgccccaggctcagcagggagctgctggaggtagtagagcctgaagtcttgcaggactcactggatagatgttattcaactccttccagttgtcttgaacagcctgactcctgccagccctatggaagttccttttatgcattggaggaaaagcatgttggcttttctcttgacgtgggagaaattgaaaagaaggggaaggggaagaaaagaaggggaagaagatcaaagaaggaaagaagaaggggaagaaaagaaggggaagaagatcaaaacccaccatgccccaggctcagcagggagctgctggatgagaaagggcctgaagtcttgcaggactcactggatagatgttattcaactccttcaggttgtcttgaactgactgactcatgccagccctacagaagtgccttttacatattggagcaacagcgtgttggcttggctgttgacatggatgaaattgaaaagtaccaagaagtggaagaagaccaagacccatcatgccccaggctcagcggggagctgttggatgagaaagagcctgaagtcttgcaggagtcactggatagatgctattcaactccttcaggttgtcttgaactgactgactcatgccagccctacagaagtgccttttacatattggagcaacagcgtgttggcttggctgttgacatggatgaaattgaaaagtaccaagaagtggaagaagaccaagacccatcatgccccaggctcagcagggagctgctggatgagaaagagcctgaagtcttgcaggactcactgggtagatgttattcgactccttcaggttatcttgaactgcctgacttaggccagccctacagcagtgctgtttactcattggaggaacagtaccttggcttggctcttgacgtggacagaattaaaaaggaccaagaagaggaagaagaccaaggcccaccatgccccaggctcagcagggagctgctggaggtagtagagcctgaagtcttgcaggactcactggatagatgttattcaactccttccagttgtcttgaacagcctgactcctgccagccctatggaagttccttttatgcattggaggaaaaacatgttggcttttctcttgacgtgggagaaattgaaaagaaggggaaggggaagaaaagaaggggaagaagatcaaagaaggaaagaagaaggggaagaaaagaaggggaagaagatcaaaacccaccatgccccaggctcaacagcatgctgatggaagtggaagagcctgaagtcttgcaggactcactggatatatgttattcgactccgtcaatgtactttgaactacctgactcattccagcactacagaagtgtgttttactcatttgaggaagagcatatcagcttcgccctttacgtggacaataggttttttactttgacggtgacaagtctccacctggtgttccagatgggagtcatattcccacaataagcagcccttactaagccgagaggtgtcattcctgcaggcaggacctataggcacgtgaagatttgaatgaaagtacagttccatttggaagcccagacataggatgggtcagtgggcatggctctattcctattctcaaaccatgccagtggcaacctgtgctcagtctgaagacaatggacccacgttaggtgtgacacgttcacataactgtgcagcacatgccgggagtgatcagtcagacattttaatttgaaccacgtatctctgggtagctacaaaattcctcagggatgtcattttgcaggcatgtctctgagcttctatacctgctcaaggtcattgtcatctttgtgtttagctcatccaaaggtgttaccctggtttcaatgaacctaacctcattctttgtgtcttcagtgttggcttgttttagctgatccatctgtaacacaggagggatccttggctgaggattgtatttcagaaccaccaactgctcttgacaattgttaacccgctaggctcctttggttagagaagccacagtccttcagcctccaattggtgtcagtacttaggaagaccacagctagatggacaaacagcattgggaggccttagccctgctcctctcaattccatcctgtagagaacaggagtcaggagccgctggcaggagacagcatgtcacccaggactctgccggtgcagaatatgagcaatgccatgttcttgcagaaaacgcttaacctgagtttcataggaggtaatcaccagacaactgcagaatgtagaacactgagcaggacaactgacctgtctccttcacatagtccatatcaccacaaatcacacaacaaaaaggagaagagatattttcggttgaaaaaaagtaaaaagata

SEQ ID NO: 445 - DNA, 3757 bp, Homo Sapiens
aggcctaagcgcggccgccgtggctcctgcgtctcccatcgtgccgtgcgtcccgcgccgcgttcgagttctcggaggggagggggcgttagccccgcgcagccgccggcgtcgccgccatggacctaggacccttgaacatctgtgaagaaatgactattctgcatggaggcttcttgctggccgagcagctgttccaccctaaggcactggcagaattaacaaagtctgactgggaacgtgttggacggcccatcgtggaggccttaagggagatctcctcggctgcagcacactcccagccctttgcctggaagaagaaagccctgatcatcatctgggccaaggttctgcagccgcaccccgtgaccccgtccgacacagagacacggtggcaggaagacctgttcttctcggtgggcaacatgatccccaccatcaaccacaccatcctcttcgagctgctcaaatccctggaagcttctggactctttatccagctcctgatggccctgcccaccaccatctgccatgcagaactagagcgctttctggaacatgtgaccgttgacacttctgccgaagacgtggccttcttcctggacgtctggtgggaggtgatgaagcacaagggtcacccgcaggaccccctgctctcccagtttagtgcaatggcccataagtacctgcctgccttagatgagttcccccatcctccaaagaggcttaggtcagacccagacgcgtgccccaccatgcccctgttggccatgctgctccgcgggctgacacagatccagagtcggatcctgggcccggggaggaagtgctgtgcgctggccaacctggctgacatgctgactgtgtttgcgctgacagaggacgacccccaggaggtgtctgcaaccgtgtatctggacaaactggccacggtgatctctgtgtggaactcggacacccagaatccctaccaccagcaggcgctggcagagaaggtgaaggaggcagaacgggatgtcagcctgacctcgctggccaaactccccagtgagaccattttcgtgggctgcgagttcctgcaccacctgctgcgggagtggggggaggagttgcaggccgtgctccgcagcagccaggggacaagttacgacagctaccggctgtgcgacagtctgacttccttcagccagaacgcgacgctctacctgaaccgcaccagcctgtccaaggaggacaggcaggtggtctctgagctggcggagtgtgtcagggacttcctgaggaaaacgagcacggtgctgaagaacagggccttggaggatatcacagcttccattgccatggccgtcatccagcagaagatggaccgccatatggaagtgtgctacatttttgcctctgagaagaagtgggccttctcggacgagtgggtagcctgcctggggagtaacagggccctcttccgacagccagacttggtgttgaggctgctggaaacagtgatagacgtcagcacagctgacagagccatccctgagtctcagatccggcaggtgatccacctgatcctggaatgttacgcagacctctccctgccaggtaaaaataaagtccttgcaggtatcctgcgttcctgggggcgaaagggcctctctgaaaagttgctggcttatgtggagggttttcaggaagacctcaatacaacttttaaccagctcactcagagtgcctccgaacagggcttggcaaaagctgtggcctccgtggcccgcctggtcatagtgcacccggaagtcacggtgaagaaaatgtgcagcctggctgtggtcaatctcggcacccacaagttcctggcccagattctcactgccttccctgcccttaggtttgtggaagagcagggtcccaattcatctgccactttcatggtgtcatgcctcaaagaaaccgtctggatgaagttctctacacccaaggaagaaaagcaatttttagagctcctgaactgcctgatgagtcccgtgaaaccccaagggattccagtggctgctcttcttgagccagacgaggtgctgaaggaatttgtcctgcctttcttgaggttagatgttgaagaggtagacctcagtctgaggatcttcatccagactctagaggcaaacgcgtgccgagaggaatactggctccagacctgctccccgtttccactcctcttcagcttgtgccagctcttggaccgcttcagcaaatactggcagcttcccaaggagaagcggtgcctctctttggataggaaggatctagcgatccatatcctggagctcctgtgtgagattgtatcagccaatgctgagaccttctccccggatgtctggatcaagtccctgtcctggctccaccgcaagttagaacagctagactggactgtgggcctgaggctgaagagcttcttcgaggggcacttcaagtgtgaagtgccagccacactttttgagatctgtaagctttcagaagacgagtggacctcccaggcccacccagggtacggggctggcacggggctcctggcctggatggagtgctgctgcgtctccagcggcatctcggagaggatgctgtctctcttggtggtggacgtgggcaatcctgaggaggtcagactgttcagcaaaggctttctggtggccctggtgcaagtcatgccttggtgcagccctcaggagtggcagcgccttcaccagctgaccaggagactgctggagaagcagctcctccatgtcccttatagcctggaatatattcagtttgttcccctgctcaacctgaagccctttgcccaggagttgcaactctccgtcctcttcctgaggactttccagtttctctgcagccatagctgtcgtgattggcttcctctggaaggctggaaccacgtggtcaaactcctctgtggcagtctgacccgcctcctggactcagtcagggcgatacaggcagctggcccttgggttcaaggaccagagcaggacctgacccaggaagccctgtttgtttacacccaggtgttctgccatgctctgcacatcatggccatgctccacccggaggtctgtgagccactctacgttttagccttggaaaccctcacctgctatgagactttgagcaagaccaacccttctgtcagctccttgctccagagggcacacgagcagcgcttcttaaagtccattgctgagggcatcggccctgaagaacggcgccaaaccctgttgcagaagatgagcagcttctgacttggcgtggggagctgggccccaacatggcgggtctgcagaagatcagcagcttcttacctgtgcgggagcgaaaaagctgggcttcaacatggcaggtctgtaggggtcagacccgagcagcctggactttacagttatgtgaaactgtccacaaaaagtcatggcaataatggtgtaaagaaaatagtttcttgggtatttgtaacgtacaaactatcataaaaattctcctctttcgcatctcactttgtctcttctaagtcggcctcagcaatagcccaggattaaatatgctctgaaattgggtttagtgtcttcaagatcaaatccagccaggaggaacatgttcataactggacttttccatcctagattttggcaaataagcccaaagttgaaaccatgtgagtggaaaaagcattacatggtacgtataacccccaaaaaaaaaaaaaaaa

SEQ ID NO: 446 - DNA, 2687 bp, Homo Sapiens
cgcgactgcgcgcatgcgctgcagggccctgcgcggcttccgtcctggctgagatggcggcgcccgggatcctgtgtagcggctgcagagggtgccgccgccctaggcgaagtagggccgtcctgagcgaaagaaccgcccccagcaggagcaccaccacggcttagcaaagaatcccagaccccgcccgggaaggcagccgcaccatggagtcttccagttcatctaactcttatttctccgttggcccaaccagtcccagcgctgtcgtgctcctctactcgaaggagctcaaaaagtgggatgagtttgaagatattttagaagagaggaggcatgtcagtgacttgaaatttgcaatgaaatgctacacacctcttgtctataagggaattactccatgtaaaccaattgatattaaatgtagtgttctcaattctgaggagattcattatgtcattaaacagctttccaaggaatcccttcaatctgtggatgtcctccgagaggaagtgagtgagatcttagatgaaatgagtcacaaactgcgtcttggagccattcggttttgtgccttcaccctgagcaaagtatttaaacaaattttctcgaaggtgtgtgtaaatgaagaaggtattcagaaactacaaagagccatccaggagcatcctgttgttctgctgcctagtcatcgaagttacattgacttcctcatgttgtcttttcttctatacaattatgatttgcctgtgccagttatagcagcaggaatggacttcctgggaatgaaaatggttggtgagctgctacgaatgtcgggtgcctttttcatgcggcgtacctttggtggcaataaactctactgggctgtattctctgaatatgtaaaaactatgttacggaatggttatgctcctgttgaatttttcctcgaagggacaagaagccgctctgccaagacattgactcctaaatttggtcttctgaatattgtgatggagccattttttaaaagagaagtttttgatacctaccttgtcccaattagtatcagttatgataagatcttggaagaaactctttatgtgtatgagcttctaggggttcctaaaccaaaagagtctacaactgggttgctgaaagccagaaagattctctctgaaaattttggaagcatccatgtgtactttggagatcctgtgtcacttcgatctttggcagctgggaggatgagtcggagctcatataacttggttccaagatacattcctcagaaacagtctgaggacatgcatgcctttgtcactgaagttgcctacaaaatggagcttctgcaaattgaaaacatggttttgagcccctggaccctaatagttgctgttctgcttcagaaccggccatccatggactttgatgctctggtggaaaagactttatggctaaaaggcttaacccaggcatttggagggtttctcatttggcctgataataaacctgctgaagaagttgtcccggccagcattcttctgcattccaacattgccagccttgtcaaagaccaggtgattctgaaagtggactccggagactcggaagtggtcgatgggcttatgctccagcacatcactctcctcatgtgctcagcttataggaaccagctgctcaacatttttgtgcgcccatccttagtagcagtagcattgcagatgacaccagggttcaggaaagaggatgtctacagttgctttcgcttcctacgtgatgtttttgcagatgagttcatcttccttccaggaaacacactaaaggactttgaagaaggctgttacctgctttgtaaaagtgaagccatacaagtgactacgaaagacatcctagttacagagaaaggaaatactgtgttagaatttttagtaggactctttaaaccttttgtggaaagctatcagataatttgcaagtaccttttgagtgaagaagaggaccacttcagtgaggaacagtacttggctgcagtcagaaaattcacaagtcagcttctcgatcaaggtacctctcaatgttatgatgtattatcttctgatgtgcagaaaaacgccttagcagcctgtgtgaggctcggagtagtggagaagaagaagataaataataactgtatatttaatgtgaatgaacctgccacaaccaaattagaagaaatgcttggttgtaagacaccaataggaaaaccagccactgcaaaactttaataatcaacaaatagttatggaaaattcggtcacgtaattactctcatcgaaggactcattacaacaaacagggaagtaaaggaagagacacatcctctcatactccctgagactctgagaacagtggacgcagagggaagagatgatcattggaagcaatcagtttactcttccccaccacagtggttaaaaggcgtttgtatctgacactatgtgtgtgttttaaaataaacttttggaaacatgtttggaaaagcaaagctcagctcatttcactaacacttttcagcttactatatgtattaaacttttatgttgacttttgaattaaagtatgacaacactgaaagctctggatattaaaagaaaatgaaaagggcatatctacgttacttgtagcttgctttaattaaagttgcctcaaacaagtaaaaaaaa

SEQ ID NO: 447 - DNA, 2449 bp, Homo Sapiens
agtgtggccgcttttccgacagaggcctgcccgtgattggctgctcgtactatttacgtcctttcgatgttgcgtcatgcagtgcgccggaggaactgtgctctttgaggccgacgctaggggcccggaagggaaactgcgaggcgaaggtgaccggggaccgagcatttcagatctgctcggtagacctggtgcaccaccaccatgttggctgcaaggctggtgtgtctccggacactaccttctagggttttccacccagctttcaccaaggcctcccctgttgtgaagaattccatcacgaagaatcaatggctgttaacacctagcagggaatatgccaccaaaacaagaattgggatccggcgtgggagaactggccaagaactcaaagaggcagcattggaaccatcgatggaaaaaatatttaaaattgatcagatgggaagatggtttgttgctggaggggctgctgttggtcttggagcattgtgctactatggcttgggactgtctaatgagattggagctattgaaaaggctgtaatttggcctcagtatgtcaaggatagaattcattccacctatatgtacttagcagggagtattggtttaacagctttgtctgccatagcaatcagcagaacgcctgttctcatgaacttcatgatgagaggctcttgggtgacaattggtgtgacctttgcagccatggttggagctggaatgctggtacgatcaataccatatgaccagagcccaggcccaaagcatcttgcttggttgctacattctggtgtgatgggtgcagtggtggctcctctgacaatattagggggtcctcttctcatcagagctgcatggtacacagctggcattgtgggaggcctctccactgtggccatgtgtgcgcccagtgaaaagtttctgaacatgggtgcacccctgggagtgggcctgggtctcgtctttgtgtcctcattgggatctatgtttcttccacctaccaccgtggctggtgccactctttactcagtggcaatgtacggtggattagttcttttcagcatgttccttctgtatgatacccagaaagtaatcaagcgtgcagaagtatcaccaatgtatggagttcaaaaatatgatcccattaactcgatgctgagtatctacatggatacattaaatatatttatgcgagttgcaactatgctggcaactggaggcaacagaaagaaatgaagtgactcagcttctggcttctctgctacatcaaatatcttgtttaatggggcagatatgcattaaatagtttgtacaagcagctttcgttgaagtttagaagataagaaacatgtcatcatatttaaatgttccggtaatgtgatgcctcaggtctgcctttttttctggagaataaatgcagtaatcctctcccaaataagcacacacattttcaattctcatgtttgagtgattttaaaatgttttggtgaatgtgaaaactaaagtttgtgtcatgagaatgtaagtcttttttctactttaaaatttagtaggttcactgagtaactaaaatttagcaaacctgtgtttgcatatttttttggagtgcagaatattgtaattaatgtcataagtgatttggagctttggtaaagggaccagagagaaggagtcacctgcagtcttttgtttttttaaatacttagaacttagcacttgtgttattgattagtgaggagccagtaagaaacatctgggtatttggaaacaagtggtcattgttacattcatctgctgaacttaacaaaactgttcatcctgaaacaggcacaggtgatgcattctcctgctgttgcttctcagtgctctctttccaatatagatgtggtcatgtttgacttgtacagaatgttaatcatacagagaatccttgatggaattatatatgtgtgttttacttttgaatgttacaaaaggaaataactttaaaactattctcaagagaaaatattcaaagcatgaaatatgttgctttttccagaatacaaacagtatactcatgattgctaagtgtttttttatttttgcatatttattgaactgtctaattgaatacagcttgctcttgtcacctcttcaagctttcaagcctttatagaaaagcttctttgtggcttacactggaaattatgaaagcagtttttctcctaagacttttggtttctcgcattgcctctcagactaagcactaaaaagcaaagcaaaacagaactagttctgtcttaatgaaatatatcaacccaaaagtgtaatgaggaaaatgcttcattagtttcccctagcagacttttacttctcttacactgctacaccattactttcttgagacatttgtaagttctttgatacagaagagttatatttagaagtctttaatgaaggg

SEQ ID NO: 448 - DNA, 699 bp, Homo Sapiens
ggtggggcggggttgagtcggaaccacaatagccaggcgaagaaactacaactcccagggcgtcccggagcaggccaacgggactacgggaagcagcgggcagcggcccgcgggaggcacctcggagatctgggtgcaaaagcccagggttaggaaccgtaggcatgctgcgccccaaggctttgacccaggtgctaagccaagccaacactggaggcgtccagagcaccctgctgctgaataacgagggatcactgctggcctactctggttacggggacactgacgcccgggtcaccgctgccatagccagtaacatctgggccgcctacgaccggaacgggaaccaagcgtttaatgaagacaatctcaaattcatcctcatggactgcatggagggccgtgtagccatcacccgagtggccaaccttctgctgtgtatgtatgccaaggagaccgtgggctttggaatgctcaaggccaaggcccaggctttggtgcagtacctggaggagcccctcacccaagtggcggcatcttaacggcattggtggaagctggggtcagaaaagagaaatgaccatttggaggggcggggcctcctagaagaaccttcttagacaatggggggaggatgggactttgttttttccaagaataaacttcaactcctgtcatgtgaaaaaaaaaaaaaaaaaa

SEQ ID NO: 449 - DNA, 1883 bp, Homo Sapiens
ggggctgcgccgggttccgtgtgtctatgtcaatgtgtctgtccttcactcctccattgtctgccgccactgctgctgctgctgctgctgccgctgctgctgcacgaatcgccgcagcccccagccttgcgcgtcgtcgctacctcctcggacaggtgagaagcagcccagaaattttatgaataagcatcagaagccagtgctaacaggccagcggttcaaaactcggaaaagggatgaaaaagagaaattcgaacccacagtcttcagggatacacttgtccaggggcttaatgaggctggtgatgaccttgaagctgtagccaaatttctggactctacaggctcaagattagattatcgtcgctatgcagacacactcttcgatatcctggtggctggcagtatgcttgcccctggaggaacgcgcatagatgatggtgacaagaccaagatgaccaaccactgtgtgttttcagcaaatgaagatcatgaaaccatccgaaactatgctcaggtcttcaataaactcatcaggagatataagtatttggagaaggcatttgaagatgaaatgaaaaagcttctcctcttccttaaagccttttccgaaacagagcagacaaagttggcgatgctgtcggggattctgctgggcaatggcaccctgcccgccaccatcctcaccagtctcttcaccgacagcttagtcaaagaaggcattgcggcctcatttgctgtcaagcttttcaaagcatggatggcagaaaaagatgccaactctgttacctcgtctttgagaaaagccaacttagacaagaggctgcttgaactctttccagttaacagacagagtgtggatcattttgctaaatacttcactgacgcaggtcttaaggagctttccgacttcctccgagtccagcagtccctgggcaccaggaaggaactgcagaaggagctccaggagcgtctttctcaggaatgcccgatcaaggaggtggtgctttatgtcaaagaagaaatgaagaggaatgatcttccagaaacagcagtgattggtcttctgtggacatgtataatgaacgctgttgagtggaacaagaaggaagaacttgttgcagagcaggctctgaagcacctgaagcaatatgctcccctgctggccgtgttcagctcccaaggccagtcagagctgatcctcctccagaaggttcaggaatactgctacgacaacatccatttcatgaaagcctttcagaagattgtggttctcttttataaagctgatgttctgagcgaagaagcaatactgaaatggtataaggaagcacatgttgctaaaggcaaaagtgtttttcttgaccagatgaagaaatttgttgagtggttacaaaatgcagaagaagaatccgaatcggaaggtgaggaaaattaaatggctcaacaagcacaatacctaggttaccacacaccactttttgattgggaatgctgaaccatttgagaagagaaacttggcttctgttttcgcaaaggaaaaaaaaaataggataggcttcccttgtgcagagggagaaatggttttgtttttgttttgtttttaaatggagccctgaggcatcagctattatacttgggactctacctctcactcactatatgctaacttaaagccattcaacaaggagtcaagtagatctgaaattaaatactcaacagactcctccttttttagctgtatttttcaggtactgtgtggtgaccgccccactggtgtctattacaggccactttggtagttgtgtatctgctcatgtatgtgatttgacaaaccagttttttaaaataaatggctttttaaaaatctgggaaaaaaaaaa

SEQ ID NO: 450 - DNA, 3997 bp, Homo Sapiens
ggcgacgccgacgcgagtctggcggctgctgcttgcgactgcggaggccgggcgaggccggtgaggacgcggcgggcgagcgagaggccgaggtgttttcttcactcatggtgaagaatgggggagatagaaggaacatacagagtcctgcagactgcagggatgcgcttgggtgcccagacccctgtgggagttagcacccttgagcctgggcagactctcttgcccagaatgcaagagaagcacctgcacctcagagtaaagctgctggacaacaccatggaaatatttgacattgagcctaaatgcgatggccaggtattactgacacaagtgtggaagcgtttaaacctggtagaatgtgactacttcgggatggagtttcaaaatactcagtcctactggatttggcttgaacctatgaaacccatcattaggcaaatacgaaggccaaagaatgtggtgcttcgcctagctgtaaaattttttccacctgatcctggtcagctacaagaagaatatacaagatacttgtttgccttgcaacttaagagagacctgctggaagagcgtttgacctgtgctgacaccacagcggcccttctcacgtcccatctcctgcagtcggaaataggagattacgatgaaacgctggaccgagagcacctcaaagtgaacgagtatttgcctggccagcagcactgccttgagaagatactagaattccatcagaagcacgtgggccagacacctgctgagtcggatttccaggtgctcgaaattgctcgaaagttggaaatgtacggcatcagatttcacatggcttctgacagggaaggaaccaagattcaactggcagtttcccacatgggtgtactcgtgttccagggcaccaccaaaatcaacactttcaactggtccaaggtccgtaaactaagcttcaagaggaaaagatttcttatcaaacttcatccagaggttcatggaccttaccaggacacattagaatttttgttgggtagtagagatgaatgtaagaacttctggaagatttgtgtggagtatcacaccttttttagacttttggaccaacctaagccaaaagcaaaagccgtcttcttcagccggggctcctccttcagatacagtggaagaactcagaaacaactagtagattatttcaaagacagtggaatgaagagaattccatatgaaagaaggcacagcaagacccacacgtccgttcgagctctgactgcagacctaccaaaacagagcatctcattccccgagggattgaggactcctgcctccccatcttcagcgaatgccttttactcgctctctccctccactctggtcccctctggcctgccagagtttaaggacagcagcagctccctcacagatccccaggtttcctacgtcaagagtccagctgcagagaggcgcagtggagcagtggctggaggccccgacacaccatcggcccagcccctcgggccccccgcactccagcctggtccaggcctttccacgaagagtcctcagccttctccctccagccggaagagccccctgagtctgagccctgcatttcaggtgcctttgggcccagctgaacagggctcatccccactcctgagccctgtcctcagtgatgctggcggagccgggatggactgcgaggagcccagacacaagcgcgtgcctgcagacgaggcctacttcatagtcaaagagattctcgctacagaacgaacatacctcaaggatttagaagttattaccgtgtggttccgcagcgcagtggtgaaggaggacgccatgcctgcgactctgatgacgctgctcttctccaacatcgatcccatctatgagttccacagaggcttcctgcgcgaggtggagcagaggctggcactctgggaagggccctccaaagcccacacaaaaggcagtcatcaacgaatcggggacatcctgctcaggaacatgcgccagttaaaggagtttaccagctacttccaaagacatgacgaggtcctaacagaactggaaaaggctaccaaacgctgtaagaagttggaggcagtgtacaaggagtttgagctgcagaaggtctgctacttgcctctcaacacgttcctgctgaagcccatccagcggctgctgcactaccgcctgctgctgcgccgcctatgcggacattacagccccgggcaccatgactacgctgactgccatgacgccctgaaagccatcacagaggtgaccaccacactacagcacattctcatccggctggagaacctgcagaagctaacggagctgcagcgggacctggtgggcatagagaacctcattgctcctggcagggagttcatccgtgagggctgccttcacaagctcaccaagaagggcctgcagcagaggatgttttttctgttctcagatatgttgctgtacacaagcaaaggagttgcagggaccagccacttccggatccggggcctccttcccctccaaggcatgctggtggaagaaagtgataacgagtggtctgttccacactgtttcaccatctacgcggctcagaaaacaatcgtggtggcagccagcactcggctggagaaagagaagtggatgctggacctgaactccgcgatccaagcagccaagagtggcggtgacacggcccctgcactgccaggccgcactgtgtgcactcgtccccccagatcccccaacgaggtatctctggagcaggagtcagaagatgatgctcggggtgtccgcagctccctggaggggcatggccagcaccgggccaacaccacaatgcacgtgtgctggtaccggaacaccagcgtgtccagggcagaccacagtgcagctgtcgagaaccagctttcaggatatctgctaagaaagttcaaaaacagtcatggctggcagaagctctgggtcgtctttaccaacttctgtttgttcttctacaaaactcatcaggatgactacccactggccagcctcccgctgctgggctacagcgtgagcatccccagggaggccgatggcatacacaaagactatgttttcaagctccagttcaaatcccacgtctacttcttccgggctgagagcaagtacacatttgaaaggtggatggaggtgatccagggggccagcagctcagccgggagggccccaagcatcgtgcaggatggcccccaaccctcctcagggctggaggggatggtcagggggaaggaggaatgacgctcaacctgcccaggtttggacacaactacaaagaacagcaggacacagaggtgacctctgtcctgaggcttctcaacagatgggaagtggctgtggtctcactggatccccactggcaccagcagtgtgggtgggcctcatgtaacatctgggaggggcttcatccccccacccaggacctagtgcatgccagcagctatctggggccctgggaaaaatgtgcgagtcttgagcgcggagccgctcaagccacagctcccaggcccctggctcaaagacgcagacaaggcctgagcagtgctctcggcatcggaccaaagcctgggcacaccctgcctctctccccagagcagggtccctgccgaggactggcctagagcaagcactggaaaagaggccctgccatacaccctgcgtacccactgccaggaccctctcagacaagcgtggcacagccatgctgaccttccatctggtgaaccaagtggcagccccaggggcctgccctgcaggtcacagctaaacaagtctggcagaagccacgcttgttccccatgtacctctagagaagcagaaaccaaagtccccctgtgccctgggagggtggggccgtctaatttattactgcccagcattccttccaacgggaagtagatgggcgactgctttgttcacacacatttgattaaaaataaacaaacagcatctcccc

SEQ ID NO: 451 - DNA, 2560 bp, Homo Sapiens
tgcggggagccgagccgccggcgctcgacgcgcgcgctctcgcgagacccgcgggatcacgtgacgcccgggcgcggcgcagctcacgtgacaagcgctgccggccgcggtgtcttcttcgtgccggcgtcgcagtggccgggcctcttgcgtctggtaacgccgctgtctctaacgccagcccttggcgcccgcgccccgccaccgcagcgcccggcagtccgcggcccaaccgccgcccgcgcccccgctccccgcaccgtacccggccgcctcgcgccatggcggcccccggcagcgcccggcgacccctgctgctgctactgctgttgctgctgctcggcctcatgcattgtgcgtcagcagcaatgtttatggtgaaaaatggcaacgggaccgcgtgcataatggccaacttctctgctgccttctcagtgaactacgacaccaagagtggccctaagaacatgacctttgacctgccatcagatgccacagtggtgctcaaccgcagctcctgtggaaaagagaacacttctgaccccagtctcgtgattgcttttggaagaggacatacactcactctcaatttcacgagaaatgcaacacgttacagcgtccagctcatgagttttgtttataacttgtcagacacacaccttttccccaatgcgagctccaaagaaatcaagactgtggaatctataactgacatcagggcagatatagataaaaaatacagatgtgttagtggcacccaggtccacatgaacaacgtgaccgtaacgctccatgatgccaccatccaggcgtacctttccaacagcagcttcagcaggggagagacacgctgtgaacaagacaggccttccccaaccacagcgccccctgcgccacccagcccctcgccctcacccgtgcccaagagcccctctgtggacaagtacaacgtgagcggcaccaacgggacctgcctgctggccagcatggggctgcagctgaacctcacctatgagaggaaggacaacacgacggtgacaaggcttctcaacatcaaccccaacaagacctcggccagcgggagctgcggcgcccacctggtgactctggagctgcacagcgagggcaccaccgtcctgctcttccagttcgggatgaatgcaagttctagccggtttttcctacaaggaatccagttgaatacaattcttcctgacgccagagaccctgcctttaaagctgccaacggctccctgcgagcgctgcaggccacagtcggcaattcctacaagtgcaacgcggaggagcacgtccgtgtcacgaaggcgttttcagtcaatatattcaaagtgtgggtccaggctttcaaggtggaaggtggccagtttggctctgtggaggagtgtctgctggacgagaacagcatgctgatccccatcgctgtgggtggtgccctggcggggctggtcctcatcgtcctcatcgcctacctcgtcggcaggaagaggagtcacgcaggctaccagactatctagcctggtgcacgcaggcacagcagctgcaggggcctctgttcctttctctgggcttagggtcctgtcgaaggggaggcacactttctggcaaacgtttctcaaatctgcttcatccaatgtgaagttcatcttgcagcatttactatgcacaacagagtaactatcgaaatgacggtgttaattttgctaactgggttaaatattttgctaactggttaaacattaatatttaccaaagtaggattttgagggtgggggtgctctctctgagggggtgggggtgccgctgtctctgaggggtgggggtgccgctgtctctgaggggtgggggtgccgctctctctgagggggtgggggtgccgctttctctgagggggtgggggtgccgctctctctgagggggtgggggtgctgctctctccgaggggtggaatgccgctgtctctgaggggtgggggtgccgctctaaattggctccatatcatttgagtttagggttctggtgtttggtttcttcattctttactgcactcagatttaagccttacaaagggaaagcctctggccgtcacacgtaggacgcatgaaggtcactcgtggtgaggctgacatgctcacacattacaacagtagagagggaaaatcctaagacagaggaactccagagatgagtgtctggagcgcttcagttcagctttaaaggccaggacgggccacacgtggctggcggcctcgttccagtggcggcacgtccttgggcgtctctaatgtctgcagctcaagggctggcacttttttaaatataaaaatgggtgttatttttatttttttttgtaaagtgatttttggtcttctgttgacattcggggtgatcctgttctgcgctgtgtacaatgtgagatcggtgcgttctcctgatgttttgccgtggcttggggattgtacacgggaccagctcacgtaatgcattgcctgtaacaatgtaataaaaagcctctttcttttaaaaaaaaaaaaaaaaaaaa

SEQ ID NO: 452 - DNA, 3060 bp, Homo Sapiens
gggagtggccgctctaggcagcggggaggtcgcggggttgaggggggttgtgaaaggagagcggcctctcctctatggtcacggggccggggcacgcttcccccactctgtcttgttacttccggtagcgaagcctctccctcttcctctgctcccgcggggtctgtgctgagaataatggcccggttggcccgggacgagtggaatgattaatgatgttttgcagcagttttctacgtctgaaattttttatgtctctggaacccagaatttgctaagagatggaggaacctcagaaaagctatgtgaacacaatggaccttgagagagatgaacctctcaaaagcaccggccctcagatttctgttagtgaattttcttgccactgctgctacgacatcctggttaaccccaccaccttgaactgtgggcacagcttctgccgtcactgccttgctttatggtgggcatcttcaaagaaaacagaatgtccagaatgcagagaaaaatgggaaggtttccccaaagtcagtattctcctcagggatgccattgaaaagttatttcctgatgccattagactgagatttgaagacattcagcagaataatgacatagtccaaagtcttgcagcctttcagaaatatgggaatgatcagattcctttagctcctaacacaggccgagcgaatcagcagatgggagggggattcttttccggtgtgctcacagctttaactggagtggcagtggtcctgctcgtctatcactggagcagcagggaatctgaacacgacctcctggtccacaaggctgtggccaaatggacggcggaagaagttgtcctctggctggagcagctgggcccttgggcatctctttacagggaaaggtttttatctgaacgagtaaatggaaggttgcttttaactttgacagaggaagaattttccaagacgccctataccatagaaaacagcagccacaggagagccatcctcatggagctagaacgtgtcaaagcattaggcgtgaagcccccccagaatctctgggaatataaggctgtgaacccaggcaggtccctgttcctgctatacgccctcaagagctcccccaggctgagtctgctctacctgtacctgtttgactacaccgacaccttcctacctttcatccacaccatctgccctctgcaagaagacagctctggggaggacatcgtcaccaagcttctggatcttaaggagcctacgtggaagcagtggagagagttcctggtcaaatactccttccttccataccagctgattgctgagtttgcttgggactggttggaggtccattactggacatcacggtttctcatcatcaatgctatgttactctcagttctggaattattctccttttggagaatctggtcgagaagtgaactgaagaccgtgcctcagaggatgtggagccatttctggaaagtatcaacgcaggggctttttgtggccatgttctggcccctcatccctcagtttgtttgcaactgtttgttttactgggccctgtactttaacccaattattaacattgatcttgtggtcaaggaactccggcggctggaaacccaggtgttgtgactggcactgcccaggctgagactcttcaagtcccgctgacgtctgagctttgatgcttaagaggggtgaggcagggagcggacttcctattttctaccctcagtaaaacaaggtgctgctttgtatatcaaaagctccaaccatgtcctctccccctcagcctgtgggtggcacgagcaaggactgacatccgcacagggaggattgtctgtttggctgacacagcagcagcccttcccacccagccaccttcctcacagggactaggaggctcagtccccaacggctggcaagactcagggtcctcagtggacatggtgtgggtgacatcagaagggtgccacatcagtcccctccccaacctcagtgactgacagaggatccggatctcagagcctgagaccaggtttattggggcctggcctgtcctctaagtcaagtttaggaaaacaaggataagattctgtcataggcatagagagttgcacataaaaaataccgaagaaaacccaaaattcaatcaacaattctgtcttattgaagagttgctaggattcagagtaaaactcaaaggattcagtttgagcctagaatgatggttagacttgtagtcactgggcttttgttttgctttatggaaatcattgaaggtctggatccctttctctgaatggagagattgagagggatgtcgggcagttcccattagatttagtggccttcatgttattcagaattgttttggtgatacctcacccctgtaatcccagcactttgggtgggtgaggcaggcggatcacttgaagccaggacttcaagaccagcttggccaacatggtgaaacctcatctctactaaaaatacaaaaattagccaagtgtgatggcacatacctgtaatcccagctacttggaattggaaatcgcctgaacccaggaggcggaggttgcagggagggagactgcaccactgcacttcagcctgggtgacagagggagactctgtcttaaaaaaaaaaaaaaaatcatctgtaaaataaattccgggatagtcgttttgttcaaggaaatgttttgtaaattgagctcacactatataatctttattgtcctatcctgatgtataatacagcaggtataattacaccaagcgctatagttataaatatggcatgaagtgaactatggccttttatttccttccagtgtgaacacagcaggtgtgagatgtcatcttggaagacaggccttgcagaaataggcctacatccaaaatattatcttgtgactccatgaaccattcattaaccctttgtatctttgagtgaaaattttactcaaaagttgcatctggaagttcgaagaaattacttgaaataaaaataaagatttctatatagataaaacctaaaaaaaaaaaaaaaaaa

SEQ ID NO: 453 - DNA, 3784 bp, Homo Sapiens
aggatagaccaaggaagaggggctggggggcagcctgggggcatgaaaagtggccaggaaggagccaagactccaccagcaacaattgagttgcttcagcctcagtctagggttccttccaggccttgaaccccccaacctcacaagggttggaaagtgaggccggtgaactttccagctggtactttgattttaaaataataataataattttttcaccctagttcggttgggtgctccatcttacggagccccaaacttattttgagaggccgccaccgtgttatgggcgtgcgcaactgcctctacggcaataatatgtcaggacaacgcgatatcccccctgaaatcggggaacagcccgagcaaccacctttggaggccccaggggcagctgcccccggtgctgggcctagcccagccgaagagatggagaccgaaccgcctcacaacgagcccatccccgtcgagaatgatggcgaggcctgtggacccccagaggtctccagacccaactttcaggtcctcaacccggcattcagggaagctggagcccatggaagctacagcccacctcctgaggaagcaatgcccttcgaggctgaacagcccagcttgggaggcttctggcctacactggagcagcctggattccccagtggggtccatgcaggccttgaggccttcggcccagcactcatggagcccggagccttcagtggtgccagaccaggcctgggaggatacagccctccaccagaagaagctatgccctttgagtttgaccagcctgcccagagaggctgcagtcaacttctcttacaggtcccagaccttgctccaggaggcccaggtgctgcaggggtccccggagctcctcccgaggagccccaagccctcaggcctgcaaaggctggctccagaggaggctacagccctccccctgaggagactatgccatttgagcttgatggagaaggatttggggacgacagcccacccccggggctttcccgagttatcgcacaagtcgacggcagcagccagttcgcggcagtcgcggcctcgagtgcggtccgcctcactcccgccgcgaacgcgcctcccctctgggtcccaggcgccatcggcagcccatcccaagaggctgtcagacctccttctaacttcacgggcagcagcccctggatggagatctccggacccccgttcgagattggcagcgcccccgctggggtcgacgacactcccgtcaacatggacagccccccaatcgcgcttgacggcccgcccatcaaggtctccggagccccagataagagagagcgagcagagagacccccagttgaggaggaagcagcagagatggaaggagccgctgatgccgcggagggaggaaaagtaccctctccggggtacggatcccctgccgccggggcagcctcagcggataccgctgccagggcagcccctgcagccccagccgatcctgactccggggcaaccccagaagatcccgactccgggacagcaccagccgatcctgactccggggcattcgcagccgatcccgactccggggcagcccctgccgccccagccgatcccgactccggggcggcccctgacgccccagccgatcccgactccggggcggcccctgacgccccagccgatccagatgccggggcggcccctgaggctcccgccgcccctgcggctgctgagacccgggcagcccatgtcgccccagctgcgccagacgcaggggctcccactgccccagccgcttctgccacccgggcagcccaagtccgccgggcggcctctgcagcccctgcctccggggccagacgcaagatccatctcagaccccccagccccgagatccaggctgccgatccgcctactccgcggcctactcgcgcgtctgcctggcggggcaagtccgagagcagccgcggccgccgcgtgtactacgatgaaggggtggccagcagcgacgatgactccagcggagacgagtccgacgatgggacctccggatgcctccgctggtttcagcatcggcgaaatcgccgccgccgaaagccccagcgcaacttactccgcaactttctcgtgcaagccttcgggggctgcttcggtcgatctgagagtccccagcccaaagcctcgcgctctctcaaggtcaagaaggtacccctggcggagaagcgcagacagatgcgcaaagaagccctggagaagcgggcccagaagcgcgcagagaagaaacgcagtaagctcatcgacaaacaactccaggacgaaaagatgggctacatgtgtacgcaccgcctgctgcttctaggtgctggagaatctggtaaaagcaccattgtgaagcagatgaggatcctgcatgttaatgggtttaatggagagggcggcgaagaggacccgcaggctgcaaggagcaacagcgatggtgagaaggcaaccaaagtgcaggacatcaaaaacaacctgaaagaggcgattgaaaccattgtggccgccatgagcaacctggtgccccccgtggagctggccaaccccgagaaccagttcagagtggactacatcctgagtgtgatgaacgtgcctgactttgacttccctcccgaattctatgagcatgccaaggctctgtgggaggatgaaggagtgcgtgcctgctacgaacgctccaacgagtaccagctgattgactgtgcccagtacttcctggacaagatcgacgtgatcaagcaggctgactatgtgccgagcgatcaggacctgcttcgctgccgtgtcctgacttctggaatctttgagaccaagttccaggtggacaaagtcaacttccacatgtttgacgtgggtggccagcgcgatgaacgccgcaagtggatccagtgcttcaacgatgtgactgccatcatcttcgtggtggccagcagcagctacaacatggtcatccgggaggacaaccagaccaaccgcctgcaggaggctctgaacctcttcaagagcatctggaacaacagatggctgcgcaccatctctgtgatcctgttcctcaacaagcaagatctgctcgctgagaaagtccttgctgggaaatcgaagattgaggactactttccagaatttgctcgctacactactcctgaggatgctactcccgagcccggagaggacccacgcgtgacccgggccaagtacttcattcgagatgagtttctgaggatcagcactgccagtggagatgggcgtcactactgctaccctcatttcacctgcgctgtggacactgagaacatccgccgtgtgttcaacgactgccgtgacatcattcagcgcatgcaccttcgtcagtacgagctgctctaagaagggaacccccaaatttaattaaagccttaagcacaattaattaaaagtgaaacgtaattgtacaagcagttaatcacccaccatagggcatgattaacaaagcaacctttcccttcccccgagtgattttgcgaaacccccttttcccttcagcttgcttagatgttccaaatttagaaagcttaaggcggcctacagaaaaaggaaaaaaggccacaaaagttccctctcactttcagtaaaaataaataaaacagcagcagcaaacaaataaaatgaaataaaagaaacaaatgaaataaatattgtgttgtgcagcattaaaaaaaatcaaaataaaaattaaatgtgagcaaagaatgaaaaaaaaaaaaaaaaaaaa

SEQ ID NO: 454 - DNA, 3945 bp, Homo Sapiens
tcttcacgtcccagcgcgggtgggcgccggcggctcctcttaaccacaggttccagaagtcctctgcagaagtgcttccctctctcatttccaggaccacaattcccagagacttcggcttcacgacgtttctctttttgcccgatctctcccggagctggctgggcttcggccggccagaggcccacagcgacgacgtgatccgtcgtgagcgggtcccagggtttcctcggcggcccttttttctctcccctcggtcgtcccccttgcaggctgtcgcggctggcctgagcggtgacctggcgggtcgcgcctgcgctctgccctgtttcctgcctggctggtggcggcggccattttgttcatcctcctcctcctcctgctcctcctggttggagcgcagtgtccggagcgggctggggggagagagcccgagagcagggttcggtgccttttcctctgtccccagccggtgcccagagcccccctccccttcctccccaccccctcccctccccaaccctgccctcccccttgtcccgggatcgctccgtcgcacccaccatgatggaagacgacgggcagccccggactctatacgtaggtaacctttccagagatgtgacagaagtccttatacttcagttgttcagtcagattggaccctgtaaaagctgtaaaatgataacagagcaacccgatagcagaagggtcaactcttctgttggattttctgttttgcagcatacaagcaatgacccatattgctttgtggaattttatgaacacagagatgcagctgctgcattagctgctatgaatgggagaaaaattttgggaaaggaggtcaaagtaaactgggcaaccacaccaagtagccagaaaaaagatacttccaatcacttccatgtgtttgttggggatttgagtccagaaattacaacagaagatatcaaatcagcatttgccccctttggtaaaatatcggatgcccgggtagttaaagacatggcaactggaaaatccaaaggctatggttttgtatctttttataacaaactggatgcagaaaatgcgattgtgcatatgggcggtcagtggttgggtggtcgtcaaatccgaaccaattgggccactcgtaaaccacctgcacctaaaagtacacaagaaaacaacactaagcagttgagatttgaagatgtagtaaaccagtcaagtccaaaaaattgtactgtgtactgtggaggaattgcgtctgggttaacagatcagcttatgagacagacattctcaccatttggacaaattatggaaataagagttttcccagaaaagggctattcatttgtcagattttcaacccatgaaagtgcagcccatgccattgtttcggtgaacggtactacgattgaaggacatgtggttaaatgctattggggtaaagaatctcctgatatgactaaaaacttccaacaggttgactatagtcaatggggccaatggagccaagtgtatggaaacccacaacagtatggacagtatatggcaaatgggtggcaagtaccgccttatggagtatacgggcaaccatggaatcaacaaggatttggagtagatcaatcaccttctgctgcttggatgggtggatttggtgctcagcctccccaaggacaagctcctccccctgtaatacctcctcctaaccaagccggatatggtatggcaagttaccaaacacagtgagccgggactctaaaaaaaaattgtaattcatgataggcttcgatttcctgtgacactctgaagacatgaaagtagacatcggaaaatgaaaatatttattttaaaaattgaaatgtttggaacctttagcacagatttgctttggtgaaggacacgtgtcttctagttctgcctttttaagtttttgttcatgatggatatgaacatgatttttctttatgtacaaaaactaaaataaagtcaataaagacaattctgactacaaattttgatataataggaaaaatggctaatacattttgattcttagatactattccatttttatcttgctgttcagtattttaactcactgtgtttttaaaagagcaaaaaagggaggatcgtgaaaacctgggaatcacatataagttcatcctgaatcctgatactcccctccccttccctgaggtggaccacatttgaagtcagcagagaaaaagtgtgatattcagaagaaatgcgtgattttggagtcgctttggaggaaatattttctttctctatgcctaaagaaactgaagccagactgaagttttgcaccctaaaaaaggaacagcattgtttgagttacttgagcaaatgttggtggtccacgttaagacatatttttaaaacttccaaaagtgtcgattattaaaattgtagtattttacatttcattttggggggaaatccaagtatggtgtttgtattgaagtcagacagtcatacttgtgcttttacatgaagtttaaatgatacatattgtaaatattcaataactacagtgtttaaaaagcatgcttcaacatagaagtagcagcaatgtaattatttgaagtaacacttaacacactccgctgcattgaatgcagtggattgatcagaatgttaagactgacatttccaaggttggctactatgtaaaattaaaattacacaaattgtgcagaaaaagccttaattttaatttcatacaatctttgatgcattagtatgttctaaaatgtcattgggaattagttttttgtttttgtttttttttttttttttttttgctttacattacttggtatgtaaataccttgattaaaaccttgtaaaccaatttcaaggttactataagttgtatagtacaagtgttttttaaaaatcttggggtgtttttaaaaattaagatatattttgcccaagaatttttttaacaagattgctaaaaacatcttatttagacacttcaatgtaccaatttataattggatattcagtttaaatagtacacagagttgtggcttttattttcaattaatttttttccttgtgggcagtgtgcatggtataataagcctgagcagaggcttaagttgtatgtgtgcagagtttgtaaaggaatcaattggaagatgcagaagaccgaggtttgctttcaaggtatttttcaggctgtgtgggtaaaatttgcctcaaatttctatcaaacaggaatgtaaaatagataaaatcctatgtatttgaattgtcagagctagggagtgcaaatgttttggcaatgtattcaaaatgctggcctgggcaccaaagagaaaatagccttttacagttacatagtaagatgcgattagtacccacaaattactgttttctaaacatttgaagttttacgattagctttaaaataatgattttataaattggtggtcacaataattttggtattactttcctccttttcccacttagcaatatagccaaatgtattcaacataaaaattcatagggtctgaaattcatagctgggccaaattttttatggcaccttagttttaccataatggtcatctattacactcttctgttataaaatatacccttatttcttttgtttatagtatctttgaggaatgtttttggaaaagttaatttatattttatagggagaacactcaataaattatgttaactgtgcccccgagttaaaaattttatgagtatatgtgaaacttgaacaactgaagactttttttaattgataaaaatgcttagtatgcctgttttggtctgccagtaaattaagtagcttattgagataactaacagctaaatatagctgtagtgtttcctgactgtatattctatgatttaataaaattatccagactagttatattgccacagtaaaaa

SEQ ID NO: 455 - DNA, 936 bp, Homo Sapiens
cttctcgcctaacgccgccaacatggtgagtcttactgttgcgggctccggggccgtcgaccatgccgctcgacctccacctccgctgggaagctgaggcgccgaacggctcccagagggtcccgggaagcgcatggtgttcaggcgcttcgtggaggttggccgggtggcctatgtctcctttggacctcatgccggaaaattggtcgcgattgtagatgttattgatcagaacagggctttggtcgatggaccttgcactcaagtgaggagacaggccatgcctttcaagtgcatgcagctcactgatttcatcctcaagtttccgcacagtgcccaccagaagtatgtccgacaagcctggcagaaggcagacatcaatacaaaatgggcagccacacgatgggccaagaagattgaagccagagaaaggaaagccaagatgacagattttgatcgttttaaagttatgaaggcaaagaaaatgaggaacagaataatcaagaatgaagttaagaagcttcaaaaggcagctctcctgaaagcttctcccaaaaaagcacctggtactaagggtactgctgctgctgctgctgctgctgctgctgctaaagttccagcaaaaaagatcaccgccgcgagtaaaaaggctccagcccagaaggttcctgcccagaaagccacaggccagaaagcagcgcctgctccaaaagctcagaagggtcaaaaagctccagcccagaaagcacctgctccaaaggcatctggcaagaaagcataagtggcaatcataaaaagtaataaaggttctttttgacctgttgacaaatgtatttaagcctttggatttaaagcctgttgaggctggagttaggaggcagattgatagtaggattataataaacattaaataatcaaaaaaaaaaaaaaaaaaaa

SEQ ID NO: 456 - DNA, 979 bp, Homo Sapiens
agcattggagacccttttcacaagatggcgccgaaagcgaagaaggaagctcctgcccctcctaaagctgaagccaaagcgaaggctttaaaggccaagaaggcagtgttgaaaggtgtccacagccacaaaaagaagaagatccgcacgtcacccaccttccggcggccgaagacactgcgactccggagacagcccaaatatcctcggaagagcgctcccaggagaaacaagcttgaccactatgctatcatcaagtttccgctgaccactgagtctgccatgaagaagatagaagacaacaacacacttgtgttcattgtggatgttaaagccaacaagcaccagattaaacaggctgtgaagaagctgtatgacattgatgtggccaaggtcaacaccctgattcggcctgatggagagaagaaggcatatgttcgactggctcctgattacgatgctttggatgttgccaacaaaattgggatcatctaaactgagtccagctgcctaattctgaatatatatatatatatatcttttcaccatatacatgcctgtctgtcaatttctggttgggctgggaggccacacacacacactgacatgacagggcttgggcaagactcctgttctacttatccttttgaaatacctcaccctgccactccaccatgtatgatcattccagagatctttgtgactagagttagtgtcctaggaaaaccagaactcagaacttgcctccatggttgagtaacaagctgtacaagaaccccttttatccctggaagaggctgtgtatgaaaccaatgcccagggtttgaagggtgttagcatccatttcaggggagtgtggattggctggctctctggtagcattttgtcctcacacacccatctactatgtccaaccggtctgtctgcttccctcaccccttgcccaataaaggacaaggacttcagaggaaaaaaaaaa

SEQ ID NO: 457 - DNA, 514 bp, Homo Sapiens
tccttctttcctttttgctggtagggccgggtggttgctgccgaaatgggcaagttcatgaaacctgggaaggtggtgcttgtcctggctggacgctactccggacgcaaagctgtcatcgtgaagaacattgatgatggcacctcagatcgcccctacagccatgctctggtggctggaattgaccgctacccccgcaaagtgacagctgccatgggcaagaagaagatcgccaagagatcaaagataaaatcttttgtgaaagtgtataactacaatcacctaatgcccacaaggtactctgtggatatccccttggacaaaactgtcgtcaataaggatgtcttcagagatcctgctcttaaacgcaaggcccgacgggaggccaaggtcaagtttgaagagagatacaagacaggcaagaacaagtggttcttccagaaactgcggttttagatgctttgttttgatcattaaaaattataaagaaaaaaaaaaaaaaaaaaaaaaaaaa

SEQ ID NO: 458 - DNA, 582 bp, Homo Sapiens
tttcctttcggccggaaccgccatcttccagtaattcgccaaaatgacgaacacaaagggaaagaggagaggcacccgatatatgttctctaggccttttagaaaacatggagttgttcctttggccacatatatgcgaatctataagaaaggtgatattgtagacatcaagggaatgggtactgttcaaaaaggaatgccccacaagtgttaccatggcaaaactggaagagtctacaatgttacccagcatgctgttggcattgttgtaaacaaacaagttaagggcaagattcttgccaagagaattaatgtgcgtattgagcacattaagcactctaagagccgagatagcttcctgaaacgtgtgaaggaaaatgatcagaaaaagaaagaagccaaagagaaaggtacctgggttcaactaaagcgccagcctgctccacccagagaagcacactttgtgagaaccaatgggaaggagcctgagctgctggaacctattccctatgaattcatggcataataggtgttaaaaaaaaaaataaaggacctctgggctacaaaaaaaaaaaaaaaaaa

SEQ ID NO: 459 - DNA, 3935 bp, Homo Sapiens
gcagcgtccctggcgccgctgaagacgccctggaactcggctggcttcggagggctcggtgactctggccgcgctgcattatggaatacagagtctaagagaaaactagcccggcaccgactccggaccaagcacacgtgtttaccttgtgcactggggtgggggcgtcagtgaagagcagctaacaagatttcgtcataagaccgcgaccagacaggcggcgccatcttcgaacttagacttccggaaggactttggcgaggcttgagtgtgcgtcagaatcccctgaagagcttgttaaaacacaaggtgctggccccatccagaattgctgattcggggcagccattttggggggtgctgatggatacctgcggggtcggctatgttgccctgggggaggccggccccgtggggaacatgactgtggtagactctcctggacaagaggtgctaaatcagcttgatgtcaagacctcttcagaaatgaccagtgcagaggcttccgtagagatgtcattacctacccctttgcctggatttgaggattctcctgatcagaggaggctccctccagagcaggaaagcctctccagactggaacagccagatctttcttcagagatgtcaaaggtctcaaagcctagggcctcaaagcctggccggaagagaggtggtaggacacgaaaaggccccaaaaggccccaacagcctaatcctccatcagccccactggttcctggtctcttagatcaatccaaccctctgtccacccccatgcctaagaaacgaggtcgaaagtccaaggcagagctgctgctgctgaagttgtcaaaagacctagatcggccagaatctcaatctccaaagaggccccctgaggactttgagaccccttctggggaacgaccccgccgaagggctgcccaagtggcacttctgtatcttcaggaactggctgaagagctctcaacagccctgcctgcccctgtgtcctgtcctgagggccccaaggtgagcagccccaccaaaccgaagaagatccggcagccagcagcctgtccaggtggagaagaggtggatggtgctccacgggatgaagacttttttctccaggttgaggctgaagatgtggaagaaagtgagggcccaagtgagagctcatctgaacctgagcctgtagtgccccgaagcaccccacgaggatctacttcagggaaacagaaaccacactgccgaggaatggctcccaatggcttaccaaatcatatcatggctcctgtttggaagtgcctccatctcaccaaggacttccgagagcagaaacattcatactgggagtttgctgagtggattcctttagcctggaagtggcacttgttatctgagcttgaggccgctccctacctgccccaggaggagaagtctccattgttttctgtacaacgtgaagggctacctgaagatggcaccctctaccgaataaacagatttagctcgatcacagcacatccagagcgctgggatgtgtccttcttcacggggggaccgctctgggctctggactggtgcccagtgccagagggggcaggagcctcgcaatatgtggctcttttctccagccctgacatgaatgagacacacccactgagccagcttcattcgggtcctgggctgctccagctctggggccttgggaccttgcagcaagaaagctgtcctggcaacagggcccactttgtctatgggattgcttgtgacaacggctgcatctgggacctcaagttctgccccagtggagcatgggaacttccaggcacccctcggaaggctcctctcctgccccggttgggtctcttggctctggcctgctcagacgggaaagtactgctattcagtctaccccatccggaggccctgctggctcagcaacccccagatgcagtgaagcctgccatatataaggtacaatgtgtggcaactctgcaggtggggtctatgcaagctacagacccctctgagtgtggtcagtgccttagcctggcctggatgcctaccaggccccaccaacacctagctgctggatattataatggcatggtggttttctggaaccttcccactaactcacccctgcagcggatacggctctctgatggctccttaaagctctaccccttccagtgtttcctagcccatgaccaggctgtgcgtacccttcaatggtgcaaagctaacagccatttccttgtctctgcggggagtgaccggaaaatcaaattctgggaccttcgacgtccttacgaacccataaactctatcaagcgcttcttgagtacagaactggcctggctgcttccctacaatggtgtcactgtggctcaggacaactgctatgcctcttatggactctgtgggattcattatattgacgctggttaccttggtttcaaggcctacttcactgctcctcgaaaaggcaccgtttggagtctttcaggatccgactggcttgggacaatagctgcaggagatatatccggggagctcattgctgctatattaccagatatggcactgaatccaataaatgtcaagcgacctgtagagcgaagatttcctatatataaagcagatctgataccgtatcaggacagtcctgaaggtccagaccattcttctgcttcatctggggtccccaaccctcctaaggctcgaacttacactgaaactgtcaaccatcactacttgctctttcaagacacagatttgggttcattccatgatctgctccgtagagaaccaatgctgcgcatgcaggagggagaggggcattctcaactctgcctggacaggctgcagctggaggctattcataaggtacgtttcagcccaaacctggactcctatggatggctggtatctggggggcagtcagggctggttcgaatccattttgtccgtggactcgcctccccactgggccaccgtatgcagcttgaaagccgagcccacttcaatgctatgttccaaccatcctcccccactagacggcctggcttctctccaaccagccatcgccttctgcccactccctagccttggcccacaccagatccttggagtgaagtcggtcaagaacaaatggcccctatgcacagagccataggaactgggggccttccctggacagtgatcatgccaggcctggacctttaggcctgcctccccaggactccttagatcccactctttctacagacttctgtgatcacagccccctgcgggcaggggggctctccctccaccaactctcaaggctcctcagcctaagactatggctcatgagaaacactcaggcctgacctaggcttgggagtcaaactgctcatattgagcatattgttaagtgggtaaagccaagtaaaggtactgggtgtttttgtgaccacttgtgaatgggtgtatggagaactgaaaagggtatctgcatgaaggctcctgtctgactattccaggatccaatattactgccttctgaaacttcctctttagggtaaccatcatgtatgcccacgagggtgatagtaattcgtgagactgaagttgcttagagtacttctttgaccaaggaataccacagacaccctaccgatagaacagtggctcagatcttacttgctcctgcttacgaagtattcccaatcactggtcatctgaccctacttgaacactcctgaacagtcatgttttttaaaatcttcctttatatcaagtcagagagtatacttctataaatttcactcatggatgttaggaaatctagtcatcttccctgtgattgccctgttaagtatttaaccatagctatcatgtgtttcccaaatcttctctagattaaatatcttcagttacttcaaaaaaaaaaaaaaaaa

SEQ ID NO: 460 - DNA, 6927 bp, Homo Sapiens
ggggggagggtggcggctcgatgggggagccgcctccagggggcccccccgccctgtgcccacggcgcggcccctttaagaggcccgcctggctccgtcatccgcgccgcggccacctccccccggccctccccttcctgcggcgcagagtgcgggccgggcgggagtgcggcgagagccggctggctgagcttagcgtccgaggaggcggcggcggcggcggcggcacggcggcggcggggctgtggggcggtgcggaagcgagaggcgaggagcgcgcgggccgtggccagagtctggcggcggcctggcggagcggagagcagcgcccgcgcctcgccgtgcggaggagccccgcacacaatagcggcgcgcgcagcccgcgcccttccccccggcgcgccccgccccgcgcgccgagcgccccgctccgcctcacctgccaccagggagtgggcgggcattgttcgccgccgccgccgccgcgcgggccatgggggccgcccggcgcccggggccgggctggcgaggcgccgcgccgccgctgagacgggccccgcgcgcagcccggcggcgcaggtaaggccggccgcgccatggtggacccggtgggcttcgcggaggcgtggaaggcgcagttcccggactcagagcccccgcgcatggagctgcgctcagtgggcgacatcgagcaggagctggagcgctgcaaggcctccattcggcgcctggagcaggaggtgaaccaggagcgcttccgcatgatctacctgcagacgttgctggccaaggaaaagaagagctatgaccggcagcgatggggcttccggcgcgcggcgcaggcccccgacggcgcctccgagccccgagcgtccgcgtcgcgcccgcagccagcgcccgccgacggagccgacccgccgcccgccgaggagcccgaggcccggcccgacggcgagggttctccgggtaaggccaggcccgggaccgcccgcaggcccggggcagccgcgtcgggggaacgggacgaccggggaccccccgccagcgtggcggcgctcaggtccaacttcgagcggatccgcaagggccatggccagcccggggcggacgccgagaagcccttctacgtgaacgtcgagtttcaccacgagcgcggcctggtgaaggtcaacgacaaagaggtgtcggaccgcatcagctccctgggcagccaggccatgcagatggagcgcaaaaagtcccagcacggcgcgggctcgagcgtgggggatgcatccaggcccccttaccggggacgctcctcggagagcagctgcggcgtcgacggcgactacgaggacgccgagttgaacccccgcttcctgaaggacaacctgatcgacgccaatggcggtagcaggcccccttggccgcccctggagtaccagccctaccagagcatctacgtcgggggcatgatggaaggggagggcaagggcccgctcctgcgcagccagagcacctctgagcaggagaagcgccttacctggccccgcaggtcctactccccccggagttttgaggattgcggaggcggctataccccggactgcagctccaatgagaacctcacctccagcgaggaggacttctcctctggccagtccagccgcgtgtccccaagccccaccacctaccgcatgttccgggacaaaagccgctctccctcgcagaactcgcaacagtccttcgacagcagcagtccccccacgccgcagtgccataagcggcaccggcactgcccggttgtcgtgtccgaggccaccatcgtgggcgtccgcaagaccgggcagatctggcccaacgatggcgagggcgccttccatggagacgcagatggctcgttcggaacaccacctggatacggctgcgctgcagaccgggcagaggagcagcgccggcaccaagatgggctgccctacattgatgactcgccctcctcatcgccccacctcagcagcaagggcaggggcagccgggatgcgctggtctcgggagccctggagtccactaaagcgagtgagctggacttggaaaagggcttggagatgagaaaatgggtcctgtcgggaatcctggctagcgaggagacttacctgagccacctggaggcactgctgctgcccatgaagcctttgaaagccgctgccaccacctctcagccggtgctgacgagtcagcagatcgagaccatcttcttcaaagtgcctgagctctacgagatccacaaggagttctatgatgggctcttcccccgcgtgcagcagtggagccaccagcagcgggtgggcgacctcttccagaagctggccagccagctgggtgtgtaccgggccttcgtggacaactacggagttgccatggaaatggctgagaagtgctgtcaggccaatgctcagtttgcagaaatctccgagaacctgagagccagaagcaacaaagatgccaaggatccaacgaccaagaactctctggaaactctgctctacaagcctgtggaccgtgtgacgaggagcacgctggtcctccatgacttgctgaagcacactcctgccagccaccctgaccaccccttgctgcaggacgccctccgcatctcacagaacttcctgtccagcatcaatgaggagatcacaccccgacggcagtccatgacggtgaagaagggagagcaccggcagctgctgaaggacagcttcatggtggagctggtggagggggcccgcaagctgcgccacgtcttcctgttcaccgacctgcttctctgcaccaagctcaagaagcagagcggaggcaaaacgcagcagtatgactgcaaatggtacattccgctcacggatctcagcttccagatggtggatgaactggaggcagtgcccaacatccccctggtgcccgatgaggagctggacgctttgaagatcaagatctcccagatcaagaatgacatccagagagagaagagggcgaacaagggcagcaaggctacggagaggctgaagaagaagctgtcggagcaggagtcactgctgctgcttatgtctcccagcatggccttcagggtgcacagccgcaacggcaagagttacacgttcctgatctcctctgactatgagcgtgcagagtggagggagaacatccgggagcagcagaagaagtgtttcagaagcttctccctgacatccgtggagctgcagatgctgaccaactcgtgtgtgaaactccagactgtccacagcattccgctgaccatcaataaggaagatgatgagtctccggggctctatgggtttctgaatgtcatcgtccactcagccactggatttaagcagagttcaaatctgtactgcaccctggaggtggattcctttgggtattttgtgaataaagcaaagacgcgcgtctacagggacacagctgagccaaactggaacgaggaatttgagatagagctggagggctcccagaccctgaggatactgtgctatgaaaagtgttacaacaagacgaagatccccaaggaggacggcgagagcacggacagactcatggggaagggccaggtccagctggacccgcaggccctgcaggacagagactggcagcgcaccgtcatcgccatgaatgggatcgaagtaaagctctcggtcaagttcaacagcagggagttcagcttgaagaggatgccgtcccgaaaacagacaggggtcttcggagtcaagattgctgtggtcaccaagagagagaggtccaaggtgccctacatcgtgcgccagtgcgtggaggagatcgagcgccgaggcatggaggaggtgggcatctaccgcgtgtccggtgtggccacggacatccaggcactgaaggcagccttcgacgtcaataacaaggacgtgtcggtgatgatgagcgagatggacgtgaacgccatcgcaggcacgctgaagctgtacttccgtgagctgcccgagcccctcttcactgacgagttctaccccaacttcgcagagggcatcgctctttcagacccggttgcaaaggagagctgcatgctcaacctgctgctgtccctgccggaggccaacctgctcaccttccttttccttctggaccacctgaaaagggtggcagagaaggaggcagtcaataagatgtccctgcacaacctcgccacggtctttggccccacgctgctccggccctccgagaaggagagcaagctccctgccaaccccagccagcctatcaccatgactgacagctggtccttggaggtcatgtcccaggtccaggtgctgctgtacttcctgcagctggaggccatccctgccccggacagcaagagacagagcatcctgttctccaccgaagtctaaaggtcccagtccatctcctggaggcggacagatggcctggaaacctctggctaatcgggccatccgtagagcgggaaccttcctgaggtgtccttgggccacccccaagtgttgggccatctgccaagagacagcgacccaaagccgaaggacaggtggcctggaaagatcccgcccaggtctgggagccccaggctggcctcagactgtggttttttatgtggccacctgagggcgccccaagccagttcatctcggagtccaggcctggccctgggagacagggtgaagggagtggtttttatgaacttaacttagagtctaaaagatttctactggatcacttgtcaagatgcgccctctctggggagaagggaacgtgactggattccctcactgttgtatcttgaataaacgctgctgcttcatcctgtgggggccgtggccctgtccctgtgtgggtggggcctcttccatttccctgacttagaaaccacactccacttctaacagggtttgagaggcttagtcagcactgggtagcgttttgactccattcttggctttctttttctttccagaaggatttttgtgcagaaatgggtcttttgttgccatgttagtcctccttggaaggcagctcagaaggcctgtgaaatgtcaggggacaggacccccagggagggaaccccaggctacgcactttagggttcgttctccagggagagcgacctcgtcccccgatcctgaccgcccttccggcccacgctctcctgtttggcttccacaggcctggacttctctggcttctctgcccacacactccctgcccccagtgtccctgcccctgccccagcacaggtgacttcatttctgtcctctcagctcagtggactcgctcaacttttgtataagtctccacttggtggcagcagcttgctgatgacttgttttaaaactttcatcctaaataaccttttgatacttgaatatttgtaagttttatacatagtttctaatttttttccgaacagatccagatacctaataagatgctggaatgtaatccctggacaatccgtgtcctggcagcatttggtcttcctctaagcgcctggctccgctgttctcaggagtgggttctgaagtctctggagaacaggatacgtggagggttaggaaggggccaggcctagagacgggagactccctcccggagcaggtggaggcacaggaccattcgctaccccatctgccgacacctgcgggggagcccaggcattctttgtaaaccctcctgaccacctggctcaaagaaaacagaagcatggagaccgccaagtattttcaagaaataaccccatgaatattccatcacttttttagaaagaggggcttggggcaggcagaggagagaagggagagcaaactgagagccaagtttccacacggtcctgcaggaggagaggatgcagctgcccagagggaagcaggatcacatttaaggaagtgtgtggggtccctggatgacaccagcacccagtgcggctctgtctggcacccgctcccaaggtgggaggagtgggtgtcccctgtgtgtcagtgggcagctcctgctgaacccgcagctcactagggagcctgacagtggggccatgcgcctgacactcctctctgcttgtggacctggcaaggcagggagcagaaaacagccacttgaaggctttctgtctgcgtctgtgtgcagtgtggatttagttgtgcttttttcttgctgggagagcacagccaccatttacaagcagtgtcaccgtcgtgggtggcgaggacagaacaggagcctctgctctctgtacctatctgggcccggtgggctcccttgtcctggcttccatctctgtctcagcgaccattcagccctgcgcaggaacacgtgttgcttagaaaagccaaatccagccttgtctctgcctcctctggtctcatgatgtgcatctgttaccttgaaactggaaaccagtctatcaatgtctgtgccaattttttattccctccccaacctccttccccatacgactttttatttatgtaggatgtgtgctgtctaatgatgggatgaccacacttttccatgttctaaaagtgctcctctcccgcagggtcccagggctggtggttgctttgggtctacagctacgtcttacccacctcctgcctcaacagcctgtgtggtggcaaagccggtgtggggctggggaacgcagcgttctccaggagggggacctggctctccttctgcaatgcaggcgaaggcctagatgccagtgtgacctcccacaaggcgtggcttccagactccccggccggaagtgatgcttttttgccttgggccctgggtttgaagcagcctggctttctcttggtaagtggctggtgtcttagcagctgcaatctgagctcagccacctacacaccaccgtggccgacactttcattaaaaagtttcctgagacga

SEQ ID NO: 461 - DNA, 6791 bp, Homo Sapiens
ggacccgccgcagagccaggtaagcggccctcgcaggcctcgggccgggcacggggactaggatgccgccggggacggggatgaggccgtgaggatgcgcgaagggccgccccctctcccggcccgcggggggcgctcggcgctgtgcccgggctagcccgaggcccggcctcaggccccacgcggcccctttccccctcggacccaccgtgcgtcccgcggcacggaccctctgcccgggaggcgcgggcacatcgcggagctccggcgcggcggcgggggagccgcagcagcaggtgcgcggcctgggccggagccgccagcccgggaggaggcggtgctaatctcagggaccggagacacctgcagcggccgcgagcccggcagcggcgacatcctcgagtccagtgcagaatacagaaactgcagccatgaccacgcacgtcaccctggaagatgccctgtccaacgtggacctgcttgaagagcttcccctccccgaccagcagccatgcatcgagcctccaccttcctccatcatgtaccaggctaactttgacacaaactttgaggacaggaatgcatttgtcacgggcattgcaaggtacattgagcaggctacagtccactccagcatgaatgagatgctggaggaaggacatgagtatgcggtcatgctgtacacctggcgcagctgttcccgggccattccccaggtgaaatgcaacgagcagcccaaccgagtagagatctatgagaagacagtagaggtgctggagccggaggtcaccaagctcatgaagttcatgtattttcagcgcaaggccatcgagcggttctgcagcgaggtgaagcggctgtgccatgccgagcgcaggaaggactttgtctctgaggcctacctcctgacccttggcaagttcatcaacatgtttgctgtcctggatgagctaaagaacatgaagtgcagcgtcaagaatgaccactctgcctacaagagggcagcacagttcctgcggaagatggcagatccccagtctatccaggagtcgcagaacctttccatgttcctggccaaccacaacaggatcacccagtgtctccaccagcaacttgaagtgatcccaggctatgaggagctgctggctgacattgtcaacatctgtgtggattactacgagaacaagatgtacctgactcccagtgagaaacatatgctcctcaaggtgatgggctttggcctctacctaatggatggaaatgtcagtaacatttacaaactggatgccaagaagagaattaatcttagcaaaattgataaattctttaagcagctgcaggtggtgccccttttcggcgacatgcagatagagctggccagatacattaagaccagtgctcactatgaagagaacaagtccaagtggacgtgcacccagagcagcatcagcccccagtacaatatctgcgagcagatggttcagatccgggatgaccacatccgcttcatctccgagctcgctcgctacagcaacagtgaggtggtgacgggctcagggctggacagccagaagtcagacgaggagtatcgcgagctcttcgacctagccctgcggggtctgcagcttctatccaagtggagcgcccacgtcatggaggtgtactcttggaagctggttcatcccacagacaagttctgcaacaaggactgtcctggcaccgcggaggaatatgagagagccacacgctacaattacaccagtgaggaaaaatttgccttcgttgaggtgatcgccatgatcaaaggcctgcaggtgctcatgggcaggatggagagcgtcttcaaccaggccatcaggaacaccatctacgcggcattgcaggacttcgcccaggtgacgctgcgtgagcccctgcggcaggcggtacggaagaagaagaatgtcctcatcagcgtcctacaggcaattcgaaagaccatctgtgactgggagggagggcgagagccccctaatgacccatgcttgagaggggagaaggaccccaaaggtggatttgatatcaaggtgccccggcgtgctgtggggccatccagcacacagctgtacatggtgcggaccatgcttgaatcactcattgcagacaaaagcggctccaagaagaccctgaggagcagcctggatggacccattgtcctcgccatagaggactttcacaaacagtccttcttcttcacacatctgctcaacatcagtgaagccctgcagcagtgttgtgacctctcccagctctggttccgagaattcttcctggagttaaccatgggccgacgaatccagttccccatcgagatgtccatgccctggattctaacggaccatatcctggaaaccaaagaaccttccatgatggagtatgtcctctaccctctggatctgtacaacgacagcgcctactatgctctgaccaagtttaaaaagcagttcctgtacgatgagatagaagctgaggtgaacctgtgttttgatcagtttgtctacaagctggcagaccagatctttgcttactacaaagccatggctggcagtgtcctgttggataaacgttttcgagctgagtgtaagaattatggcgtcatcattccgtatccaccgtccaatcgctatgaaacactgctgaagcagagacacgtccagctgttgggtagatcaattgacttgaacagactcattacccagcgcatctctgccgccatgtataaatccttggaccaagctatcagccgctttgagagtgaggacctgacctccattgtggagctggagtggctgctggagattaaccggctcacgcatcggctgctctgtaagcatatgacgctggacagcttcgatgccatgttccgagaggccaatcacaatgtgtccgccccctatggccgtatcaccctgcatgtcttctgggaactgaactttgactttctccccaactactgctacaatgggtccactaaccgttttgtgcggactgccattcctttcacccaagaaccacaacgagacaaacctgccaacgtccagccttattacctctatggatccaagcctctcaacattgcctacagccacatctacagctcctacaggaatttcgtggggccacctcatttcaagactatctgcagactcctgggttatcagggcatcgctgtggtcatggaggaactgctaaagattgtgaagagcttgctccaaggaaccattctccagtatgtgaaaacactgatagaggtgatgcccaagatatgccgcttgccccgacatgagtatggctccccagggatcctggagttcttccaccaccagctgaaggacatcattgagtacgcagagctcaaaacagacgtgttccagagcctgagggaagtgggcaatgccatcctcttctgcctcctcatagagcaagctctgtctcaggaggaggtctgcgatttgctccatgccgcacccttccaaaacatcttgcctagagtctacatcaaagagggggagcgcctggaggtccggatgaaacgtctggaagccaagtatgccccgctccacctggtccctctgatcgagcggctggggacccctcagcaaatcgccattgctcgcgagggtgacctcctgaccaaggagcggctgtgctgtggcctgtccatgttcgaggtcatcctgacccgcattcggagctacctgcaggaccccatctggcggggcccaccgcccaccaatggcgtcatgcacgtcgatgagtgtgtggagttccaccggctgtggagcgccatgcagttcgtgtactgcatccctgtgggaaccaacgagttcacagctgagcagtgtttcggcgatggcttgaactgggctggttgctccatcattgtcctgctgggccagcagcgtcgctttgacctgttcgacttctgttaccacctgctaaaagtgcagaggcaggacgggaaggatgaaatcattaagaatgtgcccctgaagaagatggccgaccggatcaggaagtatcagatcttgaacaatgaggtttttgccatcctgaacaaatacatgaagtccgtggagacagacagttccactgtggagcatgtgcgctgcttccagccacccatccaccagtccttggccaccacttgctaagcagaagatcctgcagacccttatctggaggaggaagagaagcaggagagagaaagccacagccagcctgccataggatccaactggacaacgtgtgggatggacctggaaacaagcacctccccaaacacatcaccactccctagggcggggcctgtgcatgctctcccatgacatctccatgctggtttctccatagcataaatgaaaaaaaaaaaaaaaaagtaaacagggcagtgtgtgctttttcttttctcccccctcaactatattaagaactcctagtttcaccctttctccatcccatcatcccacctatctgtggttgcttcccaagacctcctcccaagatagacatctcctacccagtgcccttgtgtgaccccaggactcaagtctcagactgtgaacagatgtggccatgcccagagacgccagcctggccagaagggcatgcctcagcttactacttcatctctcctggttccctccctgcagtgccccgggtgtcatcttctcccactctgggtaccagggattctaccacataggcttcccaaagccccattctaactcccctctctcagggaagccctagagagaggtccaaaaagcattcacagctgtatcacactctatgcaggtggggtaggagactgatcaggcctgctgtggggaagcagtatgtatgaacacagccagaaatgtcatagtccaaacaggatgctttcaggccatctcagctgcttgatggtgagatggttcccttattccttcaggaaaggcttagcattgggccacataggggaagcagctttgaacaaatcagtcatagcactgcctatagcattagccagtgaccaaattagggacaacgtcttggcacagaattgcttatcaaggaacatttccacaagaaagaaaatattaaggggttatttccacagaagcccaaaacgtcttggaaacacagaggtgaggaggaggaatagtaattgtcaatgagcttttaataccaagatacaccccctgcccccaaagaagagtcctcttttagggaatcagaaccttcattgtcctagaagctgaaagattcttggaacattttagcttttactctcaacttgctgttctctttacattccttaagttagactttcgggtgtggcttctctcccaggggtaacatttacttccattttctagactgaaccaaaagtcttctgcagaatctcccaccgagtgtggtaagaaggaaggacaaaaggctttaggatataaatttcatgttacagagcatgtcattgtcaaaggaaatctgtggccctgagattttaagaacataaaatgtgacatttgatatttctccagcccagggaagtaagatggttagcaatggttgccttaatcaaatggtcccatttttaaccccaaaggaagtgcccacagcaagaggtttgtgtgatgcacttatgtcctccggtgaggaaagggggccacatatgaaaggccccttaggtcagatcctgagagtagcacatttgagtgcagattcctgggccccacctcaaacctactaattctgaatctctgggaatagggccaggaaatctgccctttctacaaactacccaagttgttctgttgcacatcaatgtttgggaaccactgctgtaagggaatcattctggtcaccttgagctttgagctaccactaagccatgaaagaaaatacatcatacagggaagagagaagggaggaggttccaagtagtaactggcagatcctcctgtctggaggtaccaccttctattctggtttctgacttttccttcttgatgaccatagatgtgttccagaggcaaaagagacacattatcccagatggcagaacatgctttcaaaacatataaaatgtcaaagttccagatccttctacatctttagtcctgtctgaggatggtagctggctctctgtagctgatagatggctagagttccatccaaatccttgaccacgacttcatggagatttgaataatctatttgatgagatttctatttcaataacccacctctctcaccccacattcatatccctaaatttgaccctctgggccgagtcacattaccttcaggagacttgatcccagtagactgaggtcttccctttcagcagaaagatttcatttccctggcttgccagtggcactgatttccgaacacccaatgagtttaatattctttcctccttggcattactgccccagcctctttttattttttttgtgtgtgtctaataaccaggaaaaaaataaagcttaggttttaaaaagttttaaaaataatctgtttcagaaactgtcaaatgtaccatatttgtattaagagttgttgggaatttttgtacaatgaatttacatttatttatggtgacatatttacgcttgtgatcaaataatgatgttaaattcttaaatcatatttgctatgcagctgaagatgatattttgatttgtattttgggggtacctgtgttgagttgataaacatttccatcttcattaaaactgcttccaaactagtaaaaccagcaa

SEQ ID NO: 462 - DNA, 1128 bp, Homo Sapiens
gccggaagtggccccagcctcgaggccgggcgtcttcggtcatctccggcgcttctagggctggttcccgtcatcttcgggagccgtggaggtacgaacttaagacatgcctattttattaatttacttccaaacgcaacgaaaggtccatggacaatttgtgggccatttaattcagggcccccaattcgtacgtggagaagtgggaatgcaaaagtactttgacctttaaccttcggtccggcgcggtggagggaaacgcctccgtctctatataaggaattttccggtctcttcgggtcctttttcctctcttcagcgtggggcgcccacaatttgcgcgctctctttctgctgctccccagctctcggatacagccgacaccatgggtttcggagacctgaaaagccctgccggcctccaggtgctcaacgattacctggcggacaagagctacatcgaggggtatgtgccatcacaagcagatgtggcagtatttgaagccgtgtccagcccaccgcctgccgacttgtgtcatgccctacgttggtataatcacatcaagtcttacgaaaaggaaaaggccagcctgccaggagtgaagaaagctttgggcaaatatggtcctgccgatgtggaagacactacaggaagtggagctacagatagtaaagatgatgatgacattgacctctttggatctgatgatgaggaggaaagtgaagaagcaaagaggctaagggaagaacgtcttgcacaatatgaatcaaagaaagccaaaaaacctgcacttgttgccaagtcttccatcttactagatgtgaaaccttgggatgatgagacagatatggcgaaattagaggagtgcgtcagaagcattcaagcagacggcttagtctggggctcatctaaactagttccagtgggatacggaattaagaaacttcaaatacagtgtgtagttgaagatgataaagttggaacagatatgctggaggagcagatcactgcttttgaggactatgtgcagtccatggatgtggctgctttcaacaagatctaaaatccatcctggatcatggcatttaaataaaagattgaaagattacaaaaaaaaaaaaaaaaaa

SEQ ID NO: 463 - DNA, 1941 bp, Homo Sapiens
gagagggcgaaggtaggctggcagatacgttcgtcagcttgctcctttctgcccgtggacgccgccgaagaagcatcgttaaagtctctcttcaccctgccgtcatgtctaagtcagagtctcctaaagagcccgaacagctgaggaagctcttcattggagggttgagctttgaaacaactgatgagagcctgaggagccattttgagcaatggggaacgctcacggactgtgtggtaatgagagatccaaacaccaagcgctccaggggctttgggtttgtcacatatgccactgtggaggaggtggatgcagctatgaatgcaaggccacacaaggtggatggaagagttgtggaaccaaagagagctgtctccagagaagattctcaaagaccaggtgcccacttaactgtgaaaaagatatttgttggtggcattaaagaagacactgaagaacatcacctaagagattattttgaacagtatggaaaaattgaagtgattgaaatcatgactgaccgaggcagtggcaagaaaaggggctttgcctttgtaacctttgacgaccatgactccgtggataagattgtcattcagaaataccatactgtgaatggccacaactgtgaagttagaaaagccctgtcaaagcaagagatggctagtgcttcatccagccaaagaggtcgaagtggttctggaaactttggtggtggtcgtggaggtggtttcggtgggaatgacaacttcggtcgtggaggaaacttcagtggtcgtggtggctttggtggcagccgtggtggtggtggatatggtggcagtggggatggctataatggatttggtaatgatggtggttatggaggaggcggccctggttactctggaggaagcagaggctatggaagtggtggacagggttatggaaaccagggcagtggctatggcgggagtggcagctatgacagctataacaacggaggcggaggcggctttggcggtggtagtggaagcaattttggaggtggtggaagctacaatgattttgggaattacaacaatcagtcttcaaattttggacccatgaagggaggaaattttggaggcagaagctctggcccctatggcggtggaggccaatactttgcaaaaccacgaaaccaaggtggctatggcggttccagcagcagcagtagctatggcagtggcagaagattttaattaggaaacaaagcttagcaggagaggagagccagagaagtgacagggaagctacaggttacaacagatttgtgaactcagccaagcacagtggtggcagggcctagctgctacaaagaagacatgttttagacaaatactcatgtgtatgggcaaaaaactcgaggactgtatttgtgactaattgtataacaggttattttagtttctgttctgtggaaagtgtaaagcattccaacaaagggttttaatgtagatttttttttttgcaccccatgctgttgattgctaaatgtaacagtctgatcgtgacgctgaataaatgtcttttttttaatgtgctgtgtaaagttagtctactcttaagccatcttggtaaatttccccaacagtgtgaagttagaattccttcagggtgatgccaggttctatttggaatttatatacaacctgcttgggtggagaagccattgtcttcggaaaccttggtgtagttgaactgatagttactgttgtgacctgaagttcaccattaaaagggattacccaagcaaaatcatggaatggttataaaagtgattgttggcacatcctatgcaatatatctaaattgaataatggtaccagataaaattatagatgggaatgaagcttgtgtatccattatcatgtgtaatcaataaacgatttaattctcttgaaaaaaaaaaaaaaaaaa

SEQ ID NO: 464 - DNA, 2921 bp, Homo Sapiens
gcaacgacgcctgcgcagtgtgaccgggatggcgcattttcttgcaccaactaatgcggtgtcgctggcggctgaggagggcggagagttctgtggtgaaatagtgggaaggattcatgtaggcatcgggaagagcctaagtccacattataaaataggaagttgatgcggggtacagttactcccggaccggcggcgtgaaagtcgtgatatcatcgttgaactattagctttgaagtttaaatccaatggagaagactcaagaaacagtccaaagaattcttctagaaccctataaatacttacttcagttaccaggtaaacaagtgagaaccaaactttcacaggcatttaatcattggctgaaagttccagaggacaagctacagattattattgaagtgacagaaatgttgcataatgccagtttactcatcgatgatattgaagacaactcaaaactccgacgtggctttccagtggcccacagcatctatggaatcccatctgtcatcaattctgccaattacgtgtatttccttggcttggagaaagtcttaacccttgatcacccagatgcagtgaagctttttacccgccagcttttggaactccatcagggacaaggcctagatatttactggagggataattacacttgtcccactgaagaagaatataaagctatggtgctgcagaaaacaggtggactgtttggattagcagtaggtctcatgcagttgttctctgattacaaagaagatttaaaaccgctacttaatacacttgggctctttttccaaattagggatgattatgctaatctacactccaaagaatatagtgaaaacaaaagtttttgtgaagatctgacagagggaaagttctcatttcctactattcatgctatttggtcaaggcctgaaagcacccaggtgcagaatatcttgcgccagagaacagaaaacatagatataaaaaaatactgtgtacattatcttgaggatgtaggttcttttgaatacactcgtaatacccttaaagagcttgaagctaaagcctataaacagattgatgcacgtggtgggaaccctgagctagtagccttagtaaaacacttaagtaagatgttcaaagaagaaaatgaataatgttaagccattcttgattggacctcatagcttattttagttaatcttttttttgtcttttagccttaccaccttttaaaaaatttgttattctccagaaacagtaaataggtgagtaggggtggtgcaagtgaattcgttttcatttagaagcccctctgtacagataatcaaaattcaaagttgaaagaatcaaaagcagccacagttatgtaggtctgatttgaatgtcataattgcagtgacaggacattgccaccaactctatcctactaccatcaatgttgtgtttattccgtcaataaaaaagacttgcttccaggaatttttatccatacactttctaactgtactatctgggcagttccaagccagtttctattagctagctggaccaaagaccacaaatctctttttttcctaaacgctgctgtaaggaatatctcacttttccccccggaaacaccctcactgaagtcttctatgaaaaggctgataatgggctgggcgcggtggctcacgcctgtaatcccagcactttgggaggccgaggcgggcagatcacgaggtcaggagatcgagaccatcctgacacggtgaaaccctgtctctactaaaaatacaaaaaattagctgggcgtggtggtgggcgcctgtagtcccagctactcgggaggctgaggcaggagaatggtgtgaacccaggaggcggagcttgcagtgagccgagatagtgcctctgcactccagcctgggtgacagagcgagactccgtctcaaaaaaaagggctgataatgataaacagtgagcactccggtcctttttcttaggttttccttttttccttcctctccaccccacaagttttgctttttaaccaaggtgtctctgcttgatgaaattcacatgctagtctaaatctttttttctcccttgtaacatttatgtgccccaaactggttagtatatgggtacagcattccctttccaattgggaagcggaaaaagagagtatgggatattttagaagggagcctttgaaccttattatatttccccatcattgatagtgacaatcttaaaagggttgttttcttaccttaagtacaaaagcatggaaaaatgcgcttttccttcccgcccacatcaccaccccgacttgaagacagtaggtgcttgaatggaaagtgagtaggcatctttaatcgccctgattaaaggaaagtgttagcctgagagggcctgactgaaaagtaaccaaaggcttaatatcaaacactaattagctttttagtgccttaaccctgacctggttaccagttttctgtagtttctacacccaagccactgaagtcatctgtggcccaagaggtaggacaaaaaaaaaaaaaaaaaaagctgatttcaatatttgatttgttgacatcccaaaatgaaagttttatgtttcccttagaaacatgttttgcttggttctatagtatgttacttaggatctatttaccatatatttgtatgagaaatcctcacccaagcattcaacctaaatctttgaaaagttgggtgctgtctttagtaacttttaaaatagtttaaatctcccattttaatagtgataaggaaacctgttaaaatcatggctattgatgttatagtatggaaagttgaactttatgaacccatacttttaaaaagcatttttaaaaatctaacactgactatagaaacaaattaaaatgtctacctttaagtataaaaaaaaaaaaaaa

SEQ ID NO: 465 - DNA, 1905 bp, Homo Sapiens
gctgtcttttcagtcgggcgctgagtggtttttcggatcatgtctggtggctccgcggattataacagagaacatggcggcccagagggaatggaccccgatggtgtcatcgagagcaactggaatgagattgttgataactttgatgatatgaatttaaaggagtctctccttcgtggcatctatgcttacggttttgagaagccttccgctattcagcagagagctattattccctgtattaaagggtatgatgtgattgctcaagctcagtcaggtactggcaagacagccacatttgctatttccatcctgcaacagttggagattgagttcaaggagacccaagcactagtattggcccccaccagagaactggctcaacagatccaaaaggtaattctggcacttggagactatatgggagccacttgtcatgcctgcattggtggaacaaatgttcgaaatgaaatgcaaaaactgcaggctgaagcaccacatattgttgttggtacacccgggagagtgtttgatatgttaaacagaagatacctttctccaaaatggatcaaaatgtttgttttggatgaagcagatgaaatgttgagccgtggttttaaggatcaaatctatgagattttccaaaaactaaacacaagtattcaggttgtgttgctttctgccacaatgccaactgatgtgttggaagtgaccaaaaaattcatgagagatccaattcgaattctggtgaaaaaggaagaattgacccttgaaggaatcaaacagttttatattaatgttgagagagaggaatggaagttggatacactttgtgacttgtacgagacactgaccattacacaggctgttatttttctcaatacgaggcgcaaggtggactggctgactgagaagatgcatgccagagacttcacagtttctgctctgcatggtgacatggaccagaaggagagagatgttatcatgagggaattccggtcagggtcaagtcgtgttctgatcactactgacttgttggctcgcgggattgatgtgcaacaagtgtctttggttataaattatgatctacctaccaatcgtgaaaactatattcacagaattggcagagggggtcgatttgggaggaaaggtgtggctataaactttgttactgaagaagacaagaggattcttcgtgacattgagactttctacaatactacagtggaggagatgcccatgaatgtggctgaccttatttaattcctgggatgagagttttggatgcagtgctcgctgttgctgaataggcgatcacaacgtgcattgtgcttctttctttgggaatatttgaatcttgtctcaatgctcataacggatcagaaatacagattttgatagcaaagcgacgttagtcgtgagctcttgtgaggaaagtcattggctttatcctctttagagttagactgttggggtgggtataaaagatggggtctgtaaaatctttctttcttagaaatttatttcctagttctgtagaaatggttgtattagatgttctctatcatttaataatatacttgtggactaaaagatataagtgctgtataaaatcagccaattatgttaaactagcatatctgcctttattgtgtttgtcattagcctgagtagaaaggcctttaaaatttttttagaaagcatttgaatgcattttgtttggtattgtatttattcaataaagtatttaattagtgctaagtgtgaactggaccctgttgctaagccccagcaagcaatcctaggtagggtttaatccccagtaaaattgccatattgcacatgtcttaatgaagtttgaatgttaaataaattgtatattcactttaaaaaaaaaaaaaaaaa

SEQ ID NO: 466 - DNA, 3477 bp, Homo Sapiens
ggcggaaacgctttgtctgtccggcaagccgacggcccgctgctggcctccgtgacgcggcctcctccgcgcctcgcggcatggcgtcggaggggccgcgggagcccgaaagcgagggcatcaagttatcagcagatgtcaaaccatttgtccccagatttgccgggctcaatgtggcatggttagagtcctcagaagcatgtgtcttccccagctctgcagccacatactatccgtttgttcaggaaccaccagtgacagagcagaaaatatatactgaagacatggcctttggagcttcaacttttccacctcagtatttatcttctgagataactcttcatccatatgcctattctccttatacccttgactccacacagaatgtttactcagtgcctggctcccagtatctttataaccaacccagttgttaccgaggttttcaaacagtgaagcatcgaaatgagaacacatgccctctcccacaagaaatgaaagctctgtttaagaagaaaacctatgatgagaaaaaaacgtatgatcagcaaaagtttgacagtgaaagggctgatggaactatatcatctgagataaaatcagctagaggttcacatcatttgtccatttacgctgagaatagtttgaaatcagatggttaccataagcgaacagacaggaaatccagaatcattgcaaaaaatgtatctacctccaaacctgagtttgaatttaccacactggactttcctgaactgcaaggtgcagagaacaatatgtcagagatacagaagcaacccaagtggggacctgtccactctgtctctaccgacatttctcttctaagagaagtagtaaaaccagctgcagtgttatcaaagggtgaaatagtggtgaaaaataacccaaatgaatctgtaactgctaatgccgctaccaattctccttcatgtacaagagagttatcttggacaccaatgggttatgttgttcgacagacattatctacagaactgtcagcagcccctaaaaatgttacttctatgataaacttaaagaccattgcttcatcagcagatcctaaaaatgttagtataccatcttctgaagctttatcttcggatccttcctacaacaaagaaaaacacattattcatcctacccaaaagtctaaagcatcacaaggtagtgaccttgaacaaaatgaagcctcaagaaagaataagaaaaagaaagaaaaatctacatcaaaatatgaagtcctgacagttcaagagcctccaaggattgaagatgccgaggaatttcccaacctggcagttgcatctgaaagaagagacagaatagagacaccgaaatttcaatctaagcagcagccacaggataattttaaaaataatgtaaagaagagccagcttccagtgcagttggacttggggggcatgctgacagccctggagaagaagcagcactctcagcatgcaaagcagtcctccaaaccagtggtagtctcagttggagcagtgccagtcctttccaaagaatgtgcatcaggggagagaggccgccgcatgagtcaaatgaagaccccgcacaatcccttggactccagcgccccactgatgaagaaagggaagcagagggagatccccaaggccaagaagccaacctcactgaagaagattattttgaaagaacggcaagagagaaagcagcgtctccaagaaaatgctgtgagtccagcttttaccagtgatgacacacaagatggagagagtggtggtgatgaccagtttcccgagcaggcagagctgtcagggccagaggggatggacgaactgatctccactccttcggttgaggacaagtctgaagagccaccaggcacagagctccagagggacacagaggcctcccaccttgctcccaatcacaccaccttccctaagatccacagccgcagattcagggattactgcagccagatgcttagtaaagaagtggatgcttgtgttaccgacctactcaaagaactggtccgtttccaagaccgtatgtaccagaaagatccagtcaaggccaagactaaacgtcgacttgtgttggggttgagggaggttctcaaacacctgaagctcaaaaaactgaaatgtgtcattatttctcccaactgtgagaagatacagtcaaaaggtgggctggatgacactttgcacacaattattgattatgcctgtgagcagaacattccctttgtgtttgctctcaaccgcaaagctctggggcgcagtttgaataaggcagttcctgtcagtgtggtggggatcttcagctatgatggggcccaggatcagttccacaagatggttgagctgacagtggcggcccgacaggcgtacaagaccatgctggagaatgtgcagcaggagctggtgggagagcccaggcctcaggcacctcccagcctacccacacagggccccagctgccctgcagaagatggccccccagccctgaaagaaaaagaagagccacactacattgaaatctggaaaaaacatctggaagcatacagtggatgtaccctggagctagaagaatccttggaggcttcaacctctcaaatgatgaatttgaatttatgagagttcttgcctgtgtgtctgtattttgggtaaggaggggaggtctgaaaaagactttggggctttttcttctgtttttcatgacaatgtaatttgtgtaactgttgaatctggaaattgatcagcattaaagggcacatgaagcagtgtctgcaggcgttcagtgctgcggagcctgttaaaggtcactcagatgtgcaggtgttaatcttctctaaaagcctggtgatacagctctggctttctgagcacactacggatctggaaaatactggaaaatgtgatacttagaatactttggctgctaaggaaacttcctctccattgcagaatagctgagccaagtgagtgagtttgcagaaagcaggtggtgagctcctgcctgctggaggttgccatggagggccattcctgcccggcaacagcaccgtcctgcagggagccacttggcagaagggtgcagggctgctggtgtcagagcaagagggctacagggaaagggccctttctcaggggatgtagcttttttaaaagatttgggaacacttggaggatttgctaaaatgagcctcagaaggaaaattggttttctaacctgtgactttttgaaatgaattattcctttcagtctttatttttcaaagaaacaatgtgtattgaagtacctagatttgtttgataatcaacaaatctttcctttttcaatgaacatattctgaatgtggtttctgtcttagaccaggaggacagagtttgctttcatattttccctgtaagtaagagggcttatttattttaaataaagagtaattattaaattttaaaaaaaaaa

SEQ ID NO: 467 - DNA, 2370 bp, Homo Sapiens
ccccacccgggccctgccggcaggcacgaggggcggggcgcgcggcccgaggtgagggaccgcgggccggaggggatccagcgagtcagctgccgccgagggaccagcgcgggtctagctgctgccgccatccccaccatccctgaccgcgcctgcccgggctccgcgccaggaggagcggccaggcccagccccggcaccgcgcgctcggggaccccgacggcgcccagcccggcgaggggcctcagggggaggacgaggaggaaaggcggcctcgccggggacccggccatggcgctggacttcttggctggatgcgcggggggtgtggcaggcgtgcttgtgggacacccgtttgacacggtcaaggtacggcttcaggtccagagcgtggagaagcctcagtaccgcgggacgttgcactgcttcaagtccatcatcaagcaagagagcgtgctgggcctgtacaagggcctgggctcgccgctcatggggctcaccttcatcaacgcgctggtgttcggggtgcagggcaacaccctccgggccctgggccacgactcgcccctcaaccagttcctggcaggtgcggcggcgggcgccatccagtgcgtcatctgctgccccatggagctggccaagacgcggctgcagctgcaggacgcgggcccagcgcgcacctacaagggctcgctggactgcctcgcgcagatctacgggcacgagggtctgcgtggcgtcaaccggggcatggtgtccacgttgctgcgtgagacgcccagcttcggcgtctacttcctcacctatgacgctctcacgcgggcgctgggctgcgagccgggcgaccgcctgctggtgcccaagctgctgttggcgggcggtacgtcaggcatcgtgtcctggctctctacctatcctgtggacgtggtcaagtcgcggctgcaggcggacggactgcggggcgccccgcgctaccgcggcatcctggactgcgtgcaccagagctaccgcgccgagggctggcgcgtcttcacacgggggctggcgtccacgctgctgcgcgccttccccgtcaacgctgccaccttcgccaccgtcacggtggtgctcacctacgcgcgcggcgaggaggccgggcccgagggcgaggctgtgcccgccgcccctgcggggcctgccctggcgcagccctccagcctgtgacgctcaccccgccctccttccccagggctccttctcagaaacctgggacataaattggcccctgagtcgattgccctgcttcctgctgggatgctgcgagctgtggagtctatcagacgtgggctgaattttgctgatcagctgggtagttttggccgagaactgcacttgcctcagtgttctcatctatgaaataaggaccctcatgcccacactgtagagtcacgaagctcagagattattcccagcagcagccagcacctggcctggctgaggccattgcaccgttatcctggaaactgaggcagacactccagcccctttctgggatcctggccacgtcattgtgctcctgccctgcaggctggctcccgggggtctctgatggccaaccaaggggccacccagggacctctaactccacacatcctccacccgggggggtggtgggccacccctctggtctgtgttagggacagaggaaaacttggtgtgcctcctggtgtcacagaactggatcctctgcataccccagcttctccacatgccactgctaggggtaccccagctgctgccactcctgctggagggtgaactggggaccctgcaccctccgggaagccatggagtctgctggaggcaccatatcagcctgcgggactagggtggggagcaaacaggccagcggtggaggtctggacagttcaagtgtgatgcagctgtggcaaggagaaatccttccgcctctgggcctcaggctgcctgtccataaaatggggacatggccagctgacggacaactgagtctccggcccacctaccaccgccagccaggatcccccaaagtgtgcagagggctcagcagagaacagtatgggaccccctcaccaggcctggaacacctccagccacaaagaagccaaaggtcagtccctctgctccccagcaaacggtgcctcccaggcattctcagtgccagggcttcatccctgtgaaggcacagggcctgctagtgggcacaggggtggctagttggggcctggggcagaggagggctgcaccaggcgtcctggggaatgtgctcagtgaagacgacactgggctttgcacagcctggtgtcgctgtacagaaactgtcaagggaataaagtgttctttgttttttaa

SEQ ID NO: 468 - DNA, 2370 bp, Homo Sapiens; identical to SEQ ID NO: 467

SEQ ID NO: 469 - DNA, 1028 bp, Homo Sapiens
gagttaggtgacgctgcggggcgggcggacagactgcgggacggacggtggacgctgggacgcgtttgtagctccggccccgccgttccgacccccgccgccgtcgccgccatgacggggctagcactgctctactccggggtcttcgtggccttctgggcctgcgcgctggccgtgggagtctgctacaccatttttgatttgggcttccgctttgatgtggcatggttcctgacggagacttcgcccttcatgtggtccaacctgggcattggcctagctatctccctgtctgtggttggggcagcctggggcatctatattaccggctcctccatcattggtggaggagtgaaggcccccaggatcaagaccaagaacctggtcagcatcatcttctgtgaggctgtggccatctacggcatcatcatggcaattgtcattagcaacatggctgagcctttcagtgccacagaccccaaggccatcggccatcggaactaccatgcaggctactccatgtttggggctggcctcaccgtaggcctgtctaacctcttctgtggagtctgcgtgggcatcgtgggcagtggggctgccctggccgatgctcagaaccccagcctctttgtaaagattctcatcgtggagatctttggcagcgccattggcctctttggggtcatcgtcgcaattcttcagacctccagagtgaagatgggtgactagatgatatgtgtgggtggggccgtgcctcacttttatttattgctggttttcctgggacagctggagctgtgtcccttagcctttcagaggcttggtgttcagggccctccctgcactcccctcttgctgcgtgttgatttggaggcactgcagtccaggccgagtcctcagtgcggggagcaggctgctgctgctgactctgtgcagctgcgcacctgtgtcccccacctccaccctcaacccatcttcctagtgtttgtgaaataaacttggtatttgtctgggtcagtgcaaaaaaa

SEQ ID NO: 470 - DNA, 3054 bp, Homo Sapiens
gcctcccagcacgctggtcagctcctcttgctcgcaagcaggtctggccccagcggcgcgaagtcacgaggctgggggcggccggcggcgaagggggcggggcgaggccggggcgccgcagcgcgcataggcggagcctcgggccgcgggccgccttggtatatctgcgcgtgcgcggcgtcgctgctgggccagtcgggacagaggagacaagatggcgctgcgggcgatgcgggggattgtcaacggggccgcacccgagctacccgtgcccaccggtgggccggcggtgggagctcgggagcaggcgctggcagtcagtcggaactacctctcccagcctcgcctcacatacaagacagtatctggagtcaatggtccactagtgatcttagatcatgttaagtttcccaggtatgctgaaattgtccatttgaccttaccggatggcacaaagagaagtgggcaagttctggaagttagtggttccaaggcagtagttcaggtatttgaagggacttcaggtatagatgctaagaaaacgtcctgtgagtttactggggatattctccgaacaccggtgtctgaggatatgcttggtcgggtattcaatggatcgggaaaacccattgacagaggtcctgttgtactggccgaagacttccttgatatcatgggtcagccaatcaaccctcaatgtcgaatctacccagaggaaatgattcagactggcatttcggccatcgatgggatgaacagtattgctagggggcagaaaattcctatcttctctgctgctgggctaccacacaatgagattgcagctcagatctgtcgccaggctggtttggtaaagaaatccaaagatgtagtagactacagtgaggaaaattttgcaattgtatttgctgctatgggtgtaaacatggaaactgcccggttcttcaaatctgactttgaagaaaatggctcaatggacaatgtctgcctctttttgaacttggctaatgacccaaccattgagcgaattatcactcctcgcctggctctaaccacagctgaatttctggcgtaccaatgtgagaaacatgtattggttattctaacagacatgagttcttatgctgaagcacttcgagaggtttcagcagccagggaagaggtacctggtcgacgaggttttccaggttacatgtatacagatttagccacgatatatgaacgcgctgggcgagtggaagggagaaacggctcgattactcaaatccctattctaaccatgcctaatgatgatatcactcaccccatcccagacttgactggctacattacagaggggcagatctatgtggacagacagctgcacaacagacagatttatccacctatcaatgtgctgccctcactatcacggttaatgaagtctgctattggagaagggatgaccaggaaggatcatgccgatgtatctaaccagctatatgcgtgctatgctattggaaaggatgtgcaagccatgaaagctgtcgttggagaagaagcccttacctcagatgatcttctctacttggaatttctgcagaagtttgagaggaacttcattgctcagggtccttacgaaaatcgcactgtctttgagactttggacattggctggcagctactccgaatcttccccaaagaaatgctgaagagaatccctcagagcaccctcagcgaattttaccctcgagactctgcaaagcattagctgctgcttctgcattgctccgcgctcttgtgaaatactggttctgttttctttattccttttgcactctcggttcccacctttgtgttggagtttaccatgttaccctgtaattaaaaacaaagaataggtaacatattgtgccagtgttgcaacgttttaaactgctaacagaccttaaaatatccccctacctgggtcctcagtgctatgtttaaagtgctgcagggatggagtggcgttttcttattgctgtatgtattgtacatagtggagtagttagttacctgataacagtcttgttatttgggtctcttagaccttacctctcaactccctcaagagtaccagtctctgaagttataatgctttggtctctacattaggggcaagatccagtctgagagaagtctcctttgagaagggccaagaggctctttcctgagtgtttgctttcggtttgttggtatgcctgtattgctgggctgtgctgctgctcgaagcagatggttttgactgtctttttgctctttcctatataatgaatagatgagtgaaaggagttttctttttctctttagtacttacgtattgggattcctgtgtcttacagctctccctctccaaataatacacagaatcctgcaactttttgcacagctggtatctgtctggtagcagtgagaccccttgtcttggtgatccttactgggtttccaagcagaggagtcacatgattacaattgccagtagagttgttgtttggggtacaagatgagaagaaagaaaaacctacagcctttctacattctgacatgctaacagtggtttaagtttctaaagtgtttaccagatgctgaaggcaaggggagggagcagaagcacttatgtttacggatattttaaactctgttagagagcagcctttgaaaatccccaatttggttctgctttttgacctctctctaccttttcagggtaatctttgtggcacaaacgatagcatttccaagctttagagttttctgaattcctgcgccttcctgacgtgagccctgagcgatcttctatgcagttctgccatgcgtcctgttggtctctctgtgttctttgttacttgggtgcaatagcaacttccctaccccgtgcattccatctttcatgttgtgtaaagttcttcacttttttctctgagggctgggggttgggggagtcagcatgattatattttaatgtagaaaatgtgacatctggatataaaatgaaaataaatgttaaattaaatggaccttaaaaaaaaaaaa

SEQ ID NO: 471 - DNA, 1837 bp, Homo Sapiens
ggaacatggggctgtacgctgcggtggcaggcgtgctggccggcgtggagagccgccagggctctatcaaggggctggtgtactccagcaacttccagaacgtgaagcagctgtacgcgctggtgtgcgaaacgcagcgctactccgccgtgctggatgccgtgatctccagcgccggcctcctcagtgcgaagaagctgcagccgcacctggccaagggtaggggcggggcggggaagtgaaccccgacggtcagcgctttgtcatctggtttcagccccgctgccgtgcacggcgggactggagcaagtcgctcacctgaaatgagtgctagtgtatgagttgttgggaaagggctttcgagggggtgggggccaatggaaggctctgttgggacggcaccaggcgaggtgttgagttggctcggctcaaggttcttcggggtgtgagctggcatgaggacctgttggaagtgggatccaggcctggtccagcctcccagctgcctcgatttgtgcgtgtgaacactctcaagacctgctccgtttatgtagttatttcaagagacaaggtttctcctatcagggtcgggcttccaggctggatggagtgccctggcgcgatctcggctcaccgcaacctctgcctcctgggttcaagcgattctcctgcttcagccttctgagcagctgggattatgaaggggtggcctgcccctccacatctgtgggatatctcatcagccttgatgacttacaagccctcaaggggaagcattttctcctggactccttgatgccggagctgctggtgtttcccgcccagacagatctgcatgaacacccactgtaccgggccggacacctcattctgcaggacagggccagctgtctcccagccatgctgctggacccccgccaggctcccatgtcatcgatgcctgtgccgccccaggcaataagaccagtcacttggctgctcttctgaagaaccaagggaagatctttgcctttgacctggatgccaagcggctggcatccatggccacgctgctggcctgggttggcgtctcctgctgtgagctggctgaggaggacttcctggcggtctcccccttagatccgcgctatcgtgaggtccactatgtcctgctggatccttcctgcagtggctcgggtgagatggtatgccgagcagacagctggaggatcccggggcagggacacctagcccggtgcgtctgcatgccctggcagggttccagcagcgagccctgtgccacgcgctcactttcccttccctgcagcggctcgtctactccatgtgctccctctgccaggaggagaatgaagacatggtaccagatgcgctgcagcagaacccgggcgccttcaggctagctcccgccctgcctgcccggccccaccgaggcctgagcacgttcccgggtgccgagcactgcctccgggcttcccccaagaccacgcttagcggtggcttcttcgttgctgtaattgaacgggtcgagatgccgacctcagcctcacaggccaaagcatcagcaccagaacgcacacccagcccagccccaaagagaaagaagagacagcaaagagccgcagccggtgcttgcacaccgccttgcacatagcagaggctccaggctgactccttcctggtgggaaaggaagatgcctgtcctctccgtggaggaccctgggccctcaccgcaggcagcagtttgcattttgaaaggttattgggtcccttcctcgggctgtgttcttgctggtgagcaaaagtgttgcctgcagaaataaaatgcagaacgtactct

SEQ ID NO: 472 - DNA, 6932 bp, Homo Sapiens
ggcgatgagttcctgctgctgttcaccatggcctccaaccacccggccttcagcttccaccagaagcaggtgctgcgccaggagctcacgcagatccagagcagcctgaacggcggcgggggccacggcggcaagggcgcgcccgggccgggcggcgcgctgcccacttgcccagcctgccacaagatcactccaagaactgaggcccctgtcagcagtgtcagtaatagtttggagaatgccctgcacacatcagcacattccacggaggagtcgctgcccaagaggcccttaggaaaacacagcaaagtgagtgttgaaaagatagacctgaagggattatcacacacaaaaaatgacagaaatgttgaatgttcctttgaggtcttgtggtctgattcttcaataacatcagtaaccaaatcttcctctgaagtgacggaatttatttcaaagctatgtcagctctatcctgaagagaacttggagaaactcattccttgcttagctggtccggacgcattttatgtggagcgaaaccacgtggatctggactcaggcctgaggtacctggcctcattaccttctcacgtgttgaaaaatgaccatgtcaggaggtttctcagcacttcctctcccccacagcagcttcagagtccaagtcctggcaatccctccctttctaaagtaggtaccgtgatgggcgtgtctggaaggcctgtgtgtggagtggctggtatcccgtcctcgcagagcggagcccagcaccacgggcagcacccggccggctccgccgcccccttgcctcactgctcccatgcgggcagcgcgggctcagccctggcctaccggacccagatggacacatcacctgccatcctcatgccttccagtctgcagacccctcagacccaggagcagaatgggattctagactggcttaggaaactgcgtttgcacaagtattaccccgtctttaagcagctctccatggagaagtttttgagccttactgaagaagatctgaataaatttgagtctcttaccatgggggcaaagaagaagctcaagacccagctggagctggaaaaggagaagtcagagagacggtgcctgaacccctcggccccgccgctggtcaccagcagtggtgtggctcgagtgccccccaccagccacgtcgggcccgtgcagtcggggcggggcagccatgcagcagagctgcgggtggaagtggagcagccccatcaccagctgccccgggaaggcagttcctcggagtactccagctcctcctccagccccatgggggtacaggcccgggaagagagctccgacagcgctgaggagaatgacagacgtgtggagattcacttggagagctctgacaaggagaagccggtgatgctgctgaatcacttcacttccagttccgccagacccacggcccaggttctccctgtgcagaatgaggccagctccaatccatcaggccaccaccccctgcccccgcagatgctgagcgcagcctcacacatcacacccatccgcatgctgaattccgtgcacaagccggaaagagggagcgcggacatgaagctcctctcgtcttctgtgcactcacttttgtctctagaagaaaggaataaaggatctggaccaagaagcagcatgaaagtggacaagagctttggcagcgccatgatggacgtgctgcccgcgtccgcaccccaccagcctgtgcaggtcctctctgggctttcggagagcagctccatgtcacccacagtctcctttggtccccggaccaaagtcgtgcatgcatccacgctggacagggtgctgaagacagcacagcaaccggccctggtcgtggagaccagcacggccgccacggggacgcccagcacagtcctccacgccgcccgtccgcccatcaaactgctgctgtcgtcatctgttcctgctgattctgccatttctgggcaaacttcctgtcctaataatgtgcaaataagtgtgccccctgcaataataaacccccggactgctctgtacacagccaacaccaaagttgccttttctgcaatgagcagtatgccagtgggccccctgcagggtggcttctgtgcaaacagcaacactgcctctcccagcagccacccctccacgtcctttgccaacatggccacgttgcccagctgcccagcccccagctccagcccggcgctgtcctccgtccctgaaagcagtttctatagcagcagtggcggtggcggctccacaggaaacattcctgcctcgaatccgaaccaccaccaccaccaccaccatcagcagcccccggcacccccgcagcccgccccacccccgccaggctgcattgtgtgcacgtcctgtggctgcagcggcagctgcggctcgagtggcctgactgtcagctacgccaactacttccagcacccgttctccggtccgtccgtgttcaccttccccttcttgcccttcagtcccatgtgcagcagcggctacgtcagcgcccagcagtacggcggcggctccaccttccccgtcgtgcacgccccttacagcagcagcgggaccccagaccctgtcctgagtgggcagtccacgtttgccgtgccacccatgcagaacttcatggcagggacagcaggggtgtaccagacccaaggactggtgggcagtagcaatggttccagtcacaaaaagagcgggaacctatcttgttacaactgcggggccactggtcaccgcgcccaggactgcaaacagccgtccatggacttcaaccggccaggtacttttaggttgaaatacgcccctccagcagaaagtctggactccacagattgatatttttctctggcaacagaacgttattaagccatggagacataaggaaaattaaatacaaaactgagaagtctagttgctgttgagcttaatctttttaatccaaaggtgctttacttttcctagactggatagaaaatctagcgtagaagtgcatcaaactcgatttattgccaaaaccctagattggagcttggtgtcagaactcgcctagtgggcatctctgtggctggtgagatcggccacctccacttttggttgcagtgcagagacgccatgtctcccgaagagcattgccatcactggccctcctaggctcacacgtcaattccagggcagctacacgtggtctgaatcgagaaccgagcttggagttctccaagtggagttccacccgccggactcctgacacccctgggctagggaaaatgtcgactttgttttgttctgttcctaaagtgattagcactaatctctgggatttttaaggattgcactacagaagaatgtaccctgatgtaaatctctgcggttctgggagccaaactcctctgagaacagtcagtgcaagagactccaataatccatattgaaagagtcagcaccagcagaggctactcgacttaggacgcaacagaggttttagtatttccttccctcctccaagcacttgtagcagtttcaggtttttaatttttttctgcaaataaatctaaactacgttattaaatagaaatagtttactcgcaacaacttaatttctaagggtccaagtcccagagaatccatagtcgtcaaagctttgagagtatctttcttcccagccagtcagtggctttgagccctatcttccactacaaatgacctctcgaggggggacggcgacagcgcggctctgtgagtggctgtgaggatgctgcacgtcctcagcagagtttgcaagttgctttatctcccacgggctccccaagaacctccaaccccgaggcttatcgctagcggattcacacctgagacagacatttcaacaatgatacagtcctgtcatttatcagcaaaagattgggaattttctcctgtcaacttcttttgtattaggctgtgtattgatagttaattccgttaaaaattacttggaaaacagtgggaagtggtaggactctggaagaggccacacacccgagagctgcgagatctgtgcaagtctggttttggttaggtagtaataaaagtcctcactgtagatctctaaatttcaacccacggaaatgaaagccttttgtctgaaatttacggacttaaatcttcaaggttaaagggaattttctgctcaaataatactcttatcgaaaatgctaaagtcttcaatgttaaaatactgattggtaaaatcttgcagttgggattttgcagttggatatttattttaaaaaaaattataatattcagactattcttaaaatgggacaatcagcctcatgaaaaattgatgtaaatcagaagaataccctagaatgaggccttgtgatgtgagcgttcaatttgaagagcagttcctaacttcatagaaactaaagcagaaagttgttacattttttttatgacaggcttttagtagaattttttagttttattttagttgaattttatttctatgcaatgcagaattaacagacctcttctcctcatggtacacagtattacagtgttgaagtaatggtgatgcttattacaacagctatttaggggaatgttacgttgatctcttaaattgtaaacactacaaaatgtcaaaataatgagaactgacacaactttgccttaaagagtactagactggaccttctcatattacgtttaaggaagacttagagtgttcattgatgtttacgattttaatatttctgaaggccattacagtggcctggatatgtgctgaaagccaaacttttaaattttttggtttttttaagcaaagaaatattttaaataaatcctatttcaacactgaaattgttgaaaaccgtctcataacaaaaggaaaaaacattggaatttttgttttagtggtcagtataggggaatgaaagcgtctgttgttacccacgtaactattttgataagtattagaggttaaccttaaatccagcaaaacattaaaacagaaacttttcaacttggagcctgccattcagcgttgaggtagatgagttccgacactgtcacggctgtgttcccagcagcgaaggcctctgcggagctgccagtcgtcttgaacgtgcatgggcggcgtgtgacatctccagggaggccgtccgaagtcgagaatcgtcagctgtaagtaggagctacacagcgcagagaaaatggaaccacccatccgtgaggcctctttccggagggagccgcacacttggacttgagagtttgccagcagcgagctcggatgcatctctccaaaagccaccaaggtcggcgcgtctgaagagcgttttgcggtcatcagacttcctcatctgaaaacacagaacatactgaccctttcaagtacttagtcattttcctgaaagtgtggtctgtttcagaatgctgtggcaaccaggtaggtgtggcactggccatgtgccacgtctttgccctttgtagtctgtcagatattaaagtttctaaccctgtttttttaatctccaagaatggggaaagtggaatgtagagatggaagcagaacgtgatgtttggatacaacagctatttaatccttttttattttttaagcaaaacactcagttttctaccttattttctaatgttgatttcatggtaatactgacagttggaagtgtttaacataaaaactcattgctaaagagcactgaggaaatgggagctagcgcacttgtaataaaaataaagacaaaatattttcttgaatgcatatatgtgattgggtattttaaaaaccagtatcatctgtcatctccaaaagattacaggagtcagcttgttaatacagtagtgttagtaggttctgtatttttaattcagtacttagaattctaggtcctttattgcccaaagtcagcacagttagtttataccacagactctgtcttggggcacagtagtggggcggggtagtgactttgcctaaacatcacccagctggaacagaggctgagcggggctttaggcacttgccagatgggaactgggttgcaccctccttgctccctgtcattttcttgtcactcttcctgcttcccagtgttttattttatgccttgctcgttgtacatcatgatgactgatggtcttcaaggttgtgaggaaagccgtctccctgcttgactcgactgctgtcccagaggagagtcctgtgcgacctgagcgggggtggctgccatttccagcatgcaggtgacttccaaagaatgagtcaggtggcactgaaagccatgggttctgaagaggcgaatttgttgaaaagtcccaagggtctgaatgaaagcatctttaatcaacactcaacactcgcaatattctagaaaaccatatactgtgctggttgaggccaaaggttaacattgctccactgttcaccaaggaagggggcagtggccatccgccgcggcctcacgtgcgttgtaacaagccctcatcacatgtgtgagtcttacgtgcacaaaaagagaaggctttggtactgaaactggacaccttgtgtactcgataccttcacagcttctattggacatattttctttttaggaatgaaggaaaattctcccatttttgagccattcttttgtcaattctacaaaattgcatgtaactttataaatatttttaaaagatatagttttgtaaatatttaatattccgctaatttgattttgaattgtaaatgtcaagtattctgtttttggggtttttatgttttattatactttgttaaaaaggacaaattgtacatttttagaatgtttttatgagtaaatttaatgtactgaaaataaaaattttaaaaaaggctgaaaaaaaaaaaaaaaaaaaaa

SEQ ID NO: 473 - DNA, 1 bp, Homo Sapiens
  misc_feature (1)..(1): n is a, c, g, or t
n

SEQ ID NO: 474 - DNA, 1 bp, Homo Sapiens
  misc_feature (1)..(1): n is a, c, g, or t
n

SEQ ID NO: 475 - DNA, 1 bp, Homo Sapiens
  misc_feature (1)..(1): n is a, c, g, or t
n

SEQ ID NO: 476 - DNA, 1 bp, Homo Sapiens
  misc_feature (1)..(1): n is a, c, g, or t
n

SEQ ID NO: 477 - DNA, 1 bp, Homo Sapiens
  misc_feature (1)..(1): n is a, c, g, or t
n

SEQ ID NO: 478 - DNA, 1 bp, Homo Sapiens
  misc_feature (1)..(1): n is a, c, g, or t
n

SEQ ID NO: 479 - DNA, 1 bp, Homo Sapiens
  misc_feature (1)..(1): n is a, c, g, or t
n

SEQ ID NO: 480 - DNA, 1841 bp, Homo Sapiens
ctaaatttagatttcggagattgtgttgtctaagggtttgtctgagccgcctcggaagacctccggctcttgtcaggctcttgtctggtaattcctgggaatttacctgggctcatgcttgaagaagcagagggaccatctcggctgattagacacgccccagacccaaccccaggggtcaggtgaacagccaggcggctaagtgaccagctttcttgtcctctcctttttggcagatacagatcacttggattcagtcgagtttgctttgctccgtgggaactgcaccagagctggaggttagcatcttgcaaggaggtagtaacatatccagtcgtgaaactgggaaagaccagagctcttgcatcagggaaacatgtcccgtcggaaacagacaaatccaaataaagttcactgtgacagtgagggtgatgaagaggagacgacacaagatgaagtctcttcccacacatcagaggaagatggaggggtggtcaaagtggagaaagagttagaaaatacagaacagcctgttggtgggaacgaagtggtagagcacgaggtcacagggaatttgaattctgaccccttgcttgaactctgccagtgtcccctctgccagctagactgcgggagccgggagcagttgattgctcacgtgtaccagcacactgcagcagtggtgagcgccaagagctacatgtgtcctgtctgtggccgggcccttagctccccggggtcattgggtcgccacctcttaatccactcggaggaccagcgatctaactgtgctgtgtgtggagcccggttcaccagccatgccacttttaacagtgagaaacttcctgaagtactaaatatggaatccctacccacagtccacaatgagggtccctccagtgctgaggggaaggatattgcctttagtcctccagtgtaccctgctggaattctgcttgtgtgcaacaactgtgctgcctaccgtaaactgctggaagcccagactcccagtgtacgcaagtgggctctacgtcgacagaatgagcctttggaagtacggctgcagcggctggaacgagagcgcacggccaagaagagccggcgggacaatgagacccccgaggagcgggaggtgaggcgcatgagggaccgtgaagccaagcgcttgcagcgcatgcaggagacagacgagcagcgggcacgccggctgcagcgggatcgggaggccatgaggctgaagcgggccaatgaaaccccggaaaagcggcaggcccggctcatccgagagcgagaggccaagcggctcaagaggaggctggagaaaatggacatgatgttgcgagctcagtttggccaggacccttctgccatggcagccttagcagctgaaatgaacttcttccagctgcctgtaagtggggtggagttggacagccagcttcttggcaagatggcctttgaagagcagaacagcagctctctgcactgaaccacaccctcctgcctgccctccttcccacctacctacccacccacccacacccacagccacgaggaccagtgctgctgccacccacgaggccctgtccttgctgccagaggcaggcctgggtttattgcaggtggacctgagcagcccttgcatatgggaacaggatgatggggtcaggagggacctggctcaaggcagctctggacaagggagcaggcagtccagagaactggcctccccagcccactgccacaggctgtgcttctaggactgtggggcccctgtgtggcccatgaagttgtgaagtcaaataaattaattttatctttaaaaaaaaaaaaaaaaaaaa

SEQ ID NO: 481 - DNA, 3037 bp, Homo Sapiens
actcgcaggcgcgcgtgcgcacgcccgcgcgcctccagccgcggagtctccagcgcccctcagcagatccccgctctcccgggcgccgctactcacacaggcttccagccgccacggggcgtcctctgtctgctgcagcggcggcggcagcagagggaacggcgactgcagcccggccgcgtctcccagctccgtgcccgggacagagtccgggagaagcaaaggaggaggaggacgccgaggctaggaggagccgcgccgcgcccggcgccccactccgcgcagcgggttgcctccgctccccatacggcggccccaggtcctttgctgccagcatgatgtcgtatttataatatgtggaggagagagagctcaccatgctcaggtaaagggatggtatgtgcaccacaaataacaagcagaagcctctgatatgtcagaaccatgctgtcttccatgagacttcctttgtgaagagcatccatttaaaagacttttatgaatacatggtttcaatcaagtccccagagaacacatttgtcttctgagctgctggcagttttgagaatctgatgacctccgaggggaccctgcactcagccatcaaagtgttcctgcccctctggacactcataattcaatggtagatgcaggtggagttgagaacatcacccagcttccccaggagcttcctcagatgatggctgcagcagccgatggtttggggagtatagcgatagacacgacccagctcaacatgtccgtgacagatcccacagcctgggctacagccatgaataacctgggcatggttcccgtagggttgcctggacagcagctcgtgtctgactcaatctgtgtcccaggctttgatccaagcctcaacatgatgactggaatcacccccattaacccaatgataccaggccttggactggtacctcccccaccaccaacagaagtggctgttgtcaaagaaataatccactgcaaaagctgtactctttttcctcaaaatccaaatcttccacctccttccacaagagaacgacctcctgggtgtaagaccgtgtttgtcggaggattaccagaaaatgctactgaggaaattattcaagaagtctttgaacagtgcggtgatattacagcaattcggaaaagcaagaagaatttttgtcacattcgctttgcagaggaattcatggttgataaagccatttacctttctggttataggatgcgattagggtctagcaccgacaaaaaggattcaggccgccttcatgtggactttgcccaggccagggatgacttctatgagtgggaatgcaagcagaggatgcgtgcccgggaggagcggcaccggcgcaagctggaggaggaccggctcaggcccccatccccgcctgccataatgcactactcggagcacgaagccgctctgctggctgaaaagctgaaagatgatagcaagttttcagaggctatcacagtgctgctttcctggattgaacgaggggaagtgaatcggcgctctgcaaaccagttctattccatggtgcagtcggccaacagccacgtccgccggctaatgaatgaaaaagccacccatgagcaagagatggaggaagccaaggagaattttaaaaatgccttaactgggattctcactcaatttgagcagattgtggccgttttcaacgcttctaccagacaaaaagcttgggaccatttctcgaaagcccagcgcaagaacatagacatttggcgaaagcattctgaggagctccggaatgctcaaagtgagcagctcatgggcatccgccgcgaagaagaaatggaaatgtctgatgatgagaactgtgacagccctacaaagaaaatgagagtcgatgaatcagccctggctgcccaggcctacgctctgaaagaggagaatgacagtctccgctggcagctggatgcctacaggaatgaggtggagctgctgaaacaagaaaaagaacagcttttccgaacagaagaaaacctcaccaaggaccagcaactgcagtttctgcagcaaaccatgcaaggcatgcagcagcaattgctaaccatccaggaggagttaaacaacaaaaagtcagaattggaacaagcaaaggaagagcagtcccatacacaagcgttactaaaagtcctgcaggaacaattaaaaggtaccaaggaattggtcgagaccaatggccacagccatgaggattcaaatgaaatcaatgtgttgacagttgcattagtcaaccaagaccgagagaacaatattgagaaaagaagccaaggcttaaaatcagagaaagaagctctgctaataggtatcatatcaacgtttcttcacgtccatccttttggagccaacatagaatatctttggtcatacatgcagcagctggactccaagatatctgcaaatgaaatagaaatgcttttgatgaggctgccacgcatgttcaaacaggaattcacgggtgtgggagccacgctggaaaaaagatggaagctgtgtgcctttgaaggaattaaaactacctaactgcgaagagcaaagcatctctggaaatgaaaccatgtgaacctggccagggcggtgcgacggggaagcaggaggtgtggggttggtccagcacgcaacctttgtggagccatcgaagcctgcctttagttatatctgtggcgttctcttgtaagtggaaatgtaattgtgtaccagtttcttaaaataaacaaagcttcatactgtgacagatctgtttcctatgaaaaccaaacaatgattccacagtcataatgatggcaaaatcttaaaatgtgctacatttgagaatagctcaccaagcaaaatatttaaagttaatgatggtgtagcaatgattgttgctaggctacagagttgtatatgtaatgtatagctgaaatcattaaatgacattttcctgaaagtctttctgttttagtaaaaaaaaaaaaaaaaaaaaaaagaaaaagaaaaagaaaaaaa

SEQ ID NO: 482 - DNA, 1978 bp, Homo Sapiens
agcggccaggcgcatgcgccgagtatcgccacgcctggtctctgggacgcccctccggaccggtttcgcctcgcggagccggtaggtccaggtgcagcggccgcagtgctgcgtccgtgcgccgcgggctggggcggtctcaggtgtgccgaagctctggtcagtgccatgatccggcaggagcgctccacatcctaccaggagctgagtgaggagttggtccaggtggttgagaactcagagctggcagacgagcaggacaaggagacggtcagagtccaaggtccgggtatcttaccaggcctggacagcgagtccgcctccagcagcatccgcttcagcaaggcctgcctgaagaacgtcttctcggtcctactcatcttcatctacctgctgctcatggctgtggccgtcttcctggtctaccggaccatcacagactttcgtgagaaactcaagcaccctgtcatgtctgtgtcttacaaggaagtggatcgctatgatgccccaggtattgccttgtaccccggtcaggcccagttgctcagctgtaagcaccattacgaggtcattcctcctctgacaagccctggccagccgggtgacatgaattgcaccacccagaggatcaactacacggaccccttctccaatcagactgtgaaatctgccctgattgtccaggggccccgggaagtgaaaaagcgggagctggtcttcctccagttccgcctgaacaagagtagtgaggacttcagcgccattgattacctcctcttctcttctttccaggagttcctgcaaagcccaaacagggtaggcttcatgcaggcctgtgagagtgcctattccagctggaagttctctgggggcttccgcacctgggtcaagatgtcactggtaaagaccaaggaggaggatgggcgggaagcagtggagttccggcaggagacaagtgtggttaactacattgaccagaggccagctgccaaaaaaagtgctcaattgttttttgtggtctttgaatggaaagatcctttcatccagaaagtccaagatatagtcactgccaatccttggaacacaattgctcttctctgtggcgccttcttggcattatttaaagcagcagagtttgccaaactgagtataaaatggatgatcaaaattagaaagagataccttaaaagaagaggtcaggcaacgagccacataagctgaagtcacctcgcgttgtttagagaactgtccacatcaatgggagctgtcatcacttccactttgtaaacggagctatcaacaatcctgtactcacttgaagaaatggggccttgctgggaggaacagcatgtaaaactggaacttctaaccccgtcccaaaagaggcggtgtagagcctaatagaagagactaatggataaacctacaagttatttaaatatttaaattattaataaactttttaaagagctggccaatgacttttgaatagggtttgtagaagatgcctttcttcctgtttggttcattgtattgtattaggttaagctctactagggtaatgaaggctctacttttcactttttaaaagtggacaaaagagtgtgattttctttttccaaaaattcctgagtatcaagacgtgcaggtcatgctttggagcctatgcactgtacacaaaggcaaaaccctatgactttggcatcatctgccattgatgtccagcctctgacatgctctttgatttgttaaatgttaaatgagactttaaggctactagaaactagtaattaagtttcttaatggactgagtagccacctacttgtccggctagaatgtttgttgatgtatgagtttagattaacactcaaaagcactaggacagatgtacatagaaggtgcctactcattgtattttgatgatttcattaacaggtaaataaaagttaatacaaaaggaaaaaaaaaaaaaaaaaa

SEQ ID NO: 483 - DNA, 2494 bp, Homo Sapiens
agttggcgacatggtggcacccgtgctggagacttctcacgtgttttgctgcccaaaccgggtgcggggagtcctgaactggagctctgggcccagaggacttctggcctttggcacgtcctgctccgtggtgctctatgaccccctgaaaagggttgttgttaccaacttgaatggtcacaccgcccgagtcaattgcatacagtggatttgtaaacaggatggctccccttctactgaattagtttctggaggatctgataatcaagtgattcactgggaaatagaggataatcagcttttaaaagcagtgcatcttcaaggccatgaaggacctgtttatgcggtgcatgctgtttaccagaggaggacatcagatcctgcattatgtacactgatcgtttctgcagctgcagattctgctgttcgactctggtctaaaaagggtccagaagtaatgtgccttcagactttaaactttggaaatggatttgctttggctctctgcttatcttttttgccaaatactgatgtaccaatattagcatgtggcaatgatgattgcagaattcacatatttgctcaacaaaatgatcagtttcagaaagtgctttctctctgtggacatgaggattggattagaggagtggaatgggcagcctttggtagagatcttttcctagcaagctgttcacaagattgcctgataagaatatggaagctgtatataaagtcaacatctttagaaactcaggatgacgataacataagactgaaagaaaatacttttaccatagaaaatgaaagtgttaaaatagcatttgctgttactctggagacagtgctagccggtcatgaaaactgggtaaatgcagttcactggcaacctgtgttttacaaagatggtgtcctacagcagccagtgagattattatctgcttccatggataaaaccatgattctctgggctccagatgaagagtcaggagtttggctagaacaggttcgagtaggtgaagtaggtgggaatactttgggattttatgattgccagttcaatgaagatggctccatgatcattgctcatgctttccacggagcgttgcacctttggaaacagaatacagttaacccaagagagtggactccagagattgtcatttcaggacactttgatggtgtccaagacctagtctgggatccagaaggagaatttattatcactgttggtactgatcagacaactagactttttgctccatggaagagaaaagaccaatcacaggtgacttggcatgaaattgcaaggcctcagatacatgggtatgacctgaaatgtttggcaatgattaatcggtttcagtttgtatctggagcagatgaaaaagttcttcgggttttttctgcacctcggaattttgtggaaaatttttgtgccattacaggacaatcactgaatcatgtgctctgtaatcaagatagtgatcttccagaaggagccactgtccctgcattgggattatcaaataaagctgtctttcagggagatatagcttctcagccttctgatgaagaggagctgttaactagtactggttttgagtatcagcaggtggcctttcagccctccatacttactgagcctcccactgaggatcatcttctgcagaatactttgtggcctgaagttcaaaaactatatgggcacggttatgaaatattttgtgttacttgtaacagttcaaagactctgcttgcctcagcttgtaaggcagctaagaaagagcatgcagctatcattctttggaacactacatcttggaaacaggtgcagaatttagttttccacagtttgacagtcacgcagatggccttctcacctaatgagaagttcttactagctgtttccagagatcgaacctggtcattgtggaaaaagcaggatacaatctcacctgagttcgagccagtttttagtctttttgccttcaccaacaaaattacttctgtgcacagtagaattatttggtcttgtgattggagtcctgacagcaagtatttcttcactgggagtcgagacaaaaaggtggttgtctggggtgagtgcgactccactgatgactgtattgagcacaacattggcccctgctcctcagtcctggacgtgggtggggctgtgacagctgtcagcgtctgcccagtgctccacccttctcaacgatacgtggttgcagtaggattggagtgtggaaagatttgcttatatacctggaaaaagactgatcaagttccagaaataaatgactggacccactgtgtagaaacaagtcaaagccaaagtcatacactggctatcagaaaattatgctggaagaattgcagtggaaaaactgaacagaaggaagcagaaggtgctgagtggttacactttgcaagctgtggtgaagatcacactgtgaagatacacagagtcaataaatgtgcactgtaatgg

SEQ ID NO: 484 - DNA, 1920 bp, Homo Sapiens
atggaacagcggttagctgagtttcgggcggcgcggaaacgggcgggtctggcggcccaaccccctgctgccagtcagggcgcacaaaccccaggagagaaggcggaagcagcagcgactctaaaggcagccccaggctggctaaagcggttcctggtatggaaacctaggcccgcgagtgcccgggcccagcccggcctagttcaggaagcggctcagccccagggcagcacatcagagacaccatggaacacagccattcctctgccgtcgtgctgggaccagtctttcctgaccaatatcaccttcttgaaggttcttctctggttggtcctgctgggactgtttgtggaactggaatttggcctggcatattttgtcctgtccttgttctattggatgtacgtcgggacacgaggccctgaagagaagaaagagggagagaagagcgcctactctgtgttcaatccaggctgtgaagccatccagggcaccctgactgcagagcagttggagcgcgagttacagttgagacccctggcagggagataggacccagctgtgctgtcatgcagctaacctctgatgtggtcttcctcaccattggctatggatttgatttcaggtgtataggactaagggcagcttgcgggttagctctgtgactgcatagtttttctaccttctttccctgatcttttgctgccgtttgatctttgatagttttggtgaaactctctaaaatacattcactgtgggtccgacgcaatttataaaaattatgtactcaagaagggagacctgtttgtttcatttctcatctgtttgggagatgattttagagcactagaaaggcactggggagattctcagcttaaaacatccagcagtttgaagtatgattaggtacatcagggctgcattgtcaatgttctctttaagtcttttaacatttatagcaattttttttttcccggagagtttaggttgcaagttttgggtttcttgtttgtttttgttttgcttcctgctttaattctttaattttcagtcattactggtattgaaaaataaaatatctttaaaacatctcctcttcagaaataggtccctcttcattgcccatcaccatcttccactctcctattattttgccactactcagtaaaggaaggtaggaagagacaaacgcctaagtgcaggtgtggggagggatttcacaagtggttattaacggccagttcagcaagaagtgttgagtgtgtacaaaggggagggctggaagtgttaactccagacccgttggctgcttgagttgtttcttatattctaaagcagcagtccctaacctttttggcaccagggaccagttttgtggaacacagtttttccatggacggggtggtggtggaggatgaaacttccacctcagatcatcaggcattagagtctcataaggagcacgcaacctagatccctcgcatgcgcagttcacaatacggttctaagggctttagagtaagcagccttttcacctgtgggcctctggtgagaaattctgtaaattgtgataatcaggctggattttaatgctgcttttccagtacaatgttagagtttgggttcattaaaattaggcaaactcccattgggttagggcttctctcattccattttgtggctaaccttactgtgtttcagcccttgctgaaaattcttctgatacgtgttgcccttcctcacagccctttggccattgggagtttggctgtccctcagagccatccggtcaagcagatggtctgttctatctcacagaaaagtcttttcttccatgagttctgtctgaactgaacatgtaaaaagtatgggaaacagatgaatccctattaaacatgaagttttgattgtatttaagat

SEQ ID NO: 485 - DNA, 1701 bp, Homo Sapiens
aagtagggaaactgtgagggcggcaccggaagtggcgagcagtctgcgcgcggatggccgcagcggcgatggcggcagcggcaggtggaggggctggcgcggcccgctccctctcgcgcttccgaggctgcctggctggcgcgctgctcggggactgcgtgggctccttctacgaggcccacgacaccgtcgacctgacgtcagtcctgcgtcatgtccagagtctggagccggaccccggcacgcccgggagtgagcggacagaagccttgtactacacagatgacacagccatggccagggccctggtgcagtccctgctagccaaggaggcctttgacgaggtggacatggctcacagatttgctcaggagtacaagaaagaccctgacaggggctatggtgctggagtagtcactgtcttcaagaagctcctgaaccccaaatgtcgcgatgtctttgagcctgcccgggcccagtttaacgggaaaggctcctatggcaatggaggtgccatgcgggtggctggcatctccctggcctatagcagtgtccaggatgtgcagaagtttgcccggctctcggcccagctgacacacgcctcctccctgggttacaatggcgccatcctgcaggccctggctgtgcacctggccttgcagggcgagtcttccagcgagcactttctcaagcaactcctgggccacatggaggatctggagggtgatgcccagtccgtcttggatgccagggagttgggcatggaggagcgtccatactccagccgcctgaagaagattggagagcttctagaccaggcatcggtgaccagggaggaagtggtgtctgagctagggaatggcattgctgcctttgagtcggtacccaccgccatctactgcttcctacgctgcatggagccagaccctgagatcccttctgccttcaatagcctccaaaggactctcatttattccatctcacttggtggggacacagacaccattgccaccatggctggggccattgctggtgcctactatgggatggatcaggtgccagagagctggcagcaaagctgtgaaggctacgaggagacagacatcctggcccaaagcctgcaccgtgtcttccagaagagttgatgagggctacagctgttggggctctgccaggtcccctgggaccaactacagctccaatcagaaaccctgcgcttccttgagtgtggcttcccacttttcctgcattgtggagctgactgagtacaccggtgaggctggggtctctgcaggggaggtcactggaacagcgagcaagggactggtgcctcgctggtgctgggtctctggtttgctgcagagccgtaggacactcctggctcctcagtaggacagacagacgcaggcgggtttattttggaggggtacttgtggcattttcctgtattgtcttggacatgggatgtggggaggtggaaatgatgagcagtagcatcatttctccctgttgggttttagccagtttgccagcaagcgcatcctagcagggtccccgagcagcaggttgtgtggatgaagggacaggcacttgcatccagctgatctaggtcacacctggctcttggctgccatgtggcttattaacagcttccagtggaagtcgcaataaacagtttttggtaaatctcaaaaaaaaaaa

SEQ ID NO: 486 - DNA, 2797 bp, Homo Sapiens
tcccgcccgcgccctgcccaccccggccgcgcgcaccacaacgcccccgccccgccgcccggaaccagctgagcgcagctggacccagcagccgctgtctccagtgccgcagcagcaggtagtgctcatagctctctttgtccagtgcttcggccttggtcccagcgccttcccacggagcagcactcttcaccctgcacagccttgttaggagaaggggatgaatgaatacaggacttacgcgtctgctgtggcccagctggcttccagatggtgacatgagccacccacagccggagctgttcctctttcccaaagctcagcccaacagcatggtggtggaacaccccgagttcctcaaggcagggaaggagcctggcctgcagatctggcgtgtggagaagttcgatctggtgcccgtgcccaccaacctttatggagacttcttcacgggcgacgcctacgtcatcctgaagacagtgcagctgaggaacggaaatctgcagtatgacctccactactggctgggcaatgagtgcagccaggatgagagcggggcggccgccatctttaccgtgcagctggatgactacctgaacggccgggccgtgcagcaccgtgaggtccagggcttcgagtcggccaccttcctaggctacttcaagtctggcctgaagtacaagaaaggaggtgtggcatcaggattcaagcacgtggtacccaacgaggtggtggtgcagagactcttccaggtcaaagggcggcgtgtggtccgtgccaccgaggtacctgtgtcctgggagagcttcaacaatggcgactgcttcatcctggacctgggcaacaacatccaccagtggtgtggttccaacagcaatcggtatgaaagactgaaggccacacaggtgtccaagggcatccgggacaacgagcggagtggccgggcccgagtgcacgtgtctgaggagggcactgagcccgaggcgatgctccaggtgctgggccccaagccggctctgcctgcaggtaccgaggacaccgccaaggaggatgcggccaaccgcaagctggccaagctctacaaggtctccaatggtgcagggaccatgtccgtctccctcgtggctgatgagaaccccttcgcccagggggccctgaagtcagaggactgcttcatcctggaccacggcaaagatgggaaaatctttgtctggaaaggcaagcaggcaaacacggaggagaggaaggctgccctcaaaacagcctctgacttcatcaccaagatggactaccccaagcagactcaggtctcggtccttcctgagggcggtgagaccccactgttcaagcagttcttcaagaactggcgggacccagaccagacagatggcctgggcttgtcctacctttccagccatatcgccaacgtggagcgggtgcccttcgacgccgccaccctgcacacctccactgccatggccgcccagcacggcatggatgacgatggcacaggccagaaacagatctggagaatcgaaggttccaacaaggtgcccgtggaccctgccacatatggacagttctatggaggcgacagctacatcattctgtacaactaccgccatggtggccgccaggggcagataatctataactggcagggtgcccagtctacccaggatgaggtcgctgcatctgccatcctgactgctcagctggatgaggagctgggaggtacccctgtccagagccgtgtggtccaaggcaaggagcccgcccacctcatgagcctgtttggtgggaagcccatgatcatctacaagggcggcacctcccgcgagggcgggcagacagcccctgccagcacccgcctcttccaggtccgcgccaacagcgctggagccacccgggctgttgaggtattgcctaaggctggtgcactgaactccaacgatgcctttgttctgaaaaccccctcagccgcctacctgtgggtgggtacaggagccagcgaggcagagaagacgggggcccaggagctgctcagggtgctgcgggcccaacctgtgcaggtggcagaaggcagcgagccagatggcttctgggaggccctgggcgggaaggctgcctaccgcacatccccacggctgaaggacaagaagatggatgcccatcctcctcgcctctttgcctgctccaacaagattggacgttttgtgatcgaagaggttcctggtgagctcatgcaggaagacctggcaacggatgacgtcatgcttctggacacctgggaccaggtctttgtctgggttggaaaggattctcaagaagaagaaaagacagaagccttgacttctgctaagcggtacatcgagacggacccagccaatcgggatcggcggacgcccatcaccgtggtgaagcaaggctttgagcctccctcctttgtgggctggttccttggctgggatgatgattactggtctgtggaccccttggacagggccatggctgagctggctgcctgaggaggggcagggcccacccatgtcaccggtcagtgccttttggaactgtccttccctcaaagaggccttagagcgagcagagcagctctgctatgagtgtgtgtgtgtgtgtgtgttgtttcttttttttttttttacagtatccaaaaatagccctgcaaaaattcagagtccttgcaaaattgtctaaaatgtcagtgtttgggaaattaaatccaataaaaacattttgaagtgtgaaaaaaaaaaaaaaaaaaaaaaaaaaaaaa

SEQ ID NO: 487 - DNA, 5311 bp, Homo Sapiens
agcataaccttcggtggcaggacaaatcaggccagcacgcagtctgccaagtcctgctcgctccctgtcaagaaaaacagctggatccatttctaatcaacacttcccaacgcaacacttctgagtctctgaaggagaccagagcttgaaactttccagacttccaacagacatcgagtgcaaaaggatatttaggttgtctttgcacaaatctggttgatttgagagataaagggggggggaaccagtgtgactttcacctaagaagtcacatgaacatatttcacatttgaactacataatgaatgatggttattgaaatagcccaaacctctaccacagagcgagggatatagctcaaggggcaaccaggcagtcgcagaaccaaggaatggatgactacaagtatcaggacaattatgggggctatgctcccagtgatggctattaccgcggcaatgagtccaacccagaagaagatgcacagagtgatgtcaccgaaggccatgatgaggaagacgagatctatgagggcgagtaccagggtatccctcacccagatgatgtcaaggccaagcaggccaagatggcgccctccagaatggacagccttcggggccagacagacctgatggctgagaggctggaagatgaggagcagttggcccaccagtacgagaccatcatggatgagtgtggccatggccgcttccagtggatcctctttttcgtcttgggtttggccctgatggccgatggggtggaagtgttcgtggtgagttttgccctgcccagtgcagagaaggacatgtgtctgtccagttccaaaaaaggaatgctagggatgatagtctacttgggaatgatggcgggcgccttcatcctgggaggcctggctgataagctgggaaggaagcgagtcctcagcatgtctctggccgtcaatgcctccttcgcctccctctcttccttcgtgcagggatatggagccttcctcttctgccgactcatctcaggcatcggtattgggggtgctctaccgattgtttttgcctatttttctgaattcttgtctcgggagaagcgaggagaacacctcagttggctgggcatcttctggatgactgggggcctgtacgcatctgccatggcctggagcatcatcccacactatggctggggcttcagcatggggaccaattaccacttccatagctggagagtgtttgtcatcgtctgtgctctgccctgcaccgtgtccatggtggccctgaagttcatgccagagagcccaaggtttctgctagagatgggcaaacatgatgaagcctggatgattctcaagcaagtccatgacaccaacatgagagctaaggggaccccagagaaagtgttcacggtttccaacatcaaaactcccaagcaaatggatgaattcattgagatccaaagttcaacaggaacctggtaccagcgctggctggtcagattcaagaccattttcaagcaggtctgggataatgccctgtactgtgtgatggggccctacagaatgaatacactgattctggccgtggtttggtttgccatggcattcagttactatggactgacagtttggtttcctgatatgatccgctattttcaagatgaagaatacaagtctaaaatgaaggtgttttttggtgagcatgtgtacggcgccacaatcaacttcacgatggaaaatcagatccaccaacatgggaaacttgtgaatgataagttcacaagaatgtactttaaacatgtactctttgaggacacattctttgacgagtgctattttgaagacgtaacatcaacagatacctacttcaaaaattgtaccattgaatcaaccatcttttacaacacagacctctacgagcacaagttcatcaactgtcggtttatcaactccaccttcctggagcagaaggagggctgccacatggacttggagcaagataatgacttcctgatttacctcgtcagcttcctgggcagcctgtctgtcttacccgggaacatcatttctgccctgctcatggatagaattggaaggctcaagatgattggtggctccatgctaatctctgcagtctgctgcttcttcctgttttttggcaacagtgagtctgcaatgatcggctggcagtgcctgttctgtgggacaagcattgcagcctggaatgctctggatgtgatcacagtggagctgtatcccaccaaccagagagcaacagccttcggcattctcaatggattatgcaaatttggcgccatcctgggaaacaccatctttgcttcttttgttgggataaccaaagtggtccccatccttctggctgctgcttctctggttgggggtggcctgattgcccttcgactgccagagactcgagaacaggtcctgatgtgaacaacctatgggaaaaggaaaggtcgagagaatcttgtccaggacactgaaatgcatccacacttcctgcctatcacggtccggaggacaccttggatagcacgggaggagaagttgactttgtgacccctagtttaggacccacttcagctgtcaatatgtttgtaactcaggtgactgatttgggggtgccctgagccacccttagaatcacagagctgcgtgtttaacttcaagtcttcccagtccaaggcagggagaggattctccagtgagtgcacacactatgcgaggagcaagcatttctctaagtcaagtgcaaggacttaacttgcgtttgaaaaggaattagagggtcagaaacacccaggttcctccagaaagctccttggagcccaacaacttaacaaatcaacttggctggaagttagagtcattatatgaagattgggcttgaagtatatatttttgcatttaaaagtatcacctatcatattttccactcgaaaattgacatagtagcattgaggatactctgatctagaaagccaagtatttgagcaacatctatagagatctacttttctcctatgtctcctaggctttccatgataattaggtaatacatttaagaaggatatttatttctgttttgctctattcaaagaaacggaatgggatagttattctgtaaactaagtttgtatataactttatttgggtttaatttccacaactggtatctgcaaatattgccagcattttagccatattttgggagaacttggtgtttgaggtcccaggaaatgaggtctgatcaaatgaaatgcaagcacaatttcttacagccatttaactttctgttgggaggatgaattaacaaactcacattgtgcagtctgcttaatccaggcacttttctttgtgcaggtgtagtgagtagttacttctctcccttacacagatgacttgtgaaactcaagctcaccatcttcagtgctggcattttactttgccactacccaaaaacaatgtgagatgtgttcagtggcctctggtactctttgcaggcaagaatcaaacaacatggggactgagggaaggatggggaagtgtagccacagttcttccaaatgtaaatactttttgtttgttctagtggtaaaatgcaaatgcaatccatatttgttaggatggtcaggtctcatgagaaatctatgctatgtgtccagagcttttgaaacagagtccattggagtgggagttagggagtgtagtggatgccaaatatgtttttcttcagtgcttaagagaactgtttcctgaagtccagctttgaacataaacaggggtgtgggttgggggaggagcttaggacaaacctctctgatgaaggtcagcaatagactgaagtcttgactgcatggaagaggaaaaacatcagaactgtctgacaatggaggggacagtgagctacgcacaactgccagcggaggtgaacttgcacctgcccaggccggatgaacatcagcctgcaagaactagttgtttgagttgatttgcagtgctctcaatgggcaagtgccacattttccctggcagagatctccaaaaatttaaaacagaataataatggctatatcgagtgttttctcagtattggagaaatgcttaggtcctatgatagcttcgggacatctttctgtaattttcctcaattaacgggttggtaggggtaaatcttatgacacctttccaccgtcgatttgagatcagttttaatggttaaaatgtttactctccttctgtcaaccctcacctttttatttacacccctccctttttttctgtacagggagagaagacatattgactctgactggacaccctgattcctccaaatatatataccactgtgtattaatctttctctcagtgttttataggagtactaacatttattgctctgtcaataatgaaaggctcgatgtaatatagctgtaatttactttccatatgaatacagtggctaggttcataaaagagaattgtgtgagtctgggattaccacatctaaaacattattctttaatgggataatacaattcattgagcagctaccacttaaaaaacttgcaggacagttagagcctgcatttctagttaagatggatcttgtaaatttaaaattggattaacattggagtgctggggtggctgcaataatttgggggctaactccatttggtttccaagatctcacttctgcattatctttatggctctttaaaccagccacctagccaatcaagggcaattcccatctcatccatcactcaggtctttgtaaagggtgcagccaagctctgcagacttttgcaggattgtctagcctgagtaccgggctacttcttaaatgccgtcactcctgctgagataaatgcgtctttaaaaatagtctctgtggcaggtcactgggggacaatgtacagcattctggccatccacttctttttcacttcatgttctaccccaagagactcccgatgtcggctgtggagggttaaagggatgaggctttcctttgtttagcaaatctgttcacagttcttgatgatgtattttatgatgcccagcttggaaatagttgctttccatagtctcaactgtattgtgtcatctcctgatgctgatttttgatcttttgttttattaaaaataattagtgaaagaggtgtgcctatctgtgaagtttgtagtacatcatcctgaggtcatgtaacaagtaaaccccaacccagcgttccctcctacgttgtgttagttcattaaaactaaataataaaaataactgtaagaaaaccttaa

SEQ ID NO: 488 - DNA, 3120 bp, Homo Sapiens
gggcggggcgtgtgcggactgagcgctctgcttccggggcgcgggtgacgcgacgacggcgacactttgctacggagtgcatcggacgtcgaagcctagagtctctgcgtctttccctcttccgctgcctcattcctttccttcctagccttggtcgtcgccgccaccatgaacaagaagaagaaaccgttcctagggatgcccgcgcccctcggctacgtgccggggctgggccggggcgccactggcttcaccacgcggtcagacattgggcccgcccgtgatgcaaatgaccctgtggatgatcgccatgcacccccaggcaagagaaccgttggggaccagatgaagaaaaatcaggctgctgacgatgacgacgaggatctaaatgacaccaattacgatgagtttaatggctatgctgggagcctcttctcaagtggaccctacgagaaagatgatgaggaagcagatgctatctatgcagccctggataaaaggatggatgaaagaagaaaagaaagacgggagcaaagggagaaagaagaaatagagaaatatcgtatggaacgccccaaaatccaacagcagttctcagacctcaagaggaagttggcagaagtcacagaagaagagtggctgagcatccccgaggttggcgatgccagaaataaacgtcagcggaacccacgctatgagaagctgacccctgttcctgacagtttctttgccaaacatttacagaccggagagaaccatacctcagtggatccccgacaaactcaatttggaggtcttaacacaccctatccaggtggactaaacactccatacccaggtggaatgacgccaggactgatgacacctggcacaggtgagctggacatgaggaagattggccaagcgaggaacactctgatggacatgaggctgagccaggtgtctgactccgtgagtggacagaccgtcgttgaccccaaaggctacctgacggatttaaattccatgatcccgacacacggaggagacatcaatgatatcaagaaggcgcgactgctcctcaagtctgttcgggagacgaaccctcatcacccgccagcctggattgcatcagcccgcctggaagaagtcactgggaagctacaagtagctcggaaccttatcatgaaggggacggagatgtgccccaagagtgaagatgtctggctggaagcagccaggttgcagcctggggacacagccaaggccgtggtagcccaagctgtccgtcatctcccacagtctgtcaggatttacatcagagccgcagagctggaaacggacattcgtgcaaagaagcgggttcttcggaaagccctcgagcatgttccaaactcggttcgcttgtggaaagcagccgttgagctggaagaacctgaagatgctagaatcatgctgagccgagctgtggagtgctgccccaccagcgtggagctctggcttgctctggcaaggctggagacctatgaaaatgcccgcaaggtcttgaacaaggcgcgggagaacattcctacagaccgacatatctggatcacggctgctaagctggaggaagccaatgggaacacgcagatggtggagaagatcatcgaccgagccatcacctcgctgcgggccaacggtgtggagatcaaccgtgagcagtggatccaggatgccgaggaatgtgacagggctgggagtgtggccacctgccaggccgtcatgcgtgccgtgattgggattgggattgaggaggaagatcggaagcatacctggatggaggatgctgacagttgtgtagcccacaatgccctggagtgtgcacgagccatctacgcctacgccctgcaggtgttccccagcaagaagagtgtgtggctgcgcgccgcgtacttcgagaagaaccatggcactcgggagtccctggaagcactcctgcagagggctgtggcccactgccccaaagcagaggtgctgtggctcatgggcgccaagtccaagtggctggcaggggatgtgcctgcagcaaggagcatcctggccctggccttccaggccaaccccaacagtgaggagatctggctggcagccgtgaagctggagtccgagaatgatgagtacgagcgggcccggaggctgctggccaaggcgcggagcagtgcccccaccgcccgggtgttcatgaagtctgtgaagctggagtgggtgcaagacaacatcagggcagcccaagatctgtgcgaggaggccctgcggcactatgaggacttccccaagctgtggatgatgaaggggcagatcgaggagcagaaggagatgatggagaaggcgcgggaagcctataaccaggggttgaagaagtgtccccactccacacccctgtggcttttgctctctcggctggaggagaagattgggcagcttactcgagcacgggccattttggaaaagtctcgtctgaagaacccaaagaaccctgggctgtggttggagtccgtgcggctggagtaccgtgcggggctgaagaacatcgcaaatacactcatggccaaggcgctgcaggagtgccccaactccggtatcctgtggtctgaggccatcttcctcgaggcaaggccccagaggaggaccaagagcgtggatgccctgaagaagtgtgagcatgacccccatgtgctcctggccgtggccaagctgttttggagtcagcggaagatcaccaaggccagggagtggttccaccgcactgtgaagattgactcggacctgggggatgcctgggccttcttctacaagtttgagctgcagcatggcactgaggagcagcaggaggaggtgaggaagcgctgtgagagtgcagagcctcggcatggggagctgtggtgcgccgtgtccaaggacatcgccaactggcagaagaagatcggggacatccttaggctggtggccggccgcatcaagaacaccttctgattgagcggttgccatggccggtctccgtggggcagggttgggccgcatgtggaagggctctgagctgtgtcctccttcattaaaagtttttatgtctcgtgtcagaaaaaaaaaaaaaaaaaaaaa

SEQ ID NO: 489 - DNA, 2005 bp, Homo Sapiens
ctggcgcgcgcggccctgcgggtgacaggcaggcgggaaggggcggggcctcgggcggggccgccgtggggaggagggcggtgggaggggaggagtggagatggcggcggcggcggctcaggggggcgggggcggggagccccgtagaaccgagggggtcggcccgggggtcccgggggaggtggagatggtgaaggggcagccgttcgacgtgggcccgcgctacacgcagttgcagtacatcggcgagggcgcgtacggcatggtcagctcggcctatgaccacgtgcgcaagactcgcgtggccatcaagaagatcagccccttcgaacatcagacctactgccagcgcacgctccgggagatccagatcctgctgcgcttccgccatgagaatgtcatcggcatccgagacattctgcgggcgtccaccctggaagccatgagagatgtctacattgtgcaggacctgatggagactgacctgtacaagttgctgaaaagccagcagctgagcaatgaccatatctgctacttcctctaccagatcctgcggggcctcaagtacatccactccgccaacgtgctccaccgagatctaaagccctccaacctgctcatcaacaccacctgcgaccttaagatttgtgatttcggcctggcccggattgccgatcctgagcatgaccacaccggcttcctgacggagtatgtggctacgcgctggtaccgggccccagagatcatgctgaactccaagggctataccaagtccatcgacatctggtctgtgggctgcattctggctgagatgctctctaaccggcccatcttccctggcaagcactacctggatcagctcaaccacattctgggcatcctgggctccccatcccaggaggacctgaattgtatcatcaacatgaaggcccgaaactacctacagtctctgccctccaagaccaaggtggcttgggccaagcttttccccaagtcagactccaaagcccttgacctgctggaccggatgttaacctttaaccccaataaacggatcacagtggaggaagcgctggctcacccctacctggagcagtactatgacccgacggatgaggtgggccagtccccagcagcagtggggctgggggcaggggagcaggggggcacgtaggcatcccccatgccaggcctgagccttgctgtctctaccaccccagccagtggccgaggagcccttcaccttcgccatggagctggatgacctacctaaggagcggctgaaggagctcatcttccaggagacagcacgcttccagcccggagtgctggaggccccctagcccagacagacatctctgcaccctggggcctggacctgcctcctgcctgcccctctcccgccagactgttagaaaatggacactgtgcccagcccggaccttggcagcccaggccggggtggagcatgggcctggccacctctctcctttgctgaggcctccagcttcaggcaggccaaggccttctcctccccacccgccctccccacggggcctcgggacctcaggtggccccagttcaatctcccgctgctgctgctgcgcccttaccttccccagcgtcccagtctctggcagttctggaatggaagggttctggctgccccaacctgctgaagggcagaggtggagggtggggggcgctgagtagggactcagggccatgcctgcccccctcatctcattcaaaccccaccctagtttccctgaaggaacattccttagtctcaagggctagcatccctgaggagccaggccgggccgaatcccctccctgtcaaagctgtcacttcgcgtgccctcgctgcttctgtgtgtggtgagcagaagtggagctggggggcgtggagagcccggcgcccctgccacctccctgacccgtctaatatataaatatagagatgtgtctatggctgaaaaaaaaaaaaaaaaaaaaaaaaaaa

SEQ ID NO: 490 - DNA, 3595 bp, Homo Sapiens
aaacaaaaaaaggggggaaaagggggggaaagaaagaaagagaaaaaggagggcgagtggcgagcaggggcctcggccgccacccacacgccccgaagcgtgctcgtcccccgcgcggggctcccggccgccgccctcggccatcggctgctccccggtggcccaggcctcggactccgcggccggcccggcgcggcccagcgccctcagggatcatggcccaggtagcagtgtccaccctgcctgttgaagaagagtcctcctcagagaccaggatggtggtgacattcctcgtgtctgccctcgaatccatgtgtaaagaactggccaagtccaaggcagaagtggcctgcatcgcagtgtacgaaacagacgtgtttgtcgtcggaaccgagagaggatgcgcttttgttaatgccaggacggattttcagaaagattttgcaaaatactgcgttgcagagggactgtgtgaggtgaaacctccctgccctgtgaacgggatgcaggtccactcgggcgaaacggaaatactcaggaaggcagtggaggactatttctgcttttgttatggtaaagccttagggacaacagtgatggtgcctgttccctatgagaagatgctgcgagaccagtcggctgtggtagtgcaggggcttccggaaggcgttgcctttcaacaccctgagaattacgaccttgcaaccctgaaatggattttggagaacaaagcagggatttcattcatcataaatagacccttcctaggaccagagagtcagctgggtggccctgggatggtaacagatgcggagagatccatagtatcaccaagtgaaagctgcggccccatcaatgtgaaaactgaacccatggaagattctggcatttcactgaaagcagaagctgtctcagtcaagaaagaatcagaagatcctaattactatcaatataatatgcaaggaagccacccttcttccacaagcaatgaagtaatagaaatggaattaccaatggaagattccactccgctggtcccttcagaagaaccaaatgaggaccctgaagccgaggtgaaaatcgaaggaaacacaaattcatccagtgttacaaattctgcagcaggtgttgaagatcttaacatcgttcaagtgactgttccagataatgagaaggaaagattatcaagcattgaaaagattaaacagctaagagaacaagttaatgacctctttagccgaaaatttggtgaagcaattggcgtggatttccctgtgaaagttccctacaggaagatcacattcaaccctggctgtgtggtgattgatggcatgcccccgggggtggtattcaaggcccccggctatctggaaatcagttccatgaggaggatcttggaggcagctgagtttatcaaattcacagtcatcaggccgcttccagggcttgagctcagtaatgtgggaaaacgcaagatagaccaggagggccgtgtgtttcaagaaaagtgggagagagcgtatttcttcgtggaagtacagaatattccaacatgtctcatatgcaaacaaagcatgtctgtgtccaaagaatataacctaagacgccactatcaaaccaatcacagcaagcattatgaccagtatacggaaagaatgcgtgacgagaagcttcacgagctgaaaaaagggctcaggaagtatctcttaggctcgtcagacaccgagtgtcccgagcaaaaacaagtgtttgcaaacccaagtccaacccagaaatcccccgtgcagcctgtagaggacctagctgggaacttatgggagaagttacgtgaaaaaatcaggtcttttgtggcatattctatcgcaatcgatgagatcacggatataaataataccacccagttggccatattcatccgtggtgtcgatgagaatttcgatgtgtccgaagaacttctggacacggtgcccatgacgggtacaaaatctggcaacgagatctttttgcgtgttgagaagagcctgaaaaagttctgtatcaactggtcgagattagtaagcgtggcctccactggcaccccagcgatggtggatgccaataacgggcttgtcacaaaactgaagtccagggtggcgacgttctgcaagggtgcggaactgaagtccatctgttgtataattcatccggaatcactctgtgctcagaagttgaagatggaccacgtcatggacgtggtagtgaagtccgtgaactggatatgctcccggggactgaaccacagcgagttcacaaccttgctctatgagctggacagccagtatggtagcctcctgtactacacggagattaagtggctcagtcgcgggctcgtgctaaagagatttttcgaatccttggaagaaatcgactccttcatgtcatccagagggaaacccctgcctcaactgagctccatagattggatccgagacctggccttcttggttgacatgacgatgcatctgaacgctttgaacatctctctccaaggacactcccaaatcgtcacgcagatgtatgacctgatccgggcgttcctagcaaaactgtgcctctgggagactcatttgacgaggaataatctggcccactttcccaccctgaaattggtttccagaaatgaaagcgatggcctgaactacattcccaaaatcgcggaactcaagaccgaattccagaaaaggctgtctgatttcaaactctacgaaagcgaactgactctgttcagctccccgttctccacgaagatcgacagtgtgcacgaggagctccagatggaggttatcgacctgcaatgcaacacggtcctgaagacgaaatacgacaaggtgggaataccagaattctacaagtacctctggggtagctacccgaaatacaagcaccattgcgcaaagattctttccatgttcgggagcacctacatctgcgaacagctgttctccattatgaaactgagcaaaacaaaatactgctcccagttaaaggattcccagtgggattctgtactccacatcgcaacgtgatggagagaaaactcctggcagggccctatggtgggaaaggctggagtcttctagtcccaagggattgggagatgacaaaatgaattttttttttcttttttgagatggagtcttgctctgtcgcccaggttggagtgcagtggcgtgatctcggcttactgcaacttccagctcctgggttcgaacgattctcctgcctcagcctcccgagcagctgggactacaggcatgcgccaccatgcccggctaatttttgtattagtagagatgaggtttcaccatgttggccaggctggtctccaactcctgacctcaggtgatccacctgcctcgacctcacaaagtgctgggattacaggcatgaaccactgtgcccagctgacaaaatgagttcttaaactttttttttttttcagttttttttccactttgaatcagaaatataatctgcagtatcatacttgtttatattacattgtatgcctcactattcattaaaaatcaagaaagttttattgtaaaaaaaaaaa

SEQ ID NO: 491 - DNA, 5980 bp, Homo Sapiens
ggacagcagcgggttaagtgccgcccgcgcggagacggctgagtccggagccgcggctccgagctcgcattcggatccgctagagcaggaagatggcgacggacggcgcgagctgcgagcccgacttgtcccgggccccggaggacgcggcgggggccgcggcggaggcggcgaaaaaagagtttgatgtggatactctcagtaaatccgagctgcggatgctcctcagcgtgatggaaggggagctggaggccagagaccttgtcatcgaggccctgcgggctcgcaggaaggaggtatttatccaggaacggtatgggagatttaatctaaatgacccgttcctggcactccagagagactatgaagcaggtgctggtgacaaagagaagaagccagtttgtaccaaccccctctccatccttgaagcagtcatggcccactgcaagaaaatgcaagaaaggatgtccgcacagctggctgctgctgagagcagacaaaagaagctggaaatggagaagcttcagctacaagcccttgagcaagagcacaagaagctggctgcccgccttgaggaagagcgtggcaagaacaagcaggtggtcctgatgctggtcaaagagtgcaagcagctctcaggcaaagtcatagaggaggcccagaagctcgaagacgtaatggccaaactggaagaggaaaagaaaaagacgaatgaattagaagaggaactctccgctgagaaacgaagaagcacagaaatggaagctcagatggaaaaacaactctctgagtttgacactgagcgggaacagcttcgtgccaagctgaaccgggaagaagcacacaccactgacctcaaagaggagatagacaagatgaggaaaatgattgagcaactgaaaaggggaagtgacagcaaaccaagcctctctcttccacggaagacaaaagataggcgtttggtttccatatctgtgggaacagaaggaactgtgacaaggtctgttgcatgccagacagacctagtgacagaaaatgctgaccacatgaaaaagttgcctttaaccatgcctgtaaaaccttccacagggagtcccctagtttctgcaaatgcaaaagggagcgtgtgcaccagtgccaccatggccagaccaggtattgacaggcaggcttcctatggtgacttgattggcgcttctgtacccgctttcccacctccaagtgcaaacaaaattgaggaaaatggaccaagcactggctcaacaccagatccaaccagtagcacacccccacttcccagtaacgctgcccctcccaccgctcaaacaccaggcatagctcctcagaactcgcaagctccacctatgcacagtttacattcaccatgtgccaacacctctttgcatccaggtctaaacccacgaatccaagcagctagatttagatttcagggcaatgctaacgacccagaccaaaatggaaatactacccaaagtcctccgtcaagagatgtctcgcctacaagtcgtgacaacctagtggccaaacaactagctcggaatactgtgacccaagcactgtcaagatttacaagccctcaagcaggtgctccctcaaggcctggagtgcccccaacaggggatgttggcacccaccctccagttggtcggaccagtttaaagactcatggtgtagcacgagttgacagaggaaatcctcctcctatccctccaaaaaagccagggctctcccaaactccttctccaccacacccccaactcaaggttattatagacagcagcagggcctcgaacacaggggccaaagttgataacaaaactgtggcttcgactccttccagtttgccacaagggaacagggtgatcaatgaggagaaccttcctaagtcatcctcccctcagctgccaccaaaaccatccatagatttaactgtggcacctgcaggctgtgccgtttcagccctggccacgtctcaggtgggtgcctggcctgctgcaacccccggactgaaccaacctgcatgttcagacagttcccttgtcattcctaccaccattgccttttgctcttccataaaccccgttagtgcctcatcctgtagaccaggtgcctcagacagcctcctggtaacagcatcaggctggtcaccctccctaacccctttgctaatgagtggtggtcctgcccccctggctggcaggcccacccttcttcagcaagctgctgcccagggaaatgtcactttattatcaatgctgcttaatgaagaaggactggacattaattactcctgtgaagatggccattctgccttgtattctgctgctaagaatggacatacagactgtgtgagattgctgctgagtgcagaagcccaagtcaatgctgctgataaaaatggcttcacacccttgtgtgctgcagctgctcagggacatttcgagtgtgtagaattattaatttcatatgatgctaacattaatcatgctgctgatggaggacagacacctctatacctggcctgtaaaaatggaaataaagaatgtattaaactcttgttggaagctggaaccaatcgaagtgtaaaaaccacagatggctggacaccagttcacgcagctgtggacactggtaatgtggacagcctcaagcttcttatgtaccatagaataccagctcatggaaattctttcaatgaggaggagtccgagtcaagtgtctttgacttggatggaggagaagagagtcctgaaggcatatccaagcctgttgttcctgcagacctcattaaccacgccaacagagaaggctggactgctgcccacattgctgcttccaaaggttttaagaactgcctagaaatcttgtgtaggcacggagggcttgagccagaaaggagagacaagtgcaatcggactgtgcatgatgttgccactgatgactgcaagcatttgctggagaatctgaatgctcttaaaatacccttaaggatttcagtgggtgagattgaaccaagcaactatggttctgatgacttggaatgtgaaaacacaatatgtgctttaaatatccgcaaacagacatcatgggatgatttttcaaaagcagtgagtcaagctctgacaaatcatttccaggcaatctcttctgatggatggtggagtctggaagacgtgacttgcaataacaccactgattccaacatcggcctcagtgcaagaagcatacgatccatcacgctaggaaatgtgccgtggtcagtgggtcagagcttcgcgcagtccccgtgggactttatgaggaagaataaggcagagcacatcactgtgcttttgtcaggtcctcaagaaggctgtctcagtagtgtgacttatgcctccatgatccctctccagatgatgcagaactacctcaggctggttgagcaatatcataatgtcattttccacggcccagaaggaagcttgcaagactacatagtacatcagcttgcactctgcctgaagcacagacaaatggctgcaggattctcctgtgaaatagtgagagctgaagtagatgctggtttttccaaggaacagctactagacctgttcattagtagcgcttgtctgatcccagtgaaacaatctcccagtaagaagaaaatcatcatcattttagaaaatttagaaaaatcttcactgtcggagttattgagggactttttggcacctcttgaaaatcgcagcactgaaagcccctgcactttccaaaaaggaaatggactgtccgaatgttattactttcatgagaactgctttctgatgggaaccatcgccaaggcctgtctccagggctccgacttgctggtgcagcagcatttccgctgggtgcagctgcggtgggatggcgagcccatgcaaggactgctgcagaggttcttacgaaggaaagttgtgaataagttcaaaggtcaggcgccctccccctgcgatcctgtgtgcaagattgtcgactgggctctgtccgtctggcgtcagcttaactcctgcctggcccgcttgggcacacctgaagcacttcttggaccaaaatatttcctgtcttgtcctgtagttcctgggcatgcccaagtgacagtgaagtggatgtctaagctgtggaatggcgtcatcgcacccagagttcaagaagcaatattgtcaagagcctctgtgaaaagacaacctggctttgggcagacaactgctaaaagacaccctagccaaggacagcaggctgtggtcaaagctgctctcagcatcttgctaaataaagctgtactgcatggctgtcccctccccagagcagagctagaccagcatacagctgatttcaaaggaggaagtttccctttatccatagtttccagttataacacttgtaacaagaagaaaggagagagtggtgcctggagaaaggtgaacaccagtcctcgcaggaagtctggccgcttctctttacccacctggaataagccagacctaagcactgaaggtatgaaaaataagactatatcacagctgaattgtaacaggaatgcttctctgtcaaaacaaaagtctttagagaatgatctatcactgacgttgaatttggatcagagactctctctgggttcagatgacgaagcagatcttgtcaaggaacttcagagcatgtgctccagcaagtctgagtctgatatcagcaagattgctgattccagggatgatttaaggatgtttgatagttctggaaacaaccctgtactttcagcaactattaataatctgagaatgccagtgtcacaaaaggaggtcagtcctctcagcagccatcaaactactgaatgcagcaacagtaaatcaaagactgagttgggtgtttcaagagttaaatcttttcttcctgttcctagaagtaaagtcacccagtgttcccagaacaccaaaagaagcagcagcagcagtaatacaaggcaaatagaaatcaacaacaactcaaaagaagtgaattggaacttacacaaaaatgaacacctagaaaaacctaacaaataggcctgcctacaatattctcattattaacttcctctatttcacacagaaaccaaggacaacaagatacaaatacctttaaattgataaaatgttttcactgtaatataaattatgagtgcgggaccactattcaatttttttttgtaaagaatgtatttataaccaacattttgttgcttttttttttaattctgtaggattgaacttcaataccaggaagttatgccaacttttcaagtagttttataatagaaaaattgtaatagttttaatcaagatgttcaggggtattaaaacagaactgtgtactgtatatctgtatatatgtatatatgtatgtatatttaaggaagtccagaaatcatactgcatacatgctacaaaaaagtagcaaaaaagtacaaagttggcttagataacttgtaccattttaaatggagatcataattttatgttcacttgatggggaatgactagaatggggcaataacaaatcatttctaaacagttattttccattaaaagccatattaagtattttgcttgttaaattctagttttatgttttaaatctcttagtggttacattgccatttggtagcatcatgtatatatttatgcttataagtttgcattatgactcctgtaaaatatgaaattataatgcaataaaagtgttatctttcttacaaaagttttgtacctaagtggatatagataactgcataaatgaataaattcagaattaactccttcaatatttctagtagcacaactgataatattgatattttctacaaatgttacttctaaaattacagacaaaattacttacacaattcagttaagatgctttgacactgaataaaatattgatttcatgaaaaaaaaaaaaa

SEQ ID NO: 492 - DNA, 2077 bp, Homo Sapiens
gcggcgggcggggcggcgctcggggctcggctggcctcggctcgcctcggctgcgctcggcaggctgcggtaaatccgggcttgcggccgctggcgtagtctgtggccgggtggtcgttgctgcgcgccccgagccccgagagccatgcagatgtcctacgccatccggtgcgccttctaccagctgctgctggccgcgctcatgctggtggcgatgctgcagctgctctacctgtcgctgctgtccggactgcacgggcaggaggagcaagaccaatattttgagttctttcccccgtccccacggtccgtggaccaggtcaaggcgcagctccgcaccgcgctggcctctggaggcgtcctggacgctagcggcgattaccgcgtctacaggggcctgctgaagaccaccatggaccccaacgatgtgatcctggccacgcacgccagcgtggacaacctgctgcacctgtcgggtctgctggagcgctgggagggcccgctgtccgtgtcggtgttcgcggccaccaaggaggaggcgcagctggccacggtgctggcctacgcgctgagcagccactgccccgacatgcgcgccagggtcgccatgcacctcgtgtgcccctcgcgttacgaggcagccgtgcccgacccccgggagccgggggagtttgccctgctgcggtcctgccaggaggtctttgacaagctagccagggtggcccagcccgggattaattatgcgctgggcaccaatgtctcctaccccaataacctgctgaggaatctggctcgtgagggggccaactatgccctggtgatcgatgtggacatggtgcccagcgaggggctgtggagaggcctgcgggaaatgctggatcagagcaaccagtggggaggcaccgcgctggtggtgcctgccttcgaaatccgaagagcccgccgcatgcccatgaacaaaaacgagctggtgcagctctaccaggttggcgaggtgcggcccttctattatgggttgtgcaccccctgccaggcacccaccaactattcccgctgggtcaacctgccggaagagagcttgctgcggcccgcctacgtggtaccttggcaggacccctgggagccattctacgtggcaggaggcaaggtgcccaccttcgacgagcgctttcggcagtacggcttcaaccgaatcagccaggcctgcgagctgcatgtggcggggtttgattttgaggtcctgaacgaaggtttcttggttcataagggcttcaaagaagcgttgaagttccatccccaaaaggaggctgaaaatcagcacaataagatcctatatcgccagttcaaacaggagttgaaggccaagtaccccaactctccccgacgctgctgagcccttccctcccctaatctgagaagtcagcctcttggctcctcaggccaccatttaggcctgactggggtaagaaatgtcgctccactttacagaggtagctgtggtgttgaaacactggacttggatatggggtgctgggatcgattcctagctttaccactaactagctgtgtggccttgagtaaatcccgttacctctctgagcctcggttaccctgtctgtaaaaagggaggtgagaatacctacctcacggaactgttgggaggctcagatgagatgctatatgtgaaaacattctgtaagcttcgtacaaatgtgaagtattaatattatcgcagtattattgttgttattattattgttattattaacaatcttgggtgggtagtaggagagcaaaaagtatgaatgggatggagctaagaagtctgaatacttaatgaaatggactttttggaaagaaatcagatgaaggcataaaatttagttcttagctcttgaacagaagcctaaaattcctggttctctcagggcttcgccttcaagggttctggaggagggaagggtctgcaggttccatgggtgacagcctgagatctgtcccttcaacgggctgggctgggtatgtgcctaccgatgacaatgtgtaaataaatgcgtgttcacacccacaaaaaaaa

SEQ ID NO: 493 - DNA, 5155 bp, Homo Sapiens
ggtgtaagtcggtggcggcgccggtacgcctggtccccgcgtggagtctttactcaaaacagctcccgcctcaggccgagatgaggagcccttcagaatagctgctgtctctgggaggacccgggcgtccttggcagcccagctgctctggacaaagccctgccagtcaggcctccgctggcaggaaccatggcagaggctggggatgctgcgctatcggtggccgagtggctgcgggcattgcacctggagcagtacacggggctctttgagcagcatggcctggtgtgggccactgagtgccaaggcctcagcgacacccgcctgatggacatgggcatgctactccctggtcaccgccgccgcatcctggctggcctgctccgtgcccatacctcaccggcccctgcaccccgccccaccccacggcctgtgcccatgaagcgccacatcttccgctcaccacctgtgcctgccactccacccgagccgctgcccaccactacagaggatgaggggctccccgctgccccacccatcccgccccggaggagctgccttccgcccacctgcttcaccaccccatccacagctgccccagaccctgtgctgcccccgctgcctgctaagcggcatttggcagagctgagcgttccacccgtgccgccccgcaccggacccccccgcctgctggtgagcctgcccactaaggaggaggagtcattgctgccatcattatcatcccctccccagccacagtctgaggagcccctgtccaccctcccccaggggcctccccagcctccctctccacctccctgccccccggagatacctccaaagccggtacgcctgttcccagagttcgatgactctgactacgatgaggtcccagaggaggggccgggggccccagccagagtgatgaccaagaaggaggagcccccaccgagccgagtcccacgggccgtgcgcgtggccagtctgctgagcgagggagaggaactgtctggggacgaccaaggggatgaggaagaggatgaccacgcctatgagggcgtccccaatggcggatggcataccagcagcctgagcttgtccttgcccagcacaatagctgcgccacaccccatggacgggccgcctgggggctccacccccgtcacaccagtcatcaaggctggctggctggacaagaacccaccgcagggatcttacatctatcagaaacgatgggtgagactggatactgatcacctgcgatactttgacagtaacaaggacgcttactctaagcgctttatctctgtggcctgcatctcccacgtggctgccatcggggaccagaagtttgaagtgatcacaaacaaccgaacctttgccttccgggcagagagtgatgtggagcggaaggagtggatgcaggccctgcagcaggccatggctgagcagcgtgcccgggcccggctctctagcgcttatctgctgggagttccaggctcagagcagcctgaccgcgctggcagcctggagcttcgtggcttcaagaataagctgtacgtggccgtggtcggggacaaagtgcagctctacaagaatctagaggagtaccacctgggcattggcatcaccttcatcgacatgagcgtgggcaacgtgaaggaagtggaccggcgcagcttcgacctcaccacgccctaccgcatcttcagcttctctgctgactcagagctagagaaggagcagtggttggaggccatgcagggagccatcgctgaggccctgtctacctcggaggtggccgagcgcatctgggctgcagcccccaacaggttctgtgctgactgcggggctcctcagcctgactgggcctccatcaacctctgtgttgttatctgcaagcgctgtgcaggggagcaccgtggcctgggcgctggcgtctccaaggtgcggagcctgaagatggacaggaaggtgtggacagaaacacttatcgagctcttcttacagctggggaatggcgctgggaaccgcttctgggcagccaacgtgccccccagtgaggccctgcagcccagcagcagccccagcacccggcggtgccacctggaggccaagtaccgtgagggcaagtaccgccgctaccacccgctctttggcaaccaggaggagctggacaaggccctgtgtgctgcagtcaccaccacagacctggctgagacccaggcgctcctgggctgtggggctgggatcaactgcttctcgggggaccctgaggcccccacgcccctggctcttgcagagcaggcggggcagacgctgcagatggaattccttcggaacaaccggaccacagaggtgcctcggctggactcgatgaagcccctggaaaagcactactcagttgtcctgccgaccgtgagccacagtggcttcctctacaagactgcctctgccggcaagctgctacaggaccgccgggcccgggaagagttcagccggcgctggtgtgtccttggtgacggggtcctgagctactttgagaatgagcgggcagtgacccccaatggagagattcgggccagcgagattgtgtgcctggcagtgccccctcctgacacccatggctttgagcacacctttgaggtgtacacggagggagaacggctgtacctgtttgggctggagagtgcggagcaggctcatgagtgggtcaagtgtattgctaaggcattcgtgcctcccctagccgaggatctgctggcccgggattttgagcggctgggacgcctaccctacaaagctggcctgagcctacagcgggcccaggagggctggttctctctcagtggctcggagctccgtgctgtcttcccggaggggccctgcgaagagccgctgcaactacggaaactgcaggagctttccatccagggggacagtgagaaccaggtgctggtgctggtggagcgaaggaggacactgtacatacagggcgagcggcggctggacttcatgggttggctgggggccatccagaaagcagccgccagcatgggggacacgctgtcggagcagcagcttggggactcggatatcccggtgatcgtgtaccgctgtgtggactacatcacgcagtgcggcctgacctccgagggcatctaccgcaagtgtgggcagacatcgaagacacagcggctgctggagagcctgcggcaggatgcgcgctctgtgcacctcaaggagggcgagcagcacgtggatgatgtttcctcggcgctcaagcgcttcctgcgcgacctgcctgatgggctcttcactcgcgcccagcgcctaacctggctggaggcctcagagattgaggacgaggaggagaaggtctccaggtaccgagagctgctggtgcggctgccccctgtcaaccgggccacagtgaaggcccttatcagccacctgtactgtgttcagtgcttctcagacacgaaccagatgaacgtgcacaacctggcaattgtgtttgggcccacgctcttccagacagatgggcaggactacaaggctggccgtgtggtggaagacctcattaaccactatgtggtggtgtttagtgtggatgaggaagagctcaggaagcagcgggaggagatcactgccattgtgaagatgcgcgtggctggcactgccagtgggacccagcatgccggtgacttcatctgcacagtgtatctggaagagaagaaggcagagactgagcagcatatcaaggtcccagcatccatgactgctgaggagctcaccctggagatcctggatcgccggaacgtgggcatcagggagaaggactattggacctgctttgaggtcaacgagagggaggaggcagagcgccccctgcactttgcggagaaggtgctgcccatcctgcacgggctgggcacggacagccacctggtggtgaagaagcaccaggccatggaggccatgctgctgtacctggccagccgtgtcggtgacaccaagcatggcatgatgaagttccgtgaggaccgcagcctcctgggcctgggcctgccctcaggtggcttccacgatcgctacttcatcctcaacagcagctgcttgcggctctacaaggaggtccggagccagaggccgtggagcggggcccctgagaccagtcaccggcctgagaaggagtggcctattaagagtctcaaagtctacctgggagtgaagaagaaactcaggccacccacctgctggggcttcacagtggtgcatgagacagagaaacatgagaagcagcagtggtacctctgctgtgacacacagatggagctccgggagtggttcgctacctttctgtttgtgcagcatgacggcctggtgtggccctcagagccctcacgcgtgtcccgggcagtgcctgaggtccggctgggtagtgtgtcactgatcccccttcgaggtagtgaaaatgaaatgcgccggagtgtggctgccttcaccgcggaccctctgtctcttctgcgcaacgtctgagcacaggagcccatccttggctctaggattccgccgctggaagccttctgttcagacaccccttatgctccaaggcctgatgtgagccagcggggggtgcatgggaaactgcaccccacaacccacatcctccatcctgactgcagcatggggttccccggcaggggtgggaggcagcaggggtcagcctgggcaggaacctctcccaactctgtccaggtgttcagacctcttggcccaacctgctcaccccaccgggttcactgtccttgtggggctggagagatgggcataagtcaggaacttgggaggaccaccaccctttcagaggcgtgaggccctggggccctgccggaagggagccccctgctcctcccaacaaactccagaacagcagaaagcgggtgctgtagaggagcactcagctcacggggagggagctcttggctgagcttctacagggctgagagctgcgctttggggacttcagccttccttccagtctgggctgagtggggggtccagactacctgatgccccttccccaatttggggactttttgataatataaatatatctgtatattttaccctaaaaaaaaaaaaaaaaaaa

SEQ ID NO: 494 - DNA, 3540 bp, Homo Sapiens
ggcggcagaagcggcagcgctcgccattgccgctggtggcaggaggctgcgaggagccggcgcggtcgcagtctccacggcgcaggcccacggtagcgcagccgctctgagaacttcatggaggaacacggagtgacccaaaccgaacatatggctaccatagaagcacatgcagtggcccagcaagtgcagcaggtccatgtggctacttacaccgagcatagtatgctgagtgctgatgaagactcgccttcttctcccgaggacacctcttacgatgactcagatatactcaactccacagcagctgatgaggtgacagctcatctggcagctgcaggtcctgtgggaatggccgctgctgctgctgtggcaacaggaaagaaacggaaacggcctcatgtatttgagtctaatccatctatccggaagaggcaacaaacacgtttgcttcggaaacttcgagccacgttagatgaatatactactcgtgtgggacagcaagctattgtcctctgtatctcaccctccaaacctaaccctgtctttaaagtgtttggtgcagcacctttggagaatgtggtgcgtaagtacaagagcatgatcctggaagacctggagtctgctctggcagaacacgcccctgcgccacaggaggttaactcagaactgccgcctctcaccatcgacggaattccagtctctgtggacaaaatgacccaggcccagcttcgggcatttatcccagagatgctcaagtactctacaggtcggggaaaaccaggctgggggaaagaaagctgcaagcccatctggtggcctgaagatatcccctgggcaaatgtccggagtgatgtccgcacagaagagcaaaagcagagggtttcatggacccaggcactacggaccatagttaaaaactgttataaacagcatgggcgggaagaccttttgtatgcctttgaagatcagcaaacgcaaacacaggccacagccacacatagtatagctcatcttgtaccatcacagactgtagtccagacttttagtaaccctgatggcactgtctcacttatccaggttggtacgggggcaacagtagccacattggctgatgcttcagaattgccaaccacggtcaccgttgcccaagtgaattattctgccgtggctgatggagaggtggaacaaaattgggccacgttacagggaggtgagatgaccatccagacgacgcaagcatcagaggccacccaggcggtggcatcgttggcagaggccgcagtggcagcttctcaggagatgcagcagggagctacagtcactatggcgcttaacagcgaagctgccgcccatgctgtcgccaccctggctgaggccaccttacaaggtgggggacagatcgtcttgtctggggaaaccgcagcagccgtcggagcacttactggagtccaagatgctaatggcctggtccagatccctgtgagcatgtaccagactgtggtgaccagcctcgcccagggcaacggaccagtgcaggtggccatggcccctgtgaccaccaggatatcagacagcgcagtcaccatggacggccaagctgtggaggtggtgacattggaacagtgacatacagccatattatggcatcgttttctagtctacttcaaaattttttacacgtttgcagaggtgcaatcaaatggaattaagtctctcgactttggaaggaaagttttgttaacctttttttttttaaaaggaagaaagcggattttggaattgcattttttaaagcaccactcttgattttctgggattggtgaagaaactgcattgtcaatttcactgtcccaaaaaagccaaattgtggcaggacttctttctgcggaaatgtgtgtgtatacttatgtgtgtgtatgtgtgagtgtgaatatatgtatatgtgtacatatggacatacacatttacatatatataaagtatatatatacatatatatatatatatatgtatgaaacccgcatggaattatctgtatgaaatcaaggtgcgctgtggaaacaataattcacccagtttagtgggtggtagggtacgtggccagacacagtcacccagtttttgttcataccagggtcatgcgttgagctactgacaaactcaggcggaggtgaccatgcccttcaccaaagctgcctcccagtggccacacagaactctccctgctggactcacctgaggaaagaggctccagcatggggtgggtcagagatgtgcttgcaaggtccagggactgcgtggtctgccagctgagatgctcctcgggctggcccaggtgctgaccttgccacaggcagatgaatgtcttgaaagctcccgggcctcagcctcccatctcctctccttcccaggaatccttgatctcatgactattaaaatgttgctctggttttaaggtcagtcctgaattgctcgtatatatgaactgaaggtaaccgaagtattaggggtttgaggagtgcgtgcgtgtaagtgtgcttgtgtgtgtgcgtgcatggtgggggagaggatgggaagggggcgggggcagtggaagggaaaggaaggaaagaaaaatcgtcctagaccaggatacacccgtgggagcaattttctctactgtctgtagcttcacagaggaggcgctggaatgaacaagaagagacatctggtctgtggccacagcaccctgaacgcccctgatcttgtgtgatcttggaagctaagcttggttgggcccggtcagtacgcggaagggaagaagggacacctggccatagaaaacagctgagggtgtttgctgtgttcctggatcaggccctgcttcagaagggactcctggaggcccatgttccttgatgcaacctcgtggcccaggccgggagcagcttgcctcctcagaggtgttgactatctgggtgttcttggtaaccgttaactctgtctttctcagctgcaagccctgagtctccagtagctgaattcacctgacttttcaacaggccaaatctctgaaccttgagtacagggacagctcctcctccctcctcccagctctccccatgtgtgtgatggtgtatttaatgtgtttttttaatgcgacattaaaagattctccacgtcttgctcaacctttgagagaagtttcagattcttgtatttgcttgttttatataaaactatctaatgttctttatatgttcttttctgtacgtaatggggggaggggagggaaatttacatataaatagtcctagttctacaatttgttatttttttaattattattttttatcgtcattgtgaagttgtccagggactttaaagtccatgttcctttgtggtgaaataacctccaaatagtttgagaagttgccaagacgaagaaaaaagcaaaaccccagtagcagagcatggattctgtgttgtttcccattctgtctttgactgcctcattcaataaatagttaaaaatgtggcaacaggaaaaaaaaaaaa

SEQ ID NO: 495 - DNA, 3634 bp, Homo Sapiens
ggacgggacggagccggggcagccagaagaggtgggaaaagcggaggaggacgcccaggaggaggcggcggcggcggccgggaagtgaaaggtctcgcaaagttcagcggcggctgcgggcgccgagccccgggctagcggcagacgagcccgcagggccgctccgcggggcagcgcagccaggccggctatggtcccggggctcccgccgccccccaggtgcccgggacccgccaggccggtgcgcgagggtcaccccacctccccgcgcggtcccggcccctggctcccagctgccggcgaccgctgaccgagcccggcgccccaggaggaggaagaaaccagggccccgttccctcccgaggacggcggcgcttcatcccgcagcccagaggtctcggctccctccggcacccgcccggcccggctgctcccggctcctcccggccatggggagctgcgcgcggctgctgctgctctggggctgcacggtggtggccgcaggactgagtggagtagctggagtgagttcccgctgtgaaaaagcctgcaaccctcggatgggaaatttggctttggggcgaaaactctgggcagacaccacctgcggtcagaatgctaccgaactgtactgcttctacagtgagaacacggatctgacttgtcggcagcccaaatgtgacaagtgcaatgctgcctatcctcacctggctcacctgccatctgccatggcagactcatccttccggtttcctcgcacatggtggcagtctgcggaggatgtgcacagagaaaagatccagttagacctggaagctgaattctacttcactcacctaattgtgatgttcaagtcccccaggccggctgccatggtgctggaccgctcccaggactttgggaaaacatggaagccttataagtactttgcgactaactgctccgctacatttggcctggaagatgatgttgtcaagaagggcgctatttgtacttctaaatactccagtccttttccatgcactggaggagaggttattttcaaagctttgtcaccaccatacgatacagagaacccttacagtgccaaagttcaggagcagctgaagatcaccaaccttcgcgtgcagctgctgaaacgacagtcttgtccctgtcagagaaatgacctgaacgaagagcctcaacattttacacactatgcaatctatgatttcattgtcaagggcagctgcttctgcaatggccacgctgatcaatgcatacctgttcatggcttcagacctgtcaaggccccaggaacattccacatggtccatgggaagtgtatgtgtaagcacaacacagcaggcagccactgccagcactgtgccccgttatacaatgaccggccatgggaggcagctgatggcaaaacgggggctcccaacgagtgcagaacctgcaagtgtaatgggcatgctgatacctgtcacttcgacgttaatgtgtgggaggcatcagggaatcgtagtggtggtgtctgtgatgactgtcagcacaacacagaaggacagtattgccagaggtgcaagccaggcttctatcgtgacctgcggagacccttctcagctccagatgcttgcaaaccgtgttcctgccatccagtaggatcagctgtccttcctgccaactcagtgaccttctgcgaccccagcaatggtgactgcccttgcaagcctggggtggcagggcgacgttgtgacaggtgcatggtgggatactggggcttcggagactatggctgtcgaccatgtgactgtgcggggagctgtgaccctatcaccggagactgcatcagcagccacacagacatagactggtatcatgaagttcctgacttccgtcccgtgcacaataagagcgaaccagcctgggagtgggaggatgcgcaggggttttctgcacttctacactcaggtaaatgcgaatgtaaggaacagacattaggaaatgccaaggcattctgtggaatgaaatattcatatgtgctaaaaataaagattttatcagctcatgataaaggtactcatgttgaggtcaatgtgaagattaaaaaggtcttaaaatctaccaaactgaagattttccgaggaaagcgaacattatatccagaatcatggacggacagaggatgcacttgtccaatcctcaatcctggtttggaataccttgtagcaggacatgaggatataagaacaggcaaactaattgtgaatatgaaaagctttgtccagcactggaaaccttctcttggaagaaaagtcatggatattttaaaaagagagtgcaagtagcattaagatggatagcacataatggcacttgtctatgtacaaaacacaaactttagagcaagaagacctcagacaggaaactggaattttttaaagtgccaaaacatatagaaatgtttgaatgcatgggtcttatctaacttatctcttctggacccatgtttaaatacagttttatttcatgaagagaaatgaaaacccctacactgatatctgttttctatgggactgattctgaaattcttaactattaagaatattttaatagcagcatgacatttagcagtaatccattaagggcagtacctctaacaaggacgccttccagcttcagcgatgttacttacgtttgatgctacttaaagtaatgaatgacgttttaaggaatccctaaccctactatcagaaaaggtgtttgttaaagagccttctcttgtgtgttacgcatgaactttggtctgtaggtgttaaatggaacctctccatgtgtatatagtatttccttgtataaagcactttactacctaccacttgtgttgtgaacgtttggtgactgctgttgaaagaaggaaaagggtgtgtgagaaagcctactgaagcagcagcactgccactacatgtggacaaaagtgaccatataaaagaagttgtgctatttaactctgaatacttggagaaactaggtgaagatgcaaccagaaaggagaatatgtatgcgtgaagtctcagctttgagctggaggctagattccaagatgacagccatgatgaaactttttaaaaaactaaaccagaagagactttaaaataagagaaagaaatcataaatgtagacatatgcttggctaaaggggaaatggactttaaattttaaagagctcatttgcaatgcacttgtatacacttcaaaaattattgtagacacagaatttgttatatttttgtgcttagtatttaaacctgaacattgaaacagttttcctccttgtctttcttaacagtaatagtcattatatttacctgttttttaacacaatgtatgtgatagtcaaaaaatcacagtttttcattattattcatcttctgtacccacgcataaccactatacatagtttcttttgtacttgaatatacaaaacatgaacacagtgccatatgaataatttcacatacagaacctttttttctctgaagtcctgtggacttgcaaatatatatatatattgctttgttaatttgtttttatatttcatatatgtaataaaggaatatgatctgaaaaaaaaaaaaaaaaaaaa

SEQ ID NO: 496 - DNA, 3035 bp, Homo Sapiens
gaggggtcctcactcgctgaccacactgacctcaggaccaagggaacaaaacacagcaggggcaatccatccggtccacggagaagtgctaaaccccaaagggtaaatgagattcccacaggaggagcagggaggagacaacaggcagggtggagggaacagcatgaggaacagcatttgagcccagcgtgtgtggcctccatgtgctgaatgcgtactggataccaagcttgctctacggaggccctgtgaaggtggctgtggatcacagatatcctcagctctctccagagctcaacacagtaccagatgctccagaaatgtttgctgaactgaatttgactggaaaggaaaacagagccccaggcctgcgcggtggctcacgtctataatcccagcactgtgggaggccgaggcagacggatcacttgaggtcaggagttcaagaccagcctggccaacatggtcccagctgcagggcagccatgagcctggtggcctgtgagtgcctgcccagccccggcctggagcctgagccttgctcacgagcacggtcccaagctcacgtgtacctggagcagattcgcaacagggtggctctgggagtgcctgacatgacaaaacgtgactatctggtggatgcggccacgcagatccggctggccctggagcgcgatgttagtgaggactatgaggcggccttcaaccactatcagaatggcgtggacgtgctgctccgtggcatacacgttgaccccaacaaggagcgacgtgaggctgtgaagctgaaaattaccaaatacctgcggcgggcagaggagatcttcaactgccacctgcagcggccgctgagcagtggagccagccccagcgcggtgcagctggtccaggacccggcaaccggagggacctttgtggtgaagagcctacccaggtgccacatggtgagcagggagcggctgaccatcatcccacacggagtcccctacatgacgaagctgctcaggtactttgtgagcgaggactccatcttcctgcacctggagcatgtgcaaggaggcactctctggtcccacctgctctcccaggcgcactcccgacattctgggctcagctctggctctacccaggagaggatgaaggctcagctcaacccccacctcaacctcctgaccccagcgaggcttccctcaggccatgcccctggccaggacagaatcgccctggagcctcctaggacttctccgaaccttctcctagctggggaggccccatccaccagaccccagagggaggctgaaggtgaacccacagccaggaccagcacctctggctcctcggaccttccaaaggccccaggtggccacctgcaccttcaagctaggagggctggccagaactcagacgctgggccccctcgggggctcacttgggttcctgagggggccggcccggtgctagggggctgtggccgaggcatggatcagagctgcctgtcagcagatggggccggccggggctgtggcagggccacctggagtgtgagagaggagcaggtgaagcagtgggcggcagagatgctggtagcgctggaggcgctgcacgagcagggggtgctgtgccgggacctccaccccgggaacctgctcctggaccaggcaggtcacatccggctcacatattttggccagtggtcagaggtggagccccagtgctgcggggaggccgtggacaatctctacagcgccccagaggtgggtgggatttccgagctgacggaagcctgtgactggtggagctttgggtctctactgtatgaactgctgacgggaatggcactgtcccagagccacccttcaggaatccaggcccacacccagctccagctgcccgagtggctcagtcgcccagcggcctctctgctgactgagctgctgcagttcgagcctacccggcgcctgggcatgggagaaggtggtgtcagcaaactcaagtcccatccctttttcagtaccatccaatggagcaagctggtggggacatctctggagactcatctcaggacactgatccactggctcagtggacccaaaccagactgtcctggctagtcctcttagtcacacagcgagtaggcctcttccaccagaagctgttcgtgcagctggggaggcccagaagcagggatgccatctgttgtgcagggagggatgaggtaggggacaggatgacccccacccccacccccccacccccgattcctgaccatgccccctatcttgtgatttcagacttgggagagcaaaagggaggggaagaaaataagagtaatggggggaggaaggaatgcatgggtctgccccttagagcaagtctgaaaccagaatcaagagtcctcctccccagtgggcctgtgtgggggaagaggggcagcctgccccaggggtgcaagaggacagcaattcagcttccaggccaaagcagtttagacaaggtgtgcccatcaggactccctctcaggccctggctgtttaccatgtcactgcctactgtgacttcatgcccttttgggataagaaaccacaaaacgcatggaacaactatccatggctcttagccagaaatgtcttgcctctggtctctgaaaagctggggtgagtggttacctcaaagacaattgcctccagtttgggggctcctctcagggttcaccctgtcaccggggcgtgggaccgacctgggaaatttccactagagttttgccctcagctcctccctgccagcatcccagtcaccaccaggtggcgcttctgacacggtccacgtgcctggctctgaaggcccaactgtcagaccagacccctcactcatggtggggagacttgacttcctcgggctcttcaggagactgagacagagaagacaagtgaaagcgcagcctgtacatgactctctgtggtccacgtcctgcctctccctggggtttacacggccccaataaagcctgctctggcctaaaaaaaaaaaaaaaaaaa

SEQ ID NO: 497 - DNA, 1678 bp, Homo Sapiens
agagcactgctgcggccgccgccattttagcgttttgtcagaagcgtccgcgccgcgaggaggaggccctgctggtttctgtgcgggctcttgtcaggatggtgaagctgttcatcggaaacctgccccgggaggctacagagcaggagattcgctcactcttcgagcagtatgggaaggtgctggaatgtgacatcattaagaattacggctttgtgcacatagaagacaagacggcagctgaggatgccatacgcaacctgcaccattacaagcttcatggggtgaacatcaacgtggaagccagcaagaataagagcaaaacctcaacaaagttgcatgtgggcaacatcagtcccacctgcaccaataaggagcttcgagccaagtttgaggagtatggtccggtcatcgaatgtgacatcgtgaaagattatgccttcgtacacatggagcgggcagaggatgcagtggaggccatcaggggccttgataacacagagtttcaaggcaaacgaatgcacgtgcagttgtccaccagccggcttaggactgcgcccgggatgggagaccagagcggctgctatcggtgcgggaaagaggggcactggtccaaagagtgtccgatagatcgttcaggccgcgtggcagacttgaccgagcaatataatgagcaatacggagcagtgcgtacgccttacaccatgagctatggggattcattgtattacaacaacgcgtacggagcgctcgatgcctactacaagcgctgccgtgctgcccggtcctatgaggcagtggcagctgcagctgcctccgtgtataattacgcagagcagaccctgtcccagctgccacaagtccagaatacagccatggccagtcacctcacctccacctctctcgatccctacgatagacacctgttgccgacctcaggagctgctgccacagctgctgctgcagcagcagccgctgctgctgttactgcagcttccacttcatattacgggcgggatcggagccccctgcgtcgcgctacagccccagtccccactgttggagagggctacggttacgggcatgagagtgagttgtcccaagcttcagcagccgcgcggaattctctgtacgacatggcccggtatgagcgggagcagtatgccgatcgggcgcggtactcagccttttaaagcttgaggtgggatgtgtgtgggctgaaattccgagctgcggttgtgcatgagaatacacccttcgtggtaccccatctccgggacgttctcggctctgtgcgttcagtccctcaggaaccgtggaccttaatttaccttgctaagttcagaccttctcttcctttcctttcctttcctctcctgcccattttcctgttcttctgtccttcaatacttctgtagcttcccattcatgttctcttctcccagcaggcctcattgtgtgcagaaactgtggtgggggctgtgctgtctcctccctgcctcctgcctcctgcggctgttggatttgggaatgaccttggtgagagtctcactgctccagggtctctttttggtccaaaggctagacctatagagttggatcactttttttctttccggtgaaataaatggtttttcaacttagaaaaaaaaaaaaaaaaaaaaaaaaaaaaaaaaaa

SEQ ID NO: 498 - DNA, 1648 bp, Homo Sapiens
agctgatgcctacggcatcccggagaggaccaactgcctcggaacgctgtcccccgcagcgacggcccgttccacctcgcgatctgccgggtacccgggcggcgtggcgctcggcctccagggatccactgtgcggtgccaaaaaagaggcggaggctcgcggcacagctctcccggcgcagctctcgggccgccgccgccgctcccaggcccgtctcccggcccgtggcagtcggggctcgcggacaaaacaagttgagcgcgagcgcgttgattggttggcggacggtgcgaggtggacgctgattggctgagggcagcgcgaggcgggcgctgattggctgcgacgcgccgacgccggtgttttgcagtcctgggcagctcggcagtccagcccggcccgggtcatggtggtgggccgagggctgctcggccgccgcagcctcgccgcgctgggagccgcctgcgcccgccgaggcctcggtgcctaaggccgcgctgccgggctcgagcggaggcggcgcaggcgctgaggctggcgcggagcgggcgcggggccgcgggtgcggaaagcgctaggtccagccctgctgggagttttctgccacacagatttgcggaagaacctgaccgtggacgagggcaccatgaaggtagaggtgctgcctgccctgaccgacaactacatgtacctggtcattgatgatgagaccaaggaggctgccattgtggatccggtgcagccccagaaggtcgtggacgcggcgagaaagcacggggtgaaactgaccacagtgctcaccacccaccaccactgggaccatgctggcgggaatgagaaactggtcaagctggagtcgggactgaaggtgtacgggggtgacgaccgtatcggggccctgactcacaagatcactcacctgtccacactgcaggtggggtctctgaacgtcaagtgcctggcgaccccgtgccacacttcaggacacatttgttacttcgtgagcaagcccggaggctcggagccccctgccgtgttcacaggtgacaccttgtttgtggctggctgcgggaagttctatgaagggactgcggatgagatgtgtaaagctctgctggaggtcttgggccggctccccccggacacaagagtctactgtggccacgagtacaccatcaacaacctcaagtttgcacgccacgtggagcccggcaatgccgccatccgggagaagctggcctgggccaaggagaagtacagcatcggggagcccacagtgccatccaccctggcagaggagtttacctacaaccccttcatgagagtgagggagaagacggtgcagcagcacgcaggtgagacggacccggtgaccaccatgcgggccgtgcgcagggagaaggaccagttcaagatgccccgggactgaggccgccctgcaccttcagcggatttggggattaggctcttttaggtaactggctttcctgctggtccgtgcgggaaattcagtcttgatttaaccttaattttacagcccttggcttgtgttatcggacattctaatgcatatttataagagaagtttaacaagtatttattcccataaaaaaaaaaaaaaaaaaaaaaaaaaaaaaaaaaaaaaaa

SEQ ID NO: 499 - DNA, 2117 bp, Homo Sapiens
ccccgcctccccccgcgccgccgccgcccgctaccgccgccgccgccgctgcgcctgctgctcctcgccgtccgcgctgcagtgcgaagggctcgaagatggccggttggcagagctacgtggataacctgatgtgcgatggctgctgccaggaggccgccattgtcggctactgcgacgccaaatacgtctgggcagccacggccgggggcgtctttcagagcattacgccaatagaaatagatatgattgtaggaaaagaccgggaaggtttctttaccaacggtttgactcttggcgcgaagaaatgctcagtgatcagagatagtctatacgtcgatggtgactgcacaatggacatccggacaaagagtcaaggtggggagccaacatacaatgtggctgtcggcagagctggtagagtcttggtctttgtaatgggaaaagaaggggtccatggaggcggattgaataagaaggcatactcaatggcaaaatacttgagagactctgggttctagctgctaggcagactgttaagtattaggggaaaattgctcttaaactttcctagctataagcttaagtcttaattctggaaattttattagcaatgcagggtgatggggtatgaacctgtgtctcctttgtatccctctgttggtggggaaaggtgtctttctttctgccctccccccccaaaataattctgttcacttttgttttgtttccttgtgtactccagcattggttatagtcatgggaaaggaaggtgtccacggaggcacacttaacaagaaagcatatgaactcgctttatacctgaggaggtctgatgtgtaagcagcctctccccatctacctagcaactgtcttcatcaacaaccctaattatggtcacaatgctaccaaactgtagatggtagctaatttttctttacctattttctaatgtcatgattcctgtttgcccaatggatcatttgtatgttaaccactgtatgtaaccaacccttatctggcaacataattgcagcacaataatgatttgcatgataccttgaaattggggggagggggcatgccaagttgggcatcactttgtcttagcaattaatgggatattgattactaaaataagttaatattaagcaaggtgccggttgtacaatctctgatcagtgtcttttcagcactttgagcatttacttggctcatttagtcttccttttgtagcgcatggttgggaggaaaaagtgcatgcatcattccttcactcttctctttttcccgccccccctcccttcgcacataggcatttggtttgcttccatctttttttatgcagtgcctgtttttttttaaccaattaaaatcccttttgttgatgagctattgagagctgcagtagtttgcttttagtattgttgttgcacttgagcagagacaaacctttattcatagtgtctacaggacatatgaagagtgcaatggcaaaacaagagcaaaaagcacttcctcccatgaccttacagtaaccatactgattgaatccccagggacattccatcattgcaatagctcagatttttcttcctttttctttgcacaccagctctactctttagtaaaattgtaaaaggctgccattatggacattaggtatcccaacataaccatctggagtgtgtccagtttgttcttcataggaccaatttttatttgcagcttgagtttttatatgaagttgcattattgtggacttggctgtcttgtgatgaatttttttcatatgtattctgtgccatactattgttaaaatgaactgttgctattgtgagatggattttaactgacctattaagggtttctttcgaatggcactactttagggacattctagtatttgcttctattgtttgggccttgtggataatgtacagatttaaaaacaaatcttgttgctgatttgtccatttctttccctgcactttgttacatctgggatacagtctaactcatctgatttaatatgcatttaaaaaaatgccataactattaaacaccttgtttacagacagatgaaataaatttattccaaccaaaaaaaaaaaaaa

SEQ ID NO: 500 - DNA, 2509 bp, Homo Sapiens
gaaggcggtggtagcgcctcagtggtgtgggcctgagccctgcccaggtgcccgcagagagcagccgggctgccagcgtttcatgatcaacatgggagactcccacgtggacaccagctccaccgtgtccgaggcggtggccgaagaagtatctcttttcagcatgacggacatgattctgttttcgctcatcgtgggtctcctaacctactggttcctcttcagaaagaaaaaagaagaagtccccgagttcaccaaaattcagacattgacctcctctgtcagagagagcagctttgtggaaaagatgaagaaaacggggaggaacatcatcgtgttctacggctcccagacggggactgcagaggagtttgccaaccgcctgtccaaggacgcccaccgctacgggatgcgaggcatgtcagcggaccctgaggagtatgacctggccgacctgagcagcctgccagagatcgacaacgccctggtggttttctgcatggccacctacggtgagggagaccccaccgacaatgcccaggacttctacgactggctgcaggagacagacgtggatctctctggggtcaagttcgcggtgtttggtcttgggaacaagacctacgagcacttcaatgccatgggcaagtacgtggacaagcggctggagcagctcggcgcccagcgcatctttgagctggggttgggcgacgacgatgggaacttggaggaggacttcatcacctggcgagagcagttctggccggccgtgtgtgaacactttggggtggaagccactggcgaggagtccagcattcgccagtacgagcttgtggtccacaccgacatagatgcggccaaggtgtacatgggggagatgggccggctgaagagctacgagaaccagaagcccccctttgatgccaagaatccgttcctggctgcagtcaccaccaaccggaagctgaaccagggaaccgagcgccacctcatgcacctggaattggacatctcggactccaaaatcaggtatgaatctggggaccacgtggctgtgtacccagccaacgactctgctctcgtcaaccagctgggcaaaatcctgggtgccgacctggacgtcgtcatgtccctgaacaacctggatgaggagtccaacaagaagcacccattcccgtgccctacgtcctaccgcacggccctcacctactacctggacatcaccaacccgccgcgtaccaacgtgctgtacgagctggcgcagtacgcctcggagccctcggagcaggagctgctgcgcaagatggcctcctcctccggcgagggcaaggagctgtacctgagctgggtggtggaggcccggaggcacatcctggccatcctgcaggactgcccgtccctgcggccccccatcgaccacctgtgtgagctgctgccgcgcctgcaggcccgctactactccatcgcctcatcctccaaggtccaccccaactctgtgcacatctgtgcggtggttgtggagtacgagaccaaggctggccgcatcaacaagggcgtggccaccaactggctgcgggccaaggagcctgccggggagaacggcggccgtgcgctggtgcccatgttcgtgcgcaagtcccagttccgcctgcccttcaaggccaccacgcctgtcatcatggtgggccccggcaccggggtggcacccttcataggcttcatccaggagcgggcctggctgcgacagcagggcaaggaggtgggggagacgctgctgtactacggctgccgccgctcggatgaggactacctgtaccgggaggagctggcgcagttccacagggacggtgcgctcacccagctcaacgtggccttctcccgggagcagtcccacaaggtctacgtccagcacctgctaaagcaagaccgagagcacctgtggaagttgatcgaaggcggtgcccacatctacgtctgtggggatgcacggaacatggccagggatgtgcagaacaccttctacgacatcgtggctgagctcggggccatggagcacgcgcaggcggtggactacatcaagaaactgatgaccaagggccgctactccctggacgtgtggagctaggggcctgcctgccccacccaccccacagactccggcctgtaatcagctctcctggctccctcccgtagtctcctgggtgtgtttggcttggccttggcatgggcgcaggcccagtgacaaagactcctctgggcctggggtgcatcctcctcagcccccaggccaggtgaggtccaccggcccctggcagcacagcccagggcctgcatgggggcaccgggctccatgcctctggaggcctctggccctcggtggctgcacagaagggctctttctctctgctgagctgggcccagcccctccacgtgatttccagtgagtgtaaataattttaaataacctctggcccttggaataaagttctgttttctgtaaaaaaaaaaa

SEQ ID NO: 501 - DNA, 2354 bp, Homo Sapiens
atctaatgaggagcgaggtgcggtgccccgaagcgctcgcttcccgcggtgcgatctagtcctgcagtaggcggcccggggccacaccgcggccgcccaagccagtgcaaggcccaggggcctgacatcgctcccagcgctcgaggaccgaggcctgctgtggaggacaccgtgctccctcgggacctgctctggattccggcccggacgtccccttggagctctgcatctccaacctggaacccaacccagaagtctcaagtttgacgcatcacgtggcgtgcggatccactgagggtccacagagaggggcgcccatctcctgcgtctcagttatcctggtaattgtgtatctgcccattgttcgttgcctcattaacttggctttctaggtgcacccaccttgccaccagagaagtccaaatcctgacttctctccaaggtgttgggaattctgtgccctaaagaattccgactcagatccgaacggggatctggtggaatcgagggtgaaagaccagagggacaatgttctactatcccaacgtgcttcagcgccacaccggctgctttgccaccatctggctggcggcgactcgcggcagccggttggtgaagcgcgaatacctgagggtgaatgtggtgaaaacctgcgaggaaatcctcaattacgtgctggtacgagtgcaacccccgcagcccggcctgccgcggccccgcttctccctctatctctcagcccaacttcagatcggtgtgatccgcgtctattctcaacaatgccagtacctcgtggaggacatccagcacatcttggagcgcctccaccgtgcccagctgcagatccgaatagatatggagactgagctacccagcctgctgcttcctaaccacctggccatgatggagaccctagaagatgctccagatcccttttttgggatgatgtctgtggatcccagacttcctagtcctttcgatatccctcagattcgacacctcttagaggctgcaatcccagagagagttgaagagatccctcctgaagttcctacagagcccagggagccagagaggattccggtcactgtgctgccacctgaggccatcacgatcctggaggcagagcccatacggatgctggagattgagggtgaacgggagctcccagaggtcagccgccgagaactggacctgctgatcgcagaggaagaagaagctatcttgttagaaatcccgcggctcccacctccagctcctgcagaggtggaaggaataggagaggcactgggtcctgaggagctgaggctgacaggctgggaacctggggccctactcatggaggtgacccccccggaggagctgcgtctgccagccccacccagcccagagaggaggcccccagtccccccacctcctcgccgccgccgtcgtcgccggttactgttctgggacaaggagactcagatctccccggagaaattccaggaacaactgcaaaccagagcccactgctgggaatgtcctatggtgcagccgcccgagaggaccatcagaggccctgcggagttgttcagaaccccaactctctctggctggctaccccctgaactactgggtctctggacccattgtgcccagccacccccaaaagccctcaggcgagagctgcctgaggaggcagccgctgaggaggaaaggagaaagattgaagttccaagtgagattgaggtcccgagggaggccctggagcccagtgttccccttatggtgtctttagagatctccctagaggcagctgaagaggagaagtcccgcatcagcctcatcccaccagaagaacggtgggcctggcctgaggtggaggcgccagaagctcctgcattgcccgtggtgcctgaactccctgaggtgcccatggagatgcctttggtgctgcccccagagctcgagctgctctcactggaagcagtgcacagggcagtggcactggagctgcaggctaacagggagcccgacttcagcagcctggtgtcacctctcagcccccgcaggatggctgcccgggtcttctacctgctcctggtgctctcagcgcaacagattcttcacgtgaaacaagaaaagccatatggtcgcctcctgatccagccggggcccagattccactgaggttagagtccatttacaaagctgccaggaaaccggccacttctagtaaaccacgtcgtgcctcactgggtcctgcttacctcatttctgaatgtgcatttccagccttcttgctctcagagctattgttcaagcagaaaacaagctgcttttattacagtaaaaaaaaaaaaaaaaaaaaa

SEQ ID NO: 502 - DNA, 4683 bp, Homo Sapiens
gttgtcgggatgggggcgggagccaacatagagccctcagtgggatgagggtgaaactgctattgccggcggctcctgttttaccgcgtcagcatgctggtgcatttatttcgggtcgggattcggggtggcccattcccaggcaggctgctaccgcccctccgcttccagacattctcagctgtcaggtactctgatggctaccgcagctcctccctcctccgggccgtggcccacctgcggtcccagctctgggcccacctccctcgagcccccctagctcccagatggagcccctctgcctggtgctgggttgggggagccctgctaggccccatggtactgagtaagcatccccacctctgccttgtggccctgtgtgaggcagaagaggcccctcctgccagctccacaccccatgtcgtggggtctcgctttaactggaagctcttctggcagtttctgcacccccacctgctggtcctgggggtagccgtcgtgctggccttgggtgcggcactcgtgaatgtacagatccccctgctcctgggccagctggtagaggtcgtggccaagtacacaagggaccacgtagggagtttcatgactgagtcccagaatctcagcacccacctgcttatcctctatggtgtccagggactgctgaccttcgggtacctggtgctgctgtcccacgttggcgagcgcatggctgtggacatgcggagggccctcttcagctccctgctccgacaagacatcaccttctttgacgccaataagacagggcagctggtgagccgcttgacaactgacgtgcaggagtttaagtcatccttcaagcttgtcatctcccaggggctgcgaagctgcacccaggtggcaggctgcctggtgtccctgtccatgctgtcgacacgcctcacgctgctgctgatggtggccacaccagccctgatgggagtgggcaccctgatgggctcaggcctccgaaaattgtctcgccagtgtcaggagcagatcgccagggcaatgggcgtagcagacgaggccctgggcaatgtgcggactgtgcgtgccttcgccatggagcaacgggaagaggagcgctatggggcagagctggaagcctgccgctgccgggcagaggagctgggccgcggcatcgccttgttccaagggctttccaacatcgccttcaactgcatggtcttgggtaccctatttattgggggctcccttgtggccggacagcagctgacagggggagacctcatgtccttcctggtggcctcccagacagtgcaaaggtccatggccaacctctctgtcctgtttgggcaggtggtccgggggctgagtgcaggtgcccgggtctttgagtacatggccctgaacccctgcatcccactgtctgggggctgctgcgtccccaaagagcagctgcgtggctccgttacatttcagaacgtctgcttcagctacccctgccgccccggcttcgaggtgctgaaagacttcaccctgacgctgccccctggcaagatcgtggccctcgtgggccagtctggcggaggaaagaccaccgtggcttccctgctggagcgcttctacgaccccacggcaggcgtggtgatgctggatgggcgggacctgcgcacccttgacccctcctggctccggggccaggttgtcggcttcatcagccaggagcccgtcctgtttgggacgaccatcatggaaaacatccgctttgggaagctggaagcttccgatgaagaggtgtacacagccgcccgggaagcgaatgctcacgagttcatcaccagcttccccgagggctacaacacggtcgtcggtgaacggggcactaccctgtctgggggccagaagcagcgcctggccatcgcccgagcccttatcaagcagcccacggtgctgatactggatgaagctaccagcgcgctggatgcagagtccgagcgggttgtacaggaggccctggaccgggccagtgcaggccgcacggtgctggtaattgcccaccggctcagcactgtccgtggggcccactgcattgtcgtcatggccgatggccgtgtctgggaggctgggacacatgaagagctcctgaagaaaggcgggctatacgccgagctcatccggaggcaggccctggatgccccgaggacagcggccccaccgcccaaaaagccagaaggccccaggagccaccagcacaagtcctgagaagggccccctgaggtgtggtcgctgccaagcatcagtgttagggctggggctcagcctgggggagcctactggggactgagcccccaggagggccagcatgtggagagtcgctgcggctgctcctgctcacaataaagccggggccgagcagctggcaggggaggccaatccctccctcccctccccagtcctgccggctgcctccctcccaccagagtctgccagagtcattgggctgcaatgggcagagacagagttccacgagacacctccactctattctccctttgcccagacccctccagacctctcaagagacgttctggccagtctccctgccccacccagcagcttcaaattggccaggcctacagtagctccagggaatttttaaaaatcagggtctggaagtgggcctgggaattcaaacctaggctcttcccacacccttgctaggacctcacttccctagactggcgactgactccctctcctgtgtccccactccctccatgggagaaggagcctatcccctggctcaccccgggacccacagtccccatcttccaaacaacctccctcctttctccctgcacagtgaacacagtcctgatttctagatttcacctcccctccccacccacaagggacacaggcctaacagggcccaacacttgggtcagggtaggagggacggggccacaatggccagttcccacgagaagcgccagcctgcctggctgtcttccaccggccctgccctgtgtgcctggcgtctttcacccactgagattgtgaaccagcctccatctacaccaagaacacccagcactgaaggagatgggaggggctgatgcccacctggagctctctgcttcctgcccacagtgctgacgagtacagagctaaatggagcagctactgcagaatccagtacagaatcggtccaggagggtgcggctgtggacaggccagcatccccagcaggttctgggaggcgcaccttgaaaggggaaggcagacatcctgagtgatgggcgcctgtggccctgagactgtggatgagggggctaggctccagctggcttctgaggggcctggaaaggcacacaagtaggtccttggctgaactggtgccccagcaggacctcgtgtccctgcactgctgcagatgcatcagccctccccatgttggtgccgctgtcacttcctactgggatccttcccctatccagccacatccaggctgtgggactacacggtgccctgttcccctgggcaggagaagaggtggtacctgcaatgcaccttcacagccaggcaagcattctggatttaccctgtgtaaagaagggtggtaccctctttcaggggtgtgatacagtgcattgatggagcagctggtgctgctgggaggccagcctggaagaggcagcagtggctcaagtttgcgtgcaggagccagagtgggacccacgggctcttgtgggtgtggtttagaactagatggtgctttggggacaagccatccaaaaaccccaggcccacatccaccctgatttgatatcccacttcctgacagatcagaggctgtgtctttaagcagtggaggtccaggagcagagcctggggctggttcacagctaaacccctccttagggcagcccagagtagggcctcagctggcaagtccacaagccctgctggggccctgcttgttggcctgacccctccctcaccaggcagccagccaaggtggttcctgcttcacccactcagtcatcagcctcaggctgcccaaaatgcctctgacaccagatttatatcttctgggcggcttctttaaatccagcccttcacccgccccctagagaagcagtgaaaccccttggctagtccagctggaagagctagaccgcaggagccgcgccgtcttcctaacctcgcctcggccttcgctccacagtggagagtgggagcctagctgtgcttgatgctgaatgcctgttttgagagtgtgagtgggatcatctacagtaaatacttgcaaagcatggcactgtggctctggggagctggtacgcctgtgctgtaaccatggtactcagtccttccaaagtgtttattaatcaagcacctgtcatgtgccattgagcccacgatggggaatgaggacagtccctgcccccatgaagcttgtgtcctgttgggaggacagacaggtggcccagcagttgcagcatggtgtgtgcacacgtttggctggtggaaccatgtttctaccactcatggtcaaaaaaagcccaccaaagtcctgggagttcacatctgtgtgatgatacggcaacattgtttgtaatggaaagactggacacccccagtgcccatcagtgggggagtcattaaataaactatggtatgtgcacataa

SEQ ID NO: 503 - DNA, 980 bp, Homo Sapiens
  misc_feature (2)..(2): n is a, c, g, or t
  misc_feature (684)..(684): n is a, c, g, or t
  misc_feature (846)..(848): n is a, c, g, or t
  misc_feature (855)..(855): n is a, c, g, or t
  misc_feature (857)..(859): n is a, c, g, or t
  misc_feature (864)..(864): n is a, c, g, or t
  misc_feature (868)..(872): n is a, c, g, or t
  misc_feature (877)..(877): n is a, c, g, or t
  misc_feature (879)..(879): n is a, c, g, or t
  misc_feature (883)..(883): n is a, c, g, or t
  misc_feature (885)..(885): n is a, c, g, or t
  misc_feature (891)..(891): n is a, c, g, or t
  misc_feature (893)..(893): n is a, c, g, or t
  misc_feature (904)..(906): n is a, c, g, or t
  misc_feature (911)..(911): n is a, c, g, or t
  misc_feature (915)..(915): n is a, c, g, or t
  misc_feature (917)..(917): n is a, c, g, or t
  misc_feature (920)..(927): n is a, c, g, or t
  misc_feature (929)..(931): n is a, c, g, or t
  misc_feature (936)..(936): n is a, c, g, or t
  misc_feature (938)..(938): n is a, c, g, or t
  misc_feature (961)..(961): n is a, c, g, or t
  misc_feature (963)..(963): n is a, c, g, or t
  misc_feature (965)..(965): n is a, c, g, or t
  misc_feature (968)..(968): n is a, c, g, or t
  misc_feature (971)..(971): n is a, c, g, or t
  misc_feature (975)..(975): n is a, c, g, or t
anaatagagaaattactatgagaggatcgcatcaccatcaccatcacggatcctatttaggtgacactatagaatcgtcgacccacgcgtccgtgctcttagccaaatggactgagtgaatactgatggtgacagtttacttatggctagcaccaaaatggtgttcagttctgactcatgtgagaactggactcaagtgttttcttctcttcagttgatcataggatgtaacccagaagtagggtgactttatacccagcttgccagggataattccagcatatgccaggtatcacaaagtaattaatagcattaaattttactctcaaatgcatctcagtttggataattcattataaggtcactgtacttaagagaccagaaataaaattgagaaagaggcatcaatatagcacaagtacatgtcatggactgtatgtttatgtaatttactgatatatatttgaacctgctcagccttgattccaaatactccatttctaccttttgatggattgatgctatgctcatctgttttttgataggtataatcaaatacaggtcacgataaaagctgcagttacatagttatttgatgtttcatggtcagacacttggtctttaccaaggcccaataatatatcaagagccacttttgaaatggttaacaattctctgttgcanaagaaaaggccttgctgtagaatcctagaagtctgtgactcatctctgtactggggattgccatacataacacaaagcatcccttactatcatgaaaacgtctagcactatcagatattctacggtataaacctgccatacaccttctccatgactttttcnnnacaaaanannnacaanaatnnnnnggccngnccanangaaccncnaaaaaaacgcnnnaaaanaaanancannnnnnnncnnnggggncncccccccccccccaaagggggancngnatnaancctnatttt

SEQ ID NO: 504 - DNA, 1582 bp, Homo Sapiens
  misc_feature (3)..(3): n is a, c, g, or t
  misc_feature (8)..(8): n is a, c, g, or t
  misc_feature (18)..(18): n is a, c, g, or t
  misc_feature (67)..(67): n is a, c, g, or t
  misc_feature (74)..(74): n is a, c, g, or t
  misc_feature (99)..(99): n is a, c, g, or t
  misc_feature (110)..(110): n is a, c, g, or t
  misc_feature (195)..(195): n is a, c, g, or t
  misc_feature (245)..(245): n is a, c, g, or t
  misc_feature (297)..(297): n is a, c, g, or t
  misc_feature (299)..(299): n is a, c, g, or t
  misc_feature (315)..(315): n is a, c, g, or t
  misc_feature (340)..(340): n is a, c, g, or t
  misc_feature (344)..(344): n is a, c, g, or t
  misc_feature (357)..(357): n is a, c, g, or t
  misc_feature (372)..(372): n is a, c, g, or t
  misc_feature (381)..(381): n is a, c, g, or t
  misc_feature (395)..(395): n is a, c, g, or t
  misc_feature (411)..(411): n is a, c, g, or t
  misc_feature (423)..(423): n is a, c, g, or t
  misc_feature (427)..(427): n is a, c, g, or t
  misc_feature (435)..(435): n is a, c, g, or t
  misc_feature (447)..(447): n is a, c, g, or t
  misc_feature (454)..(454): n is a, c, g, or t
  misc_feature (462)..(463): n is a, c, g, or t
  misc_feature (473)..(474): n is a, c, g, or t
  misc_feature (479)..(479): n is a, c, g, or t
  misc_feature (482)..(482): n is a, c, g, or t
  misc_feature (485)..(485): n is a, c, g, or t
  misc_feature (488)..(488): n is a, c, g, or t
  misc_feature (491)..(491): n is a, c, g, or t
  misc_feature (508)..(508): n is a, c, g, or t
  misc_feature (510)..(510): n is a, c, g, or t
  misc_feature (515)..(517): n is a, c, g, or t
  misc_feature (526)..(526): n is a, c, g, or t
  misc_feature (532)..(532): n is a, c, g, or t
  misc_feature (536)..(536): n is a, c, g, or t
  misc_feature (541)..(541): n is a, c, g, or t
  misc_feature (554)..(554): n is a, c, g, or t
  misc_feature (559)..(559): n is a, c, g, or t
  misc_feature (562)..(563): n is a, c, g, or t
  misc_feature (573)..(573): n is a, c, g, or t
  misc_feature (576)..(576): n is a, c, g, or t
  misc_feature (580)..(583): n is a, c, g, or t
  misc_feature (591)..(591): n is a, c, g, or t
  misc_feature (599)..(601): n is a, c, g, or t
  misc_feature (603)..(603): n is a, c, g, or t
  misc_feature (608)..(609): n is a, c, g, or t
  misc_feature (619)..(620): n is a, c, g, or t
  misc_feature (624)..(624): n is a, c, g, or t
  misc_feature (634)..(634): n is a, c, g, or t
  misc_feature (637)..(637): n is a, c, g, or t
  misc_feature (642)..(642): n is a, c, g, or t
  misc_feature (646)..(646): n is a, c, g, or t
  misc_feature (654)..(654): n is a, c, g, or t
  misc_feature (665)..(665): n is a, c, g, or t
  misc_feature (668)..(668): n is a, c, g, or t
  misc_feature (670)..(670): n is a, c, g, or t
  misc_feature (678)..(680): n is a, c, g, or t
  misc_feature (684)..(684): n is a, c, g, or t
  misc_feature (686)..(687): n is a, c, g, or t
  misc_feature (689)..(691): n is a, c, g, or t
  misc_feature (693)..(694): n is a, c, g, or t
  misc_feature (696)..(696): n is a, c, g, or t
  misc_feature (699)..(700): n is a, c, g, or t
  misc_feature (702)..(702): n is a, c, g, or t
  misc_feature (706)..(706): n is a, c, g, or t
  misc_feature (710)..(712): n is a, c, g, or t
  misc_feature (714)..(714): n is a, c, g, or t
  misc_feature (716)..(716): n is a, c, g, or t
  misc_feature (719)..(719): n is a, c, g, or t
  misc_feature (724)..(724): n is a, c, g, or t
  misc_feature (728)..(729): n is a, c, g, or t
  misc_feature (731)..(731): n is a, c, g, or t
  misc_feature (737)..(737): n is a, c, g, or t
  misc_feature (740)..(740): n is a, c, g, or t
  misc_feature (743)..(743): n is a, c, g, or t
  misc_feature (745)..(745): n is a, c, g, or t
  misc_feature (747)..(748): n is a, c, g, or t
  misc_feature (751)..(752): n is a, c, g, or t
  misc_feature (761)..(761): n is a, c, g, or t
  misc_feature (763)..(763): n is a, c, g, or t
  misc_feature (774)..(774): n is a, c, g, or t
  misc_feature (776)..(776): n is a, c, g, or t
  misc_feature (780)..(780): n is a, c, g, or t
  misc_feature (785)..(787): n is a, c, g, or t
  misc_feature (789)..(790): n is a, c, g, or t
  misc_feature (794)..(794): n is a, c, g, or t
  misc_feature (808)..(811): n is a, c, g, or t
  misc_feature (813)..(813): n is a, c, g, or t
  misc_feature (817)..(817): n is a, c, g, or t
  misc_feature (821)..(821): n is a, c, g, or t
  misc_feature (823)..(823): n is a, c, g, or t
  misc_feature (837)..(840): n is a, c, g, or t
  misc_feature (845)..(845): n is a, c, g, or t
  misc_feature (849)..(851): n is a, c, g, or t
  misc_feature (855)..(855): n is a, c, g, or t
  misc_feature (859)..(859): n is a, c, g, or t
  misc_feature (861)..(861): n is a, c, g, or t
  misc_feature (866)..(868): n is a, c, g, or t
  misc_feature (870)..(870): n is a, c, g, or t
  misc_feature (873)..(873): n is a, c, g, or t
  misc_feature (877)..(879): n is a, c, g, or t
  misc_feature (887)..(887): n is a, c, g, or t
  misc_feature (893)..(896): n is a, c, g, or t
  misc_feature (898)..(899): n is a, c, g, or t
  misc_feature (902)..(902): n is a, c, g, or t
  misc_feature (905)..(905): n is a, c, g, or t
  misc_feature (907)..(908): n is a, c, g, or t
  misc_feature (912)..(912): n is a, c, g, or t
  misc_feature (916)..(916): n is a, c, g, or t
  misc_feature (919)..(919): n is a, c, g, or t
  misc_feature (921)..(921): n is a, c, g, or t
  misc_feature (923)..(925): n is a, c, g, or t
  misc_feature (927)..(927): n is a, c, g, or t
  misc_feature (931)..(932): n is a, c, g, or t
  misc_feature (934)..(934): n is a, c, g, or t
  misc_feature (937)..(937): n is a, c, g, or t
  misc_feature (945)..(949): n is a, c, g, or t
  misc_feature (958)..(958): n is a, c, g, or t
  misc_feature (963)..(963): n is a, c, g, or t
  misc_feature (965)..(965): n is a, c, g, or t
  misc_feature (969)..(969): n is a, c, g, or t
  misc_feature (975)..(975): n is a, c, g, or t
  misc_feature (978)..(978): n is a, c, g, or t
  misc_feature (984)..(984): n is a, c, g, or t
  misc_feature (986)..(987): n is a, c, g, or t
  misc_feature (994)..(994): n is a, c, g, or t
  misc_feature (1001)..(1002): n is a, c, g, or t
  misc_feature (1011)..(1011): n is a, c, g, or t
  misc_feature (1014)..(1014): n is a, c, g, or t
  misc_feature (1016)..(1017): n is a, c, g, or t
  misc_feature (1020)..(1021): n is a, c, g, or t
  misc_feature (1031)..(1032): n is a, c, g, or t
  misc_feature (1037)..(1037): n is a, c, g, or t
  misc_feature (1049)..(1049): n is a, c, g, or t
  misc_feature (1052)..(1052): n is a, c, g, or t
  misc_feature (1055)..(1056): n is a, c, g, or t
  misc_feature (1063)..(1063): n is a, c, g, or t
  misc_feature (1072)..(1072): n is a, c, g, or t
  misc_feature (1076)..(1076): n is a, c, g, or t
  misc_feature (1080)..(1080): n is a, c, g, or t
  misc_feature (1084)..(1085): n is a, c, g, or t
  misc_feature (1088)..(1088): n is a, c, g, or t
  misc_feature (1092)..(1092): n is a, c, g, or t
  misc_feature (1099)..(1100): n is a, c, g, or t
  misc_feature (1102)..(1102): n is a, c, g, or t
  misc_feature (1105)..(1105): n is a, c, g, or t
  misc_feature (1107)..(1107): n is a, c, g, or t
  misc_feature (1110)..(1110): n is a, c, g, or t
  misc_feature (1112)..(1112): n is a, c, g, or t
  misc_feature (1117)..(1118): n is a, c, g, or t
  misc_feature (1123)..(1124): n is a, c, g, or t
  misc_feature (1126)..(1126): n is a, c, g, or t
  misc_feature (1129)..(1129): n is a, c, g, or t
  misc_feature (1134)..(1134): n is a, c, g, or t
  misc_feature (1138)..(1138): n is a, c, g, or t
  misc_feature (1140)..(1140): n is a, c, g, or t
  misc_feature (1144)..(1144): n is a, c, g, or t
  misc_feature (1146)..(1147): n is a, c, g, or t
  misc_feature (1167)..(1167): n is a, c, g, or t
  misc_feature (1170)..(1171): n is a, c, g, or t
  misc_feature (1179)..(1179): n is a, c, g, or t
  misc_feature (1184)..(1184): n is a, c, g, or t
  misc_feature (1186)..(1186): n is a, c, g, or t
  misc_feature (1191)..(1191): n is a, c, g, or t
  misc_feature (1193)..(1193): n is a, c, g, or t
  misc_feature (1197)..(1197): n is a, c, g, or t
  misc_feature (1202)..(1203): n is a, c, g, or t
  misc_feature (1205)..(1206): n is a, c, g, or t
  misc_feature (1216)..(1218): n is a, c, g, or t
  misc_feature (1221)..(1221): n is a, c, g, or t
  misc_feature (1224)..(1225): n is a, c, g, or t
  misc_feature (1228)..(1229): n is a, c, g, or t
  misc_feature (1232)..(1232): n is a, c, g, or t
  misc_feature (1234)..(1235): n is a, c, g, or t
  misc_feature (1237)..(1239): n is a, c, g, or t
  misc_feature (1244)..(1244): n is a, c, g, or t
  misc_feature (1246)..(1246): n is a, c, g, or t
  misc_feature (1251)..(1251): n is a, c, g, or t
  misc_feature (1258)..(1258): n is a, c, g, or t
  misc_feature (1260)..(1261): n is a, c, g, or t
  misc_feature (1266)..(1267): n is a, c, g, or t
  misc_feature (1272)..(1272): n is a, c, g, or t
  misc_feature (1274)..(1274): n is a, c, g, or t
  misc_feature (1276)..(1276): n is a, c, g, or t
  misc_feature (1279)..(1279): n is a, c, g, or t
  misc_feature (1282)..(1282): n is a, c, g, or t
  misc_feature (1286)..(1287): n is a, c, g, or t
  misc_feature (1289)..(1289): n is a, c, g, or t
  misc_feature (1292)..(1292): n is a, c, g, or t
  misc_feature (1294)..(1294): n is a, c, g, or t
  misc_feature (1298)..(1298): n is a, c, g, or t
  misc_feature (1301)..(1301): n is a, c, g, or t
  misc_feature (1305)..(1305): n is a, c, g, or t
  misc_feature (1309)..(1309): n is a, c, g, or t
  misc_feature (1319)..(1319): n is a, c, g, or t
  misc_feature (1322)..(1322): n is a, c, g, or t
  misc_feature (1326)..(1326): n is a, c, g, or t
  misc_feature (1328)..(1328): n is a, c, g, or t
  misc_feature (1332)..(1332): n is a, c, g, or t
  misc_feature (1336)..(1336): n is a, c, g, or t
  misc_feature (1340)..(1340): n is a, c, g, or t
  misc_feature (1342)..(1343): n is a, c, g, or t
  misc_feature (1348)..(1348): n is a, c, g, or t
  misc_feature (1351)..(1351): n is a, c, g, or t
  misc_feature (1353)..(1353): n is a, c, g, or t
  misc_feature (1356)..(1357): n is a, c, g, or t
  misc_feature (1359)..(1359): n is a, c, g, or t
  misc_feature (1361)..(1361): n is a, c, g, or t
  misc_feature (1363)..(1363): n is a, c, g, or t
  misc_feature (1365)..(1365): n is a, c, g, or t
  misc_feature (1368)..(1370): n is a, c, g, or t
  misc_feature (1372)..(1373): n is a, c, g, or t
  misc_feature (1378)..(1378): n is a, c, g, or t
  misc_feature (1385)..(1385): n is a, c, g, or t
  misc_feature (1387)..(1387): n is a, c, g, or t
  misc_feature (1389)..(1389): n is a, c, g, or t
  misc_feature (1392)..(1392): n is a, c, g, or t
  misc_feature (1394)..(1396): n is a, c, g, or t
  misc_feature (1402)..(1402): n is a, c, g, or t
  misc_feature (1404)..(1405): n is a, c, g, or t
  misc_feature (1410)..(1410): n is a, c, g, or t
  misc_feature (1416)..(1416): n is a, c, g, or t
  misc_feature (1419)..(1419): n is a, c, g, or t
  misc_feature (1421)..(1421): n is a, c, g, or t
  misc_feature (1423)..(1426): n is a, c, g, or t
  misc_feature (1429)..(1429): n is a, c, g, or t
  misc_feature (1437)..(1438): n is a, c, g, or t
  misc_feature (1440)..(1441): n is a, c, g, or t
  misc_feature (1448)..(1448): n is a, c, g, or t
  misc_feature (1451)..(1451): n is a, c, g, or t
  misc_feature (1454)..(1456): n is a, c, g, or t
  misc_feature (1461)..(1461): n is a, c, g, or t
  misc_feature (1466)..(1467): n is a, c, g, or t
  misc_feature (1469)..(1470): n is a, c, g, or t
  misc_feature (1473)..(1473): n is a, c, g, or t
  misc_feature (1477)..(1477): n is a, c, g, or t
  misc_feature (1493)..(1493): n is a, c, g, or t
  misc_feature (1497)..(1497): n is a, c, g, or t
  misc_feature (1500)..(1501): n is a, c, g, or t
  misc_feature (1511)..(1511): n is a, c, g, or t
  misc_feature (1513)..(1514): n is a, c, g, or t
  misc_feature (1519)..(1519): n is a, c, g, or t
  misc_feature (1524)..(1524): n is a, c, g, or t
  misc_feature (1528)..(1528): n is a, c, g, or t
  misc_feature (1532)..(1532): n is a, c, g, or t
  misc_feature (1535)..(1535): n is a, c, g, or t
  misc_feature (1537)..(1537): n is a, c, g, or t
  misc_feature (1539)..(1539): n is a, c, g, or t
  misc_feature (1547)..(1548): n is a, c, g, or t
  misc_feature (1557)..(1557): n is a, c, g, or t
  misc_feature (1562)..(1563): n is a, c, g, or t
  misc_feature (1566)..(1566): n is a, c, g, or t
  misc_feature (1569)..(1569): n is a, c, g, or t
  misc_feature (1571)..(1571): n is a, c, g, or t
  misc_feature (1574)..(1574): n is a, c, g, or t
  misc_feature (1580)..(1580): n is a, c, g, or t
aantaganagaattactntgagaggatcgcatcaccgctcgccatcacgggatcctatttaggtganactatanaatcgtcgacccacgcgttccgacnaaaacgaaaangaaaatgggtcccaggccctccccgccagcctccgtagacgggaaggatcaggaagcggggactccgggatgtcagcggcgccgnggcgcgggctccgggcttccctgccctgcaatgtggaagctgctctctangaggggcccgaggctgggcccacggatgcgggcgcgccgggaggatatttancnttgaagagcggaaggnggcggagactcggcgcgccccaagncccnggtgcacgtgggngcgccggtgcccggntgatggagngtcccgatccgtgnaatccctggagggtanatcggcgcttcnccantcgaacgnaaacctgggagncttaacnatcgagcnngctgtaaaanncatcntcnccnccnacntggattattgatttttngntttcnnnggttccatnctgccncacnatgcntggaaaggccccnagatngcnnatttcttccnganttannnngccgcatnctgccacnnngnattgnnaacatcgganngcanccctcctgcnccnctgcngcgncttaaacnttccctttccnctntntgattaannnctcnanncnnnanncnaanntncccncaannnanantcngcaantatnnanctttanccngancnannctnnataaacaancntgataatgatnantcanatacnnntnnattntcaaacaaatctcnnnntnttcngtananaacgagtctttatnnnnccttnccannnaccncatntncctannnancanccannnatactatncttctnnnnannatnaantnncccntctnacncncnnncnaaanntnttnttttacannnnntactaaatnattcnantctntaccanaanaatctncnncaataanttatccnnatcgtatanctnannctnntatattagtnncgccncactcataacanttnaanntacactncataataantctncttnatcnnccnctanatttatnntnttnancantnatcannctctnntngancaaantaantnacancnntatttattcttaaccaactnttnnaacatctntcagnantaatntnttanccatnncnntcgcccactnnngcnctnnatnnatntnnannntactncncttcntccaatncnnttaanncacantntntcntanactnnantananaatnatncttnctantctatataancanatantnctcntatnctgnanncaaantcnanacnntncntntntcnnncnnatatnatcaacntntncanannnctttcntnnccacncctcanaancntnnnntcnctcattcnnanntcacttntantannncatantattnncnnacnttcncatatcttatatttancatnatnncaactatctncnncttcnatttncacnttanctntnanttcttctnncatattctntcatnntanatncntcnattctntc

SEQ ID NO: 505 - DNA, 1200 bp, Homo Sapiens
  misc_feature (902)..(902): n is a, c, g, or t
  misc_feature (921)..(921): n is a, c, g, or t
  misc_feature (935)..(935): n is a, c, g, or t
  misc_feature (953)..(953): n is a, c, g, or t
  misc_feature (976)..(976): n is a, c, g, or t
  misc_feature (999)..(999): n is a, c, g, or t
  misc_feature (1004)..(1004): n is a, c, g, or t
  misc_feature (1032)..(1032): n is a, c, g, or t
  misc_feature (1052)..(1052): n is a, c, g, or t
  misc_feature (1076)..(1076): n is a, c, g, or t
  misc_feature (1082)..(1083): n is a, c, g, or t
  misc_feature (1085)..(1085): n is a, c, g, or t
  misc_feature (1101)..(1101): n is a, c, g, or t
  misc_feature (1111)..(1111): n is a, c, g, or t
  misc_feature (1117)..(1117): n is a, c, g, or t
  misc_feature (1125)..(1126): n is a, c, g, or t
  misc_feature (1131)..(1131): n is a, c, g, or t
  misc_feature (1135)..(1135): n is a, c, g, or t
  misc_feature (1138)..(1138): n is a, c, g, or t
  misc_feature (1144)..(1145): n is a, c, g, or t
  misc_feature (1154)..(1154): n is a, c, g, or t
  misc_feature (1156)..(1156): n is a, c, g, or t
  misc_feature (1167)..(1167): n is a, c, g, or t
  misc_feature (1177)..(1177): n is a, c, g, or t
  misc_feature (1180)..(1180): n is a, c, g, or t
  misc_feature (1187)..(1187): n is a, c, g, or t
  misc_feature (1194)..(1194): n is a, c, g, or t
  misc_feature (1200)..(1200): n is a, c, g, or t
aatagagaaattactatgagaggatcgcatcaccatcaccatcacggatcctatttaggtgacactatagaatcgtcgacccacgcgtccggatggccgtgcagagggaccttgcgccggggtgcctgggcacagtgccctggcaggggggctcctctcctgtctcctcaggtccagatcaaggaagagacccgcttggtgtctgtcattgaccagattgacaaggctgtggccatcatcccccgaggcgccctcttcaagaccccttttggacccacccatgtcaatcggacctttgaaggactgtccttgtctgaggccaagaagctcagctcctacttccatttcagggagcctgttgagctaaagaataagaccttgcttgagaaggctgacctggacccctccctggatttcatggactccttggagcatgacattcccaaagggtcctggagcatccagatggagaggggcaatgccctggtggtgctgcgcagcctgctctggccgggcctcaccttctaccatgctccccgcaccaagaactatggctacgtctacgtgggcactggcgagaagaacatggacttgcccttcatgctatagaatgggagccagcctggatgtttttaaacagagtctaaacatgattttcttaagcttcagtgaacttggcctgcctgttctgtcctatcttcttaactccacctccgtctggttccagattctgaaaggcccactgagccagggagctcatttctaaaccaagtggcagaggggttggaatgtgctaatgaaagagattctagacaacgatgggtggaaatggctgtgggagaaggtgacaaccagggcccctttgaggaacgcagtttcttggattcacacgaaagcggcangtgtgtcaggcagcccacnttggctccctgcanctctcccacagtaagganctcacagctgtcatgaaaaagangggacctgtttggcccatgaatncaatngactcatggccccatcacaaaaaatcantgactcatgctcaccaccanctggcatgtgccagaaccctgcanttccannangaacgcaacccatggnaacccagaanccattnaaaaatgnntgggnaaantcngtcccnnatgaaaggncnaacccaaaaantggaaggacnaangcctgcngcttaantccaan

SEQ ID NO: 506 - DNA, 1443 bp, Homo Sapiens
  misc_feature (930)..(930): n is a, c, g, or t
  misc_feature (958)..(958): n is a, c, g, or t
  misc_feature (976)..(976): n is a, c, g, or t
  misc_feature (990)..(990): n is a, c, g, or t
  misc_feature (1009)..(1011): n is a, c, g, or t
  misc_feature (1016)..(1016): n is a, c, g, or t
  misc_feature (1027)..(1027): n is a, c, g, or t
  misc_feature (1029)..(1029): n is a, c, g, or t
  misc_feature (1031)..(1032): n is a, c, g, or t
  misc_feature (1047)..(1047): n is a, c, g, or t
  misc_feature (1050)..(1050): n is a, c, g, or t
  misc_feature (1054)..(1055): n is a, c, g, or t
  misc_feature (1057)..(1057): n is a, c, g, or t
  misc_feature (1063)..(1063): n is a, c, g, or t
  misc_feature (1066)..(1066): n is a, c, g, or t
  misc_feature (1088)..(1088): n is a, c, g, or t
  misc_feature (1092)..(1092): n is a, c, g, or t
  misc_feature (1095)..(1095): n is a, c, g, or t
  misc_feature (1103)..(1103): n is a, c, g, or t
  misc_feature (1113)..(1113): n is a, c, g, or t
  misc_feature (1138)..(1138): n is a, c, g, or t
  misc_feature (1157)..(1158): n is a, c, g, or t
  misc_feature (1160)..(1160): n is a, c, g, or t
  misc_feature (1176)..(1176): n is a, c, g, or t
  misc_feature (1184)..(1184): n is a, c, g, or t
  misc_feature (1196)..(1196): n is a, c, g, or t
  misc_feature (1204)..(1204): n is a, c, g, or t
  misc_feature (1224)..(1224): n is a, c, g, or t
  misc_feature (1245)..(1245): n is a, c, g, or t
  misc_feature (1257)..(1257): n is a, c, g, or t
  misc_feature (1263)..(1263): n is a, c, g, or t
  misc_feature (1271)..(1272): n is a, c, g, or t
  misc_feature (1281)..(1282): n is a, c, g, or t
  misc_feature (1284)..(1285): n is a, c, g, or t
  misc_feature (1287)..(1287): n is a, c, g, or t
  misc_feature (1290)..(1290): n is a, c, g, or t
  misc_feature (1294)..(1294): n is a, c, g, or t
  misc_feature (1296)..(1296): n is a, c, g, or t
  misc_feature (1308)..(1308): n is a, c, g, or t
  misc_feature (1315)..(1315): n is a, c, g, or t
  misc_feature (1321)..(1321): n is a, c, g, or t
  misc_feature (1326)..(1326): n is a, c, g, or t
  misc_feature (1330)..(1330): n is a, c, g, or t
  misc_feature (1334)..(1336): n is a, c, g, or t
  misc_feature (1341)..(1341): n is a, c, g, or t
  misc_feature (1343)..(1344): n is a, c, g, or t
  misc_feature (1353)..(1353): n is a, c, g, or t
  misc_feature (1358)..(1358): n is a, c, g, or t
  misc_feature (1390)..(1390): n is a, c, g, or t
  misc_feature (1396)..(1397): n is a, c, g, or t
  misc_feature (1407)..(1409): n is a, c, g, or t
  misc_feature (1423)..(1423): n is a, c, g, or t
  misc_feature (1427)..(1427): n is a, c, g, or t
  misc_feature (1438)..(1438): n is a, c, g, or t
gagattactatgagaggatcgcatcaccatcaccatcacggatcctatttaggtgacactatagaatcgtcgacccacgcgtccgctacccttaaaggacaaagatttaccaacactgaagacccttacaagttgacagtttctaaagagggttctaggaatgttctgtgtaaggtcagcttcactggaataaacatacatcttcccaaggtgactacttcaaaggcaacactacccattcgggtgcagaaattaccgtacttactctgccataaatgtaaaatgtgtataaagttaagctattgcattttttcataacacatttaaatagaaattggcttttaaagtattgtagttaaaaccagatctcaccaagtaatagttgtgcaattgacaaatgtttggtgccatgtaatggagatgtcacactacacagttgtagtttaaatgcagtccaacataaggtgcatgccactgaactgtaaccctagtaatgtgtcttgtacagttgaaaaataatacttcacctttatataggttaagatatgtaccttatctttaccactcagggtggctttaaaagacggacagctttaggtttgttctcactggaactggttacactttctgtgcaaacttaaccaagtgatgatcgtctggaagctgcattccctcatttccactgtttggtgtgaatctagtctccccactttatctaaaaggaggctagcagggccccagcctgagcagagcagctagagagtgcttccagattcctttgccaaaggaggcccattttccagctgtgagtgacatctgtagtcattggcttccattgcctggcactagccctgtctagaagtggagaaagctggatcacagctggaccacaaccagccccaatccaggatttccccataccatgctggnctgtgggctctgtgagcctcagccaggngggccaggctaaacttgnccccagctgggccncaggccctgctgaaggaannnggggngtaaagcccanancnnggttctggttccccnctngaannantgaccncgngcaatcccaggaaacccgcgtncccntgnttcccccnaaaaaaaaangccccctttgtttacccctttaacngaaaaagggaacgggggcnngnaattaagggaaaaaancccccccnccggatttaaancttccccncccccctaaaaaaagccagncgggggggggttccccgtaancccccctcgggngccggnggggaatnnggccggaannanntncgncacncnggaaaaaaaccnggggggngccctnccccntttngggnnnaaatntnnctggggggngggcnaaatcccccccgggaaaaaccccaaaaaaaancctgtnncaaggggccnnnacccccccaaaaanggtnttcccttatanccccc

SEQ ID NO: 507 - DNA, 1429 bp, Homo Sapiens
  misc_feature (1)..(1): n is a, c, g, or t
  misc_feature (956)..(957): n is a, c, g, or t
  misc_feature (968)..(968): n is a, c, g, or t
  misc_feature (973)..(973): n is a, c, g, or t
  misc_feature (981)..(981): n is a, c, g, or t
  misc_feature (997)..(997): n is a, c, g, or t
  misc_feature (1011)..(1011): n is a, c, g, or t
  misc_feature (1019)..(1019): n is a, c, g, or t
  misc_feature (1062)..(1063): n is a, c, g, or t
  misc_feature (1071)..(1072): n is a, c, g, or t
  misc_feature (1075)..(1075): n is a, c, g, or t
  misc_feature (1099)..(1099): n is a, c, g, or t
  misc_feature (1101)..(1101): n is a, c, g, or t
  misc_feature (1113)..(1113): n is a, c, g, or t
  misc_feature (1132)..(1132): n is a, c, g, or t
  misc_feature (1136)..(1137): n is a, c, g, or t
  misc_feature (1140)..(1140): n is a, c, g, or t
  misc_feature (1153)..(1153): n is a, c, g, or t
  misc_feature (1160)..(1160): n is a, c, g, or t
  misc_feature (1163)..(1163): n is a, c, g, or t
  misc_feature (1168)..(1168): n is a, c, g, or t
  misc_feature (1174)..(1174): n is a, c, g, or t
  misc_feature (1189)..(1189): n is a, c, g, or t
  misc_feature (1201)..(1201): n is a, c, g, or t
  misc_feature (1206)..(1206): n is a, c, g, or t
  misc_feature (1208)..(1208): n is a, c, g, or t
  misc_feature (1216)..(1216): n is a, c, g, or t
  misc_feature (1229)..(1229): n is a, c, g, or t
  misc_feature (1233)..(1233): n is a, c, g, or t
  misc_feature (1246)..(1246): n is a, c, g, or t
  misc_feature (1260)..(1260): n is a, c, g, or t
  misc_feature (1270)..(1270): n is a, c, g, or t
  misc_feature (1273)..(1273): n is a, c, g, or t
  misc_feature (1293)..(1293): n is a, c, g, or t
  misc_feature (1295)..(1295): n is a, c, g, or t
  misc_feature (1305)..(1305): n is a, c, g, or t
  misc_feature (1314)..(1314): n is a, c, g, or t
  misc_feature (1319)..(1320): n is a, c, g, or t
  misc_feature (1322)..(1322): n is a, c, g, or t
  misc_feature (1332)..(1332): n is a, c, g, or t
  misc_feature (1340)..(1341): n is a, c, g, or t
  misc_feature (1344)..(1344): n is a, c, g, or t
  misc_feature (1349)..(1350): n is a, c, g, or t
  misc_feature (1355)..(1355): n is a, c, g, or t
  misc_feature (1359)..(1359): n is a, c, g, or t
  misc_feature (1362)..(1364): n is a, c, g, or t
  misc_feature (1367)..(1367): n is a, c, g, or t
  misc_feature (1370)..(1371): n is a, c, g, or t
  misc_feature (1378)..(1379): n is a, c, g, or t
  misc_feature (1384)..(1384): n is a, c, g, or t
  misc_feature (1390)..(1390): n is a, c, g, or t
  misc_feature (1408)..(1408): n is a, c, g, or t
  misc_feature (1423)..(1423): n is a, c, g, or t
  misc_feature (1429)..(1429): n is a, c, g, or t
naatagagagaattactatgagaggatcgcatcaccatcaccatcacggatcctatttaggtgacactatagaatcgtcgacccacgcgtccgggaaaaaggaagccgtctgtttacagttaactttatttcatggacttctacaaaatgttgtattaatcactttttctagttcaaggaatttcaattccagggtacaaaccattgatttaaaaattacgtttccattctttttagtatcagtttaaagtaaatgcttaccatcagccagttgctgtcactgggaagaaggcaacttgaagtatttactgataaaatagcctttattcccaagtgtgacttttcttcagtgtctacatattatgtcacacgttctatttgcactgctgcaatatagatcaaagatcttgtggcataggggtaggggagtgttagtatctcccttgtcccatttgttctgttactgcttcattggactgatataccctcatgaacttgcaatcacctaaatggaagtcttgaatgtgtcaccttttgcttggttatttcaaccatgctgctatatataatcaggtgtggcacagtttgtcagtttgattataggtgtgagtggatagaaatcattacactgtgctgttaacgatccttgtctgcttgctgttacctactttttacaggcatcataataaaagctagactatttctttggggggaaagagacttatttaatgtaatttaaaaaacttttccaatagaaaaatgaaatattattgaaaataatatctattttttagctttcagcaaattgatggtgctttgttgtggtgtctgctggaagtctactgccattatagggaaccttgctggttagcttctctagatctctattctaaacaatctgttagtgatgaaaaaattctgtaggagggtctattctgagccgttaaacttcctgnnaaggggaaaanggggngggtaacnaaaaataccattgaancagggggggcctgngggggggnaaggttggggtaatttgtcctggaaaaataaaaactaccaaanncttttggnnccnaactgaatttttaaaaaaaaaacncntttttaaaaaangtggaaaaaaaaaaaaaangggnnccnccccccaaaaggnagccaanaancttanttaccngaacctggaaccccngggaaaaacccnaaaangnccccaaanccccccgggattnttcnaaaaccccggggnccccggggtttttnggggaaaccnccnaccctggggaattttcgggncnaggaaccaangggaaaaanccggnnanccccggaaantccccggnnccnaaaannttggngttnccnnnccnggnnaaaaacnnccggnaaaaanccttaaaaaaaaaaaaantttccccttttattnccgcgn

SEQ ID NO: 508 - DNA, 1328 bp, Homo Sapiens
  misc_feature (882)..(882): n is a, c, g, or t
  misc_feature (921)..(921): n is a, c, g, or t
  misc_feature (969)..(969): n is a, c, g, or t
  misc_feature (971)..(971): n is a, c, g, or t
  misc_feature (991)..(991): n is a, c, g, or t
  misc_feature (1014)..(1014): n is a, c, g, or t
  misc_feature (1018)..(1018): n is a, c, g, or t
  misc_feature (1040)..(1040): n is a, c, g, or t
  misc_feature (1042)..(1042): n is a, c, g, or t
  misc_feature (1049)..(1049): n is a, c, g, or t
  misc_feature (1051)..(1051): n is a, c, g, or t
  misc_feature (1057)..(1057): n is a, c, g, or t
  misc_feature (1065)..(1065): n is a, c, g, or t
  misc_feature (1068)..(1068): n is a, c, g, or t
  misc_feature (1079)..(1079): n is a, c, g, or t
  misc_feature (1092)..(1092): n is a, c, g, or t
  misc_feature (1102)..(1102): n is a, c, g, or t
  misc_feature (1104)..(1104): n is a, c, g, or t
  misc_feature (1109)..(1109): n is a, c, g, or t
  misc_feature (1113)..(1113): n is a, c, g, or t
  misc_feature (1124)..(1124): n is a, c, g, or t
  misc_feature (1140)..(1140): n is a, c, g, or t
  misc_feature (1152)..(1152): n is a, c, g, or t
  misc_feature (1155)..(1155): n is a, c, g, or t
  misc_feature (1168)..(1168): n is a, c, g, or t
  misc_feature (1170)..(1170): n is a, c, g, or t
  misc_feature (1183)..(1183): n is a, c, g, or t
  misc_feature (1195)..(1195): n is a, c, g, or t
  misc_feature (1214)..(1214): n is a, c, g, or t
  misc_feature (1225)..(1226): n is a, c, g, or t
  misc_feature (1233)..(1233): n is a, c, g, or t
  misc_feature (1239)..(1240): n is a, c, g, or t
  misc_feature (1255)..(1258): n is a, c, g, or t
  misc_feature (1261)..(1261): n is a, c, g, or t
  misc_feature (1275)..(1275): n is a, c, g, or t
  misc_feature (1280)..(1280): n is a, c, g, or t
  misc_feature (1285)..(1285): n is a, c, g, or t
  misc_feature (1292)..(1293): n is a, c, g, or t
  misc_feature (1301)..(1301): n is a, c, g, or t
  misc_feature (1309)..(1310): n is a, c, g, or t
  misc_feature (1320)..(1321): n is a, c, g, or t
  misc_feature (1323)..(1325): n is a, c, g, or t
  misc_feature (1328)..(1328): n is a, c, g, or t
agaaattactatgagaggatcgcatcaccatcaccatcacggatcctatttaggtgacactatagaatcgtcgacccacgcgtccggccgtggactgcagctgtgctatgcacagctatgcagtgaggcttctggaattggttgtggtgctcaagtttttaactggcctgcgtgtactttaatgtccaaacatgacctgccctttctggggtttgccttaagtgtcactgaggggaagagaaactgaccgatggtgcagcgaacggttctcctttccctgagaaagtcctggccacttctctcctcacgggaggcggcctctgagccctggcctgtcctgcctgataagacagtcctggttacctgtggaccttgggccaggctggatggtctgtgctattgatgggatttgtggtgggcattttgggccacatggtgtcagctgcacctctggagggatcagagaccaagctgccacacgtggtcgcttggcagagcccgtgggactgagccccagcaaagccctgaaccccaaggcaggccatcggctcggggagaagcaagtgctgtcaggccgcccagtggggagagcagcagcccatgcctggaccctcctggactctgccagttcccttcaccgattctagccggtgccccttcgctctaatgaacgtcaactgtgagcacagcaggtctgtggcactgcgtgagccttctggagaatcgcggagtctaagggtggtttggggacaccagagctgcagggggtaaggcagtgattgaaggaaaaatagaactcgtctgatttgttcccctagggattcaggctatttaatgagccaaatagtcataaaccatgtttggggactgtacagataatantcttctagtgactggcaaagcctgctgcctgcaatgccnggtgtggaggcttttggtccctggtcctaccacaatgggctctttatncnataacttctttcctcacccngcaaaagggctgggcctgctgcngganaaatgcctggccagtggtgggnanatgtctnanaggcancaaaaaanacncctgaaaaganaaaaacctcatgnggtcccaccncntgccnaagnaatccgggggngaaaaaaaaaaaaaancccccaaaaaantcngggaactggggananggaactggggtcnaaaaaaaaaaanaaaaatttcttttcccttntaaaaaaaaannggaaaangggccnngggcccccccccggnnnnccntttttaaaaatttnaattnaattnccccccnncccaaaantttttttnnaaaaaaaaannannnttn

SEQ ID NO: 509 - DNA, 1311 bp, Homo Sapiens
  misc_feature (1)..(1): n is a, c, g, or t
  misc_feature (3)..(3): n is a, c, g, or t
  misc_feature (15)..(15): n is a, c, g, or t
  misc_feature (841)..(841): n is a, c, g, or t
  misc_feature (925)..(925): n is a, c, g, or t
  misc_feature (935)..(935): n is a, c, g, or t
  misc_feature (1000)..(1000): n is a, c, g, or t
  misc_feature (1008)..(1008): n is a, c, g, or t
  misc_feature (1013)..(1013): n is a, c, g, or t
  misc_feature (1023)..(1023): n is a, c, g, or t
  misc_feature (1025)..(1026): n is a, c, g, or t
  misc_feature (1043)..(1043): n is a, c, g, or t
  misc_feature (1054)..(1054): n is a, c, g, or t
  misc_feature (1060)..(1060): n is a, c, g, or t
  misc_feature (1074)..(1074): n is a, c, g, or t
  misc_feature (1081)..(1081): n is a, c, g, or t
  misc_feature (1083)..(1083): n is a, c, g, or t
  misc_feature (1091)..(1091): n is a, c, g, or t
  misc_feature (1098)..(1098): n is a, c, g, or t
  misc_feature (1121)..(1121): n is a, c, g, or t
  misc_feature (1136)..(1136): n is a, c, g, or t
  misc_feature (1151)..(1151): n is a, c, g, or t
  misc_feature (1157)..(1158): n is a, c, g, or t
  misc_feature (1191)..(1211): n is a, c, g, or t
  misc_feature (1214)..(1220): n is a, c, g, or t
  misc_feature (1222)..(1271): n is a, c, g, or t
  misc_feature (1276)..(1276): n is a, c, g, or t
  misc_feature (1285)..(1286): n is a, c, g, or t
  misc_feature (1291)..(1291): n is a, c, g, or t
  misc_feature (1293)..(1293): n is a, c, g, or t
  misc_feature (1297)..(1298): n is a, c, g, or t
  misc_feature (1300)..(1300): n is a, c, g, or t
  misc_feature (1305)..(1309): n is a, c, g, or t
nantagagagattanctatgagaggatcgcatcaccatcaccatcacggatcctatttaggtgacactatagaatcgtcgacccacgcgtccggaggtttttgcatcctcagttcccaccgctggggctggcggcgaccaactgtaagagaaactcactgggaggcgaggcaggggggtgcggaggatgggaaggcgactctgaagggtgggaagtgaatgctggacttgatcgtctttctctttctttcagcgcagacctgtcgcagccagagagctgtcatttcagtaccgggattcagaattgatccagtccgcagcggagggggcacatcccagctaccgagctgctgagtgtctctggctggaacaatagtatttttttctctgcgaggctgcaattaacatcttatttgttctggctccatacaggctttgtcaggatcgcggtgcggcgaccgacgttgggctcttgcattgctttctgcttggcaatggaatcatggtttcggggtctaaacttttgtttcgttttgtagtcttaatgtatctgattctttttcaagtttccctagtaacaggtttggggacggggtgggaagaagcgagaaaaggggtgaagagaaaaaaccagattatatagaaaggaaaaagggaaaagggatgtttccccaccttttaatctaactatctatctgtctgtctatctatcatcatagatagtcattttgcctcctggacagttggctgacgaagtgtctgataaaccagcttcagatacatgctacaaaaggctactgagctggcctgatgatgatccttctgagatatatttatagcanatgatttgtggatgataactacgccaagcaagacactgtctccagtaaccccaggctcgtctgacttcctcagggggattatantaaagaatcncaaaaagaaccctatatggacagtctggtctctggacactaacaacagcccaatccaaggcaaanaaaggagnaaccnccttgtttcnanntctgcaagctgccccanaagaaagcatngctganatgttgacccaccnccaaaananaccaccantttaacnccccccaccccccggcccttccnttcaatgaagggggnccccttttaggacgnaaaacnnttaaaatccccctttcccattttaaaaaaaaannnnnnnnnnnnnnnnnnnnnccnnnnnnnannnnnnnnnnnnnnnnnnnnnnnnnnnnnnnnnnnnnnnnnnnnnnnnnngggcncccccccannggggncnaaanntnaatcnnnnngg

SEQ ID NO: 510 - DNA, 1428 bp, Homo Sapiens
  misc_feature (1)..(3): n is a, c, g, or t
  misc_feature (5)..(6): n is a, c, g, or t
  misc_feature (12)..(12): n is a, c, g, or t
  misc_feature (14)..(14): n is a, c, g, or t
  misc_feature (115)..(115): n is a, c, g, or t
  misc_feature (282)..(282): n is a, c, g, or t
  misc_feature (348)..(348): n is a, c, g, or t
  misc_feature (402)..(402): n is a, c, g, or t
  misc_feature (499)..(499): n is a, c, g, or t
  misc_feature (502)..(502): n is a, c, g, or t
  misc_feature (527)..(527): n is a, c, g, or t
  misc_feature (562)..(562): n is a, c, g, or t
  misc_feature (568)..(568): n is a, c, g, or t
  misc_feature (572)..(572): n is a, c, g, or t
  misc_feature (580)..(580): n is a, c, g, or t
  misc_feature (584)..(584): n is a, c, g, or t
  misc_feature (594)..(594): n is a, c, g, or t
  misc_feature (605)..(605): n is a, c, g, or t
  misc_feature (610)..(610): n is a, c, g, or t
  misc_feature (615)..(615): n is a, c, g, or t
  misc_feature (620)..(620): n is a, c, g, or t
  misc_feature (629)..(630): n is a, c, g, or t
  misc_feature (649)..(650): n is a, c, g, or t
  misc_feature (664)..(665): n is a, c, g, or t
  misc_feature (669)..(669): n is a, c, g, or t
  misc_feature (676)..(676): n is a, c, g, or t
  misc_feature (699)..(700): n is a, c, g, or t
  misc_feature (703)..(704): n is a, c, g, or t
  misc_feature (706)..(708): n is a, c, g, or t
  misc_feature (710)..(710): n is a, c, g, or t
  misc_feature (712)..(713): n is a, c, g, or t
  misc_feature (716)..(716): n is a, c, g, or t
  misc_feature (718)..(719): n is a, c, g, or t
  misc_feature (730)..(730): n is a, c, g, or t
  misc_feature (733)..(733): n is a, c, g, or t
  misc_feature (737)..(738): n is a, c, g, or t
  misc_feature (741)..(741): n is a, c, g, or t
  misc_feature (743)..(743): n is a, c, g, or t
  misc_feature (745)..(747): n is a, c, g, or t
  misc_feature (752)..(752): n is a, c, g, or t
  misc_feature (757)..(757): n is a, c, g, or t
  misc_feature (765)..(766): n is a, c, g, or t
  misc_feature (768)..(768): n is a, c, g, or t
  misc_feature (772)..(772): n is a, c, g, or t
  misc_feature (774)..(774): n is a, c, g, or t
  misc_feature (776)..(776): n is a, c, g, or t
  misc_feature (779)..(781): n is a, c, g, or t
  misc_feature (783)..(783): n is a, c, g, or t
  misc_feature (785)..(785): n is a, c, g, or t
  misc_feature (792)..(792): n is a, c, g, or t
  misc_feature (797)..(797): n is a, c, g, or t
  misc_feature (799)..(800): n is a, c, g, or t
  misc_feature (806)..(806): n is a, c, g, or t
  misc_feature (810)..(810): n is a, c, g, or t
  misc_feature (812)..(812): n is a, c, g, or t
  misc_feature (816)..(816): n is a, c, g, or t
  misc_feature (821)..(821): n is a, c, g, or t
  misc_feature (824)..(824): n is a, c, g, or t
  misc_feature (826)..(826): n is a, c, g, or t
  misc_feature (841)..(841): n is a, c, g, or t
  misc_feature (845)..(845): n is a, c, g, or t
  misc_feature (848)..(849): n is a, c, g, or t
  misc_feature (855)..(855): n is a, c, g, or t
  misc_feature (857)..(857): n is a, c, g, or t
  misc_feature (868)..(868): n is a, c, g, or t
  misc_feature (871)..(871): n is a, c, g, or t
  misc_feature (873)..(874): n is a, c, g, or t
  misc_feature (878)..(879): n is a, c, g, or t
  misc_feature (881)..(881): n is a, c, g, or t
  misc_feature (895)..(895): n is a, c, g, or t
  misc_feature (897)..(897): n is a, c, g, or t
  misc_feature (909)..(909): n is a, c, g, or t
  misc_feature (911)..(911): n is a, c, g, or t
  misc_feature (915)..(915): n is a, c, g, or t
  misc_feature (918)..(918): n is a, c, g, or t
  misc_feature (923)..(923): n is a, c, g, or t
  misc_feature (926)..(926): n is a, c, g, or t
  misc_feature (929)..(930): n is a, c, g, or t
  misc_feature (935)..(935): n is a, c, g, or t
  misc_feature (939)..(939): n is a, c, g, or t
  misc_feature (945)..(946): n is a, c, g, or t
  misc_feature (950)..(950): n is a, c, g, or t
  misc_feature (953)..(955): n is a, c, g, or t
  misc_feature (959)..(959): n is a, c, g, or t
  misc_feature (961)..(961): n is a, c, g, or t
  misc_feature (970)..(970): n is a, c, g, or t
  misc_feature (978)..(978): n is a, c, g, or t
  misc_feature (986)..(987): n is a, c, g, or t
  misc_feature (996)..(996): n is a, c, g, or t
  misc_feature (998)..(998): n is a, c, g, or t
  misc_feature (1002)..(1004): n is a, c, g, or t
  misc_feature (1008)..(1008): n is a, c, g, or t
  misc_feature (1011)..(1011): n is a, c, g, or t
  misc_feature (1014)..(1014): n is a, c, g, or t
  misc_feature (1017)..(1017): n is a, c, g, or t
  misc_feature (1020)..(1021): n is a, c, g, or t
  misc_feature (1026)..(1026): n is a, c, g, or t
  misc_feature (1031)..(1031): n is a, c, g, or t
  misc_feature (1036)..(1036): n is a, c, g, or t
  misc_feature (1038)..(1039): n is a, c, g, or t
  misc_feature (1044)..(1044): n is a, c, g, or t
  misc_feature (1047)..(1047): n is a, c, g, or t
  misc_feature (1050)..(1051): n is a, c, g, or t
  misc_feature (1055)..(1055): n is a, c, g, or t
  misc_feature (1058)..(1058): n is a, c, g, or t
  misc_feature (1067)..(1067): n is a, c, g, or t
  misc_feature (1073)..(1077): n is a, c, g, or t
  misc_feature (1084)..(1084): n is a, c, g, or t
  misc_feature (1087)..(1088): n is a, c, g, or t
  misc_feature (1094)..(1094): n is a, c, g, or t
  misc_feature (1102)..(1102): n is a, c, g, or t
  misc_feature (1104)..(1104): n is a, c, g, or t
  misc_feature (1112)..(1112): n is a, c, g, or t
  misc_feature (1114)..(1115): n is a, c, g, or t
  misc_feature (1117)..(1117): n is a, c, g, or t
  misc_feature (1119)..(1120): n is a, c, g, or t
  misc_feature (1123)..(1123): n is a, c, g, or t
  misc_feature (1129)..(1129): n is a, c, g, or t
  misc_feature (1141)..(1141): n is a, c, g, or t
  misc_feature (1147)..(1148): n is a, c, g, or t
  misc_feature (1152)..(1154): n is a, c, g, or t
  misc_feature (1162)..(1162): n is a, c, g, or t
  misc_feature (1170)..(1170): n is a, c, g, or t
  misc_feature (1178)..(1180): n is a, c, g, or t
  misc_feature (1190)..(1190): n is a, c, g, or t
  misc_feature (1196)..(1197): n is a, c, g, or t
  misc_feature (1200)..(1200): n is a, c, g, or t
  misc_feature (1203)..(1205): n is a, c, g, or t
  misc_feature (1219)..(1222): n is a, c, g, or t
  misc_feature (1226)..(1226): n is a, c, g, or t
  misc_feature (1229)..(1230): n is a, c, g, or t
  misc_feature (1235)..(1235): n is a, c, g, or t
  misc_feature (1237)..(1237): n is a, c, g, or t
  misc_feature (1240)..(1240): n is a, c, g, or t
  misc_feature (1250)..(1251): n is a, c, g, or t
  misc_feature (1257)..(1257): n is a, c, g, or t
  misc_feature (1262)..(1262): n is a, c, g, or t
  misc_feature (1269)..(1269): n is a, c, g, or t
  misc_feature (1279)..(1280): n is a, c, g, or t
  misc_feature (1283)..(1284): n is a, c, g, or t
  misc_feature (1287)..(1287): n is a, c, g, or t
  misc_feature (1295)..(1295): n is a, c, g, or t
  misc_feature (1304)..(1304): n is a, c, g, or t
  misc_feature (1309)..(1310): n is a, c, g, or t
  misc_feature (1317)..(1317): n is a, c, g, or t
  misc_feature (1322)..(1323): n is a, c, g, or t
  misc_feature (1325)..(1325): n is a, c, g, or t
  misc_feature (1330)..(1331): n is a, c, g, or t
  misc_feature (1340)..(1341): n is a, c, g, or t
  misc_feature (1346)..(1346): n is a, c, g, or t
  misc_feature (1352)..(1352): n is a, c, g, or t
  misc_feature (1354)..(1354): n is a, c, g, or t
  misc_feature (1365)..(1365): n is a, c, g, or t
  misc_feature (1370)..(1370): n is a, c, g, or t
  misc_feature (1377)..(1377): n is a, c, g, or t
  misc_feature (1381)..(1382): n is a, c, g, or t
  misc_feature (1384)..(1384): n is a, c, g, or t
  misc_feature (1392)..(1392): n is a, c, g, or t
  misc_feature (1395)..(1396): n is a, c, g, or t
  misc_feature (1399)..(1402): n is a, c, g, or t
  misc_feature (1405)..(1406): n is a, c, g, or t
  misc_feature (1410)..(1410): n is a, c, g, or t
  misc_feature (1414)..(1415): n is a, c, g, or t
  misc_feature (1424)..(1424): n is a, c, g, or t
  misc_feature (1427)..(1427): n is a, c, g, or t
nnncnnaaaacnanttagagataattactatgagaggatcgcatcaccatcaccatcacggatcctatttaggtgacactatagaatcgtcgacccacgcgttccggccgggcgntccgcgaagatgcagctcaagccgatggagatcaaccccgagatgctgaacaaagtgagtggcgtctcgcgccgtctctggccccctcccccgcgagcgccgaggcgggggcgcccaccggttccggctgctggcagggaccaagccgcccgctgcgagcaccgganacggccgggctggggcgtgggctgggcgcctttcctgggcccctgcatttagcgggtgactctacnaaaccggtcacggggagatggagggggctgcgccccgtggcgagcgagcgccangcggagctcccgagggcgtggcgcgggcagcacagactcggctgcacgggcttcgcgggcgccacgtgtgggccgcgctttgtgctgtgtcattgcnccngcccgggtgggggtggcagggcggnactggggctcctcccatgctcgggtgcggacgcgnagggcncgcncctcctgncccngccccctggnaggtgcccgcnacccncgtgnccccntgcgcctgnnccgccttgtctcctctccnnatgtgctgtcccannctgntgggtcncccggccaagtgatgctttcatnnacnntnnntngnngcntnnaaaaaatattntcntggnnctnantnnnccaangcctnacctagtnnantttncntnctnnntnantttcccntcacngnnccaatnattnanaaantttcnagnantaaatctaattgtanttanctnnaagtgnanaaaaaaatatngtncnntaanntnatactttcaatganantaaaaatattangnaaanttncattnttngcnncattncagnaatttnnttcnctnnnatgnanaaataaatncaacaaanaaacttanngaatttaantntatnnnaatnaanttnttnaannacaanttttncattntnntaatntanaannaaanatntctctctcnaataannnnntaaaaancgnnctattnaaaaatantntttccctntnntnannacnccatantttcctattgtnaacatnnaaannntaattttnatctaaanaaaaaagnnnaaaatttccntttttnntanctnnntaaaaaaaactaannnnaacnttnntattnanatnctaatgcatnnctaagnctatnttccaanatatcataannttnncantcaaaaantataatcantttanntaaacanattanncnatatnnttaatgagnnttctnctatgntnttaaaatagcnaaatncctcttntcanncnatgaatanttnncannnnttnnttcntaannctcacaganaana

SEQ ID NO: 511 - DNA, 1345 bp, Homo Sapiens
  misc_feature (842)..(842): n is a, c, g, or t
  misc_feature (877)..(877): n is a, c, g, or t
  misc_feature (907)..(907): n is a, c, g, or t
  misc_feature (921)..(921): n is a, c, g, or t
  misc_feature (929)..(929): n is a, c, g, or t
  misc_feature (931)..(931): n is a, c, g, or t
  misc_feature (936)..(936): n is a, c, g, or t
  misc_feature (939)..(939): n is a, c, g, or t
  misc_feature (972)..(972): n is a, c, g, or t
  misc_feature (979)..(979): n is a, c, g, or t
  misc_feature (981)..(981): n is a, c, g, or t
  misc_feature (995)..(996): n is a, c, g, or t
  misc_feature (999)..(999): n is a, c, g, or t
  misc_feature (1001)..(1002): n is a, c, g, or t
  misc_feature (1010)..(1010): n is a, c, g, or t
  misc_feature (1020)..(1020): n is a, c, g, or t
  misc_feature (1039)..(1039): n is a, c, g, or t
  misc_feature (1045)..(1045): n is a, c, g, or t
  misc_feature (1048)..(1048): n is a, c, g, or t
  misc_feature (1054)..(1054): n is a, c, g, or t
  misc_feature (1058)..(1059): n is a, c, g, or t
  misc_feature (1064)..(1064): n is a, c, g, or t
  misc_feature (1068)..(1069): n is a, c, g, or t
  misc_feature (1073)..(1073): n is a, c, g, or t
  misc_feature (1081)..(1081): n is a, c, g, or t
  misc_feature (1086)..(1086): n is a, c, g, or t
  misc_feature (1096)..(1096): n is a, c, g, or t
  misc_feature (1103)..(1103): n is a, c, g, or t
  misc_feature (1105)..(1105): n is a, c, g, or t
  misc_feature (1107)..(1107): n is a, c, g, or t
  misc_feature (1109)..(1109): n is a, c, g, or t
  misc_feature (1115)..(1115): n is a, c, g, or t
  misc_feature (1119)..(1119): n is a, c, g, or t
  misc_feature (1123)..(1123): n is a, c, g, or t
  misc_feature (1128)..(1128): n is a, c, g, or t
  misc_feature (1131)..(1132): n is a, c, g, or t
  misc_feature (1140)..(1140): n is a, c, g, or t
  misc_feature (1143)..(1144): n is a, c, g, or t
  misc_feature (1150)..(1153): n is a, c, g, or t
  misc_feature (1155)..(1155): n is a, c, g, or t
  misc_feature (1158)..(1158): n is a, c, g, or t
  misc_feature (1160)..(1163): n is a, c, g, or t
  misc_feature (1170)..(1170): n is a, c, g, or t
  misc_feature (1173)..(1173): n is a, c, g, or t
  misc_feature (1176)..(1178): n is a, c, g, or t
  misc_feature (1180)..(1181): n is a, c, g, or t
  misc_feature (1188)..(1188): n is a, c, g, or t
  misc_feature (1191)..(1191): n is a, c, g, or t
  misc_feature (1201)..(1201): n is a, c, g, or t
  misc_feature (1203)..(1204): n is a, c, g, or t
  misc_feature (1206)..(1206): n is a, c, g, or t
  misc_feature (1209)..(1210): n is a, c, g, or t
  misc_feature (1212)..(1212): n is a, c, g, or t
  misc_feature (1214)..(1214): n is a, c, g, or t
  misc_feature (1216)..(1217): n is a, c, g, or t
  misc_feature (1219)..(1220): n is a, c, g, or t
  misc_feature (1222)..(1222): n is a, c, g, or t
  misc_feature (1225)..(1225): n is a, c, g, or t
  misc_feature (1229)..(1229): n is a, c, g, or t
  misc_feature (1231)..(1231): n is a, c, g, or t
  misc_feature (1234)..(1237): n is a, c, g, or t
  misc_feature (1242)..(1243): n is a, c, g, or t
  misc_feature (1247)..(1247): n is a, c, g, or t
  misc_feature (1250)..(1253): n is a, c, g, or t
  misc_feature (1256)..(1259): n is a, c, g, or t
  misc_feature (1264)..(1265): n is a, c, g, or t
  misc_feature (1268)..(1279): n is a, c, g, or t
  misc_feature (1283)..(1293): n is a, c, g, or t
  misc_feature (1296)..(1299): n is a, c, g, or t
  misc_feature (1302)..(1306): n is a, c, g, or t
  misc_feature (1311)..(1315): n is a, c, g, or t
  misc_feature (1318)..(1324): n is a, c, g, or t
  misc_feature (1327)..(1334): n is a, c, g, or t
  misc_feature (1342)..(1343): n is a, c, g, or t
tagagaaattactatgagaggatcgcatcaccatcaccatcacggatcctatttaggtgacactatagaatcgtcgacccacgcgtccgaaggaagagcggaagaggcgtcgccagccaccgagactgccagccaccaccccctcccagactctctgtccccaccccagaccagggtcaccttcttcctgcactgggggtggggtgcggtaggtttcgcaatccagactgtggggtgggggtgggagcaggtgtgtgtaaatgagcagctcgtcaggagtcactgagaaggaggcagatggagctggtacccagcaggtctcctctcataagcgtcaaccctcgcctgggcgggctgggggatcctcagcaccccagctctgagccaggggtctgcaacccgggcaccagcgatgggccctcatgcacacagggcgccgagcggggccggaggcaagagtgacttcagacaggaacccgacgccacagccggtgacgcggaccctgggtcagccagcacgatgggccgctggggagaggagggctggaggcagagagtgtaagtgtgcagccttcatcagcttatttttagtcgcgttatgtaagtggcttcatctcaacgtcacatgggggggggtctcagatttaattacaggatgacagcctttgcttttcaagcaagctgttctcctggcaagccaggcgaaggattggggagttttgctaaacagaaggagccctttctgaggtgaccacccgtcaaaacttgaacccgcttccacctccgtctccctcttcccgaccagcctcacccagcctcggctgaatgtggcctgaaagtanccacttgtccgcaatcacagggacgttttatgccntgtcaagggagcttcctctctcctcttctnccccttccaacttntgcctggnanctttngcnttttctccaaaaaaaggtccacccaatcaaaantcctctncnttttcattccggannaancnnttgtatcntaaccaaaanttccaaaacggaaaaaacngaaggnctngaatgntttnnaaggntttnngggnaaaaccanaaggnaaactttttnttccccncngncnttgttnattncccntcagncannggttgggnaannctggcnnnncnggntnnnngggaaantanccnnngnnttggaanccntttttttttntnnanggnngnangnntnngnttnttcnanggnnnntttcnnccanggnnnnttnnnnaaaannaannnnnnnnnnnngggnnnnnnnnnnnggnnnnaannnnnttttnnnnnaannnnnnnccnnnnnnnntttttttnnaa

SEQ ID NO: 512 - DNA, 1195 bp, Homo Sapiens
  misc_feature (875)..(875): n is a, c, g, or t
  misc_feature (1001)..(1002): n is a, c, g, or t
  misc_feature (1014)..(1014): n is a, c, g, or t
  misc_feature (1036)..(1036): n is a, c, g, or t
  misc_feature (1065)..(1065): n is a, c, g, or t
  misc_feature (1078)..(1078): n is a, c, g, or t
  misc_feature (1082)..(1082): n is a, c, g, or t
  misc_feature (1099)..(1099): n is a, c, g, or t
  misc_feature (1110)..(1110): n is a, c, g, or t
  misc_feature (1115)..(1115): n is a, c, g, or t
  misc_feature (1122)..(1122): n is a, c, g, or t
  misc_feature (1127)..(1127): n is a, c, g, or t
  misc_feature (1134)..(1134): n is a, c, g, or t
  misc_feature (1136)..(1136): n is a, c, g, or t
  misc_feature (1147)..(1147): n is a, c, g, or t
  misc_feature (1149)..(1149): n is a, c, g, or t
  misc_feature (1153)..(1153): n is a, c, g, or t
  misc_feature (1155)..(1156): n is a, c, g, or t
  misc_feature (1160)..(1160): n is a, c, g, or t
  misc_feature (1174)..(1174): n is a, c, g, or t
  misc_feature (1179)..(1179): n is a, c, g, or t
  misc_feature (1183)..(1183): n is a, c, g, or t
  misc_feature (1185)..(1185): n is a, c, g, or t
  misc_feature (1193)..(1193): n is a, c, g, or t
  misc_feature (1195)..(1195): n is a, c, g, or t
gaatagagagaattactatgagaggatcgcatcaccatcaccactcacggatcctatttaggtgacactatagaatcgtcgacccacgcgtccgcccacgcgtccggcctgtcgaataccagtgagggcttcccaggccaaccttccaaacaaagacctgcagctctgcctgcctccgctttccagctctacttccaccaagcacctgacacccatgtgtctgtcttgttgtccatctcagtggaattgaagttctaagaaggcaagtctcttccctccactgccatttccatctccccagcctttagaacagtgcctggcacaaagtctatgcttaatacatagttgtctaatgaatcagtggaaaatcagaaaggggaacccctcagtactgggcaaatcaggaaagtgggtcactctacttgctggatctatgcaaaccccccgtgtgaccagaggagttgggactgcagccatcagcagcactgagttcaacaggcgcggtcccagaggcccacccgagacctgctacataaacaccgccttgagttcgctactgtctgatacatgcaagtttctgatatgtgttgccaagagttcttaagtgatagaaatactaaattgtgttataagtatgaacctgcaataaaataaaatatgattgagaatttatttgaaaaagaatgaacttgaataaactagtaaatcttgacaaccaacaacagaatattagtcagtgctaaacagaaatgcactatcaagacatggaaggaatcttgaatgcctattgctaaatgaaagaggccaacctgcaaagaccaaataatgtgtgattccacctgttctggaaagggcaaaatatgaaggaattaaanttactggtggttgtcaggggctgggggaaggaagggatgaaaaggtggaaaaaacaggctttttaaggcagtggaaactattctgtatgaaactgtgatgagggatggatgtcattatgtatttgnnccaaattcatanaatgggtaacactacgagtganccctaatgtcaatgctgcgctccaggggnaattatgccatgntccnggtaggttccccagctnttatgttcccncttgngggggantgggnatttccnanattccggaaananggcngnngggnaagcttggaaaatntgtancccncnccccaaantn

SEQ ID NO: 513 - DNA, 1200 bp, Homo Sapiens
  misc_feature (2)..(2): n is a, c, g, or t
  misc_feature (274)..(274): n is a, c, g, or t
  misc_feature (338)..(338): n is a, c, g, or t
  misc_feature (360)..(360): n is a, c, g, or t
  misc_feature (394)..(394): n is a, c, g, or t
  misc_feature (829)..(829): n is a, c, g, or t
  misc_feature (898)..(898): n is a, c, g, or t
  misc_feature (929)..(929): n is a, c, g, or t
  misc_feature (937)..(937): n is a, c, g, or t
  misc_feature (939)..(939): n is a, c, g, or t
  misc_feature (941)..(941): n is a, c, g, or t
  misc_feature (961)..(961): n is a, c, g, or t
  misc_feature (963)..(963): n is a, c, g, or t
  misc_feature (980)..(980): n is a, c, g, or t
  misc_feature (995)..(995): n is a, c, g, or t
  misc_feature (1001)..(1001): n is a, c, g, or t
  misc_feature (1010)..(1010): n is a, c, g, or t
  misc_feature (1020)..(1020): n is a, c, g, or t
  misc_feature (1036)..(1036): n is a, c, g, or t
  misc_feature (1038)..(1038): n is a, c, g, or t
  misc_feature (1040)..(1040): n is a, c, g, or t
  misc_feature (1051)..(1051): n is a, c, g, or t
  misc_feature (1062)..(1062): n is a, c, g, or t
  misc_feature (1077)..(1077): n is a, c, g, or t
  misc_feature (1094)..(1094): n is a, c, g, or t
  misc_feature (1102)..(1102): n is a, c, g, or t
  misc_feature (1105)..(1105): n is a, c, g, or t
  misc_feature (1111)..(1111): n is a, c, g, or t
  misc_feature (1114)..(1114): n is a, c, g, or t
  misc_feature (1125)..(1125): n is a, c, g, or t
  misc_feature (1129)..(1129): n is a, c, g, or t
  misc_feature (1141)..(1141): n is a, c, g, or t
  misc_feature (1146)..(1146): n is a, c, g, or t
  misc_feature (1162)..(1162): n is a, c, g, or t
  misc_feature (1176)..(1176): n is a, c, g, or t
  misc_feature (1183)..(1184): n is a, c, g, or t
  misc_feature (1186)..(1186): n is a, c, g, or t
  misc_feature (1188)..(1188): n is a, c, g, or t
  misc_feature (1192)..(1192): n is a, c, g, or t
  misc_feature (1196)..(1196): n is a, c, g, or t
angaatagagaaattactatgagaggatcgcatcaccatcaccatcacggatcctatttaggtgacactatagaatcgtcgacccacgcgtccgatttacgccaaaccccagctctcgatctcttcttctccctgtggcccctgcgctgttgccccgtccccgtcaccccgcccgttactgaaatgtataatctgacttcctgtacagaaacctgaaaaaaaaaaaaaaaaaaaaaaaaaaaaaaaaaaaaaaagggcggccgctccctatagngagtcgtattaagcttaattagctgagcttggactcctgttgatagatccagtaatgacctcanaactccatctggatttgttcanaacgctcggttgccgccgggcgttttttattggngagaatccaagctagcttggcgagattttcaggagctaaggaagctaaaatggagaaaaaaatcactggatataccaccgttgatatatcccaatggcatcgtaaagaacattttgaggcatttcagtcagttgctcaatgtacctataaccagaccgttcagctggatattacggcctttttaaagaccgtaaagaaaaataagcacaagttttatccggcctttattcacattcttgcccgcctgatgaatgctcatccggaatttcgtatggcaatgaaagacggtgagctggtgatatgggatagtgttcacccttgttacaccgttttccatgagcaaactgaaacgttttcatcgctctggagtgaataccacgacgatttccggcagtttctacacatatattcgcaagatgtggcgtgttacggtgnaaaacctggcctatttccctaaagggtttattggaaaatatgtttttcgtctcagccaatcccctgggngagtttcaccagttttgaatttaaacgtggncaaaatgnanancttcttccccccccgttttncnccatggggcaaaatatnaatacccaaggccanaaaggngcttgatgnccccctggcnattccaggttcatcangncngtttggggaangcctcccatgnccggcaaaatgcttnaatgaatttacaaccantaccgccnatnaatggncanggcggggcccnaaanttttttaaaggnagttnttgggggcccctaaanccccggggggaaangaccccnnancnttgnggcnccaa

SEQ ID NO: 514 - DNA, 1361 bp, Homo Sapiens
  misc_feature (1)..(2): n is a, c, g, or t
  misc_feature (121)..(121): n is a, c, g, or t
  misc_feature (664)..(664): n is a, c, g, or t
  misc_feature (741)..(741): n is a, c, g, or t
  misc_feature (779)..(779): n is a, c, g, or t
  misc_feature (783)..(783): n is a, c, g, or t
  misc_feature (829)..(829): n is a, c, g, or t
  misc_feature (870)..(870): n is a, c, g, or t
  misc_feature (888)..(888): n is a, c, g, or t
  misc_feature (900)..(900): n is a, c, g, or t
  misc_feature (906)..(906): n is a, c, g, or t
  misc_feature (912)..(913): n is a, c, g, or t
  misc_feature (954)..(954): n is a, c, g, or t
  misc_feature (972)..(972): n is a, c, g, or t
  misc_feature (989)..(989): n is a, c, g, or t
  misc_feature (992)..(992): n is a, c, g, or t
  misc_feature (995)..(996): n is a, c, g, or t
  misc_feature (1010)..(1010): n is a, c, g, or t
  misc_feature (1019)..(1019): n is a, c, g, or t
  misc_feature (1025)..(1025): n is a, c, g, or t
  misc_feature (1034)..(1034): n is a, c, g, or t
  misc_feature (1036)..(1036): n is a, c, g, or t
  misc_feature (1044)..(1044): n is a, c, g, or t
  misc_feature (1059)..(1059): n is a, c, g, or t
  misc_feature (1075)..(1075): n is a, c, g, or t
  misc_feature (1081)..(1081): n is a, c, g, or t
  misc_feature (1086)..(1086): n is a, c, g, or t
  misc_feature (1103)..(1103): n is a, c, g, or t
  misc_feature (1113)..(1113): n is a, c, g, or t
  misc_feature (1125)..(1125): n is a, c, g, or t
  misc_feature (1127)..(1127): n is a, c, g, or t
  misc_feature (1135)..(1135): n is a, c, g, or t
  misc_feature (1137)..(1137): n is a, c, g, or t
  misc_feature (1140)..(1141): n is a, c, g, or t
  misc_feature (1152)..(1152): n is a, c, g, or t
  misc_feature (1165)..(1165): n is a, c, g, or t
  misc_feature (1170)..(1170): n is a, c, g, or t
  misc_feature (1173)..(1173): n is a, c, g, or t
  misc_feature (1178)..(1178): n is a, c, g, or t
  misc_feature (1184)..(1184): n is a, c, g, or t
  misc_feature (1190)..(1191): n is a, c, g, or t
  misc_feature (1205)..(1206): n is a, c, g, or t
  misc_feature (1220)..(1220): n is a, c, g, or t
  misc_feature (1226)..(1226): n is a, c, g, or t
  misc_feature (1241)..(1241): n is a, c, g, or t
  misc_feature (1245)..(1245): n is a, c, g, or t
  misc_feature (1260)..(1260): n is a, c, g, or t
  misc_feature (1264)..(1264): n is a, c, g, or t
  misc_feature (1267)..(1267): n is a, c, g, or t
  misc_feature (1270)..(1270): n is a, c, g, or t
  misc_feature (1283)..(1284): n is a, c, g, or t
  misc_feature (1289)..(1290): n is a, c, g, or t
  misc_feature (1305)..(1305): n is a, c, g, or t
  misc_feature (1309)..(1309): n is a, c, g, or t
  misc_feature (1316)..(1316): n is a, c, g, or t
  misc_feature (1337)..(1338): n is a, c, g, or t
  misc_feature (1347)..(1347): n is a, c, g, or t
  misc_feature (1354)..(1355): n is a, c, g, or t
  misc_feature (1359)..(1359): n is a, c, g, or t
nnaatagagagaattactatgagaggatcgcatcaccatcaccatcacggatcctatttaggtgacactatagaatcgtcgacccacgcgtccgggaatattttggagacaaaagtatcanaacttggaatggatggatgtaagggcatgaggacgtcgaatatgatttccaggcttctggcttgtgcaggtgggtggctgtggggctgtttactgataagggaaaacaagggaagagcaaaggttcaggtccgtgttaagctcgaggtcaaggcctttgactcgttctggatgaaatgtggagaccacgatgccgggtgcggtggttcacgcttgtaatcccatcactttgggaggccgaggcgggcggatcgcttaagcccgggagttcaagaccagcctagcccacatggccaaaccccgtccctacaaaaaatataaaaattagcaggacatggtggctcatgtacgcctgtagtcccagctactcaggaggctgaggcgggaggaaccttgagcccgggaggcagaggttgcagtgagccgtgattgtgccattgtactccagcctgggcgacaaaagtgaaaccatgtgttaaaaaaaaaaaaaaaagaaaagaaaaagaaaaattatggagaccgtgggatgtgggtgggatctggnattctaagacaggcttcacccacaaggtagagcccaggtccctttgttgtgagacctcaaaccctttcaagacttantcaagggcctagcttcattccagttggagttagagcanaaanaaaatgaaattacatgaatgttcatagcagtaccatttcacagtancccaaaaaaaaaaccaatccatgcagtgatggatggatgcntgaataaaaatgatgtgngtacatacaaangaaaantattcnnccttaaaaaggaatgaaattctgttacatgctgccacatgnaatgaaccctgaaaaaanttatgctaaagtgaaanaanccnntttgcaaaaagganaaaaactgntattcngccttatcngnaaaaaccnaattagtccaaattnttgggaaacaaaaaantaaaantggtnttttgttggcctagggnaagggaaaangggaaaattttntnttttaaangnctnntaaaaaaatcngaaaaatttaagnccccnaanctttntgcctnaaaatnntaaacttttggggnngggcccggggggcncccccntgtaaattccccccntttngagacccaagggggnggantcnttnggttcgggaattnnaaacnncccgctaaaaaaagnaaanccccccnccaaaaaaaaaaaaaaaaaannggggggggnggggggnngtancc

SEQ ID NO: 515 - DNA, 1200 bp, Homo Sapiens
  misc_feature (1)..(1): n is a, c, g, or t
  misc_feature (3)..(4): n is a, c, g, or t
  misc_feature (10)..(10): n is a, c, g, or t
  misc_feature (13)..(13): n is a, c, g, or t
  misc_feature (948)..(948): n is a, c, g, or t
  misc_feature (985)..(985): n is a, c, g, or t
  misc_feature (996)..(996): n is a, c, g, or t
  misc_feature (1022)..(1022): n is a, c, g, or t
  misc_feature (1033)..(1034): n is a, c, g, or t
  misc_feature (1046)..(1046): n is a, c, g, or t
  misc_feature (1048)..(1048): n is a, c, g, or t
  misc_feature (1062)..(1062): n is a, c, g, or t
  misc_feature (1066)..(1066): n is a, c, g, or t
  misc_feature (1071)..(1071): n is a, c, g, or t
  misc_feature (1078)..(1078): n is a, c, g, or t
  misc_feature (1082)..(1082): n is a, c, g, or t
  misc_feature (1108)..(1109): n is a, c, g, or t
  misc_feature (1113)..(1113): n is a, c, g, or t
  misc_feature (1127)..(1127): n is a, c, g, or t
  misc_feature (1130)..(1131): n is a, c, g, or t
  misc_feature (1136)..(1136): n is a, c, g, or t
  misc_feature (1150)..(1150): n is a, c, g, or t
  misc_feature (1153)..(1153): n is a, c, g, or t
  misc_feature (1156)..(1156): n is a, c, g, or t
  misc_feature (1168)..(1168): n is a, c, g, or t
  misc_feature (1172)..(1172): n is a, c, g, or t
  misc_feature (1180)..(1182): n is a, c, g, or t
  misc_feature (1189)..(1189): n is a, c, g, or t
ngnntagagnganttacctatggagaggatcgcatcaccatcaccatcacggatcctatttaggtgacactatagaatcgtcgacccacgcgtccgcacatacacacatacacatatacacacatgcacatgcacatacacacatacacgtatacacacatgtatacacacatacacacatgtacacaatacatacacatacacacaggcacattggtatatacaagtatacatagagctgatctcagtttacacaaagcagtcttttcaaatgtttgccttagaataaacaatctttctctagtatttttaaaaaataaaaccaaagacactgacaagtctgatgcaaagaacgaagctgctgctgatccgcctgcttctacatgggcaagattgactctgggtaaaaacaagagaaagcagggaaaagttgaaaatagggacagagccagcctacagacactaccttcctatccttcccttctcccctgcctgcctgaggagcaaaaagcctcgtctaagggaggctggacagaatctaaacagataagccagcagtgaaaccgcttcccggggcacgcacagcaggtgcagttgctaggtcagcatcccctcctcccggcccacagctttactggaggagagcagcaggacaaagccaggcttacctgggccacgcggggcctaagttctgctgtgtgggaagggtgggtgctggagaggagtccctgtgtgcagggcatgggtctcaccttggcttctgtcaaagctcagcctgcacggcgttcccaggatgcagctggtgatcgcatccgtcctaggaggacacagtaactggtatcccagggcactcctaatgtggcgtctgatgcctggggggtctctatggtaatctcggctcactgcaaacctctggcctcccgggttcaagcgattctcctgcctcancctcccgagtggctgggaattacagggcatggctccnccatatcccgnctaattttttctagtttttagcaaanacggggtttcnnccatggttgggncnaggctgggtcttgnaacncctgnaacctcnaggngatccccccccccctgggcccccccnnaagnggctgggattgcanggnnggganccattgggcccagnccnacnagcccccttttncaangggggttnnnaaaaacntggctcccaag

SEQ ID NO: 516 - DNA, 1380 bp, Homo Sapiens
  misc_feature (880)..(880): n is a, c, g, or t
  misc_feature (887)..(887): n is a, c, g, or t
  misc_feature (939)..(939): n is a, c, g, or t
  misc_feature (946)..(946): n is a, c, g, or t
  misc_feature (951)..(952): n is a, c, g, or t
  misc_feature (973)..(973): n is a, c, g, or t
  misc_feature (982)..(982): n is a, c, g, or t
  misc_feature (1005)..(1005): n is a, c, g, or t
  misc_feature (1011)..(1011): n is a, c, g, or t
  misc_feature (1013)..(1013): n is a, c, g, or t
  misc_feature (1016)..(1016): n is a, c, g, or t
  misc_feature (1020)..(1020): n is a, c, g, or t
  misc_feature (1030)..(1030): n is a, c, g, or t
  misc_feature (1037)..(1037): n is a, c, g, or t
  misc_feature (1048)..(1048): n is a, c, g, or t
  misc_feature (1056)..(1056): n is a, c, g, or t
  misc_feature (1068)..(1068): n is a, c, g, or t
  misc_feature (1071)..(1071): n is a, c, g, or t
  misc_feature (1073)..(1073): n is a, c, g, or t
  misc_feature (1081)..(1081): n is a, c, g, or t
  misc_feature (1084)..(1085): n is a, c, g, or t
  misc_feature (1088)..(1088): n is a, c, g, or t
  misc_feature (1094)..(1094): n is a, c, g, or t
  misc_feature (1100)..(1100): n is a, c, g, or t
  misc_feature (1111)..(1111): n is a, c, g, or t
  misc_feature (1121)..(1121): n is a, c, g, or t
  misc_feature (1133)..(1133): n is a, c, g, or t
  misc_feature (1146)..(1146): n is a, c, g, or t
  misc_feature (1149)..(1149): n is a, c, g, or t
  misc_feature (1152)..(1153): n is a, c, g, or t
  misc_feature (1158)..(1158): n is a, c, g, or t
  misc_feature (1161)..(1162): n is a, c, g, or t
  misc_feature (1166)..(1166): n is a, c, g, or t
  misc_feature (1170)..(1170): n is a, c, g, or t
  misc_feature (1172)..(1172): n is a, c, g, or t
  misc_feature (1178)..(1178): n is a, c, g, or t
  misc_feature (1183)..(1183): n is a, c, g, or t
  misc_feature (1198)..(1198): n is a, c, g, or t
  misc_feature (1203)..(1204): n is a, c, g, or t
  misc_feature (1206)..(1206): n is a, c, g, or t
  misc_feature (1219)..(1219): n is a, c, g, or t
  misc_feature (1224)..(1224): n is a, c, g, or t
  misc_feature (1229)..(1229): n is a, c, g, or t
  misc_feature (1239)..(1239): n is a, c, g, or t
  misc_feature (1256)..(1256): n is a, c, g, or t
  misc_feature (1268)..(1268): n is a, c, g, or t
  misc_feature (1271)..(1271): n is a, c, g, or t
  misc_feature (1274)..(1274): n is a, c, g, or t
  misc_feature (1281)..(1282): n is a, c, g, or t
  misc_feature (1286)..(1297): n is a, c, g, or t
  misc_feature (1303)..(1303): n is a, c, g, or t
  misc_feature (1307)..(1307): n is a, c, g, or t
  misc_feature (1311)..(1311): n is a, c, g, or t
  misc_feature (1313)..(1314): n is a, c, g, or t
  misc_feature (1318)..(1318): n is a, c, g, or t
  misc_feature (1325)..(1325): n is a, c, g, or t
  misc_feature (1331)..(1331): n is a, c, g, or t
  misc_feature (1337)..(1337): n is a, c, g, or t
  misc_feature (1339)..(1340): n is a, c, g, or t
  misc_feature (1343)..(1344): n is a, c, g, or t
  misc_feature (1347)..(1347): n is a, c, g, or t
  misc_feature (1352)..(1352): n is a, c, g, or t
  misc_feature (1355)..(1356): n is a, c, g, or t
  misc_feature (1380)..(1380): n is a, c, g, or t
gagaaattactatgagaggatcgcatcaccatcaccatcacggatcctatttaggtgacactatagaatcgtcgacccacgcgtccggtgagttatacactacttcaatctgtaattgaattgtagactattttattgctctgaagaacatttagcaattaatgctagaactaatatgctgctcagtagtgctttagagatccactttatggcataggtgagaacatttgcagtcaccttcccctcctttgccagtttatgtaggtcctatgaactcctgagtcaagtctggccttctctggaaagtctttcctgtttcagccacagtaagactcccattgtcacatttaagaattggtcatttatatatgaattgtgtatctcttggctaagttagagattatggactgcatcttattcttggccttctcaagatctagtatttcatatgtacgtccagcatacaaggacaatgatatggattatttttacagaaaagcatgctggaggtgcttgaaggatcttgaaaatagtttgtgatctgaggtatttaattttcagctcctattttctgtttgttttttgaatttttatttttatttttatttttttatttttagtagagagagggtttcaccatgttagccaggcaggtcttgaactcttgacctcaggtgatccgcccatcttggcgtcccaaagtgctaggattacaggcatgagccactgcacctggcctctttttgaatttttaaaatgctgtactttgtgtcaaaatctcctgttttctgttagaaaacatttttgctatggatttgtgcacagcaaaaaggattacaaaggtgtacaggtttgtcaactttttcaaaatttgaagtcnctgcggnatgatgaaaaatattttactaaggccaaaacattttagtaatcccagcctgnaatcccncgccnngtaatcccagtactttggganggctggggngggaaaaattgcttgaggccagnagttcnanacngtcnggggaaacanagggganaccttatctgnacaaaaanaaaaaaaataanccnancatggggncannccngtagtnccgccnctggggaaaangaataggggngaatccctggancccggaagttccnggntannaaaanccnngatncccngnaccccncccgnacacggagggaaccntgtcnncnaaaaaaaaaaaanccaanccaanccaaaaaaanggggggggggggttttnggattttgcctnccnaanccagggnncccnnnnnnnnnnnnaaaaanaaanaaananngggnccccccnagggcnaaaacntnnacnncgngcccnggnnaaccaaagccccacccccgggttn

SEQ ID NO: 517 - DNA, 1259 bp, Homo Sapiens
  misc_feature (3)..(3): n is a, c, g, or t
  misc_feature (5)..(12): n is a, c, g, or t
  misc_feature (29)..(29): n is a, c, g, or t
  misc_feature (904)..(904): n is a, c, g, or t
  misc_feature (906)..(906): n is a, c, g, or t
  misc_feature (925)..(925): n is a, c, g, or t
  misc_feature (928)..(928): n is a, c, g, or t
  misc_feature (994)..(999): n is a, c, g, or t
  misc_feature (1001)..(1006): n is a, c, g, or t
  misc_feature (1008)..(1014): n is a, c, g, or t
  misc_feature (1016)..(1019): n is a, c, g, or t
  misc_feature (1021)..(1036): n is a, c, g, or t
  misc_feature (1039)..(1050): n is a, c, g, or t
  misc_feature (1053)..(1060): n is a, c, g, or t
  misc_feature (1062)..(1068): n is a, c, g, or t
  misc_feature (1075)..(1075): n is a, c, g, or t
  misc_feature (1081)..(1081): n is a, c, g, or t
  misc_feature (1083)..(1083): n is a, c, g, or t
  misc_feature (1086)..(1086): n is a, c, g, or t
  misc_feature (1095)..(1096): n is a, c, g, or t
  misc_feature (1101)..(1101): n is a, c, g, or t
  misc_feature (1106)..(1106): n is a, c, g, or t
  misc_feature (1111)..(1111): n is a, c, g, or t
  misc_feature (1117)..(1117): n is a, c, g, or t
  misc_feature (1119)..(1119): n is a, c, g, or t
  misc_feature (1122)..(1122): n is a, c, g, or t
  misc_feature (1124)..(1124): n is a, c, g, or t
  misc_feature (1128)..(1129): n is a, c, g, or t
  misc_feature (1136)..(1136): n is a, c, g, or t
  misc_feature (1138)..(1138): n is a, c, g, or t
  misc_feature (1142)..(1142): n is a, c, g, or t
  misc_feature (1156)..(1157): n is a, c, g, or t
  misc_feature (1159)..(1159): n is a, c, g, or t
  misc_feature (1161)..(1162): n is a, c, g, or t
  misc_feature (1173)..(1173): n is a, c, g, or t
  misc_feature (1182)..(1182): n is a, c, g, or t
  misc_feature (1186)..(1186): n is a, c, g, or t
  misc_feature (1189)..(1189): n is a, c, g, or t
  misc_feature (1194)..(1194): n is a, c, g, or t
  misc_feature (1209)..(1209): n is a, c, g, or t
  misc_feature (1211)..(1211): n is a, c, g, or t
  misc_feature (1214)..(1214): n is a, c, g, or t
  misc_feature (1216)..(1216): n is a, c, g, or t
  misc_feature (1219)..(1221): n is a, c, g, or t
  misc_feature (1226)..(1227): n is a, c, g, or t
  misc_feature (1232)..(1232): n is a, c, g, or t
  misc_feature (1242)..(1242): n is a, c, g, or t
  misc_feature (1245)..(1245): n is a, c, g, or t
  misc_feature (1249)..(1249): n is a, c, g, or t
ctntnnnnnnnnaattagagaaaattacnatgagaggatcgcatcaccatcaccatcacggatcctatttaggtgacactatagaatcgtcgacccacgcgtccgggcgcgggccctagcgtggcggcgctgcagtctgggcagtgggttggttcctcctcggtcctctgtcgagtggcgacagggcctagccacctggcgggggtgaccttcggacgtgcgacccgctcggagaagggagggaactgtggcccgcaacaaagcagtgacaggcccgacatcccctgcagcgcgatctttccctcagctgcctgccggaggaagggcctttctgtttcacagggctaaagatggggcgcggttcctccacggggcggctgccgggtgaacggaacggggatggaggcgctgccagaagagcccgagctcgagcccgccctgccctcggcctccccgccgcgccgctccgcaggagccccgctcctctcctgctcgctccggagaaccccagtccggcctgacctcggccctcgcggtcaggcgctccaaccagagcgactccagctcgaacagcgctgggtaaactgaggctgaaccccgctggctgcatccccaggagtcgggcgtttacggtcacgggaacaggttaataaacttttacgcagcagacccggaacttaggtcccgatgtccgggtatcttaagaacaagaagcattcttagttgaagtttcgctttaaagataatgatacagatgcttgcggaggacaggcgttatgcaaagattggcaatcctttgacgagcccaggtagtacagcacgtctcccccgtgatgttttttggcttttatcttacatataaacaagcgtacccaggtggaacgccttcctcctcgtgcttttngnaaacaccctgcttctatgnaantaaccattcttttattccttcactgccttaaaaaaacttgcttttcacttttaaaaaaaaaaaaannnnnnannnnnnannnnnnnannnnannnnnnnnnnnnnnnnaannnnnnnnnnnnaannnnnnnnannnnnnnggggggncccccntnccnaaaaagggnngtccnaaaanaaacntttaantnaantnaaannttggaanancccngtttgaaaaaaaanncnannaaatgaacccncaaaaaacncccnctnggaanttttttttaaaaaancnttntnttnnnccccnnggggntttttttttnttngganaaaaacccaa

SEQ ID NO: 518 - DNA, 1264 bp, Homo Sapiens
  misc_feature (768)..(768): n is a, c, g, or t
  misc_feature (778)..(778): n is a, c, g, or t
  misc_feature (781)..(781): n is a, c, g, or t
  misc_feature (853)..(853): n is a, c, g, or t
  misc_feature (873)..(873): n is a, c, g, or t
  misc_feature (883)..(883): n is a, c, g, or t
  misc_feature (893)..(893): n is a, c, g, or t
  misc_feature (902)..(902): n is a, c, g, or t
  misc_feature (908)..(908): n is a, c, g, or t
  misc_feature (918)..(918): n is a, c, g, or t
  misc_feature (925)..(925): n is a, c, g, or t
  misc_feature (945)..(945): n is a, c, g, or t
  misc_feature (954)..(955): n is a, c, g, or t
  misc_feature (973)..(973): n is a, c, g, or t
  misc_feature (980)..(980): n is a, c, g, or t
  misc_feature (991)..(991): n is a, c, g, or t
  misc_feature (993)..(993): n is a, c, g, or t
  misc_feature (995)..(995): n is a, c, g, or t
  misc_feature (1016)..(1016): n is a, c, g, or t
  misc_feature (1025)..(1025): n is a, c, g, or t
  misc_feature (1030)..(1030): n is a, c, g, or t
  misc_feature (1033)..(1033): n is a, c, g, or t
  misc_feature (1042)..(1043): n is a, c, g, or t
  misc_feature (1050)..(1051): n is a, c, g, or t
  misc_feature (1053)..(1055): n is a, c, g, or t
  misc_feature (1063)..(1063): n is a, c, g, or t
  misc_feature (1066)..(1067): n is a, c, g, or t
  misc_feature (1070)..(1070): n is a, c, g, or t
  misc_feature (1088)..(1088): n is a, c, g, or t
  misc_feature (1093)..(1095): n is a, c, g, or t
  misc_feature (1109)..(1110): n is a, c, g, or t
  misc_feature (1124)..(1124): n is a, c, g, or t
  misc_feature (1129)..(1129): n is a, c, g, or t
  misc_feature (1133)..(1133): n is a, c, g, or t
  misc_feature (1135)..(1136): n is a, c, g, or t
  misc_feature (1142)..(1149): n is a, c, g, or t
  misc_feature (1151)..(1151): n is a, c, g, or t
  misc_feature (1154)..(1154): n is a, c, g, or t
  misc_feature (1158)..(1166): n is a, c, g, or t
  misc_feature (1168)..(1170): n is a, c, g, or t
  misc_feature (1172)..(1177): n is a, c, g, or t
  misc_feature (1179)..(1180): n is a, c, g, or t
  misc_feature (1183)..(1183): n is a, c, g, or t
  misc_feature (1187)..(1187): n is a, c, g, or t
  misc_feature (1190)..(1193): n is a, c, g, or t
  misc_feature (1195)..(1197): n is a, c, g, or t
  misc_feature (1201)..(1204): n is a, c, g, or t
  misc_feature (1206)..(1210): n is a, c, g, or t
  misc_feature (1213)..(1213): n is a, c, g, or t
  misc_feature (1216)..(1223): n is a, c, g, or t
  misc_feature (1227)..(1228): n is a, c, g, or t
  misc_feature (1230)..(1231): n is a, c, g, or t
  misc_feature (1235)..(1237): n is a, c, g, or t
  misc_feature (1239)..(1239): n is a, c, g, or t
  misc_feature (1241)..(1243): n is a, c, g, or t
  misc_feature (1245)..(1247): n is a, c, g, or t
  misc_feature (1252)..(1264): n is a, c, g, or t
gagaaattactatgagaggatcgcatcaccatcaccatcacggatcctatttaggtgacactatagaatcgtcgacccacgcgtccgcttccccgtttccaggtgtgaaagaaaaaaaaaagcacttccccatttccagatgtgaaagaaaatgtctacctcaaggctcgctggctctgtgggctgtgttgtcactggacctgcctccccgcccctcctgcccacagcccacctacctctcctgcagaggagaggccagaggttgggccaccaaggggaactcttgtggcctacagaaatagaaatggattgggcagagaaaaaatgtgaaagcaaccaaaaatgagaggaaatttgttccttgaagtataaattgtccaaacgagccacctcccagcacaccgcctgtccccgtcttgtctgtccactcccattttgagccagcccatccttgatggggatgcccatgaggaacctgggcttgggagggtggcatcagctggccgcctgcctcctgtcctgcaggcccggcccctggaatgtaccatgtgtgggatgggtgtgtgggagggtgagggggtgtgggtgtcccctgcagaggcgccccagcctcaggcacccagccagcctgatccacccctcgacaggggagcatccactgtcagcagccatggccggaagctatttttatacaaggtgtgttaagggttatgttcttgtgactttttgttactcttttctggttgtgttgttctttgaactacttantttaaagaanaanaaaagaaaaccaaggaaaacaaatacctattttttggttatactcaaaaacttttttttaaatagcaaaaanaaaaaacttttttttaaaanaaaaaaagantaaatgtatncctttaaanaatganaaccataaantattccnttgaaccccccaaccccctntaagggacnnccctcccacccctgaaanttttaantttaaatttancntnaaaaaaaaaaaaaaaattttngtggggggnttttnccnaaaaaaaannaaaaaanntnnntgttcccnccnnggnaactttgggggaaaaggntaaannnccctttcccctttnnccccaaaatggaanggtgngggnanngccccnnnnnnnncnccnaaannnnnnnnncnnngnnnnnntnnccncccnttnnnntnnnaaannnnannnnnttnttnnnnnnnnaaanncnncccnnntncnnntnnnaaaannnnnnnnnnnnn

SEQ ID NO: 519 - DNA, 1573 bp, Homo Sapiens
  misc_feature (1)..(2): n is a, c, g, or t
  misc_feature (295)..(295): n is a, c, g, or t
  misc_feature (327)..(327): n is a, c, g, or t
  misc_feature (368)..(368): n is a, c, g, or t
  misc_feature (384)..(384): n is a, c, g, or t
  misc_feature (397)..(397): n is a, c, g, or t
  misc_feature (402)..(403): n is a, c, g, or t
  misc_feature (409)..(409): n is a, c, g, or t
  misc_feature (422)..(422): n is a, c, g, or t
  misc_feature (424)..(424): n is a, c, g, or t
  misc_feature (430)..(430): n is a, c, g, or t
  misc_feature (432)..(432): n is a, c, g, or t
  misc_feature (444)..(444): n is a, c, g, or t
  misc_feature (461)..(461): n is a, c, g, or t
  misc_feature (470)..(470): n is a, c, g, or t
  misc_feature (480)..(480): n is a, c, g, or t
  misc_feature (488)..(488): n is a, c, g, or t
  misc_feature (494)..(495): n is a, c, g, or t
  misc_feature (515)..(515): n is a, c, g, or t
  misc_feature (525)..(525): n is a, c, g, or t
  misc_feature (530)..(530): n is a, c, g, or t
  misc_feature (532)..(532): n is a, c, g, or t
  misc_feature (535)..(536): n is a, c, g, or t
  misc_feature (540)..(540): n is a, c, g, or t
  misc_feature (542)..(542): n is a, c, g, or t
  misc_feature (551)..(551): n is a, c, g, or t
  misc_feature (558)..(558): n is a, c, g, or t
  misc_feature (566)..(566): n is a, c, g, or t
  misc_feature (577)..(577): n is a, c, g, or t
  misc_feature (582)..(582): n is a, c, g, or t
  misc_feature (586)..(586): n is a, c, g, or t
  misc_feature (590)..(591): n is a, c, g, or t
  misc_feature (601)..(601): n is a, c, g, or t
  misc_feature (609)..(609): n is a, c, g, or t
  misc_feature (612)..(612): n is a, c, g, or t
  misc_feature (619)..(619): n is a, c, g, or t
  misc_feature (626)..(627): n is a, c, g, or t
  misc_feature (629)..(629): n is a, c, g, or t
  misc_feature (636)..(636): n is a, c, g, or t
  misc_feature (656)..(657): n is a, c, g, or t
  misc_feature (660)..(660): n is a, c, g, or t
  misc_feature (662)..(662): n is a, c, g, or t
  misc_feature (667)..(667): n is a, c, g, or t
  misc_feature (680)..(680): n is a, c, g, or t
  misc_feature (686)..(688): n is a, c, g, or t
  misc_feature (690)..(690): n is a, c, g, or t
  misc_feature (709)..(710): n is a, c, g, or t
  misc_feature (712)..(714): n is a, c, g, or t
  misc_feature (719)..(719): n is a, c, g, or t
  misc_feature (731)..(733): n is a, c, g, or t
  misc_feature (746)..(746): n is a, c, g, or t
  misc_feature (749)..(749): n is a, c, g, or t
  misc_feature (752)..(752): n is a, c, g, or t
  misc_feature (754)..(754): n is a, c, g, or t
  misc_feature (757)..(758): n is a, c, g, or t
  misc_feature (770)..(772): n is a, c, g, or t
  misc_feature (783)..(783): n is a, c, g, or t
  misc_feature (785)..(787): n is a, c, g, or t
  misc_feature (789)..(789): n is a, c, g, or t
  misc_feature (792)..(792): n is a, c, g, or t
  misc_feature (796)..(796): n is a, c, g, or t
  misc_feature (805)..(805): n is a, c, g, or t
  misc_feature (807)..(807): n is a, c, g, or t
  misc_feature (814)..(814): n is a, c, g, or t
  misc_feature (817)..(817): n is a, c, g, or t
  misc_feature (824)..(824): n is a, c, g, or t
  misc_feature (826)..(826): n is a, c, g, or t
  misc_feature (830)..(831): n is a, c, g, or t
  misc_feature (834)..(834): n is a, c, g, or t
  misc_feature (836)..(836): n is a, c, g, or t
  misc_feature (846)..(846): n is a, c, g, or t
  misc_feature (848)..(848): n is a, c, g, or t
  misc_feature (852)..(852): n is a, c, g, or t
  misc_feature (856)..(856): n is a, c, g, or t
  misc_feature (859)..(859): n is a, c, g, or t
  misc_feature (861)..(862): n is a, c, g, or t
  misc_feature (864)..(864): n is a, c, g, or t
  misc_feature (866)..(866): n is a, c, g, or t
  misc_feature (871)..(871): n is a, c, g, or t
  misc_feature (884)..(884): n is a, c, g, or t
  misc_feature (886)..(886): n is a, c, g, or t
  misc_feature (889)..(889): n is a, c, g, or t
  misc_feature (897)..(897): n is a, c, g, or t
  misc_feature (899)..(899): n is a, c, g, or t
  misc_feature (907)..(907): n is a, c, g, or t
  misc_feature (911)..(912): n is a, c, g, or t
  misc_feature (915)..(918): n is a, c, g, or t
  misc_feature (929)..(929): n is a, c, g, or t
  misc_feature (933)..(934): n is a, c, g, or t
  misc_feature (939)..(939): n is a, c, g, or t
  misc_feature (941)..(944): n is a, c, g, or t
  misc_feature (949)..(949): n is a, c, g, or t
  misc_feature (959)..(959): n is a, c, g, or t
  misc_feature (963)..(963): n is a, c, g, or t
  misc_feature (965)..(965): n is a, c, g, or t
  misc_feature (972)..(972): n is a, c, g, or t
  misc_feature (974)..(974): n is a, c, g, or t
  misc_feature (979)..(981): n is a, c, g, or t
  misc_feature (983)..(983): n is a, c, g, or t
  misc_feature (988)..(988): n is a, c, g, or t
  misc_feature (995)..(996): n is a, c, g, or t
  misc_feature (1002)..(1002): n is a, c, g, or t
  misc_feature (1006)..(1006): n is a, c, g, or t
  misc_feature (1013)..(1013): n is a, c, g, or t
  misc_feature (1015)..(1018): n is a, c, g, or t
  misc_feature (1024)..(1024): n is a, c, g, or t
  misc_feature (1031)..(1032): n is a, c, g, or t
  misc_feature (1037)..(1037): n is a, c, g, or t
  misc_feature (1041)..(1042): n is a, c, g, or t
  misc_feature (1047)..(1047): n is a, c, g, or t
  misc_feature (1049)..(1050): n is a, c, g, or t
  misc_feature (1052)..(1052): n is a, c, g, or t
  misc_feature (1061)..(1064): n is a, c, g, or t
  misc_feature (1066)..(1069): n is a, c, g, or t
  misc_feature (1072)..(1072): n is a, c, g, or t
  misc_feature (1074)..(1074): n is a, c, g, or t
  misc_feature (1081)..(1081): n is a, c, g, or t
  misc_feature (1083)..(1083): n is a, c, g, or t
  misc_feature (1090)..(1090): n is a, c, g, or t
  misc_feature (1106)..(1106): n is a, c, g, or t
  misc_feature (1108)..(1108): n is a, c, g, or t
  misc_feature (1118)..(1118): n is a, c, g, or t
  misc_feature (1124)..(1124): n is a, c, g, or t
  misc_feature (1126)..(1126): n is a, c, g, or t
  misc_feature (1137)..(1137): n is a, c, g, or t
  misc_feature (1139)..(1140): n is a, c, g, or t
  misc_feature (1142)..(1142): n is a, c, g, or t
  misc_feature (1146)..(1146): n is a, c, g, or t
  misc_feature (1154)..(1154): n is a, c, g, or t
  misc_feature (1157)..(1157): n is a, c, g, or t
  misc_feature (1160)..(1161): n is a, c, g, or t
  misc_feature (1163)..(1165): n is a, c, g, or t
  misc_feature (1169)..(1170): n is a, c, g, or t
  misc_feature (1172)..(1172): n is a, c, g, or t
  misc_feature (1178)..(1178): n is a, c, g, or t
  misc_feature (1180)..(1180): n is a, c, g, or t
  misc_feature (1182)..(1182): n is a, c, g, or t
  misc_feature (1185)..(1186): n is a, c, g, or t
  misc_feature (1192)..(1192): n is a, c, g, or t
  misc_feature (1196)..(1196): n is a, c, g, or t
  misc_feature (1198)..(1198): n is a, c, g, or t
  misc_feature (1204)..(1204): n is a, c, g, or t
  misc_feature (1214)..(1214): n is a, c, g, or t
  misc_feature (1218)..(1218): n is a, c, g, or t
  misc_feature (1222)..(1222): n is a, c, g, or t
  misc_feature (1225)..(1225): n is a, c, g, or t
  misc_feature (1227)..(1227): n is a, c, g, or t
  misc_feature (1234)..(1235): n is a, c, g, or t
  misc_feature (1242)..(1243): n is a, c, g, or t
  misc_feature (1246)..(1248): n is a, c, g, or t
  misc_feature (1257)..(1257): n is a, c, g, or t
  misc_feature (1259)..(1259): n is a, c, g, or t
  misc_feature (1266)..(1266): n is a, c, g, or t
  misc_feature (1268)..(1268): n is a, c, g, or t
  misc_feature (1276)..(1276): n is a, c, g, or t
  misc_feature (1281)..(1284): n is a, c, g, or t
  misc_feature (1287)..(1287): n is a, c, g, or t
  misc_feature (1289)..(1289): n is a, c, g, or t
  misc_feature (1292)..(1292): n is a, c, g, or t
  misc_feature (1297)..(1297): n is a, c, g, or t
  misc_feature (1299)..(1299): n is a, c, g, or t
  misc_feature (1302)..(1305): n is a, c, g, or t
  misc_feature (1309)..(1309): n is a, c, g, or t
  misc_feature (1312)..(1315): n is a, c, g, or t
  misc_feature (1319)..(1319): n is a, c, g, or t
  misc_feature (1323)..(1324): n is a, c, g, or t
  misc_feature (1335)..(1335): n is a, c, g, or t
  misc_feature (1339)..(1340): n is a, c, g, or t
  misc_feature (1344)..(1344): n is a, c, g, or t
  misc_feature (1347)..(1349): n is a, c, g, or t
  misc_feature (1353)..(1354): n is a, c, g, or t
  misc_feature (1362)..(1362): n is a, c, g, or t
  misc_feature (1365)..(1366): n is a, c, g, or t
  misc_feature (1378)..(1378): n is a, c, g, or t
  misc_feature (1381)..(1381): n is a, c, g, or t
  misc_feature (1384)..(1385): n is a, c, g, or t
  misc_feature (1392)..(1392): n is a, c, g, or t
  misc_feature (1394)..(1394): n is a, c, g, or t
  misc_feature (1401)..(1401): n is a, c, g, or t
  misc_feature (1410)..(1410): n is a, c, g, or t
  misc_feature (1413)..(1413): n is a, c, g, or t
  misc_feature (1415)..(1417): n is a, c, g, or t
  misc_feature (1423)..(1423): n is a, c, g, or t
  misc_feature (1425)..(1425): n is a, c, g, or t
  misc_feature (1431)..(1432): n is a, c, g, or t
  misc_feature (1436)..(1436): n is a, c, g, or t
  misc_feature (1441)..(1441): n is a, c, g, or t
  misc_feature (1448)..(1448): n is a, c, g, or t
  misc_feature (1451)..(1451): n is a, c, g, or t
  misc_feature (1456)..(1456): n is a, c, g, or t
  misc_feature (1462)..(1462): n is a, c, g, or t
  misc_feature (1464)..(1464): n is a, c, g, or t
  misc_feature (1468)..(1468): n is a, c, g, or t
  misc_feature (1485)..(1485): n is a, c, g, or t
  misc_feature (1489)..(1490): n is a, c, g, or t
  misc_feature (1496)..(1496): n is a, c, g, or t
  misc_feature (1504)..(1505): n is a, c, g, or t
  misc_feature (1507)..(1507): n is a, c, g, or t
  misc_feature (1510)..(1510): n is a, c, g, or t
  misc_feature (1513)..(1513): n is a, c, g, or t
  misc_feature (1521)..(1521): n is a, c, g, or t
  misc_feature (1526)..(1526): n is a, c, g, or t
  misc_feature (1535)..(1535): n is a, c, g, or t
  misc_feature (1541)..(1542): n is a, c, g, or t
  misc_feature (1558)..(1560): n is a, c, g, or t
  misc_feature (1566)..(1567): n is a, c, g, or t
  misc_feature (1570)..(1571): n is a, c, g, or t
nnatatagaggagaattaactatggagaggatcgcatcaccatcaccatcacgggtatcctatttaggtgacactatagaatcgtcgacccacgcgtccgcacctatccattcacctacccatccatccatccatccatccatccatccatccatccatccatctttccacccacccacccacccacctatccatctacctacccatccatccatccatccatccatccacccatccacccatttacccacccacccacccacccagccagccaagtccttggggctgggacacngcagtgatgggctaggaacctgccaaacacancctcacatccttcccaggaacacatccatgctgtgatagcnaccgaccccttccacncacccctctgtcntctgnnaaaggncctcccccagctngntcctananttggaacaaggntcagacctacctaaccngttggcagnccacactganccctccanacaganngggcagtgtgggtccatggnaggtgtcacnggagncnggnnatgnangaggcggangggcctnccaggggnttatgagtgcncaaangggncaanncttgtggganaccacccnacncacggcncacaggnntntatgccnaaaccaagggacttgactgnnttngnggtanatattcgccattnagggtnnnanaaaaggtgcctaataatanngnnnatgancaatttaacggnnngatttgtgataantanttncngtnnagaatggtttcnnngggcaatcgancnnngnttnaaangcatgcgantnttacttnacnacagagnanatgnnatncnggttgtaagngnggtntacnaananngngntgtgnaaactaaggggangngtnaccatagntngtgggagnaagnnacnnnnggaccattaantggnntctangnnnnggggnaagggaaggngagntngggttananttttnnngnaaaanaatgggnnatcctngtgnggagganannnnaaagangggggannaaacnaggnnggggntnngntataggggnnnncnnnnccnangaggggnangaaaaantggttaagagtttaantnatataaacgnaggggntntgtttatgcgngnnanaggngatatggntantannannnatanntntggtanananggnnaggggngaantnggaacntatatcagantggngggnctntnttggacnnaaagagnnaannnggggaaaantnagggtanangtgacaanttcannnnacntntgnaaaancnatnnnnatanggnnnngatntacnnctatcgagcantgannagangannngatnntttagacnatnngtatggacttanagntcnntgttacnanaaggaantcactaccnctncnnntagtgntnaagatnnatanctctntaaaaantangatanacacananggangtgtgaaagtagatganaccnnagcaanagataaannantcngtntaggtcancatgngatctgacncgactnntgagtagacgactgtnnnagatannttnntg

SEQ ID NO: 520 - DNA, 1383 bp, Homo Sapiens
  misc_feature (821)..(821): n is a, c, g, or t
  misc_feature (868)..(868): n is a, c, g, or t
  misc_feature (973)..(973): n is a, c, g, or t
  misc_feature (984)..(984): n is a, c, g, or t
  misc_feature (987)..(987): n is a, c, g, or t
  misc_feature (1004)..(1004): n is a, c, g, or t
  misc_feature (1007)..(1007): n is a, c, g, or t
  misc_feature (1012)..(1012): n is a, c, g, or t
  misc_feature (1024)..(1024): n is a, c, g, or t
  misc_feature (1048)..(1048): n is a, c, g, or t
  misc_feature (1095)..(1095): n is a, c, g, or t
  misc_feature (1098)..(1098): n is a, c, g, or t
  misc_feature (1107)..(1108): n is a, c, g, or t
  misc_feature (1117)..(1117): n is a, c, g, or t
  misc_feature (1123)..(1123): n is a, c, g, or t
  misc_feature (1127)..(1127): n is a, c, g, or t
  misc_feature (1129)..(1130): n is a, c, g, or t
  misc_feature (1133)..(1133): n is a, c, g, or t
  misc_feature (1140)..(1140): n is a, c, g, or t
  misc_feature (1148)..(1148): n is a, c, g, or t
  misc_feature (1152)..(1153): n is a, c, g, or t
  misc_feature (1164)..(1164): n is a, c, g, or t
  misc_feature (1171)..(1171): n is a, c, g, or t
  misc_feature (1175)..(1175): n is a, c, g, or t
  misc_feature (1189)..(1190): n is a, c, g, or t
  misc_feature (1198)..(1198): n is a, c, g, or t
  misc_feature (1205)..(1205): n is a, c, g, or t
  misc_feature (1210)..(1211): n is a, c, g, or t
  misc_feature (1213)..(1213): n is a, c, g, or t
  misc_feature (1217)..(1217): n is a, c, g, or t
  misc_feature (1219)..(1219): n is a, c, g, or t
  misc_feature (1229)..(1229): n is a, c, g, or t
  misc_feature (1234)..(1234): n is a, c, g, or t
  misc_feature (1244)..(1246): n is a, c, g, or t
  misc_feature (1255)..(1256): n is a, c, g, or t
  misc_feature (1258)..(1258): n is a, c, g, or t
  misc_feature (1267)..(1267): n is a, c, g, or t
  misc_feature (1272)..(1272): n is a, c, g, or t
  misc_feature (1276)..(1276): n is a, c, g, or t
  misc_feature (1285)..(1286): n is a, c, g, or t
  misc_feature (1288)..(1288): n is a, c, g, or t
  misc_feature (1306)..(1307): n is a, c, g, or t
  misc_feature (1314)..(1315): n is a, c, g, or t
  misc_feature (1324)..(1325): n is a, c, g, or t
  misc_feature (1333)..(1334): n is a, c, g, or t
  misc_feature (1342)..(1343): n is a, c, g, or t
  misc_feature (1345)..(1345): n is a, c, g, or t
  misc_feature (1352)..(1352): n is a, c, g, or t
  misc_feature (1358)..(1358): n is a, c, g, or t
  misc_feature (1360)..(1361): n is a, c, g, or t
  misc_feature (1363)..(1363): n is a, c, g, or t
  misc_feature (1368)..(1370): n is a, c, g, or t
  misc_feature (1373)..(1373): n is a, c, g, or t
  misc_feature (1376)..(1377): n is a, c, g, or t
  misc_feature (1379)..(1379): n is a, c, g, or t
  misc_feature (1382)..(1382): n is a, c, g, or t
tagagaaattactatgagaggatcgcatcaccatcaccatcacggatcctatttaggtgacactatagaatcgtcgacccacgcgtccgcagagatcacgccactgcactccagcctgggtgacagagcgagactccgtctcaagaaaaaaaaaaaaaaagaaagtggccgagcgcgcttcccccagaacagtggctgtcagccaggaatgactgtgaccccagggaatgtttggttgtcacagcttagggcgtggtgctgtgtataggccgtagaggcagggatggggcccacaagccccagtgcacaggcggctccccagacctcccaaggtcagcactgccactggaggagcctgccctgaggccagagctgaagcctcctggagtcttcctggaggagtggccaggtcacagcgtgtccagtcagggcaaagccagctagcaacagaaaactgtatttccagatgacagaagtagcatttaaatgaaagttcggtcagtggggccctcccacacccaccagtgaagagcaggggcctgcggaagtacaggtgtagactggagagctggacacagggatggggaccaggatgaagcctccctgagagtggcatgggccggggaggtgatgagagaggagggtgtgggagagcctgactcgagctgggctccaggccgcaggagcgggacactgactgggagcttcctgggggctgcttctactggaagtcctctgggaaggcagtgagacagtccccaaggcccacagaggaggaacagagcagggcccactttaggcacatgtggaagacaagtcancaagggtaggctgggccggtggagggcacggcagggagacagatgancgggcgtcacaggtcctcaaagcggagacccaaaggcacctggagctctcacctgagggtcaaaatcctggtgcctttgtaggaacagtgtgggtcaggaggcancgatcgatgancancatgccacgggggaaanttntttcngaaccagctcancacatcggtccatgcaaatgtggncctgggcgtcctcagggtttcccaacgaactcaaagttgtgctgcangcnatgcaggcnncaaactggnaccccnaggntnnccntggaaancaggtccnatcnnggatttggcanttccggngggngcctgggaaggaannatcgggtncagttcnggccnnangggnanaaaccccgcnaaaanaaaaggatcnnnccttttggnncnaaaaaaaanggccnaaanggggttttnngngggggggggggttttttnnaattttnnaaaaatttnngaaaaaannggtttttnntnaaaaaantttttnannanccccnnnccnggnncnggng

SEQ ID NO: 521 - DNA, 1200 bp, Homo Sapiens
  misc_feature (815)..(815): n is a, c, g, or t
  misc_feature (903)..(903): n is a, c, g, or t
  misc_feature (913)..(913): n is a, c, g, or t
  misc_feature (925)..(925): n is a, c, g, or t
  misc_feature (927)..(927): n is a, c, g, or t
  misc_feature (955)..(955): n is a, c, g, or t
  misc_feature (972)..(973): n is a, c, g, or t
  misc_feature (988)..(988): n is a, c, g, or t
  misc_feature (996)..(996): n is a, c, g, or t
  misc_feature (998)..(998): n is a, c, g, or t
  misc_feature (1005)..(1005): n is a, c, g, or t
  misc_feature (1007)..(1007): n is a, c, g, or t
  misc_feature (1030)..(1030): n is a, c, g, or t
  misc_feature (1043)..(1043): n is a, c, g, or t
  misc_feature (1048)..(1048): n is a, c, g, or t
  misc_feature (1064)..(1064): n is a, c, g, or t
  misc_feature (1069)..(1069): n is a, c, g, or t
  misc_feature (1084)..(1084): n is a, c, g, or t
  misc_feature (1090)..(1090): n is a, c, g, or t
  misc_feature (1095)..(1095): n is a, c, g, or t
  misc_feature (1099)..(1099): n is a, c, g, or t
  misc_feature (1103)..(1103): n is a, c, g, or t
  misc_feature (1110)..(1110): n is a, c, g, or t
  misc_feature (1118)..(1118): n is a, c, g, or t
  misc_feature (1124)..(1124): n is a, c, g, or t
  misc_feature (1133)..(1133): n is a, c, g, or t
  misc_feature (1142)..(1142): n is a, c, g, or t
  misc_feature (1155)..(1155): n is a, c, g, or t
  misc_feature (1161)..(1161): n is a, c, g, or t
  misc_feature (1169)..(1169): n is a, c, g, or t
  misc_feature (1171)..(1171): n is a, c, g, or t
  misc_feature (1183)..(1183): n is a, c, g, or t
  misc_feature (1189)..(1189): n is a, c, g, or t
  misc_feature (1192)..(1192): n is a, c, g, or t
  misc_feature (1198)..(1198): n is a, c, g, or t
attagagaaattactatgagaggatcgcatcaccatcaccatcacggatcctatttaggtgacactatagaatcgtcgacccacgcgtccggcatgaaagtgacaggagaaggatgtgtctacctccagacatccttgaaatacaatattctcccagaaaaggaagagttcccctttgctttaggagtgcagactctgcctcaaacttgtgatgaacccaaagcccacaccagcttccaaatctccctaagtgtcagttacacagggagccgctctgcctccaacatggcgatcgttgatgtgaagatggtctctggcttcattcccctgaagccaacagtgaaaatgcttgaaagatctaaccatgtgagccggacagaagtcagcagcaaccatgtcttgatttaccttgataaggtgtcaaatcagacactgagcttgttcttcacggttctgcaagatgtcccagtaagagatctgaaaccagccatagtgaaagtctatgattactacgagacggatgagtttgcaattgctgagtacaatgctccttgcagcaaagatcttggaaatgcttgaagaccacaaggctgaaaagtgctttgctggagtcctgttctcagagctccacagaagacacgtgtttttgtatctttaaagacttgatgaataaacactttttctggtcaaaaaaaaaaaaaaaaaaaaagggcggccgctccctatagtgagtcgtattaagcttaattagctgagcttggactcctgttgatagatccagtaatgacctcagaactccatctggatttgttcanaacgctcggttgccgccgggcgttttttattggtgagaatccaagctagcttggcgagattttcaggagctaaggaagctaaatgganaaaaaaatcnctggatataccncngttgatatatcccaatggcatcgtaaanaaaattttgaggcattnnatcagttgctcatgnacctatancngaccgtncnctggatattacggcctttttaanaccgtaaaaaaanaagcncaagttttatccggcnttatncaattcttgcccccngaaaangcccnccgnattnctagggnatgaaaancggganctgggaaanggaaaggtncccttgttacccntttccnggaaaaangnaaagttttctcncctggnggnaaaccncc

SEQ ID NO: 522 - DNA, 1410 bp, Homo Sapiens
  misc_feature (829)..(829): n is a, c, g, or t
  misc_feature (832)..(832): n is a, c, g, or t
  misc_feature (867)..(867): n is a, c, g, or t
  misc_feature (887)..(887): n is a, c, g, or t
  misc_feature (897)..(897): n is a, c, g, or t
  misc_feature (911)..(911): n is a, c, g, or t
  misc_feature (933)..(933): n is a, c, g, or t
  misc_feature (939)..(939): n is a, c, g, or t
  misc_feature (948)..(948): n is a, c, g, or t
  misc_feature (951)..(951): n is a, c, g, or t
  misc_feature (968)..(968): n is a, c, g, or t
  misc_feature (987)..(987): n is a, c, g, or t
  misc_feature (992)..(992): n is a, c, g, or t
  misc_feature (998)..(998): n is a, c, g, or t
  misc_feature (1008)..(1008): n is a, c, g, or t
  misc_feature (1024)..(1024): n is a, c, g, or t
  misc_feature (1052)..(1052): n is a, c, g, or t
  misc_feature (1059)..(1059): n is a, c, g, or t
  misc_feature (1069)..(1069): n is a, c, g, or t
  misc_feature (1072)..(1072): n is a, c, g, or t
  misc_feature (1074)..(1074): n is a, c, g, or t
  misc_feature (1092)..(1092): n is a, c, g, or t
  misc_feature (1096)..(1096): n is a, c, g, or t
  misc_feature (1098)..(1099): n is a, c, g, or t
  misc_feature (1102)..(1102): n is a, c, g, or t
  misc_feature (1107)..(1107): n is a, c, g, or t
  misc_feature (1123)..(1123): n is a, c, g, or t
  misc_feature (1129)..(1129): n is a, c, g, or t
  misc_feature (1138)..(1139): n is a, c, g, or t
  misc_feature (1143)..(1143): n is a, c, g, or t
  misc_feature (1148)..(1148): n is a, c, g, or t
  misc_feature (1150)..(1151): n is a, c, g, or t
  misc_feature (1165)..(1165): n is a, c, g, or t
  misc_feature (1173)..(1173): n is a, c, g, or t
  misc_feature (1181)..(1181): n is a, c, g, or t
  misc_feature (1188)..(1188): n is a, c, g, or t
  misc_feature (1199)..(1199): n is a, c, g, or t
  misc_feature (1210)..(1210): n is a, c, g, or t
  misc_feature (1223)..(1223): n is a, c, g, or t
  misc_feature (1227)..(1227): n is a, c, g, or t
  misc_feature (1235)..(1236): n is a, c, g, or t
  misc_feature (1242)..(1246): n is a, c, g, or t
  misc_feature (1248)..(1248): n is a, c, g, or t
  misc_feature (1250)..(1254): n is a, c, g, or t
  misc_feature (1257)..(1259): n is a, c, g, or t
  misc_feature (1262)..(1264): n is a, c, g, or t
  misc_feature (1266)..(1266): n is a, c, g, or t
  misc_feature (1274)..(1274): n is a, c, g, or t
  misc_feature (1277)..(1277): n is a, c, g, or t
  misc_feature (1288)..(1288): n is a, c, g, or t
  misc_feature (1294)..(1294): n is a, c, g, or t
  misc_feature (1298)..(1298): n is a, c, g, or t
  misc_feature (1303)..(1304): n is a, c, g, or t
  misc_feature (1306)..(1307): n is a, c, g, or t
  misc_feature (1311)..(1311): n is a, c, g, or t
  misc_feature (1315)..(1315): n is a, c, g, or t
  misc_feature (1319)..(1321): n is a, c, g, or t
  misc_feature (1327)..(1328): n is a, c, g, or t
  misc_feature (1330)..(1330): n is a, c, g, or t
  misc_feature (1338)..(1338): n is a, c, g, or t
  misc_feature (1342)..(1342): n is a, c, g, or t
  misc_feature (1349)..(1349): n is a, c, g, or t
  misc_feature (1353)..(1353): n is a, c, g, or t
  misc_feature (1356)..(1358): n is a, c, g, or t
  misc_feature (1363)..(1365): n is a, c, g, or t
  misc_feature (1368)..(1368): n is a, c, g, or t
  misc_feature (1374)..(1375): n is a, c, g, or t
  misc_feature (1377)..(1380): n is a, c, g, or t
  misc_feature (1384)..(1384): n is a, c, g, or t
  misc_feature (1387)..(1387): n is a, c, g, or t
  misc_feature (1390)..(1390): n is a, c, g, or t
  misc_feature (1393)..(1393): n is a, c, g, or t
  misc_feature (1397)..(1398): n is a, c, g, or t
  misc_feature (1400)..(1400): n is a, c, g, or t
aatagagaaattactatgagaggatcgcatcaccatcaccatcacggatcctatttaggtgacactatagaatcgtcgacccacgcgtccgcccacgcgtccgccagcaccttcaagatgctgaccggcgacgagagcacgacggggggcgaggccttcgtcaatggacacagcgtgctgaaggagctgctccaggtgcagcagagcctcggctactgcccgcagtgtgacgcgctgttcgacgagctcacggcccgggagcacctgcagctgtacacgcggctgcgtgggatctcctggaaggacgaggcccgggtggtgaagtgggctctggagaagctggagctgaccaagtacgcagacaagccggctggcacctacagcggcggcaacaagcggaagctctccacggccatcgccctcattgggtacccagccttcatcttcctggacgagcccaccacaggcatggaccccaaggcccggcgcttcctctggaacctcatccttgacctcatcaagacagggcgttcagtggtgctgacatcacacagcatggaggagtgcgaggcgctgtgcacgcggctggccatcatggtgaacggtcgcctgcggtgcctgggcagcatccagcacctgaagaaccggtttggagatggctacatgatcacggtgcggaccaagagcagccagagtgtgaaggacgtggtgcggttcttcaaccgcaacttcccggaagccatgctcaaggagcggcaccacacaaaggtgcagtaccagctcaagtcggagcacatctcgctggcccaggtgttcagcaagatggaancangtgtctggcgtgctgggcatcgaggactactcggntcagccaaaccacactgganaatgtgttcntgaactttgccaanaaccaaaatgacaaccttgaancaccangaaacgganccnccatcccgcaactgcantcccctttcggctgcttgnttcanccttgntccgggcccnggttttgcccccacgnaaacttccgggccctttgttggcaaaanaaccccnaagaacctgnaananggaagaaaaagggccttnctcnannttncaagnaaaaacggggccccanttttcntttaaaaannaaanccttntnnttaaaacccaaaantgggcccngggagaanccctccncttaacccccnaaattgggccngggaatccaaaangggnaaaaaaanncccccnnnnntncnnnnnctnnnatnnnantttaaaanaangggtttttggntccccncccntttanntnncaantccngggnnnattggnntncccccctntttntcaaaanatanccnnnggggnnnaancccttnncnnnntttnttnaanccngggnngncccccccccc

SEQ ID NO: 523 - DNA, 1429 bp, Homo Sapiens
  misc_feature (1)..(1): n is a, c, g, or t
  misc_feature (4)..(4): n is a, c, g, or t
  misc_feature (128)..(128): n is a, c, g, or t
  misc_feature (130)..(130): n is a, c, g, or t
  misc_feature (172)..(172): n is a, c, g, or t
  misc_feature (792)..(792): n is a, c, g, or t
  misc_feature (795)..(795): n is a, c, g, or t
  misc_feature (806)..(806): n is a, c, g, or t
  misc_feature (810)..(810): n is a, c, g, or t
  misc_feature (866)..(866): n is a, c, g, or t
  misc_feature (871)..(871): n is a, c, g, or t
  misc_feature (877)..(878): n is a, c, g, or t
  misc_feature (880)..(880): n is a, c, g, or t
  misc_feature (884)..(884): n is a, c, g, or t
  misc_feature (889)..(889): n is a, c, g, or t
  misc_feature (905)..(906): n is a, c, g, or t
  misc_feature (916)..(916): n is a, c, g, or t
  misc_feature (929)..(929): n is a, c, g, or t
  misc_feature (933)..(933): n is a, c, g, or t
  misc_feature (964)..(966): n is a, c, g, or t
  misc_feature (972)..(972): n is a, c, g, or t
  misc_feature (976)..(976): n is a, c, g, or t
  misc_feature (981)..(981): n is a, c, g, or t
  misc_feature (985)..(985): n is a, c, g, or t
  misc_feature (988)..(988): n is a, c, g, or t
  misc_feature (993)..(994): n is a, c, g, or t
  misc_feature (997)..(997): n is a, c, g, or t
  misc_feature (1003)..(1003): n is a, c, g, or t
  misc_feature (1021)..(1021): n is a, c, g, or t
  misc_feature (1027)..(1027): n is a, c, g, or t
  misc_feature (1035)..(1035): n is a, c, g, or t
  misc_feature (1051)..(1051): n is a, c, g, or t
  misc_feature (1054)..(1055): n is a, c, g, or t
  misc_feature (1062)..(1062): n is a, c, g, or t
  misc_feature (1065)..(1066): n is a, c, g, or t
  misc_feature (1069)..(1071): n is a, c, g, or t
  misc_feature (1073)..(1073): n is a, c, g, or t
  misc_feature (1076)..(1076): n is a, c, g, or t
  misc_feature (1086)..(1086): n is a, c, g, or t
  misc_feature (1093)..(1093): n is a, c, g, or t
  misc_feature (1099)..(1099): n is a, c, g, or t
  misc_feature (1102)..(1102): n is a, c, g, or t
  misc_feature (1108)..(1108): n is a, c, g, or t
  misc_feature (1114)..(1114): n is a, c, g, or t
  misc_feature (1116)..(1116): n is a, c, g, or t
  misc_feature (1121)..(1121): n is a, c, g, or t
  misc_feature (1143)..(1143): n is a, c, g, or t
  misc_feature (1153)..(1153): n is a, c, g, or t
  misc_feature (1161)..(1161): n is a, c, g, or t
  misc_feature (1164)..(1166): n is a, c, g, or t
  misc_feature (1172)..(1172): n is a, c, g, or t
  misc_feature (1176)..(1176): n is a, c, g, or t
  misc_feature (1190)..(1190): n is a, c, g, or t
  misc_feature (1195)..(1195): n is a, c, g, or t
  misc_feature (1198)..(1198): n is a, c, g, or t
  misc_feature (1201)..(1201): n is a, c, g, or t
  misc_feature (1203)..(1203): n is a, c, g, or t
  misc_feature (1214)..(1214): n is a, c, g, or t
  misc_feature (1216)..(1217): n is a, c, g, or t
  misc_feature (1220)..(1223): n is a, c, g, or t
  misc_feature (1232)..(1232): n is a, c, g, or t
  misc_feature (1238)..(1238): n is a, c, g, or t
  misc_feature (1240)..(1241): n is a, c, g, or t
  misc_feature (1261)..(1261): n is a, c, g, or t
  misc_feature (1271)..(1271): n is a, c, g, or t
  misc_feature (1285)..(1285): n is a, c, g, or t
  misc_feature (1288)..(1288): n is a, c, g, or t
  misc_feature (1290)..(1290): n is a, c, g, or t
  misc_feature (1292)..(1292): n is a, c, g, or t
  misc_feature (1294)..(1294): n is a, c, g, or t
  misc_feature (1307)..(1309): n is a, c, g, or t
  misc_feature (1312)..(1313): n is a, c, g, or t
  misc_feature (1318)..(1319): n is a, c, g, or t
  misc_feature (1322)..(1323): n is a, c, g, or t
  misc_feature (1329)..(1329): n is a, c, g, or t
  misc_feature (1335)..(1335): n is a, c, g, or t
  misc_feature (1339)..(1339): n is a, c, g, or t
  misc_feature (1343)..(1343): n is a, c, g, or t
  misc_feature (1345)..(1345): n is a, c, g, or t
  misc_feature (1357)..(1357): n is a, c, g, or t
  misc_feature (1363)..(1363): n is a, c, g, or t
  misc_feature (1366)..(1366): n is a, c, g, or t
  misc_feature (1370)..(1373): n is a, c, g, or t
  misc_feature (1376)..(1376): n is a, c, g, or t
  misc_feature (1378)..(1378): n is a, c, g, or t
  misc_feature (1383)..(1384): n is a, c, g, or t
  misc_feature (1392)..(1394): n is a, c, g, or t
  misc_feature (1400)..(1400): n is a, c, g, or t
  misc_feature (1411)..(1411): n is a, c, g, or t
  misc_feature (1413)..(1414): n is a, c, g, or t
  misc_feature (1419)..(1420): n is a, c, g, or t
  misc_feature (1425)..(1425): n is a, c, g, or t
ntanagaaattactatgagaggatcgcatcaccatcaccatcacggatcctatttaggtgacactatagaatcgtcgacccacgcgtccgttcaggatcagagtgaggaagaggaggaggaagaaaancntcctcctaagcctgccaagccggagaagaatcggatcaatanggccgtatctgaggaacagcagcctgcactcaagggcaaaaagggaaaggaagagaagtcaaaagggaaggctaagcctcaaaataaattcgctgctctggacaatgaagaggaggataaagaagaagaaattataaaggaaaaggagcctcccaaacaagggaaggagaaggccaagaaggcagagcagggttcagaggaagaaggagaaggggaagaagaggaggaggaaggaggagagtctaaggcagatgatccctatgctcatcttagcaaaaaggagaagaaaaagctgaaaaaacagatggagtatgagcgccaagtggcttcattaaaagcagccaatgcagctgaaaatgacttctccgtgtcccaggcggagatgtcctcccgccaagccatgttagaaaatgcatctgacatcaagctggagaagttcagcatctccgctcatggcaaggagctgttcgtcaatgcagacctgtacattgtagccggccgccgctacgggctggtaggacccaatggcaagggcaagaccacactcctcaagcacattgccaaccgagccctgagcatccctcccaacattgatgtgttgctgtgtgagcaggaggtgntancagatgagacnccancagtccaggctgttcttcgagctgacaccaagcgattgaagctgctggaagaggancgccntcttcnngnacanctggnacaaggggatgacacnnctgctgaaanggctaaaaaaagntgtntgaagaatttgcgggccacttggggcgggcnnnctgcanaggnccaancacnggnggatnntgncttggnctgggctttgacccctgnaatgcnaaatccanccccccccaaaatttntcnnggggctnggnnatnnntntcnccctggcccngggcctnttcttngancccccntcttantnctgantaacccccaacccctgaacctnacctgttttngggtttantannncctccnggcnggggaaaacctttnttttnttnccntnacaggcttctngnnatnnnnccttaatcncccccncnntcccccggtccttttttggnttttttgccntcaaatttcccccnacnanantnttaatttttaacnnnaannctttnnctnncggggntccccncttngaanantatccctttttnctaatnccnaacnnnngtncnccttnncccctaannntttttncccccccccgntnngtttnntaaantttt

SEQ ID NO: 524 - DNA, 1356 bp, Homo Sapiens
  misc_feature (876)..(876): n is a, c, g, or t
  misc_feature (906)..(906): n is a, c, g, or t
  misc_feature (920)..(921): n is a, c, g, or t
  misc_feature (925)..(925): n is a, c, g, or t
  misc_feature (927)..(927): n is a, c, g, or t
  misc_feature (932)..(932): n is a, c, g, or t
  misc_feature (952)..(952): n is a, c, g, or t
  misc_feature (955)..(955): n is a, c, g, or t
  misc_feature (957)..(957): n is a, c, g, or t
  misc_feature (1013)..(1013): n is a, c, g, or t
  misc_feature (1020)..(1020): n is a, c, g, or t
  misc_feature (1029)..(1029): n is a, c, g, or t
  misc_feature (1032)..(1032): n is a, c, g, or t
  misc_feature (1048)..(1049): n is a, c, g, or t
  misc_feature (1060)..(1060): n is a, c, g, or t
  misc_feature (1068)..(1068): n is a, c, g, or t
  misc_feature (1070)..(1070): n is a, c, g, or t
  misc_feature (1087)..(1087): n is a, c, g, or t
  misc_feature (1096)..(1096): n is a, c, g, or t
  misc_feature (1105)..(1105): n is a, c, g, or t
  misc_feature (1111)..(1111): n is a, c, g, or t
  misc_feature (1124)..(1125): n is a, c, g, or t
  misc_feature (1136)..(1136): n is a, c, g, or t
  misc_feature (1143)..(1143): n is a, c, g, or t
  misc_feature (1147)..(1148): n is a, c, g, or t
  misc_feature (1157)..(1158): n is a, c, g, or t
  misc_feature (1163)..(1163): n is a, c, g, or t
  misc_feature (1170)..(1170): n is a, c, g, or t
  misc_feature (1175)..(1175): n is a, c, g, or t
  misc_feature (1184)..(1184): n is a, c, g, or t
  misc_feature (1190)..(1190): n is a, c, g, or t
  misc_feature (1192)..(1193): n is a, c, g, or t
  misc_feature (1195)..(1195): n is a, c, g, or t
  misc_feature (1223)..(1223): n is a, c, g, or t
  misc_feature (1225)..(1225): n is a, c, g, or t
  misc_feature (1234)..(1234): n is a, c, g, or t
  misc_feature (1238)..(1238): n is a, c, g, or t
  misc_feature (1247)..(1247): n is a, c, g, or t
  misc_feature (1254)..(1255): n is a, c, g, or t
  misc_feature (1258)..(1258): n is a, c, g, or t
  misc_feature (1262)..(1267): n is a, c, g, or t
  misc_feature (1271)..(1271): n is a, c, g, or t
  misc_feature (1273)..(1273): n is a, c, g, or t
  misc_feature (1278)..(1279): n is a, c, g, or t
  misc_feature (1282)..(1282): n is a, c, g, or t
  misc_feature (1288)..(1288): n is a, c, g, or t
  misc_feature (1300)..(1300): n is a, c, g, or t
  misc_feature (1305)..(1305): n is a, c, g, or t
  misc_feature (1310)..(1310): n is a, c, g, or t
  misc_feature (1330)..(1331): n is a, c, g, or t
  misc_feature (1333)..(1334): n is a, c, g, or t
  misc_feature (1337)..(1337): n is a, c, g, or t
  misc_feature (1340)..(1344): n is a, c, g, or t
  misc_feature (1347)..(1348): n is a, c, g, or t
  misc_feature (1350)..(1353): n is a, c, g, or t
  misc_feature (1356)..(1356): n is a, c, g, or t
gagaaattactatgagaggatcgcatcaccatcaccatcacggatcctatttaggtgacactatagaatcgtcgacccacgcgtccgcagggtctccggtaggggaaggcactggatcgcctcccaagtggcagattggtgagcaggaatttgaagccctcatgcggatgctcgataatctgggctacagaactggctacccttatcgataccctgctctgagagagaagtctaaaaaatacagcgatgtggaggttcctgctagtgtcacaggttactcctttgctagtgacggtgattcgggcacttgctccccactcagacacagttttcagaagcagcagcgggagaagacaagatggctgaactctggccggggcgacgaagcttccgaggaagggcagaatggaagcagtcccaagtcgaagactaagtggactaaagaggatggacatagaacttccacctctgctgtccctaacctgtttgttccattgaacactaacccaaaagaggtccaggagatgaggaacaagatccgagagcagaatttacaggacattaagacggctggccctcagtcccaggttttgtgtggtgtagtgatggacaggagcctcgtccaggatgcacctctctctgactgtacggaaactatcgaagggctcgagcttacagagcagacctttagtcccgctaaatctctctcttttagaaagggagagctggtgacggcctccaaggccatcattgaaaaggagtaccagccccacgtcattgtgagcaccacgggccccaaccccttcaccacactcacagaccgtgagctggaggagtaccgcagggaggtggagaggaagcaaaagggctctgaanaaaatctggacgaggctagagaaccgaaangaaaagagtcctcnnaacnancctgnggttcccccacccgcctccnagnantcccatcaagctggaagaaccaggaaacggatgccctaaaaaagtacctgttaccntaacctngtgccgganccnaatactggaaaagaanntgatgctgccncctttaancnaactccccccgaatttntcccctgangaaacctcnaaaaancccggcttcccannttaaaaaaggngaaaaancccnnaacccccannccccntggaggnccctnatgggggcngccccnanncncccccaaacccaccccgggggtgaaaangngcccccccntttnaagaggggnccccccnnaancctnnnnnnaggntntcccnnaantccccncaaaaaaaaaanttccnccccncttttaaaaaaaaaaaaaanncnnaanccnnnnnaanntnnnnggn

SEQ ID NO: 525 - DNA, 1425 bp, Homo Sapiens
  misc_feature (911)..(911): n is a, c, g, or t
  misc_feature (931)..(931): n is a, c, g, or t
  misc_feature (943)..(943): n is a, c, g, or t
  misc_feature (970)..(970): n is a, c, g, or t
  misc_feature (975)..(975): n is a, c, g, or t
  misc_feature (977)..(977): n is a, c, g, or t
  misc_feature (982)..(982): n is a, c, g, or t
  misc_feature (998)..(998): n is a, c, g, or t
  misc_feature (1000)..(1000): n is a, c, g, or t
  misc_feature (1005)..(1006): n is a, c, g, or t
  misc_feature (1008)..(1008): n is a, c, g, or t
  misc_feature (1010)..(1010): n is a, c, g, or t
  misc_feature (1027)..(1027): n is a, c, g, or t
  misc_feature (1035)..(1035): n is a, c, g, or t
  misc_feature (1037)..(1037): n is a, c, g, or t
  misc_feature (1067)..(1067): n is a, c, g, or t
  misc_feature (1076)..(1076): n is a, c, g, or t
  misc_feature (1085)..(1085): n is a, c, g, or t
  misc_feature (1092)..(1092): n is a, c, g, or t
  misc_feature (1116)..(1116): n is a, c, g, or t
  misc_feature (1120)..(1120): n is a, c, g, or t
  misc_feature (1126)..(1126): n is a, c, g, or t
  misc_feature (1134)..(1134): n is a, c, g, or t
  misc_feature (1142)..(1142): n is a, c, g, or t
  misc_feature (1145)..(1145): n is a, c, g, or t
  misc_feature (1150)..(1150): n is a, c, g, or t
  misc_feature (1171)..(1171): n is a, c, g, or t
  misc_feature (1184)..(1184): n is a, c, g, or t
  misc_feature (1190)..(1193): n is a, c, g, or t
  misc_feature (1195)..(1195): n is a, c, g, or t
  misc_feature (1199)..(1199): n is a, c, g, or t
  misc_feature (1223)..(1223): n is a, c, g, or t
  misc_feature (1225)..(1225): n is a, c, g, or t
  misc_feature (1228)..(1228): n is a, c, g, or t
  misc_feature (1230)..(1230): n is a, c, g, or t
  misc_feature (1236)..(1237): n is a, c, g, or t
  misc_feature (1253)..(1253): n is a, c, g, or t
  misc_feature (1257)..(1257): n is a, c, g, or t
  misc_feature (1282)..(1282): n is a, c, g, or t
  misc_feature (1284)..(1284): n is a, c, g, or t
  misc_feature (1290)..(1290): n is a, c, g, or t
  misc_feature (1298)..(1298): n is a, c, g, or t
  misc_feature (1300)..(1300): n is a, c, g, or t
  misc_feature (1308)..(1310): n is a, c, g, or t
  misc_feature (1314)..(1315): n is a, c, g, or t
  misc_feature (1318)..(1318): n is a, c, g, or t
  misc_feature (1321)..(1321): n is a, c, g, or t
  misc_feature (1324)..(1324): n is a, c, g, or t
  misc_feature (1341)..(1341): n is a, c, g, or t
  misc_feature (1359)..(1360): n is a, c, g, or t
  misc_feature (1363)..(1363): n is a, c, g, or t
  misc_feature (1365)..(1365): n is a, c, g, or t
  misc_feature (1367)..(1367): n is a, c, g, or t
  misc_feature (1370)..(1371): n is a, c, g, or t
  misc_feature (1379)..(1379): n is a, c, g, or t
  misc_feature (1384)..(1384): n is a, c, g, or t
  misc_feature (1402)..(1402): n is a, c, g, or t
  misc_feature (1405)..(1405): n is a, c, g, or t
  misc_feature (1415)..(1415): n is a, c, g, or t
  misc_feature (1425)..(1425): n is a, c, g, or t
tagagaaattactatgagaggatcgcatcaccatcaccatcacggatcctatttaggtgacactatagaatcgtcgacccacgcgtccgagaagataagagtcactcaagggaaaggattaatgccagatggtaccagcagatttacttgcaaaggaaagacaattttgcattacatgggaaccagcacattttctgaatacacagttgtggctgatatctctgttgctaaaatagatcctttagcacctttggataaagtctgccttctaggttgtggcatttcaaccggttatggtgctgctgtgaacactgccaagttggagcctggctctgtttgtgccgtctttggtctgggaggagtcggattggcagttatcatgggctgtaaagtggctggtgcttcccggatcattggtgtggacatcaataaagataaatttgcaagggccaaagagtttggagccactgaatgtattaaccctcaggattttagtaaacccatccaggaagtgctcattgagatgaccgatggaggagtggactattcctttgaatgtattggtaatgtgaaggtcatgagagcagcacttgaggcatgtcacaagggctggggcgtcagcgtcgtggttggagtagctgcttcaggtgaagaaattgccactcgtccattccagctggtaacaggtcgcacatggaaaggcactgcctttggaggatggaagagtgtagaaagtgtcccaaagttggtgtctgaatatatgtccaaaaagataaaagttgatgaatttgtgactcacaatctgtcttttgatgaaatcaacaaaagcctttgaactgatgcattctggaaagagcattcgaactgttgtaaagatttaattcaaagaaaaaaataatgtcccatcctgnccgtgatgtgataggagcancttaacaggcanggagaaccgcctccaacctcacagccncgtanancttcncagctactccaaaaanangggtnngngngccattcatgaatctcnataatcangnaaaagaaaattcgtcctgaacctgttttcngaagccccncccaaaaanaattgcnatttttttaaggaaatttttaccntaanaaaagnatttcccnatttgggnggnaaatngcctggtttaagcggcccccntggcccgggttgnccgccnnnnanttcnctcccaaggaaagaaaagaaaccngnccngngggggnntctaaccccaaaaaanaccntaaattttagggtccccccccctgnanaaaaanaacccccncnggaaaatnnnccgnnccnccnctnctgaaaatttttaggangaagggccttttaccccnnccnantnaanngccccccncgggncaaaaaataaacacccgncanaaggaatggnggggggcatn

SEQ ID NO: 526 - DNA, 1200 bp, Homo Sapiens
  misc_feature (645)..(645): n is a, c, g, or t
  misc_feature (708)..(708): n is a, c, g, or t
  misc_feature (713)..(713): n is a, c, g, or t
  misc_feature (751)..(751): n is a, c, g, or t
  misc_feature (761)..(761): n is a, c, g, or t
  misc_feature (775)..(775): n is a, c, g, or t
  misc_feature (779)..(779): n is a, c, g, or t
  misc_feature (805)..(805): n is a, c, g, or t
  misc_feature (812)..(812): n is a, c, g, or t
  misc_feature (822)..(822): n is a, c, g, or t
  misc_feature (841)..(841): n is a, c, g, or t
  misc_feature (853)..(853): n is a, c, g, or t
  misc_feature (856)..(856): n is a, c, g, or t
  misc_feature (866)..(866): n is a, c, g, or t
  misc_feature (868)..(868): n is a, c, g, or t
  misc_feature (870)..(870): n is a, c, g, or t
  misc_feature (882)..(882): n is a, c, g, or t
  misc_feature (888)..(890): n is a, c, g, or t
  misc_feature (892)..(892): n is a, c, g, or t
  misc_feature (906)..(906): n is a, c, g, or t
  misc_feature (910)..(910): n is a, c, g, or t
  misc_feature (914)..(914): n is a, c, g, or t
  misc_feature (923)..(923): n is a, c, g, or t
  misc_feature (929)..(930): n is a, c, g, or t
  misc_feature (935)..(935): n is a, c, g, or t
  misc_feature (938)..(938): n is a, c, g, or t
  misc_feature (946)..(946): n is a, c, g, or t
  misc_feature (963)..(963): n is a, c, g, or t
  misc_feature (970)..(970): n is a, c, g, or t
  misc_feature (972)..(972): n is a, c, g, or t
  misc_feature (974)..(975): n is a, c, g, or t
  misc_feature (980)..(980): n is a, c, g, or t
  misc_feature (988)..(990): n is a, c, g, or t
  misc_feature (994)..(994): n is a, c, g, or t
  misc_feature (1002)..(1002): n is a, c, g, or t
  misc_feature (1007)..(1007): n is a, c, g, or t
  misc_feature (1010)..(1010): n is a, c, g, or t
  misc_feature (1014)..(1014): n is a, c, g, or t
  misc_feature (1016)..(1016): n is a, c, g, or t
  misc_feature (1023)..(1023): n is a, c, g, or t
  misc_feature (1029)..(1029): n is a, c, g, or t
  misc_feature (1032)..(1033): n is a, c, g, or t
  misc_feature (1035)..(1035): n is a, c, g, or t
  misc_feature (1040)..(1040): n is a, c, g, or t
  misc_feature (1042)..(1042): n is a, c, g, or t
  misc_feature (1044)..(1044): n is a, c, g, or t
  misc_feature (1048)..(1049): n is a, c, g, or t
  misc_feature (1062)..(1062): n is a, c, g, or t
  misc_feature (1066)..(1066): n is a, c, g, or t
  misc_feature (1071)..(1071): n is a, c, g, or t
  misc_feature (1076)..(1077): n is a, c, g, or t
  misc_feature (1080)..(1080): n is a, c, g, or t
  misc_feature (1088)..(1088): n is a, c, g, or t
  misc_feature (1090)..(1090): n is a, c, g, or t
  misc_feature (1094)..(1094): n is a, c, g, or t
  misc_feature (1096)..(1097): n is a, c, g, or t
  misc_feature (1099)..(1100): n is a, c, g, or t
  misc_feature (1107)..(1109): n is a, c, g, or t
  misc_feature (1111)..(1111): n is a, c, g, or t
  misc_feature (1114)..(1114): n is a, c, g, or t
  misc_feature (1117)..(1118): n is a, c, g, or t
  misc_feature (1122)..(1122): n is a, c, g, or t
  misc_feature (1125)..(1125): n is a, c, g, or t
  misc_feature (1127)..(1127): n is a, c, g, or t
  misc_feature (1133)..(1133): n is a, c, g, or t
  misc_feature (1140)..(1140): n is a, c, g, or t
  misc_feature (1144)..(1145): n is a, c, g, or t
  misc_feature (1147)..(1148): n is a, c, g, or t
  misc_feature (1153)..(1153): n is a, c, g, or t
  misc_feature (1156)..(1156): n is a, c, g, or t
  misc_feature (1159)..(1160): n is a, c, g, or t
  misc_feature (1168)..(1169): n is a, c, g, or t
  misc_feature (1172)..(1172): n is a, c, g, or t
  misc_feature (1178)..(1178): n is a, c, g, or t
  misc_feature (1180)..(1181): n is a, c, g, or t
  misc_feature (1184)..(1184): n is a, c, g, or t
  misc_feature (1190)..(1191): n is a, c, g, or t
  misc_feature (1200)..(1200): n is a, c, g, or t
aatagagagaattactatgagaggatcgcatcaccatcaccatcacggatcctatttaggtgacactatagaatcgtcgacccacgcgtccgacgagatgtcctacggcttgaacatcgagatgcacaaacaggctgagatcgtcaaaaggctgaacgggatttgtgcccaggtcctgccctacctctcccaagagcaccagcagcaggtcttgggagccattgagagggccaagcaggtcaccgctcccgagctgaactctatcatccgacagcagctccaagcccaccagctgtcccagctgcaggccctggccctgcccttgaccccactacccgtggggctgcagccgccttcgctgccggcggtcagcgcaggcaccggcctcctctcgctgtccgcgctgggttcccaggcccacctctccaaggaagacaagaacgggcacgatggtgacacccaccaggaggatgatggcgagaagtcggattagcagggggccgggacggggaggttgggaggggggacagaggggagacagaggcacggagagaaaggaatgtttagcacaagacacagcggagctcgggattggctaaactcccatagtatttatggtggccgccggcgggggccccagcccancttgcaggccacctctagctttcttcctaccccattcccggcttccctcctcctcccctgcancctgntttaggtggatacctgccctgacatgtgaggcaagctnaggcctggangggtcagatggganaccntgtcccaagggagcaagacctcgcgnaacgtancagccccggnccttcccccgttttgaacntgtgtaaccganagncttgcctggngnanagcccttctcancctggnnncngcatggcccccaangctnactnccccctttnccgttnnttggncanccccaaantctccccccgaacccgnggtcccnangnnagctnccaacctnnnactntgcccaantcacnaantttngnaagtttnaaaaanccnncnattanancnggtnntctccattttccnaaantgggnggccnnaantatcaaantntctnanntnngaaggannngntanggnnggtnaancncaaatnccccccncctnncnnaaaanaangannaaaaaaannggngggctnannttntaaaanntttttcttn

SEQ ID NO: 527 - DNA, 1318 bp, Homo Sapiens
  misc_feature (721)..(721): n is a, c, g, or t
  misc_feature (829)..(829): n is a, c, g, or t
  misc_feature (832)..(832): n is a, c, g, or t
  misc_feature (878)..(878): n is a, c, g, or t
  misc_feature (896)..(897): n is a, c, g, or t
  misc_feature (912)..(912): n is a, c, g, or t
  misc_feature (923)..(923): n is a, c, g, or t
  misc_feature (957)..(957): n is a, c, g, or t
  misc_feature (984)..(984): n is a, c, g, or t
  misc_feature (993)..(993): n is a, c, g, or t
  misc_feature (996)..(997): n is a, c, g, or t
  misc_feature (1002)..(1002): n is a, c, g, or t
  misc_feature (1025)..(1025): n is a, c, g, or t
  misc_feature (1030)..(1030): n is a, c, g, or t
  misc_feature (1032)..(1032): n is a, c, g, or t
  misc_feature (1049)..(1049): n is a, c, g, or t
  misc_feature (1058)..(1058): n is a, c, g, or t
  misc_feature (1060)..(1060): n is a, c, g, or t
  misc_feature (1062)..(1062): n is a, c, g, or t
  misc_feature (1064)..(1064): n is a, c, g, or t
  misc_feature (1070)..(1070): n is a, c, g, or t
  misc_feature (1081)..(1081): n is a, c, g, or t
  misc_feature (1093)..(1093): n is a, c, g, or t
  misc_feature (1103)..(1103): n is a, c, g, or t
  misc_feature (1109)..(1109): n is a, c, g, or t
  misc_feature (1112)..(1112): n is a, c, g, or t
  misc_feature (1118)..(1120): n is a, c, g, or t
  misc_feature (1130)..(1130): n is a, c, g, or t
  misc_feature (1134)..(1134): n is a, c, g, or t
  misc_feature (1137)..(1137): n is a, c, g, or t
  misc_feature (1140)..(1140): n is a, c, g, or t
  misc_feature (1162)..(1162): n is a, c, g, or t
  misc_feature (1166)..(1166): n is a, c, g, or t
  misc_feature (1168)..(1169): n is a, c, g, or t
  misc_feature (1173)..(1173): n is a, c, g, or t
  misc_feature (1177)..(1178): n is a, c, g, or t
  misc_feature (1181)..(1181): n is a, c, g, or t
  misc_feature (1183)..(1183): n is a, c, g, or t
  misc_feature (1186)..(1186): n is a, c, g, or t
  misc_feature (1192)..(1192): n is a, c, g, or t
  misc_feature (1200)..(1200): n is a, c, g, or t
  misc_feature (1213)..(1213): n is a, c, g, or t
  misc_feature (1215)..(1216): n is a, c, g, or t
  misc_feature (1222)..(1222): n is a, c, g, or t
  misc_feature (1237)..(1238): n is a, c, g, or t
  misc_feature (1241)..(1241): n is a, c, g, or t
  misc_feature (1244)..(1245): n is a, c, g, or t
  misc_feature (1248)..(1250): n is a, c, g, or t
  misc_feature (1252)..(1253): n is a, c, g, or t
  misc_feature (1258)..(1258): n is a, c, g, or t
  misc_feature (1263)..(1263): n is a, c, g, or t
  misc_feature (1270)..(1270): n is a, c, g, or t
  misc_feature (1272)..(1274): n is a, c, g, or t
  misc_feature (1277)..(1277): n is a, c, g, or t
  misc_feature (1289)..(1290): n is a, c, g, or t
  misc_feature (1292)..(1292): n is a, c, g, or t
  misc_feature (1298)..(1299): n is a, c, g, or t
  misc_feature (1309)..(1309): n is a, c, g, or t
  misc_feature (1311)..(1311): n is a, c, g, or t
  misc_feature (1313)..(1313): n is a, c, g, or t
  misc_feature (1315)..(1315): n is a, c, g, or t
  misc_feature (1318)..(1318): n is a, c, g, or t
ttagaggaaaattacttatgaagaggatcgcatcaccatcaccatcacggatcctatttaggtgacactatagaatcgttcgacccacgcgtccggcaccatgccctaccaatatccagcactgaccccggagcagaagaaggagctgtctgacatcgctcaccgcatcgtggcacctggcaagggcatcctggctgcagatgagtccactgggagcattgccaagcggctgcagtccattggcaccgagaacaccgaggagaaccggcgcttctaccgccagctgctgctgacagctgacgaccgcgtgaacccctgcattgggggtgtcatcctcttccatgagacactctaccagaaggcggatgatgggcgtcccttcccccaagttatcaaatccaagggcggtgttgtgggcatcaaggtagacaagggcgtggtccccctggcagggacaaatggcgagactaccacccaagggttggatgggctgtctgagcgctgtgcccagtacaagaaggacggagctgacttcgccaagtggcgttgtgtgctgaagattggggaacacaccccctcagccctcgccatcatggaaaatgccaatgttctggcccgttatgccagtatctgccagcagaatggcattgtgcccatcgtggagcctgagatcctccctgatggggaccatgacttgaagcgctgccagtatgtgaccganaaggtgctggctgctgtctacaaggctctgagtgaccaccacatctacctggaaaggcacctttgctgaagcccaacatggtcaccccaggccatgcttgcaactcanaanttttctcatgaaggagattgccatggcgaccgtcacaaccgctgcnccgcacagtgcccccccnnctgtcactgggaatnacctttcctgntctggaagcccaaaatgaggaggaaggcgttccnatcaaccttcaatgccatttaaacaanttgcccccntgnntaaancccctggggccctgaaccctttntcctnangggccgaaaaccctggnaaggccctntngncnttgaangccctggggcngggaaaaaaagnaaaaaccttnaaaggnctngccccnnngaagaaattntttnaangcnaacccttggcccaaaacctttntttntnnaagnaaannaantnccnaaacgnttaaggtngggccttctttcnannaaattnccttttttttttctnnaanaannccnnnannaaagnaaggntttttcnannnttnccccacaaaatnnangggccnnggcccccttncnantnttn

SEQ ID NO: 528 - DNA, 1187 bp, Homo Sapiens
  misc_feature (779)..(779): n is a, c, g, or t
  misc_feature (893)..(893): n is a, c, g, or t
  misc_feature (916)..(916): n is a, c, g, or t
  misc_feature (922)..(922): n is a, c, g, or t
  misc_feature (935)..(935): n is a, c, g, or t
  misc_feature (940)..(940): n is a, c, g, or t
  misc_feature (943)..(943): n is a, c, g, or t
  misc_feature (965)..(965): n is a, c, g, or t
  misc_feature (971)..(971): n is a, c, g, or t
  misc_feature (982)..(982): n is a, c, g, or t
  misc_feature (998)..(998): n is a, c, g, or t
  misc_feature (1007)..(1007): n is a, c, g, or t
  misc_feature (1015)..(1015): n is a, c, g, or t
  misc_feature (1017)..(1017): n is a, c, g, or t
  misc_feature (1019)..(1019): n is a, c, g, or t
  misc_feature (1052)..(1052): n is a, c, g, or t
  misc_feature (1057)..(1057): n is a, c, g, or t
  misc_feature (1083)..(1083): n is a, c, g, or t
  misc_feature (1095)..(1095): n is a, c, g, or t
  misc_feature (1101)..(1101): n is a, c, g, or t
  misc_feature (1127)..(1127): n is a, c, g, or t
  misc_feature (1129)..(1130): n is a, c, g, or t
  misc_feature (1133)..(1133): n is a, c, g, or t
  misc_feature (1135)..(1135): n is a, c, g, or t
  misc_feature (1148)..(1148): n is a, c, g, or t
  misc_feature (1150)..(1150): n is a, c, g, or t
  misc_feature (1158)..(1159): n is a, c, g, or t
  misc_feature (1165)..(1165): n is a, c, g, or t
  misc_feature (1177)..(1177): n is a, c, g, or t
  misc_feature (1186)..(1187): n is a, c, g, or t
aattagagaaattactatgagaggatcgcatcaccatcaccatcacggatcctatttaggtgacactatagaatcgtcgacccacgcgtccggaaaggatctgctactgcagctggaggatgagacactaaagctagtggagccacagagccaggcactgctgcacgcccaacccatcatcagcatccgcgtgtggggcgtcgggcgggacagtggaagagagagggactttgcctacgtagctcgtgataagctgacccagatgctcaagtgccacgtgtttcgctgtgaggcacctgccaagaacatcgccaccagcctgcatgagatctgctctaagatcatggccgaacggcgtaatgcccgctgcttggtaaatggactctccctggaccactctaaacttgtggatgtccctttccaagtggaattcccagcgcctaagaatgagttggtccagaagttccaagtctattacctggggaatgtacctgttgctaaacctgttggggtagatgtgattaatggggccctcgagtcagtcctgtcctccagcagccgtgaacaatggaccccaagtcatgtcagtgtggcccctgctaccctcaccatcttgcaccagcagacagaggcagtgctgggagagtgtcgggtgcgtttcctctccttcctggccgtgggcagagatgtccacacgtttgcattcatcatggctgccggcccagcctccttctgctgccacatgttctggtgcgagcccaatgctgccagcctctcanaggctgtgcaggctgcgtgcatgcttcgctaccagaagtgtctggatgcccgttcccaggcctccacctcctgcctcccagcaccccctgctgagtctgtggcacggcgtgtanggtggactgtccgcaggggtgtncagtcnctgtggggctccntgaanccnaacggctgggggcccatacccnatgaanaagcccccacnttccctccacctgctngtgttgggnccccaggnantnaagggtgtgggtcagggagggtctaaagctatnctagnctcagcctcccaaaatgccccccccnaaaactacggtncctgcntagaactggggaggaaaatttatccntnnagnantgaaacctggggngntaaaaaannaaaagnaaaaggcccccngtttttccnn

SEQ ID NO: 529 - DNA, 1407 bp, Homo Sapiens
  misc_feature (767)..(767): n is a, c, g, or t
  misc_feature (839)..(839): n is a, c, g, or t
  misc_feature (859)..(859): n is a, c, g, or t
  misc_feature (873)..(873): n is a, c, g, or t
  misc_feature (878)..(878): n is a, c, g, or t
  misc_feature (884)..(884): n is a, c, g, or t
  misc_feature (890)..(890): n is a, c, g, or t
  misc_feature (905)..(905): n is a, c, g, or t
  misc_feature (941)..(941): n is a, c, g, or t
  misc_feature (944)..(945): n is a, c, g, or t
  misc_feature (951)..(951): n is a, c, g, or t
  misc_feature (958)..(958): n is a, c, g, or t
  misc_feature (974)..(974): n is a, c, g, or t
  misc_feature (976)..(976): n is a, c, g, or t
  misc_feature (986)..(986): n is a, c, g, or t
  misc_feature (991)..(992): n is a, c, g, or t
  misc_feature (1008)..(1008): n is a, c, g, or t
  misc_feature (1013)..(1013): n is a, c, g, or t
  misc_feature (1019)..(1020): n is a, c, g, or t
  misc_feature (1036)..(1037): n is a, c, g, or t
  misc_feature (1039)..(1039): n is a, c, g, or t
  misc_feature (1041)..(1041): n is a, c, g, or t
  misc_feature (1044)..(1044): n is a, c, g, or t
  misc_feature (1049)..(1049): n is a, c, g, or t
  misc_feature (1058)..(1058): n is a, c, g, or t
  misc_feature (1077)..(1077): n is a, c, g, or t
  misc_feature (1102)..(1103): n is a, c, g, or t
  misc_feature (1116)..(1116): n is a, c, g, or t
  misc_feature (1118)..(1118): n is a, c, g, or t
  misc_feature (1125)..(1125): n is a, c, g, or t
  misc_feature (1135)..(1138): n is a, c, g, or t
  misc_feature (1142)..(1142): n is a, c, g, or t
  misc_feature (1144)..(1144): n is a, c, g, or t
  misc_feature (1149)..(1149): n is a, c, g, or t
  misc_feature (1166)..(1166): n is a, c, g, or t
  misc_feature (1169)..(1169): n is a, c, g, or t
  misc_feature (1175)..(1175): n is a, c, g, or t
  misc_feature (1192)..(1192): n is a, c, g, or t
  misc_feature (1196)..(1196): n is a, c, g, or t
  misc_feature (1204)..(1204): n is a, c, g, or t
  misc_feature (1207)..(1207): n is a, c, g, or t
  misc_feature (1216)..(1216): n is a, c, g, or t
  misc_feature (1221)..(1221): n is a, c, g, or t
  misc_feature (1228)..(1228): n is a, c, g, or t
  misc_feature (1256)..(1259): n is a, c, g, or t
  misc_feature (1271)..(1271): n is a, c, g, or t
  misc_feature (1276)..(1276): n is a, c, g, or t
  misc_feature (1281)..(1281): n is a, c, g, or t
  misc_feature (1285)..(1286): n is a, c, g, or t
  misc_feature (1290)..(1290): n is a, c, g, or t
  misc_feature (1292)..(1292): n is a, c, g, or t
  misc_feature (1300)..(1301): n is a, c, g, or t
  misc_feature (1318)..(1318): n is a, c, g, or t
  misc_feature (1327)..(1327): n is a, c, g, or t
  misc_feature (1329)..(1329): n is a, c, g, or t
  misc_feature (1332)..(1332): n is a, c, g, or t
  misc_feature (1340)..(1340): n is a, c, g, or t
  misc_feature (1356)..(1356): n is a, c, g, or t
  misc_feature (1361)..(1361): n is a, c, g, or t
  misc_feature (1372)..(1372): n is a, c, g, or t
  misc_feature (1388)..(1388): n is a, c, g, or t
  misc_feature (1391)..(1391): n is a, c, g, or t
  misc_feature (1395)..(1395): n is a, c, g, or t
  misc_feature (1398)..(1399): n is a, c, g, or t
  misc_feature (1403)..(1403): n is a, c, g, or t
caatagagagattaactatgagaggatcgcatcaccatcaccatcacggatcctatttaggtgacactatagaatcgtcgacccgtacgcctgcggcattaattactgcgcttaatcagcaaggctatcagctggggttattctcatcagatggctttaccagcccgctgtatcgccaggcattgttgtcagatttctcgatgccgagcgtacgcacccaatccgacgagcagaccgccacgcagtggatcaactggctgggacgctacgcacaagaagataaccgctggttctcgtgggtttctttcaatggtactaacattgacgacagcaatcagcaggcatttgcacggaaatatagccgggcggcaggcaatgtcgatgaccagatcaaccgcgtgctcaatgcactgcgtgattctggcaaactggacaatacggtggtgattatcactgccggtcggggtattccactgagcgaagaggaagaaacctttgactggtcccacggtcatctgcaggtgccattagtgattcactggccaggcacgccggcgcagcgtattaatgctctgactgatcataccgatctgatgacgacgctgatgcaacgcctgctacatgtcagcacacctgccagcgaatattcgcaaggtcaggatttgttcaaccctcaacgccgtcattactgggttaccgcagcggataacgatacgctggcaattaccaccccgaaaaaagacgctggtactgaaacaataacggtnaaatacccgcacttacaacttacgtggtgaaagagtgaaagatgaaaaaccacagttaagtttgttattgcnaagtgctgacagacgagaanccgtttttatccgntaacntgattnaattanaaatcagtttaccgnaaatatccttacttggcaatcggtggggaaaaacgnaannattaancaccccngagtccggcacgtaancncaaccctggnaaccnncccgtccattggggtngtccnggggtnngaaaggttcaaatccnncncntgnccaancaaaaaatnccaaaaaaaaaccaacccntacggggtgggttttttttaaatcnngcaattaaattcnanaaaaaanacccgggaannnntccnancccgnttttatttttttgtttnacnaaaacnctcccaaaccccccccncccnaaaatatnccngggggaaantcacnccccggnccccttttccctaaacgaaagaaaaaannnnccccttaacccncgggnaaaanaaanncctntnaccccccnnaaaacacccctggtctnaccccccananatnaaaatttncccccccccataactntcccncggaaaaacanggatattccaaaaacnggncctnttnnccanggtt

SEQ ID NO: 530 - DNA, 1399 bp, Homo Sapiens
  misc_feature (880)..(880): n is a, c, g, or t
  misc_feature (910)..(910): n is a, c, g, or t
  misc_feature (922)..(922): n is a, c, g, or t
  misc_feature (945)..(945): n is a, c, g, or t
  misc_feature (952)..(952): n is a, c, g, or t
  misc_feature (959)..(959): n is a, c, g, or t
  misc_feature (972)..(972): n is a, c, g, or t
  misc_feature (976)..(976): n is a, c, g, or t
  misc_feature (993)..(993): n is a, c, g, or t
  misc_feature (1008)..(1008): n is a, c, g, or t
  misc_feature (1013)..(1013): n is a, c, g, or t
  misc_feature (1016)..(1017): n is a, c, g, or t
  misc_feature (1025)..(1026): n is a, c, g, or t
  misc_feature (1035)..(1035): n is a, c, g, or t
  misc_feature (1045)..(1047): n is a, c, g, or t
  misc_feature (1058)..(1058): n is a, c, g, or t
  misc_feature (1062)..(1062): n is a, c, g, or t
  misc_feature (1064)..(1064): n is a, c, g, or t
  misc_feature (1077)..(1077): n is a, c, g, or t
  misc_feature (1084)..(1084): n is a, c, g, or t
  misc_feature (1089)..(1089): n is a, c, g, or t
  misc_feature (1091)..(1093): n is a, c, g, or t
  misc_feature (1099)..(1099): n is a, c, g, or t
  misc_feature (1104)..(1104): n is a, c, g, or t
  misc_feature (1113)..(1113): n is a, c, g, or t
  misc_feature (1115)..(1115): n is a, c, g, or t
  misc_feature (1124)..(1125): n is a, c, g, or t
  misc_feature (1129)..(1131): n is a, c, g, or t
  misc_feature (1140)..(1140): n is a, c, g, or t
  misc_feature (1142)..(1142): n is a, c, g, or t
  misc_feature (1149)..(1151): n is a, c, g, or t
  misc_feature (1158)..(1158): n is a, c, g, or t
  misc_feature (1164)..(1164): n is a, c, g, or t
  misc_feature (1168)..(1168): n is a, c, g, or t
  misc_feature (1171)..(1171): n is a, c, g, or t
  misc_feature (1175)..(1175): n is a, c, g, or t
  misc_feature (1177)..(1177): n is a, c, g, or t
  misc_feature (1183)..(1183): n is a, c, g, or t
  misc_feature (1186)..(1187): n is a, c, g, or t
  misc_feature (1190)..(1192): n is a, c, g, or t
  misc_feature (1196)..(1196): n is a, c, g, or t
  misc_feature (1199)..(1200): n is a, c, g, or t
  misc_feature (1208)..(1208): n is a, c, g, or t
  misc_feature (1214)..(1215): n is a, c, g, or t
  misc_feature (1218)..(1218): n is a, c, g, or t
  misc_feature (1228)..(1228): n is a, c, g, or t
  misc_feature (1235)..(1237): n is a, c, g, or t
  misc_feature (1241)..(1241): n is a, c, g, or t
  misc_feature (1244)..(1245): n is a, c, g, or t
  misc_feature (1247)..(1247): n is a, c, g, or t
  misc_feature (1250)..(1250): n is a, c, g, or t
  misc_feature (1252)..(1253): n is a, c, g, or t
  misc_feature (1263)..(1268): n is a, c, g, or t
  misc_feature (1272)..(1272): n is a, c, g, or t
  misc_feature (1274)..(1278): n is a, c, g, or t
  misc_feature (1283)..(1286): n is a, c, g, or t
  misc_feature (1289)..(1291): n is a, c, g, or t
  misc_feature (1295)..(1295): n is a, c, g, or t
  misc_feature (1302)..(1303): n is a, c, g, or t
  misc_feature (1306)..(1306): n is a, c, g, or t
  misc_feature (1312)..(1312): n is a, c, g, or t
  misc_feature (1326)..(1326): n is a, c, g, or t
  misc_feature (1329)..(1331): n is a, c, g, or t
  misc_feature (1334)..(1334): n is a, c, g, or t
  misc_feature (1337)..(1340): n is a, c, g, or t
  misc_feature (1349)..(1350): n is a, c, g, or t
  misc_feature (1353)..(1357): n is a, c, g, or t
  misc_feature (1366)..(1366): n is a, c, g, or t
  misc_feature (1371)..(1376): n is a, c, g, or t
  misc_feature (1381)..(1382): n is a, c, g, or t
  misc_feature (1384)..(1386): n is a, c, g, or t
  misc_feature (1398)..(1399): n is a, c, g, or t
tagaggaaattactatgagaggatcgcatcaccatcaccatcacggatcctatttaggtgacactatagaatcgtcgacccacgcgtccggaagaaaattggaggaatctgcttcatttgaatctctttctccatcatctagaccagcttctcccactaggtcccaggcacaaactccagttttaagtccttcccttcctgatatgtctctatccacacattcgtctgttcaggctggtggatggcgaaaactcccacctaatctcagtcccactatagagtataatgatggaagaccagcaaagcgccatgatattgcacggtctcattctgaaagtccttctagacttccaatcaataggtcaggaacctggaaacgtgagcacagcaaacattcatcatcccttcctcgagtaagcacttggagaagaactggaagttcatcttcaattctttctgcttcatcagaatccagtgaaaaagcaaaaagtgaggatgaaaaacatgtgaactctatttcaggaaccaaacaaagtaaagaaaaccaagtatccgcaaaaggaacatggagaaaaataaaagaaaatgaattttctcccacaaatagtacttctcagaccgtttcctcaggtgctacaaatggtgctgaatcaaagactctaatttatcaaatggcacctgctgtttctaaaacagaggatgtttgggtgagaattgaggactgtcccattaacaatcctagatctggaagatctcccacaggtaatactcccccggtgattgacagtgtttcagaaaaggcaaatccaaacattaaagattcaaaagataatcaggcaaaacaaaatgtgggtaatggcagtgttcccatgcgtaccgngggtttggaaaatcgcctgaactcctttantcaggggggagncccctgaccaaaaaggaactganataaaanccagganaaaataatcctgntccntgtatcaaaaaactaanggaaagttctaaagnggaanggnncccattcnnttctagcanctcagcaaannnagttcccctangggnanggtgccgccaaanggactcntttantnnnacccanccccngaaaaaccncncaaaaaaanntttnnnctgggcatntnaaatccnnntccgggnaaaacncccnaanaacngntttccnaannggnnncccnaannccggggancccaannccnaagccccttngggctannntggnaanngnttnannggggaaaggnnnnnnaaantnnnnnttttnnnnggnnnaaanttttttnnaanaatttnaaaagaaaattttnaannnttnttnnnnaggtttttnngannnnnaaaaaattnccccnnnnnntgggnncnnngggaaaaaaaann

SEQ ID NO: 531 - DNA, 1380 bp, Homo Sapiens
  misc_feature (859)..(859): n is a, c, g, or t
  misc_feature (864)..(864): n is a, c, g, or t
  misc_feature (867)..(867): n is a, c, g, or t
  misc_feature (901)..(901): n is a, c, g, or t
  misc_feature (938)..(938): n is a, c, g, or t
  misc_feature (979)..(979): n is a, c, g, or t
  misc_feature (987)..(987): n is a, c, g, or t
  misc_feature (999)..(999): n is a, c, g, or t
  misc_feature (1002)..(1002): n is a, c, g, or t
  misc_feature (1029)..(1029): n is a, c, g, or t
  misc_feature (1031)..(1031): n is a, c, g, or t
  misc_feature (1036)..(1036): n is a, c, g, or t
  misc_feature (1038)..(1039): n is a, c, g, or t
  misc_feature (1062)..(1063): n is a, c, g, or t
  misc_feature (1082)..(1082): n is a, c, g, or t
  misc_feature (1087)..(1087): n is a, c, g, or t
  misc_feature (1090)..(1090): n is a, c, g, or t
  misc_feature (1095)..(1095): n is a, c, g, or t
  misc_feature (1101)..(1101): n is a, c, g, or t
  misc_feature (1105)..(1105): n is a, c, g, or t
  misc_feature (1126)..(1126): n is a, c, g, or t
  misc_feature (1141)..(1141): n is a, c, g, or t
  misc_feature (1166)..(1166): n is a, c, g, or t
  misc_feature (1173)..(1173): n is a, c, g, or t
  misc_feature (1179)..(1180): n is a, c, g, or t
  misc_feature (1182)..(1182): n is a, c, g, or t
  misc_feature (1185)..(1185): n is a, c, g, or t
  misc_feature (1189)..(1189): n is a, c, g, or t
  misc_feature (1196)..(1196): n is a, c, g, or t
  misc_feature (1216)..(1216): n is a, c, g, or t
  misc_feature (1218)..(1218): n is a, c, g, or t
  misc_feature (1223)..(1223): n is a, c, g, or t
  misc_feature (1226)..(1226): n is a, c, g, or t
  misc_feature (1235)..(1235): n is a, c, g, or t
  misc_feature (1237)..(1237): n is a, c, g, or t
  misc_feature (1242)..(1242): n is a, c, g, or t
  misc_feature (1248)..(1248): n is a, c, g, or t
  misc_feature (1253)..(1253): n is a, c, g, or t
  misc_feature (1265)..(1265): n is a, c, g, or t
  misc_feature (1272)..(1272): n is a, c, g, or t
  misc_feature (1294)..(1294): n is a, c, g, or t
  misc_feature (1329)..(1329): n is a, c, g, or t
  misc_feature (1333)..(1333): n is a, c, g, or t
  misc_feature (1339)..(1341): n is a, c, g, or t
  misc_feature (1344)..(1344): n is a, c, g, or t
  misc_feature (1348)..(1348): n is a, c, g, or t
  misc_feature (1352)..(1352): n is a, c, g, or t
  misc_feature (1355)..(1355): n is a, c, g, or t
  misc_feature (1363)..(1363): n is a, c, g, or t
aatagagaaattactatgagaggatcgcatcaccatcaccatcacggatcctatttaggtgacactatagaatcgtcgacccacgcgtccgcggacgcgtgggcggacgcgtgggatgtgaaggatgtccagtttgcagtggaacaggtgctccaggaggaacactttgatgcaagccatgtggcccttatgggtggttcccatggtggcttcatttcctgccacttgattggtcagtacccagagacctacagggcctgcgtggcccggaaccccgtgatcaacatcgcctccatgttgggctccactgacatccctgactggtgcgtggtggaggctggctttcctttcagcagtgactgcctgccagacctcagcgtgtgggctgagatgctggacaaatcgcccatcagatacatccctcaggtgaagacaccactgttactgatgttgggccaggaggaccggcgtgtgcccttcaagcagggcatggagtattaccgtgccctcaagacccggaatgtgcctgttcggctcctgctctatcccaaaagcacccacgcattatcagaggtggaggtggagtcagacagcttcatgaatgctgtgctctggctacgcacacacttgggcagctgaagccctgccattctgcatgagctgatcagcctgtgccacacttcgctcttgaggagctcaacggtctggcagggcagcaggaggctttctgggctctggactccacggatgcgtgggcagaggaatgtgggctatgtagtcataataaattaggacacagaaaaaaaaaaaaaaaaaagggcggccgctccctatagtgagtcgtattaagcttaattanctganctnggactcctgttgataaatccagtaatgacctcanaactccatctggattttttcaaaacgctcggttgccnccgggcgttttttattggtgaaaatccaagctagcttggcnaaaatttncaggaactaagnaanctaaatggaaaaaaaaaatccctggananacccncnnttgaaatatccccaatggcatcnnaaaaaaaattttgaggcanttcantcnttgcncaaggnaccnaaaaccaaaccgttcacctgnaattacggccttttnaaaaccgtaaaaaaaaaaacccaanttttccngccttnntncantttngcccccngaaaaggcccccccgaattncnaaggnaanaaaaagggnanctggnaaaggnaaagnttccctttttanctttttnagaaaaaaaaaaatttttcccnggaaaaaaccaaaaatttcgggttttaaaaatttnaaangggggnnnggnaaancccnttncccaaggnttaaaaaatttttcccc

SEQ ID NO: 532 - DNA, 1314 bp, Homo Sapiens
  misc_feature (912)..(912): n is a, c, g, or t
  misc_feature (916)..(916): n is a, c, g, or t
  misc_feature (939)..(939): n is a, c, g, or t
  misc_feature (947)..(947): n is a, c, g, or t
  misc_feature (952)..(952): n is a, c, g, or t
  misc_feature (984)..(984): n is a, c, g, or t
  misc_feature (991)..(992): n is a, c, g, or t
  misc_feature (999)..(999): n is a, c, g, or t
  misc_feature (1002)..(1002): n is a, c, g, or t
  misc_feature (1013)..(1013): n is a, c, g, or t
  misc_feature (1031)..(1031): n is a, c, g, or t
  misc_feature (1043)..(1043): n is a, c, g, or t
  misc_feature (1045)..(1045): n is a, c, g, or t
  misc_feature (1047)..(1047): n is a, c, g, or t
  misc_feature (1050)..(1050): n is a, c, g, or t
  misc_feature (1056)..(1056): n is a, c, g, or t
  misc_feature (1060)..(1060): n is a, c, g, or t
  misc_feature (1062)..(1062): n is a, c, g, or t
  misc_feature (1071)..(1071): n is a, c, g, or t
  misc_feature (1078)..(1078): n is a, c, g, or t
  misc_feature (1080)..(1080): n is a, c, g, or t
  misc_feature (1085)..(1085): n is a, c, g, or t
  misc_feature (1092)..(1092): n is a, c, g, or t
  misc_feature (1105)..(1105): n is a, c, g, or t
  misc_feature (1112)..(1112): n is a, c, g, or t
  misc_feature (1119)..(1119): n is a, c, g, or t
  misc_feature (1123)..(1123): n is a, c, g, or t
  misc_feature (1128)..(1128): n is a, c, g, or t
  misc_feature (1137)..(1138): n is a, c, g, or t
  misc_feature (1140)..(1140): n is a, c, g, or t
  misc_feature (1145)..(1145): n is a, c, g, or t
  misc_feature (1157)..(1157): n is a, c, g, or t
  misc_feature (1166)..(1166): n is a, c, g, or t
  misc_feature (1177)..(1177): n is a, c, g, or t
  misc_feature (1180)..(1180): n is a, c, g, or t
  misc_feature (1187)..(1187): n is a, c, g, or t
  misc_feature (1194)..(1194): n is a, c, g, or t
  misc_feature (1198)..(1198): n is a, c, g, or t
  misc_feature (1202)..(1205): n is a, c, g, or t
  misc_feature (1213)..(1213): n is a, c, g, or t
  misc_feature (1218)..(1218): n is a, c, g, or t
  misc_feature (1228)..(1230): n is a, c, g, or t
  misc_feature (1237)..(1239): n is a, c, g, or t
  misc_feature (1242)..(1242): n is a, c, g, or t
  misc_feature (1248)..(1249): n is a, c, g, or t
  misc_feature (1267)..(1267): n is a, c, g, or t
  misc_feature (1280)..(1280): n is a, c, g, or t
  misc_feature (1287)..(1287): n is a, c, g, or t
attagagaaattactatgagaggatcgcatcaccatcaccatcacggatcctatttaggtgacactatagaatcgtcgacccacgcgtccgcccacgcgtccgcaaaaaaaaaaaaaaaaggaaagaaaagaaaaaagaaagcttagctataccgagaactttatttcccatatcccattttgtattagtccattttcacactggaaaaaaaaaataccaaagattgagtaatttataaaatagagaggtttaattgactcacagtttcgcatggctggggaggcctcaggaaacttacaatcatggcagaaggggaagcaggcaccttcttcacaaggcagcaggagggaataagagccagcaggggaaatgccagacacttataaagccctcagatctcatgagaactcaccctttatcacgagaacagcatgggggaaactgccgccatgatccaatcacttccctccctcgacacgtggggattacaatttgcagtgagattttggtggggacacagagccaaaccatatccttttccctgtagggttgtgggttaaaagtaggcagaagaggatggtgcgggagatttgggaagtggaaggaaggtgacatcagtgtttactctttgaaggctgtccagatgagacaaggaggtgatctgacagaggggccacagaggttccagcttgtcctcaccctcccctgtgtcccttgcagcttgtcttcatgaccgctgggcctgctgaccaacagcagcccccccgcctctggatgcttggcagacgaggcagcagccccctagggacccctctacctgtttcccctctgccactccatcttaacagctggacgcatctgactctcatatcagctgtcggtgacttctctcatcctctccacccttccanaacngccatctccccagctccctgganaattgtanaaggnctaattcctataacgcatcccttgccccaaancacgtanngaccctnctncccgaattganccctgactaaaatccccncaacagcctttnananaancccccnaaantnggaggcatngggtccntnttggnccaggcnaaaatccccccanggtttcngggtccnaccntgganggcctttgnnanccccngggaaaactttnaaaaaaaanggggggggccnggnttttaancccaaancttngttnnnntttttccnagggnaaacccgggnnnttggaannnttnaaaaanngggggggggaggcccccncccccccccgggnaaaaaanccccccccccttttcggggggaaaaaa

SEQ ID NO: 533 - DNA, 1402 bp, Homo Sapiens
  misc_feature (1)..(1): n is a, c, g, or t
  misc_feature (802)..(802): n is a, c, g, or t
  misc_feature (855)..(856): n is a, c, g, or t
  misc_feature (871)..(871): n is a, c, g, or t
  misc_feature (873)..(873): n is a, c, g, or t
  misc_feature (889)..(889): n is a, c, g, or t
  misc_feature (897)..(897): n is a, c, g, or t
  misc_feature (922)..(922): n is a, c, g, or t
  misc_feature (931)..(931): n is a, c, g, or t
  misc_feature (938)..(938): n is a, c, g, or t
  misc_feature (964)..(964): n is a, c, g, or t
  misc_feature (974)..(974): n is a, c, g, or t
  misc_feature (978)..(978): n is a, c, g, or t
  misc_feature (993)..(993): n is a, c, g, or t
  misc_feature (1005)..(1005): n is a, c, g, or t
  misc_feature (1015)..(1015): n is a, c, g, or t
  misc_feature (1017)..(1018): n is a, c, g, or t
  misc_feature (1020)..(1020): n is a, c, g, or t
  misc_feature (1023)..(1024): n is a, c, g, or t
  misc_feature (1026)..(1027): n is a, c, g, or t
  misc_feature (1033)..(1033): n is a, c, g, or t
  misc_feature (1038)..(1038): n is a, c, g, or t
  misc_feature (1040)..(1041): n is a, c, g, or t
  misc_feature (1050)..(1050): n is a, c, g, or t
  misc_feature (1055)..(1055): n is a, c, g, or t
  misc_feature (1060)..(1061): n is a, c, g, or t
  misc_feature (1064)..(1066): n is a, c, g, or t
  misc_feature (1072)..(1072): n is a, c, g, or t
  misc_feature (1080)..(1080): n is a, c, g, or t
  misc_feature (1087)..(1087): n is a, c, g, or t
  misc_feature (1097)..(1097): n is a, c, g, or t
  misc_feature (1107)..(1107): n is a, c, g, or t
  misc_feature (1109)..(1109): n is a, c, g, or t
  misc_feature (1114)..(1115): n is a, c, g, or t
  misc_feature (1126)..(1126): n is a, c, g, or t
  misc_feature (1128)..(1129): n is a, c, g, or t
  misc_feature (1141)..(1141): n is a, c, g, or t
  misc_feature (1150)..(1151): n is a, c, g, or t
  misc_feature (1153)..(1153): n is a, c, g, or t
  misc_feature (1156)..(1157): n is a, c, g, or t
  misc_feature (1167)..(1168): n is a, c, g, or t
  misc_feature (1172)..(1172): n is a, c, g, or t
  misc_feature (1174)..(1175): n is a, c, g, or t
  misc_feature (1191)..(1191): n is a, c, g, or t
  misc_feature (1196)..(1196): n is a, c, g, or t
  misc_feature (1198)..(1198): n is a, c, g, or t
  misc_feature (1207)..(1207): n is a, c, g, or t
  misc_feature (1210)..(1211): n is a, c, g, or t
  misc_feature (1214)..(1214): n is a, c, g, or t
  misc_feature (1216)..(1216): n is a, c, g, or t
  misc_feature (1218)..(1218): n is a, c, g, or t
  misc_feature (1220)..(1220): n is a, c, g, or t
  misc_feature (1230)..(1230): n is a, c, g, or t
  misc_feature (1235)..(1236): n is a, c, g, or t
  misc_feature (1238)..(1240): n is a, c, g, or t
  misc_feature (1243)..(1243): n is a, c, g, or t
  misc_feature (1246)..(1246): n is a, c, g, or t
  misc_feature (1266)..(1266): n is a, c, g, or t
  misc_feature (1268)..(1268): n is a, c, g, or t
  misc_feature (1276)..(1278): n is a, c, g, or t
  misc_feature (1281)..(1283): n is a, c, g, or t
  misc_feature (1285)..(1287): n is a, c, g, or t
  misc_feature (1290)..(1291): n is a, c, g, or t
  misc_feature (1293)..(1293): n is a, c, g, or t
  misc_feature (1295)..(1295): n is a, c, g, or t
  misc_feature (1300)..(1300): n is a, c, g, or t
  misc_feature (1304)..(1307): n is a, c, g, or t
  misc_feature (1311)..(1311): n is a, c, g, or t
  misc_feature (1314)..(1314): n is a, c, g, or t
  misc_feature (1316)..(1316): n is a, c, g, or t
  misc_feature (1318)..(1318): n is a, c, g, or t
  misc_feature (1322)..(1322): n is a, c, g, or t
  misc_feature (1334)..(1334): n is a, c, g, or t
  misc_feature (1339)..(1341): n is a, c, g, or t
  misc_feature (1346)..(1346): n is a, c, g, or t
  misc_feature (1348)..(1349): n is a, c, g, or t
  misc_feature (1355)..(1355): n is a, c, g, or t
  misc_feature (1359)..(1360): n is a, c, g, or t
  misc_feature (1368)..(1368): n is a, c, g, or t
  misc_feature (1373)..(1379): n is a, c, g, or t
  misc_feature (1381)..(1381): n is a, c, g, or t
  misc_feature (1383)..(1383): n is a, c, g, or t
  misc_feature (1388)..(1390): n is a, c, g, or t
  misc_feature (1392)..(1393): n is a, c, g, or t
  misc_feature (1396)..(1397): n is a, c, g, or t
  misc_feature (1400)..(1401): n is a, c, g, or t
ntagagaaattactatgagaggatcgcatcaccatcaccatcacggatcctatttaggtgacactatagaatcgtcgacccacgcgtccgcccacgcgtccgagggactcggcgggaggatgggcttgctctcaattttgcgcaagttgaaaagtgcaccagaccaggaggtgagaatacttctcctgggcttggataatgctggcaagaccactcttctgaagcagcttgcatctgaagacatcagccacatcacacctacacagggtttcaacatcaaaagtgtacaatcacaaggttttaaactgaatgtatgggacattggtggacagaggaaaatcagaccatactggaagaattattttgaaaataccgatattcttatatatgtaatcgacagtgcagacagaaaaagatttgaagagacgggtcaggaactagcggaattactggaggaagaaaaactaagttgtgtgccagtgctcatcttgctaataagcaggatttgctcacagcagcccctgcctctgaaattgcagaaggactgaacctgcataccatccgcgaccgagtctggcagatccagtcttgctcagctctcacaggagagggcgttcaggatggcatgaactgggtctgcaaaaatgtcaatgcaaagaagaaataaaatctatacgaatggagatgcaggagctgcgggagccgaattcggtcctgaaaaacactaatttgctgctttctgaccaaatgtttttccatctgtgtacagctccagctgtttgaagagagggaacaacacggnttagaaagaatccccattccagcagtaaatttaactgatctctgaaggttcannatcatttttccaatnanggaattatattatttncctctgcntaattgaaatacctattaaatgtcnccaagcacntgattanaaaaatgaaattttttaatgagccanaaattgcttngcantttaaacattcccgngggctttttttncccccaaaanannangannannaaaagnggaananncccctttcngaatnctttnnttnnngacccnccccttgntttcccnccagggtttnaaccccaaanangtttnntggggcggccngnnttttaccgcccnacccccccnngnttnnttttccaaannaaantnntggggggggggggggnaaaangnaaaaattanccnnccncncntnggggggaaanacccnntnnnccnccncttgaaaaaaaaaaaaaagngncccccccnnnggnnnannnctnntncncccgncccnnnnaaanccnanancccnaccccggttttnaaccnnngcccngnntttttngaannccctcggntttcnnnnnnnananaaaannncnnccnnttnnc

SEQ ID NO: 534 - DNA, 1375 bp, Homo Sapiens
  misc_feature (892)..(892): n is a, c, g, or t
  misc_feature (900)..(900): n is a, c, g, or t
  misc_feature (905)..(905): n is a, c, g, or t
  misc_feature (907)..(907): n is a, c, g, or t
  misc_feature (924)..(924): n is a, c, g, or t
  misc_feature (928)..(928): n is a, c, g, or t
  misc_feature (934)..(934): n is a, c, g, or t
  misc_feature (952)..(952): n is a, c, g, or t
  misc_feature (986)..(986): n is a, c, g, or t
  misc_feature (995)..(995): n is a, c, g, or t
  misc_feature (999)..(999): n is a, c, g, or t
  misc_feature (1019)..(1019): n is a, c, g, or t
  misc_feature (1039)..(1039): n is a, c, g, or t
  misc_feature (1046)..(1046): n is a, c, g, or t
  misc_feature (1050)..(1050): n is a, c, g, or t
  misc_feature (1073)..(1073): n is a, c, g, or t
  misc_feature (1084)..(1084): n is a, c, g, or t
  misc_feature (1087)..(1087): n is a, c, g, or t
  misc_feature (1090)..(1090): n is a, c, g, or t
  misc_feature (1093)..(1093): n is a, c, g, or t
  misc_feature (1097)..(1097): n is a, c, g, or t
  misc_feature (1103)..(1103): n is a, c, g, or t
  misc_feature (1116)..(1116): n is a, c, g, or t
  misc_feature (1119)..(1119): n is a, c, g, or t
  misc_feature (1124)..(1124): n is a, c, g, or t
  misc_feature (1137)..(1137): n is a, c, g, or t
  misc_feature (1140)..(1140): n is a, c, g, or t
  misc_feature (1143)..(1143): n is a, c, g, or t
  misc_feature (1151)..(1151): n is a, c, g, or t
  misc_feature (1155)..(1155): n is a, c, g, or t
  misc_feature (1159)..(1159): n is a, c, g, or t
  misc_feature (1165)..(1165): n is a, c, g, or t
  misc_feature (1169)..(1169): n is a, c, g, or t
  misc_feature (1172)..(1172): n is a, c, g, or t
  misc_feature (1184)..(1184): n is a, c, g, or t
  misc_feature (1188)..(1188): n is a, c, g, or t
  misc_feature (1194)..(1195): n is a, c, g, or t
  misc_feature (1201)..(1201): n is a, c, g, or t
  misc_feature (1215)..(1215): n is a, c, g, or t
  misc_feature (1231)..(1231): n is a, c, g, or t
  misc_feature (1237)..(1237): n is a, c, g, or t
  misc_feature (1248)..(1248): n is a, c, g, or t
  misc_feature (1253)..(1253): n is a, c, g, or t
  misc_feature (1264)..(1264): n is a, c, g, or t
  misc_feature (1285)..(1285): n is a, c, g, or t
  misc_feature (1288)..(1288): n is a, c, g, or t
  misc_feature (1291)..(1291): n is a, c, g, or t
  misc_feature (1293)..(1293): n is a, c, g, or t
  misc_feature (1298)..(1298): n is a, c, g, or t
  misc_feature (1300)..(1300): n is a, c, g, or t
  misc_feature (1310)..(1310): n is a, c, g, or t
  misc_feature (1312)..(1312): n is a, c, g, or t
  misc_feature (1316)..(1316): n is a, c, g, or t
  misc_feature (1320)..(1320): n is a, c, g, or t
  misc_feature (1329)..(1329): n is a, c, g, or t
  misc_feature (1340)..(1340): n is a, c, g, or t
  misc_feature (1342)..(1342): n is a, c, g, or t
  misc_feature (1344)..(1344): n is a, c, g, or t
  misc_feature (1354)..(1354): n is a, c, g, or t
  misc_feature (1365)..(1365): n is a, c, g, or t
  misc_feature (1368)..(1368): n is a, c, g, or t
  misc_feature (1375)..(1375): n is a, c, g, or t
agagaaattaactatgagaggatcgcatcaccatcaccatcacggatcctatttaggtgacactatagaatcgtcgacccacgcgtccgaggacatgacctccgagcagctggatgacattttgaagtaccacactgagatagtgtttgccaggacctcccctcagcagaagctcatcattgtggaaggctgccaaagacagggtgctatcgtggctgtgactggtgacggtgtgaatgactctccagctttgaagaaagcagacattggggttgctatggggattgctggctcagatgtgtccaagcaagctgctgacatgattcttctggatgacaactttgcctcaattgtgactggagtagaggaaggtcgtctgatctttgataacttgaagaaatccattgcttataccttaaccagtaacattcccgagatcaccccgttcctgatatttattattgcaaacattccactaccactggggactgtcaccatcctctgcattgacttgggcactgacatggttcctgccatctccctggcttatgagcaggctgagagtgacatcatgaagagacagcccagaaatcccaaaacagacaaacttgtgaatgagcggctgatcagcatggcctatgggcagattggaatgatccaggccctgggaggcttctttacttactttgtgattctggctgagaacggcttcctcccaattcacctgttgggcctccgagtggactgggatgaccgctggatcaacgatgtggaagacagctacgggcagcagtggacctatgagcagaggaaaatcgtggagttcacctgccacacagccttcttcgtcagtatcgtggtggtgcagtgggccgacttggtcatctgtaanaccaggangaatncngtcttccagcaggggangaanaacaanatcttgatatttggcccnttgaaaaaaagccctggctgctttccttcctacngcctggaangggngtgctctaagatgttccccncaacctactgggggtctggncttcccnatcncttccatcttcgaaatgacgaantcaaaaactcntcntcnggngacncctggnggtgggggaaaanaanctaantaacccccgtccngcnccnggaaaatnggcnaaantttgancaanccnccccctttggantccncctggnntggganccccccggaaaaanccccccctggggaaanaaaccntgaaaaaaagnccttntgggggggggnggggcgaaacccccttggaanaanggnanttttncnttttttaaanancccnaaanaaaattttngttttaagggntngnaaaaaaaaangggcccctttnttnttttttn

SEQ ID NO: 535 - DNA, 1306 bp, Homo Sapiens
  misc_feature (1)..(1): n is a, c, g, or t
  misc_feature (955)..(955): n is a, c, g, or t
  misc_feature (961)..(961): n is a, c, g, or t
  misc_feature (970)..(970): n is a, c, g, or t
  misc_feature (982)..(982): n is a, c, g, or t
  misc_feature (985)..(985): n is a, c, g, or t
  misc_feature (999)..(999): n is a, c, g, or t
  misc_feature (1004)..(1004): n is a, c, g, or t
  misc_feature (1022)..(1022): n is a, c, g, or t
  misc_feature (1030)..(1030): n is a, c, g, or t
  misc_feature (1037)..(1037): n is a, c, g, or t
  misc_feature (1052)..(1052): n is a, c, g, or t
  misc_feature (1056)..(1056): n is a, c, g, or t
  misc_feature (1062)..(1062): n is a, c, g, or t
  misc_feature (1066)..(1066): n is a, c, g, or t
  misc_feature (1068)..(1069): n is a, c, g, or t
  misc_feature (1071)..(1071): n is a, c, g, or t
  misc_feature (1076)..(1076): n is a, c, g, or t
  misc_feature (1089)..(1089): n is a, c, g, or t
  misc_feature (1096)..(1096): n is a, c, g, or t
  misc_feature (1105)..(1105): n is a, c, g, or t
  misc_feature (1108)..(1109): n is a, c, g, or t
  misc_feature (1111)..(1111): n is a, c, g, or t
  misc_feature (1114)..(1115): n is a, c, g, or t
  misc_feature (1119)..(1119): n is a, c, g, or t
  misc_feature (1121)..(1123): n is a, c, g, or t
  misc_feature (1125)..(1126): n is a, c, g, or t
  misc_feature (1128)..(1128): n is a, c, g, or t
  misc_feature (1130)..(1130): n is a, c, g, or t
  misc_feature (1133)..(1133): n is a, c, g, or t
  misc_feature (1139)..(1141): n is a, c, g, or t
  misc_feature (1143)..(1143): n is a, c, g, or t
  misc_feature (1147)..(1147): n is a, c, g, or t
  misc_feature (1153)..(1154): n is a, c, g, or t
  misc_feature (1157)..(1157): n is a, c, g, or t
  misc_feature (1162)..(1162): n is a, c, g, or t
  misc_feature (1165)..(1165): n is a, c, g, or t
  misc_feature (1168)..(1168): n is a, c, g, or t
  misc_feature (1172)..(1172): n is a, c, g, or t
  misc_feature (1175)..(1175): n is a, c, g, or t
  misc_feature (1178)..(1178): n is a, c, g, or t
  misc_feature (1182)..(1182): n is a, c, g, or t
  misc_feature (1186)..(1188): n is a, c, g, or t
  misc_feature (1199)..(1199): n is a, c, g, or t
  misc_feature (1204)..(1206): n is a, c, g, or t
  misc_feature (1210)..(1211): n is a, c, g, or t
  misc_feature (1214)..(1214): n is a, c, g, or t
  misc_feature (1218)..(1218): n is a, c, g, or t
  misc_feature (1223)..(1224): n is a, c, g, or t
  misc_feature (1227)..(1228): n is a, c, g, or t
  misc_feature (1230)..(1230): n is a, c, g, or t
  misc_feature (1233)..(1233): n is a, c, g, or t
  misc_feature (1235)..(1235): n is a, c, g, or t
  misc_feature (1237)..(1238): n is a, c, g, or t
  misc_feature (1240)..(1241): n is a, c, g, or t
  misc_feature (1250)..(1250): n is a, c, g, or t
  misc_feature (1255)..(1255): n is a, c, g, or t
  misc_feature (1258)..(1258): n is a, c, g, or t
  misc_feature (1262)..(1262): n is a, c, g, or t
  misc_feature (1266)..(1266): n is a, c, g, or t
  misc_feature (1269)..(1269): n is a, c, g, or t
  misc_feature (1272)..(1273): n is a, c, g, or t
  misc_feature (1285)..(1286): n is a, c, g, or t
  misc_feature (1288)..(1291): n is a, c, g, or t
  misc_feature (1293)..(1297): n is a, c, g, or t
  misc_feature (1301)..(1301): n is a, c, g, or t
  misc_feature (1306)..(1306): n is a, c, g, or t
naattagagaaattactatgagaggatcgcatcaccatcaccatcacggatcctatttaggtgacactatagaatcgtcgacccacgcgtccgcgttggcctattcggtgaagaaaatgatgaaggacaacaacctggtacgccacctggatgcctgtgagaccatgggcaatgccacagccatctgctcagacaagacaggcacgctgaccaccaatcgcatgacagtggtacaggcctatgtcggcgacgtccactataaagagatccccgaccccagctccatcaacaccaagaccatggagctgctgatcaatgccatcgccatcaacagcgcctacaccaccaagattctgcccccagagaaggagggcgccctgcctcggcaggtgggcaacaagacggagtgcggcctgctgggcttcgtgctggacctgaagcaggactacgagcccgtgcgcagccagatgccagaggagaagttgtacaaagtgtacaccttcaactccgtgcgcaagtccatgagcactgtcatcaagctgcccgacgagagcttccgcatgtacagcaagggggcttctgagatcgtgctcaagaagtgctgcaaaatcctcaatggggcgggagagcctcgtgtcttccggccccgcgaccgggacgagatggtaaagaaggtgattgagcccatggcttgcgatgggctccgcactatctgcgtggcctaccgcgacttccccagcagcccggagccggactgggacaatgagaatgacatcctcaacgaactcacctgcatctgcgtggtgggcatcgaggacccggtgcggccagaggtcccagaagccatccgcaagtgccagcgggcaggcatcacggtccgcatggtcactggcgacaatatcaacacggctcgggccatcgccatcaagtgtggcatcatccatcctggggaggnactttntgtgcctcnaggggcaagganttnaacaggaggatccncaacnaaaaagggggaaattgancaggaacnaattganaaattttggccaaanctgngggtgntggntnncntcctnccccaaggaaaancttaccntggtttaanggnntnctnnaaancnnncnncntnaanaacggnnngngggnggcccnnaanggggnaanggnaacnaanaangggncctnnncttaaaaaagnccaannngggnnttncccntgggnnttnncnggncntnnanngggccaagngggcnttnaaantttnttngannaaaaaaattttnncnnnntnnnnngggnggggn

SEQ ID NO: 536 - DNA, 1395 bp, Homo Sapiens
  misc_feature (11)..(11): n is a, c, g, or t
  misc_feature (17)..(17): n is a, c, g, or t
  misc_feature (949)..(949): n is a, c, g, or t
  misc_feature (976)..(976): n is a, c, g, or t
  misc_feature (979)..(979): n is a, c, g, or t
  misc_feature (988)..(988): n is a, c, g, or t
  misc_feature (997)..(997): n is a, c, g, or t
  misc_feature (1008)..(1008): n is a, c, g, or t
  misc_feature (1014)..(1014): n is a, c, g, or t
  misc_feature (1027)..(1027): n is a, c, g, or t
  misc_feature (1043)..(1043): n is a, c, g, or t
  misc_feature (1046)..(1046): n is a, c, g, or t
  misc_feature (1049)..(1049): n is a, c, g, or t
  misc_feature (1054)..(1054): n is a, c, g, or t
  misc_feature (1056)..(1056): n is a, c, g, or t
  misc_feature (1066)..(1066): n is a, c, g, or t
  misc_feature (1071)..(1071): n is a, c, g, or t
  misc_feature (1078)..(1078): n is a, c, g, or t
  misc_feature (1080)..(1080): n is a, c, g, or t
  misc_feature (1086)..(1086): n is a, c, g, or t
  misc_feature (1093)..(1093): n is a, c, g, or t
  misc_feature (1095)..(1097): n is a, c, g, or t
  misc_feature (1118)..(1118): n is a, c, g, or t
  misc_feature (1120)..(1120): n is a, c, g, or t
  misc_feature (1124)..(1124): n is a, c, g, or t
  misc_feature (1132)..(1132): n is a, c, g, or t
  misc_feature (1142)..(1142): n is a, c, g, or t
  misc_feature (1144)..(1144): n is a, c, g, or t
  misc_feature (1148)..(1269): n is a, c, g, or t
  misc_feature (1274)..(1309): n is a, c, g, or t
  misc_feature (1312)..(1334): n is a, c, g, or t
  misc_feature (1336)..(1354): n is a, c, g, or t
  misc_feature (1356)..(1366): n is a, c, g, or t
  misc_feature (1368)..(1375): n is a, c, g, or t
  misc_feature (1380)..(1384): n is a, c, g, or t
  misc_feature (1386)..(1395): n is a, c, g, or t
gaatagagganaattanctatgagaggatcgcatcaccattcaccatcacggatcctatttaggtgacactatagaatcgtcgacccacgcgtccggatccactgttgcccagttggtgaagagacttacagatgcagatgccatgaagtacaccattgtggtgtcggctacggcctcggatgctgccccacttcagtacctggctccttactctggctgttccatgggagagtattttagagacaatggcaaacatgctttgatcatctatgacgacttatccaaacaggctgttgcttaccgtcagatgtctctgttgctccgccgaccccctggtcgtgaggcctatcctggtgatgtgttctacctacactcccggttgctggagagagcagccaaaatgaacgatgcttttggtggtggctccttgactgctttgccagtcatagaaacacaggctggtgacgtgtctgcttacattccaacaaatgtcatttccatcactgacggacagatcttcttggaaacagaattgttctacaaaggtatccgccctgcaattaacgttggtctgtctgtatctcgtgtcggatccgctgcccaaaccagggctatgaagcaggtagcaggtaccatgaagctggaattggctcagtatcgtgaggttgctgcttttgcccagttcggttctgacctcgatgctgccactcaacaacttttgagtcgtggcgtgcgtctaactgagttgctgaagcaaggacagtattctcccatggctattgaagaacaagtggctgttatctatgcgggtgtaaggggatatcttgataaactggagcccagcaagattacaaagtttgaaaatgctttcttgtctcatgtcgtcagccagcaccaagccttgttgggcactatcagggctgatggaaaagatctcaaaacaatcanatgcaaagctgaaagaattgtaacaanttncttggctgnatttgaacntaaactcctgngaatcncatcaaaaaccanttcagttttgtcatgntcnaanaaatnanttccatttgnaaaanggttacncncaaacnccttatnannnaaatcccctgaaaaaaaaaangntccntaatgccnaaaaaaaaananaaannnnnnnnnnnnnnnnnnnnnnnnnnnnnnnnnnnnnnnnnnnnnnnnnnnnnnnnnnnnnnnnnnnnnnnnnnnnnnnnnnnnnnnnnnnnnnnnnnnnnnnnnnnnnnnnnnnnnnnnnnccccnnnnnnnnnnnnnnnnnnnnnnnnnnnnnnnnnnnnccnnnnnnnnnnnnnnnnnnnnnnnannnnnnnnnnnnnnnnnnnannnnnnnnnnncnnnnnnnnttttnnnnnannnnnnnnnn

SEQ ID NO: 537 - DNA, 1354 bp, Homo Sapiens
  misc_feature (881)..(881): n is a, c, g, or t
  misc_feature (999)..(999): n is a, c, g, or t
  misc_feature (1001)..(1001): n is a, c, g, or t
  misc_feature (1053)..(1053): n is a, c, g, or t
  misc_feature (1055)..(1055): n is a, c, g, or t
  misc_feature (1060)..(1060): n is a, c, g, or t
  misc_feature (1066)..(1066): n is a, c, g, or t
  misc_feature (1068)..(1068): n is a, c, g, or t
  misc_feature (1095)..(1095): n is a, c, g, or t
  misc_feature (1102)..(1102): n is a, c, g, or t
  misc_feature (1110)..(1111): n is a, c, g, or t
  misc_feature (1128)..(1128): n is a, c, g, or t
  misc_feature (1132)..(1133): n is a, c, g, or t
  misc_feature (1147)..(1148): n is a, c, g, or t
  misc_feature (1158)..(1158): n is a, c, g, or t
  misc_feature (1165)..(1165): n is a, c, g, or t
  misc_feature (1172)..(1173): n is a, c, g, or t
  misc_feature (1176)..(1176): n is a, c, g, or t
  misc_feature (1184)..(1184): n is a, c, g, or t
  misc_feature (1187)..(1187): n is a, c, g, or t
  misc_feature (1197)..(1197): n is a, c, g, or t
  misc_feature (1201)..(1201): n is a, c, g, or t
  misc_feature (1219)..(1219): n is a, c, g, or t
  misc_feature (1223)..(1223): n is a, c, g, or t
  misc_feature (1230)..(1230): n is a, c, g, or t
  misc_feature (1237)..(1237): n is a, c, g, or t
  misc_feature (1239)..(1241): n is a, c, g, or t
  misc_feature (1243)..(1243): n is a, c, g, or t
  misc_feature (1253)..(1253): n is a, c, g, or t
  misc_feature (1256)..(1257): n is a, c, g, or t
  misc_feature (1263)..(1263): n is a, c, g, or t
  misc_feature (1266)..(1266): n is a, c, g, or t
  misc_feature (1270)..(1271): n is a, c, g, or t
  misc_feature (1275)..(1276): n is a, c, g, or t
  misc_feature (1281)..(1282): n is a, c, g, or t
  misc_feature (1287)..(1289): n is a, c, g, or t
  misc_feature (1292)..(1293): n is a, c, g, or t
  misc_feature (1296)..(1298): n is a, c, g, or t
  misc_feature (1302)..(1302): n is a, c, g, or t
  misc_feature (1304)..(1307): n is a, c, g, or t
  misc_feature (1310)..(1310): n is a, c, g, or t
  misc_feature (1313)..(1314): n is a, c, g, or t
  misc_feature (1318)..(1321): n is a, c, g, or t
  misc_feature (1328)..(1328): n is a, c, g, or t
  misc_feature (1331)..(1331): n is a, c, g, or t
  misc_feature (1333)..(1334): n is a, c, g, or t
  misc_feature (1354)..(1354): n is a, c, g, or t
atagagaaattactatgagaggatcgcatcaccatcaccatcacggatcctatttaggtgacactatagaatcgtcgacccacgcgtccgggagacaagatggcgctgcgggcgatgcgggggattgtcaacggggccgcacccgagctacccgtgcccaccggtgggccggcggtgggagctcgggagcaggcgctggcagtcagtcggaactacctctcccagcctcgcctcacatacaagacagtatctggagtcaatggtccactagtgatcttagatcatgttaagtttcccaggtatgctgaaattgtccatttgaccttaccggatggcacaaagagaagtgggcaagttctggaagttagtggttccaaggcagtagttcaggtatttgaagggacttcaggtatagatgctaagaaaacgtcctgtgagtttactggggatattctccgaacaccggtgtctgaggatatgcttggtcgggtattcaatggatcgggaaaacccattgacagaggtcctgttgtactggccgaagacttccttgatatcatgggtcagccaatcaaccctcaatgtcgaatctacccagaggaaatgattcagactggcatttcggccatcgatgggatgaacagtattgctagggggcagaaaattcctatcttctctgctgctgggctaccacacaatgagattgcagctcagatctgtcgccaggctggtttggtaaagaaatccaaagatgtagtagactacagtgaggaaaattttgcaattgtatttgctgctatgggtgtaaacatggaaactgcccggttcttcaaatctgactttgaaaaaaatggctcaatggacaatgtctgcctcttttnaacttggctatgacccaaccatttgagcgaattatcactcctcgcctggctctaaccacagctgaatttctggcgtacaatgtgaaaaacatgtattggttattctaacaaacatgantncttatgctgaacccttccaaaggtttcacacccaggaaaaagtacctggtcnanaaagntttccngntactgtaaacaaattaaccccaaattnaaccccntggccaanngaaggaaaaacgctcantacnnaatcccattcaacnngccaaagaanaaacccnccccccnnccnaaattganggntaattaaaangggnaaattttggaaaaacctnccanaaaaaanttccccntnnngncccccccaanccnnaaaaanccncttnnaaannaaacnnaaaannnccnnttnnncctntnnnnttnttnnaaannnnccccaanttntnnaaaacccttctaattttttn

SEQ ID NO: 538 - DNA, 1420 bp, Homo Sapiens
  misc_feature (16)..(16): n is a, c, g, or t
  misc_feature (815)..(815): n is a, c, g, or t
  misc_feature (828)..(828): n is a, c, g, or t
  misc_feature (832)..(832): n is a, c, g, or t
  misc_feature (870)..(870): n is a, c, g, or t
  misc_feature (903)..(903): n is a, c, g, or t
  misc_feature (918)..(920): n is a, c, g, or t
  misc_feature (922)..(922): n is a, c, g, or t
  misc_feature (925)..(925): n is a, c, g, or t
  misc_feature (938)..(938): n is a, c, g, or t
  misc_feature (941)..(941): n is a, c, g, or t
  misc_feature (943)..(943): n is a, c, g, or t
  misc_feature (946)..(946): n is a, c, g, or t
  misc_feature (952)..(954): n is a, c, g, or t
  misc_feature (959)..(959): n is a, c, g, or t
  misc_feature (963)..(963): n is a, c, g, or t
  misc_feature (965)..(965): n is a, c, g, or t
  misc_feature (970)..(970): n is a, c, g, or t
  misc_feature (972)..(972): n is a, c, g, or t
  misc_feature (974)..(974): n is a, c, g, or t
  misc_feature (979)..(980): n is a, c, g, or t
  misc_feature (982)..(982): n is a, c, g, or t
  misc_feature (989)..(991): n is a, c, g, or t
  misc_feature (994)..(995): n is a, c, g, or t
  misc_feature (998)..(998): n is a, c, g, or t
  misc_feature (1000)..(1000): n is a, c, g, or t
  misc_feature (1004)..(1004): n is a, c, g, or t
  misc_feature (1008)..(1008): n is a, c, g, or t
  misc_feature (1014)..(1017): n is a, c, g, or t
  misc_feature (1024)..(1024): n is a, c, g, or t
  misc_feature (1027)..(1028): n is a, c, g, or t
  misc_feature (1032)..(1033): n is a, c, g, or t
  misc_feature (1039)..(1039): n is a, c, g, or t
  misc_feature (1043)..(1045): n is a, c, g, or t
  misc_feature (1050)..(1050): n is a, c, g, or t
  misc_feature (1059)..(1059): n is a, c, g, or t
  misc_feature (1067)..(1068): n is a, c, g, or t
  misc_feature (1072)..(1072): n is a, c, g, or t
  misc_feature (1078)..(1079): n is a, c, g, or t
  misc_feature (1087)..(1087): n is a, c, g, or t
  misc_feature (1090)..(1090): n is a, c, g, or t
  misc_feature (1093)..(1097): n is a, c, g, or t
  misc_feature (1100)..(1101): n is a, c, g, or t
  misc_feature (1106)..(1106): n is a, c, g, or t
  misc_feature (1109)..(1110): n is a, c, g, or t
  misc_feature (1114)..(1116): n is a, c, g, or t
  misc_feature (1118)..(1118): n is a, c, g, or t
  misc_feature (1120)..(1120): n is a, c, g, or t
  misc_feature (1122)..(1123): n is a, c, g, or t
  misc_feature (1127)..(1127): n is a, c, g, or t
  misc_feature (1129)..(1129): n is a, c, g, or t
  misc_feature (1136)..(1136): n is a, c, g, or t
  misc_feature (1140)..(1140): n is a, c, g, or t
  misc_feature (1144)..(1145): n is a, c, g, or t
  misc_feature (1147)..(1147): n is a, c, g, or t
  misc_feature (1149)..(1149): n is a, c, g, or t
  misc_feature (1152)..(1152): n is a, c, g, or t
  misc_feature (1154)..(1154): n is a, c, g, or t
  misc_feature (1160)..(1160): n is a, c, g, or t
  misc_feature (1173)..(1176): n is a, c, g, or t
  misc_feature (1180)..(1181): n is a, c, g, or t
  misc_feature (1185)..(1185): n is a, c, g, or t
  misc_feature (1187)..(1189): n is a, c, g, or t
  misc_feature (1192)..(1194): n is a, c, g, or t
  misc_feature (1197)..(1197): n is a, c, g, or t
  misc_feature (1201)..(1201): n is a, c, g, or t
  misc_feature (1208)..(1208): n is a, c, g, or t
  misc_feature (1213)..(1214): n is a, c, g, or t
  misc_feature (1221)..(1222): n is a, c, g, or t
  misc_feature (1225)..(1227): n is a, c, g, or t
  misc_feature (1229)..(1229): n is a, c, g, or t
  misc_feature (1231)..(1231): n is a, c, g, or t
  misc_feature (1235)..(1235): n is a, c, g, or t
  misc_feature (1237)..(1238): n is a, c, g, or t
  misc_feature (1240)..(1240): n is a, c, g, or t
  misc_feature (1242)..(1243): n is a, c, g, or t
  misc_feature (1245)..(1245): n is a, c, g, or t
  misc_feature (1249)..(1249): n is a, c, g, or t
  misc_feature (1251)..(1251): n is a, c, g, or t
  misc_feature (1253)..(1253): n is a, c, g, or t
  misc_feature (1255)..(1255): n is a, c, g, or t
  misc_feature (1259)..(1259): n is a, c, g, or t
  misc_feature (1263)..(1264): n is a, c, g, or t
  misc_feature (1266)..(1266): n is a, c, g, or t
  misc_feature (1268)..(1272): n is a, c, g, or t
  misc_feature (1278)..(1279): n is a, c, g, or t
  misc_feature (1282)..(1282): n is a, c, g, or t
  misc_feature (1285)..(1285): n is a, c, g, or t
  misc_feature (1294)..(1295): n is a, c, g, or t
  misc_feature (1298)..(1298): n is a, c, g, or t
  misc_feature (1300)..(1300): n is a, c, g, or t
  misc_feature (1304)..(1304): n is a, c, g, or t
  misc_feature (1308)..(1308): n is a, c, g, or t
  misc_feature (1310)..(1311): n is a, c, g, or t
  misc_feature (1314)..(1314): n is a, c, g, or t
  misc_feature (1323)..(1325): n is a, c, g, or t
  misc_feature (1329)..(1329): n is a, c, g, or t
  misc_feature (1332)..(1332): n is a, c, g, or t
  misc_feature (1336)..(1337): n is a, c, g, or t
  misc_feature (1340)..(1341): n is a, c, g, or t
  misc_feature (1347)..(1347): n is a, c, g, or t
  misc_feature (1349)..(1350): n is a, c, g, or t
  misc_feature (1354)..(1354): n is a, c, g, or t
  misc_feature (1356)..(1356): n is a, c, g, or t
  misc_feature (1360)..(1360): n is a, c, g, or t
  misc_feature (1362)..(1364): n is a, c, g, or t
  misc_feature (1371)..(1372): n is a, c, g, or t
  misc_feature (1378)..(1378): n is a, c, g, or t
  misc_feature (1381)..(1382): n is a, c, g, or t
  misc_feature (1385)..(1388): n is a, c, g, or t
  misc_feature (1392)..(1392): n is a, c, g, or t
  misc_feature (1395)..(1395): n is a, c, g, or t
  misc_feature (1399)..(1399): n is a, c, g, or t
  misc_feature (1401)..(1401): n is a, c, g, or t
  misc_feature (1408)..(1408): n is a, c, g, or t
  misc_feature (1413)..(1413): n is a, c, g, or t
  misc_feature (1417)..(1417): n is a, c, g, or t
  misc_feature (1419)..(1419): n is a, c, g, or t
gaatagagagaattantatgagtaggatggcatcaccattcaccattcacggatcctatttaggtgacactatagaatcgtcgacccacgcgtccggggcggacagactgcgggacggacggtggacgctgggacgcgtttgtagctccggccccgccgttccgacccccgccgccgtcgccgccatgacggggctagcactgctctactccggggtcttcgtggccttctgggcctgcgcgctggccgtgggagtctgctacaccatttttgatttgggcttccgctttgatgtggcatggttcctgacggagacttcgcccttcatgtggtccaacctgggcagcctggggcatctatattaccggctcctccatcattggtggaggagtgaaggcccccaggatcaagaccaagaacctggtcagcatcatcttctgtgaggctgtggccatctacggcatcatcatggcaattgtcattagcaacatggctgagcctttcagtgccacagaccccaaggccatcggccatcggaactaccatgcaggctactccatgtttggggctggcctcaccgtaggcctgtctaacctcttctgtggagtctgcgtgggcatcgtgggcagtggggctgccctggccgatgctcagaaccccagcctctttgtaaagattctcatcgtggagatctttggcagcgccattggcctctttggggtcatcgtcgcaattcttcagacctccagagtgaagatgggtgactagatgatatgtgtgggtggggccgtgcctcacttttatttattgctggntttcctgggacanctgnaactgtgtcccttaaacctttcaaaaagcttggtgttnaggccctcccctgaaatccccctcttgcttgcnggttgattttggaannnantgnaattccaaggccnaantnctncaatgnnnggaanaagntnctggnantnaatcnngnaaacctnnncanntgntntccnccanttttcnnnnctaaacncanntttnntaaatntttnnnaaaanaaatttggnatttttcnnggtncaaaannaaaaatanaanaannnnntannataanaannaaannnantntnnatananaacaaanaaanaatnnananaanancaatanaaaataaaaactnnnnaaannaaantnnnaannnacntatntaaaatncaaannaaatctnnaannnananatantnntnannanaatnancnanatcnaaanncntnnnnnatatannaanaanataaaaaannctnanaaanaatnannaanaataaaaannnaacntanaatnnatnntaaaananncatnanaaanannntataaannttctanaanncannnnaaanaanatanantaataancacanattnant

SEQ ID NO: 539 - DNA, 1314 bp, Homo Sapiens
  misc_feature (823)..(823): n is a, c, g, or t
  misc_feature (828)..(872): n is a, c, g, or t
  misc_feature (898)..(898): n is a, c, g, or t
  misc_feature (902)..(902): n is a, c, g, or t
  misc_feature (905)..(905): n is a, c, g, or t
  misc_feature (911)..(911): n is a, c, g, or t
  misc_feature (920)..(920): n is a, c, g, or t
  misc_feature (925)..(925): n is a, c, g, or t
  misc_feature (934)..(934): n is a, c, g, or t
  misc_feature (937)..(937): n is a, c, g, or t
  misc_feature (946)..(946): n is a, c, g, or t
  misc_feature (956)..(956): n is a, c, g, or t
  misc_feature (967)..(967): n is a, c, g, or t
  misc_feature (972)..(972): n is a, c, g, or t
  misc_feature (980)..(980): n is a, c, g, or t
  misc_feature (999)..(999): n is a, c, g, or t
  misc_feature (1005)..(1005): n is a, c, g, or t
  misc_feature (1021)..(1021): n is a, c, g, or t
  misc_feature (1033)..(1033): n is a, c, g, or t
  misc_feature (1055)..(1055): n is a, c, g, or t
  misc_feature (1064)..(1064): n is a, c, g, or t
  misc_feature (1076)..(1076): n is a, c, g, or t
  misc_feature (1089)..(1089): n is a, c, g, or t
  misc_feature (1111)..(1111): n is a, c, g, or t
  misc_feature (1118)..(1118): n is a, c, g, or t
  misc_feature (1120)..(1120): n is a, c, g, or t
  misc_feature (1123)..(1123): n is a, c, g, or t
  misc_feature (1143)..(1144): n is a, c, g, or t
  misc_feature (1151)..(1151): n is a, c, g, or t
  misc_feature (1157)..(1157): n is a, c, g, or t
  misc_feature (1159)..(1159): n is a, c, g, or t
  misc_feature (1162)..(1162): n is a, c, g, or t
  misc_feature (1167)..(1167): n is a, c, g, or t
  misc_feature (1169)..(1170): n is a, c, g, or t
  misc_feature (1173)..(1174): n is a, c, g, or t
  misc_feature (1181)..(1181): n is a, c, g, or t
  misc_feature (1183)..(1183): n is a, c, g, or t
  misc_feature (1186)..(1187): n is a, c, g, or t
  misc_feature (1190)..(1191): n is a, c, g, or t
  misc_feature (1197)..(1197): n is a, c, g, or t
  misc_feature (1202)..(1203): n is a, c, g, or t
  misc_feature (1210)..(1210): n is a, c, g, or t
  misc_feature (1220)..(1220): n is a, c, g, or t
  misc_feature (1223)..(1223): n is a, c, g, or t
  misc_feature (1236)..(1237): n is a, c, g, or t
  misc_feature (1247)..(1247): n is a, c, g, or t
  misc_feature (1251)..(1251): n is a, c, g, or t
  misc_feature (1256)..(1256): n is a, c, g, or t
  misc_feature (1261)..(1261): n is a, c, g, or t
  misc_feature (1271)..(1271): n is a, c, g, or t
  misc_feature (1288)..(1288): n is a, c, g, or t
  misc_feature (1300)..(1300): n is a, c, g, or t
  misc_feature (1312)..(1312): n is a, c, g, or t
tagagagaattactatgagaggatcgcatcaccatcaccatcacggatcctatttaggtgacactatagaatcgtcgacccacgcgtccggacctacagccgcccgggagaagatggctgccccagcagtgtccgggctctcccggcaggtgcgatgcttcagtacctctgtggtcagaccatttgccaagcttgtgaggcctcctgttcaggtatacggtattgaaggtcgctatgccacagctctttattctgctgcatcaaaacagaataagctggagcaagtagaaaaggagttgttgagagtagcacaaatcctgaaggaacccaaagtggctgcttctgttttgaatccctatgtgaagcgttccattaaagtgaaaagcctaaatgacatcacagcaaaagagaggttctctcccctcactaccaacctgatcaatttgcttgctgaaaatggtcgattaagcaatacccaaggagtcgtttctgccttttctaccatgatgagtgtccatcgcggagaggtaccttgcacagtgacctctgcatctcctttagaagaagccacactctctgaattaaaaactgtcctcaagagcttcctaagtcaaggccaagtattgaaattggaggctaagactgatccgtcaatcttgggtggaatgattgtgcgcattggcgagaaatatgttgacatgtctgtcaagaccaagattcagaagctgggcagggctatgcgggagattgtctaaaagtgttggttttctgccatcagtgaaaattcttaaacttggagcaacaataaaaagcttccagaacngatcnnnnnnnnnnnnnnnnnnnnnnnnnnnnnnnnnnnnnnnnnnnnnaaaaaaagggcggccctccctatagngagncgnattaancttaattanctgancttggaacnccnggttgaaanatccagtaangacccccaaanctccntctgggantttgttcaaaaccctcggnttgccncccgggcgtttttttnttgggggaaaantccaagcctaaccttgggcganaatttttcngggacctaaggnaacctaaaatggnaaaaaaaaatcccctgggaaanacccccngntgnaaatttccccaagggcttcnnaaaaaanattttngnggnatttnannccnntggcccnanggnnccnnaaaccnaaacnnttccccnggaaaaacgnccntttttaaaaaccnnaaaaaaaaanaacncaaanttttntcggcctttnttcattttttgcccccnggaaaaagcccnccgaatttttangg

SEQ ID NO: 540 - DNA, 1400 bp, Homo Sapiens
  misc_feature (892)..(892): n is a, c, g, or t
  misc_feature (920)..(920): n is a, c, g, or t
  misc_feature (930)..(930): n is a, c, g, or t
  misc_feature (946)..(946): n is a, c, g, or t
  misc_feature (956)..(956): n is a, c, g, or t
  misc_feature (965)..(965): n is a, c, g, or t
  misc_feature (972)..(972): n is a, c, g, or t
  misc_feature (1025)..(1025): n is a, c, g, or t
  misc_feature (1034)..(1036): n is a, c, g, or t
  misc_feature (1057)..(1057): n is a, c, g, or t
  misc_feature (1069)..(1069): n is a, c, g, or t
  misc_feature (1074)..(1074): n is a, c, g, or t
  misc_feature (1079)..(1079): n is a, c, g, or t
  misc_feature (1091)..(1091): n is a, c, g, or t
  misc_feature (1094)..(1094): n is a, c, g, or t
  misc_feature (1112)..(1112): n is a, c, g, or t
  misc_feature (1116)..(1117): n is a, c, g, or t
  misc_feature (1127)..(1127): n is a, c, g, or t
  misc_feature (1133)..(1133): n is a, c, g, or t
  misc_feature (1138)..(1138): n is a, c, g, or t
  misc_feature (1157)..(1157): n is a, c, g, or t
  misc_feature (1169)..(1169): n is a, c, g, or t
  misc_feature (1179)..(1179): n is a, c, g, or t
  misc_feature (1185)..(1185): n is a, c, g, or t
  misc_feature (1189)..(1189): n is a, c, g, or t
  misc_feature (1194)..(1194): n is a, c, g, or t
  misc_feature (1198)..(1198): n is a, c, g, or t
  misc_feature (1217)..(1217): n is a, c, g, or t
  misc_feature (1229)..(1230): n is a, c, g, or t
  misc_feature (1239)..(1239): n is a, c, g, or t
  misc_feature (1241)..(1241): n is a, c, g, or t
  misc_feature (1259)..(1259): n is a, c, g, or t
  misc_feature (1268)..(1268): n is a, c, g, or t
  misc_feature (1270)..(1274): n is a, c, g, or t
  misc_feature (1277)..(1278): n is a, c, g, or t
  misc_feature (1280)..(1282): n is a, c, g, or t
  misc_feature (1284)..(1284): n is a, c, g, or t
  misc_feature (1286)..(1293): n is a, c, g, or t
  misc_feature (1295)..(1302): n is a, c, g, or t
  misc_feature (1304)..(1304): n is a, c, g, or t
  misc_feature (1307)..(1307): n is a, c, g, or t
  misc_feature (1309)..(1314): n is a, c, g, or t
  misc_feature (1317)..(1330): n is a, c, g, or t
  misc_feature (1334)..(1334): n is a, c, g, or t
  misc_feature (1341)..(1342): n is a, c, g, or t
  misc_feature (1345)..(1346): n is a, c, g, or t
  misc_feature (1350)..(1350): n is a, c, g, or t
  misc_feature (1353)..(1353): n is a, c, g, or t
  misc_feature (1356)..(1356): n is a, c, g, or t
  misc_feature (1360)..(1360): n is a, c, g, or t
  misc_feature (1362)..(1362): n is a, c, g, or t
  misc_feature (1370)..(1370): n is a, c, g, or t
  misc_feature (1374)..(1374): n is a, c, g, or t
  misc_feature (1384)..(1384): n is a, c, g, or t
  misc_feature (1388)..(1388): n is a, c, g, or t
  misc_feature (1390)..(1390): n is a, c, g, or t
  misc_feature (1399)..(1400): n is a, c, g, or t
tagagagattactatgagaggatcgcatcaccatcaccatcacggatcctatttaggtgacactatagaatcgtcgacccacgcgtccgatcctaagcctaataaattgccaaaatctaagcaatcagagactgtggatcaaaattcagattctgatgaaatgctagcaatcctcaaagaggtgagcaggatgagtcacagttcttcttcagatactgatattaatgaaattcatacaaaccataagactttgtatgatttaaagactcaggcggggaaagatgataaaggaaaaaggaaacgaaaaagttctacatctggctcagattttgatactaaaaagggcaaatcagctaagagctctataatttctaaaaagaaacgacaaacccagtctgagtcttctaattatgactcagaattagaaaaagagataaagagcatgagtaaaattggtgctgccagaaccaccaaaaaaagaattccaaatacaaaagattttgactcttctgaagatgagaaacacagcaaaaaaggaatggataatcaagggcacaaaaatttgaagacctcacaagaaggatcatctgatgatgctgaaagaaaacaagagagagagactttctcttcagcagaaggcacagttgataaagacacgaccatcatggaattaagagatcgacttcctaagaagcagcaagcaagtgcttccactgatggtgtcgataagctttctgggaaagagcagagttttacttctttggaagttagaaaagttgctgaaactaaagaaaagagcaagcatctcaaaaccaaacatgtaaaaaaagtacaggatggcttatctgatattgcagagaaattcctaaaagaaaagaccagagcgatgaancttctgaagatgataaaaagccagagcnaaaagggganctggaagaaaaaaaanaaaccctccngactttaangaaaaangtaattaaaatggaaccaccgtatgaatcttcctctgaggccctgaaaagttncctgagcgnnnaaaaatttttccttttcctangggcttaaaacnaattnagaanggaccaccgggnggnaaaaaaaaagtaaaaatnagannataaacctcnaaaaanagggngaatttctgatttgccggnaaatccccgggnaagggaaatntttggncccncccangaanaaaaagcccgggacccccnaaacgggggttnnaaaaaaaananccccccggggcttggtcncaaaaaaanannnnnaanncnnnanannnnnnnnannnnnnnnanacnannnnnncannnnnnnnnnnnnngggnccccccnnggnnaaanatntangggncnccgtgaanccancccccccccntttntnacccgccgnn

SEQ ID NO: 541 - DNA, 1401 bp, Homo Sapiens
  misc_feature (873)..(873): n is a, c, g, or t
  misc_feature (960)..(960): n is a, c, g, or t
  misc_feature (991)..(991): n is a, c, g, or t
  misc_feature (998)..(998): n is a, c, g, or t
  misc_feature (1013)..(1013): n is a, c, g, or t
  misc_feature (1019)..(1019): n is a, c, g, or t
  misc_feature (1034)..(1034): n is a, c, g, or t
  misc_feature (1043)..(1043): n is a, c, g, or t
  misc_feature (1048)..(1048): n is a, c, g, or t
  misc_feature (1060)..(1060): n is a, c, g, or t
  misc_feature (1066)..(1066): n is a, c, g, or t
  misc_feature (1089)..(1089): n is a, c, g, or t
  misc_feature (1092)..(1093): n is a, c, g, or t
  misc_feature (1098)..(1098): n is a, c, g, or t
  misc_feature (1111)..(1111): n is a, c, g, or t
  misc_feature (1136)..(1136): n is a, c, g, or t
  misc_feature (1147)..(1147): n is a, c, g, or t
  misc_feature (1151)..(1151): n is a, c, g, or t
  misc_feature (1153)..(1153): n is a, c, g, or t
  misc_feature (1169)..(1169): n is a, c, g, or t
  misc_feature (1172)..(1172): n is a, c, g, or t
  misc_feature (1174)..(1174): n is a, c, g, or t
  misc_feature (1176)..(1176): n is a, c, g, or t
  misc_feature (1178)..(1178): n is a, c, g, or t
  misc_feature (1204)..(1204): n is a, c, g, or t
  misc_feature (1209)..(1209): n is a, c, g, or t
  misc_feature (1213)..(1213): n is a, c, g, or t
  misc_feature (1215)..(1215): n is a, c, g, or t
  misc_feature (1226)..(1226): n is a, c, g, or t
  misc_feature (1238)..(1238): n is a, c, g, or t
  misc_feature (1243)..(1243): n is a, c, g, or t
  misc_feature (1252)..(1252): n is a, c, g, or t
  misc_feature (1263)..(1265): n is a, c, g, or t
  misc_feature (1267)..(1267): n is a, c, g, or t
  misc_feature (1269)..(1269): n is a, c, g, or t
  misc_feature (1271)..(1276): n is a, c, g, or t
  misc_feature (1285)..(1285): n is a, c, g, or t
  misc_feature (1293)..(1294): n is a, c, g, or t
  misc_feature (1304)..(1305): n is a, c, g, or t
  misc_feature (1313)..(1314): n is a, c, g, or t
  misc_feature (1316)..(1317): n is a, c, g, or t
  misc_feature (1319)..(1319): n is a, c, g, or t
  misc_feature (1326)..(1326): n is a, c, g, or t
  misc_feature (1331)..(1332): n is a, c, g, or t
  misc_feature (1347)..(1347): n is a, c, g, or t
  misc_feature (1360)..(1361): n is a, c, g, or t
  misc_feature (1367)..(1367): n is a, c, g, or t
  misc_feature (1372)..(1372): n is a, c, g, or t
  misc_feature (1374)..(1374): n is a, c, g, or t
  misc_feature (1383)..(1384): n is a, c, g, or t
  misc_feature (1390)..(1390): n is a, c, g, or t
  misc_feature (1395)..(1395): n is a, c, g, or t
  misc_feature (1398)..(1398): n is a, c, g, or t
tagagaaattactatgagaggatcgcatcaccatcaccatcacggatcctatttaggtgacactatagaatcgtcgacccacgcgtccgcccagaccctgaggatactgtgctatgaaaagtgttacaacaagacgaagatccccaaggaggacggcgagagcacggacagactcatggggaagggccaggtccagctggacccgcaggccctgcaggacagagactggcagcgcaccgtcatcgccatgaatgggatcgaagtaaagctctcggtcaagttcaacagcagggagttcagcttgaagaggatgccgtcccgaaaacagacaggggtcttcggagtcaagattgctgtggtcaccaagagagagaggtccaaggtgccctacatcgtgcgccagtgcgtggaggagatcgagcgccgaggcatggaggaggtgggcatctaccgcgtgtccggtgtggccacggacatccaggcactgaaggcagccttcgacgtcaataacaaggacgtgtcggtgatgatgagcgagatggacgtgaacgccatcgcaggcacgctgaagctgtacttccgtgagctgcccgagcccctcttcactgacgagttctaccccaacttcgcagagggcatcgctctttcagacccggttgcaaaggagagctgcatgctcaacctgctgctgtccctgccggaggccaacctgctcaccttccttttccttctggaccacctgaaaaggtccaggtgctgctgtacttcctgcagctggaggccatccctgccccggacagcaagagacagagcatcctgttctccaccgaagtctaaaggtcccagtccatctcctggaggcggacagatggncctggaaacctctggctaatcggggccatccgtaaagcgggaaccttcctgaggtgtctttgggccccccccaagtgttgggccatntgccaagaaacagcgacccaaacccaaaganaggtggncctggaaaaatcccncccagntttgggaacccccangctgggccncaaantggggttttttntttggncccctgagggccccccaagccanttnnttcgnaatccagccctgncctgggaaaaaaggtgaagggatgnttttttaaacntacntnaaatctaaaaaatttnctngnancntttcaaaatccccctcttgggaaaangaacngaangnattcccccgtntttttttgaaanccccncttttcccntgaaaaaaaannnananannnnnnaaaaaaggngccccccnnaggggcctannacttttcnncnngnccccggnaaaannaaaccccaacccctntttttaacccccnnccccgnttttntnaaccccttnnattttnacaanaanaaa

SEQ ID NO: 542 - DNA, 1500 bp, Homo Sapiens
  misc_feature (101)..(101): n is a, c, g, or t
  misc_feature (300)..(300): n is a, c, g, or t
  misc_feature (305)..(305): n is a, c, g, or t
  misc_feature (351)..(351): n is a, c, g, or t
  misc_feature (412)..(412): n is a, c, g, or t
  misc_feature (414)..(414): n is a, c, g, or t
  misc_feature (432)..(432): n is a, c, g, or t
  misc_feature (457)..(457): n is a, c, g, or t
  misc_feature (503)..(503): n is a, c, g, or t
  misc_feature (511)..(513): n is a, c, g, or t
  misc_feature (541)..(541): n is a, c, g, or t
  misc_feature (550)..(550): n is a, c, g, or t
  misc_feature (584)..(584): n is a, c, g, or t
  misc_feature (590)..(590): n is a, c, g, or t
  misc_feature (602)..(602): n is a, c, g, or t
  misc_feature (615)..(615): n is a, c, g, or t
  misc_feature (629)..(629): n is a, c, g, or t
  misc_feature (638)..(638): n is a, c, g, or t
  misc_feature (647)..(647): n is a, c, g, or t
  misc_feature (652)..(652): n is a, c, g, or t
  misc_feature (684)..(684): n is a, c, g, or t
  misc_feature (687)..(687): n is a, c, g, or t
  misc_feature (703)..(703): n is a, c, g, or t
  misc_feature (715)..(716): n is a, c, g, or t
  misc_feature (744)..(745): n is a, c, g, or t
  misc_feature (749)..(749): n is a, c, g, or t
  misc_feature (752)..(752): n is a, c, g, or t
  misc_feature (754)..(754): n is a, c, g, or t
  misc_feature (757)..(757): n is a, c, g, or t
  misc_feature (764)..(764): n is a, c, g, or t
  misc_feature (777)..(777): n is a, c, g, or t
  misc_feature (787)..(787): n is a, c, g, or t
  misc_feature (797)..(797): n is a, c, g, or t
  misc_feature (800)..(800): n is a, c, g, or t
  misc_feature (805)..(805): n is a, c, g, or t
  misc_feature (811)..(812): n is a, c, g, or t
  misc_feature (815)..(815): n is a, c, g, or t
  misc_feature (819)..(819): n is a, c, g, or t
  misc_feature (831)..(833): n is a, c, g, or t
  misc_feature (837)..(838): n is a, c, g, or t
  misc_feature (841)..(841): n is a, c, g, or t
  misc_feature (844)..(844): n is a, c, g, or t
  misc_feature (846)..(849): n is a, c, g, or t
  misc_feature (855)..(855): n is a, c, g, or t
  misc_feature (868)..(868): n is a, c, g, or t
  misc_feature (872)..(872): n is a, c, g, or t
  misc_feature (877)..(877): n is a, c, g, or t
  misc_feature (883)..(885): n is a, c, g, or t
  misc_feature (887)..(888): n is a, c, g, or t
  misc_feature (897)..(897): n is a, c, g, or t
  misc_feature (901)..(906): n is a, c, g, or t
  misc_feature (912)..(912): n is a, c, g, or t
  misc_feature (919)..(919): n is a, c, g, or t
  misc_feature (921)..(922): n is a, c, g, or t
  misc_feature (928)..(928): n is a, c, g, or t
  misc_feature (941)..(941): n is a, c, g, or t
  misc_feature (946)..(946): n is a, c, g, or t
  misc_feature (950)..(950): n is a, c, g, or t
  misc_feature (955)..(955): n is a, c, g, or t
  misc_feature (961)..(961): n is a, c, g, or t
  misc_feature (967)..(969): n is a, c, g, or t
  misc_feature (971)..(971): n is a, c, g, or t
  misc_feature (976)..(976): n is a, c, g, or t
  misc_feature (978)..(978): n is a, c, g, or t
  misc_feature (983)..(983): n is a, c, g, or t
  misc_feature (985)..(985): n is a, c, g, or t
  misc_feature (987)..(987): n is a, c, g, or t
  misc_feature (989)..(989): n is a, c, g, or t
  misc_feature (992)..(992): n is a, c, g, or t
  misc_feature (999)..(999): n is a, c, g, or t
  misc_feature (1001)..(1001): n is a, c, g, or t
  misc_feature (1005)..(1005): n is a, c, g, or t
  misc_feature (1014)..(1014): n is a, c, g, or t
  misc_feature (1022)..(1022): n is a, c, g, or t
  misc_feature (1037)..(1037): n is a, c, g, or t
  misc_feature (1039)..(1039): n is a, c, g, or t
  misc_feature (1043)..(1043): n is a, c, g, or t
  misc_feature (1045)..(1045): n is a, c, g, or t
  misc_feature (1053)..(1054): n is a, c, g, or t
  misc_feature (1069)..(1070): n is a, c, g, or t
  misc_feature (1078)..(1078): n is a, c, g, or t
  misc_feature (1083)..(1083): n is a, c, g, or t
  misc_feature (1086)..(1087): n is a, c, g, or t
  misc_feature (1092)..(1092): n is a, c, g, or t
  misc_feature (1094)..(1097): n is a, c, g, or t
  misc_feature (1100)..(1100): n is a, c, g, or t
  misc_feature (1104)..(1104): n is a, c, g, or t
  misc_feature (1109)..(1109): n is a, c, g, or t
  misc_feature (1112)..(1113): n is a, c, g, or t
  misc_feature (1121)..(1121): n is a, c, g, or t
  misc_feature (1123)..(1123): n is a, c, g, or t
  misc_feature (1125)..(1125): n is a, c, g, or t
  misc_feature (1138)..(1139): n is a, c, g, or t
  misc_feature (1142)..(1143): n is a, c, g, or t
  misc_feature (1147)..(1147): n is a, c, g, or t
  misc_feature (1165)..(1165): n is a, c, g, or t
  misc_feature (1185)..(1185): n is a, c, g, or t
  misc_feature (1187)..(1187): n is a, c, g, or t
  misc_feature (1189)..(1189): n is a, c, g, or t
  misc_feature (1191)..(1192): n is a, c, g, or t
  misc_feature (1194)..(1194): n is a, c, g, or t
  misc_feature (1196)..(1197): n is a, c, g, or t
  misc_feature (1200)..(1200): n is a, c, g, or t
  misc_feature (1206)..(1206): n is a, c, g, or t
  misc_feature (1209)..(1209): n is a, c, g, or t
  misc_feature (1219)..(1219): n is a, c, g, or t
  misc_feature (1222)..(1222): n is a, c, g, or t
  misc_feature (1228)..(1228): n is a, c, g, or t
  misc_feature (1234)..(1234): n is a, c, g, or t
  misc_feature (1237)..(1237): n is a, c, g, or t
  misc_feature (1239)..(1239): n is a, c, g, or t
  misc_feature (1242)..(1244): n is a, c, g, or t
  misc_feature (1247)..(1247): n is a, c, g, or t
  misc_feature (1249)..(1249): n is a, c, g, or t
  misc_feature (1261)..(1262): n is a, c, g, or t
  misc_feature (1264)..(1264): n is a, c, g, or t
  misc_feature (1273)..(1273): n is a, c, g, or t
  misc_feature (1275)..(1275): n is a, c, g, or t
  misc_feature (1277)..(1277): n is a, c, g, or t
  misc_feature (1289)..(1289): n is a, c, g, or t
  misc_feature (1291)..(1292): n is a, c, g, or t
  misc_feature (1296)..(1297): n is a, c, g, or t
  misc_feature (1307)..(1307): n is a, c, g, or t
  misc_feature (1309)..(1309): n is a, c, g, or t
  misc_feature (1312)..(1313): n is a, c, g, or t
  misc_feature (1326)..(1326): n is a, c, g, or t
  misc_feature (1329)..(1329): n is a, c, g, or t
  misc_feature (1337)..(1337): n is a, c, g, or t
  misc_feature (1342)..(1342): n is a, c, g, or t
  misc_feature (1347)..(1347): n is a, c, g, or t
  misc_feature (1351)..(1351): n is a, c, g, or t
  misc_feature (1353)..(1353): n is a, c, g, or t
  misc_feature (1357)..(1358): n is a, c, g, or t
  misc_feature (1372)..(1372): n is a, c, g, or t
  misc_feature (1374)..(1374): n is a, c, g, or t
  misc_feature (1376)..(1376): n is a, c, g, or t
  misc_feature (1381)..(1383): n is a, c, g, or t
  misc_feature (1386)..(1387): n is a, c, g, or t
  misc_feature (1391)..(1391): n is a, c, g, or t
  misc_feature (1399)..(1403): n is a, c, g, or t
  misc_feature (1410)..(1410): n is a, c, g, or t
  misc_feature (1415)..(1415): n is a, c, g, or t
  misc_feature (1420)..(1420): n is a, c, g, or t
  misc_feature (1423)..(1423): n is a, c, g, or t
  misc_feature (1434)..(1434): n is a, c, g, or t
  misc_feature (1441)..(1441): n is a, c, g, or t
  misc_feature (1458)..(1458): n is a, c, g, or t
  misc_feature (1460)..(1460): n is a, c, g, or t
  misc_feature (1476)..(1476): n is a, c, g, or t
  misc_feature (1478)..(1478): n is a, c, g, or t
  misc_feature (1481)..(1481): n is a, c, g, or t
  misc_feature (1485)..(1485): n is a, c, g, or t
  misc_feature (1491)..(1491): n is a, c, g, or t
  misc_feature (1495)..(1496): n is a, c, g, or t
  misc_feature (1498)..(1498): n is a, c, g, or t
atttagagaaattactatgagaggatcgcatcaccatcaccatcacggatcctatttaggtgacactatagaatcgtcgacccacgcgtccggccccaagnccagcctctcgccagctgggagtcgcgcgctgcccacctcgctgcccaggcccccgacgccgcggcaggagccccccaagagcgcgggaagccccgtggacctggcgctcccggctcgggcgtggacggggcgggcgccggggcggggcgcgcgtcctcgcgggtctgaatggaagggtcgaggtcgtcgtcggcggcnagcanatcctgaagccagaactccaccccggcgcccgcgccatgcggcggnagaggcatcacgtggggcaaggtggtgtccctgtatgcggtggccgcggggctggccgtgnantgtgtgaggcaggcccancctgccatggtccacgccctcgtgnactgcctgggggagttcgtgcgcaagaccctgtcaacctggctgcngagacgcnnnggatggactgatgtcctcaagtgtgtgntcaacacanaccctggcctccgctcccactggctggtggctgnactctncagcttcagccncttcctgaaaggntgccttcttcgtgntgctgccanagagatganctgcncacctgtcagtggcctcagcctggtcctttgnagnccaactcaagaaggcnctcaacaccccnnaaaacatcttcctcctccccaaccaaannctgnaancnctnttaaacnctcgaaacacccncttaaaactncctttctttnaanaaaanccaagnnccnttcncagaaattggtnnnaatnnagnaangnnnnttttcnttaaaatcttgtnaacntggtntttttnnntnntttcatganaaannnnnnccccancttgtgntnncccttntccagattaatanccaangttnttccncatttnttttcnnngngctcnantaatntnangnacntactacncnattncttaaaatntcaatagncaccaaaaaaaaccntnttcntntcatgaanncaactaagtataaannatacccangaaanatnntctcntnnnnatnaaanaatanacnngaaagtanantnagaaaaaaaactnntcnntcancattaaaaccccatatcnaaagaaaaccaaaaataaantntntnnanannaantcactnaantaaaatagtntanaaacancctacnttntnatnnnatntnccaatgatagtnntnactacgaanancntacttctatttntnncctnntaaagataantnctnnataatacatttcnctncctctatnttacnctatntaanantatnntaacatataatttnanantatannnttnncaanaaagttannnnnataatanttttnctcantcnaatcatagaantaacctntaaacataactcctatncntacataaaatatatcnanatntaanttgttncatnnanat

SEQ ID NO: 543 - DNA, 1343 bp, Homo Sapiens
  misc_feature (820)..(820): n is a, c, g, or t
  misc_feature (931)..(931): n is a, c, g, or t
  misc_feature (949)..(949): n is a, c, g, or t
  misc_feature (957)..(957): n is a, c, g, or t
  misc_feature (979)..(979): n is a, c, g, or t
  misc_feature (985)..(985): n is a, c, g, or t
  misc_feature (990)..(990): n is a, c, g, or t
  misc_feature (992)..(992): n is a, c, g, or t
  misc_feature (1006)..(1006): n is a, c, g, or t
  misc_feature (1036)..(1036): n is a, c, g, or t
  misc_feature (1038)..(1038): n is a, c, g, or t
  misc_feature (1053)..(1053): n is a, c, g, or t
  misc_feature (1059)..(1059): n is a, c, g, or t
  misc_feature (1064)..(1064): n is a, c, g, or t
  misc_feature (1074)..(1074): n is a, c, g, or t
  misc_feature (1080)..(1080): n is a, c, g, or t
  misc_feature (1082)..(1082): n is a, c, g, or t
  misc_feature (1086)..(1086): n is a, c, g, or t
  misc_feature (1090)..(1090): n is a, c, g, or t
  misc_feature (1097)..(1098): n is a, c, g, or t
  misc_feature (1100)..(1102): n is a, c, g, or t
  misc_feature (1104)..(1104): n is a, c, g, or t
  misc_feature (1107)..(1107): n is a, c, g, or t
  misc_feature (1113)..(1113): n is a, c, g, or t
  misc_feature (1125)..(1126): n is a, c, g, or t
  misc_feature (1128)..(1128): n is a, c, g, or t
  misc_feature (1146)..(1146): n is a, c, g, or t
  misc_feature (1148)..(1148): n is a, c, g, or t
  misc_feature (1152)..(1152): n is a, c, g, or t
  misc_feature (1168)..(1168): n is a, c, g, or t
  misc_feature (1175)..(1176): n is a, c, g, or t
  misc_feature (1193)..(1193): n is a, c, g, or t
  misc_feature (1203)..(1203): n is a, c, g, or t
  misc_feature (1206)..(1206): n is a, c, g, or t
  misc_feature (1210)..(1210): n is a, c, g, or t
  misc_feature (1214)..(1214): n is a, c, g, or t
  misc_feature (1220)..(1222): n is a, c, g, or t
  misc_feature (1224)..(1224): n is a, c, g, or t
  misc_feature (1231)..(1231): n is a, c, g, or t
  misc_feature (1233)..(1233): n is a, c, g, or t
  misc_feature (1238)..(1239): n is a, c, g, or t
  misc_feature (1243)..(1243): n is a, c, g, or t
  misc_feature (1245)..(1245): n is a, c, g, or t
  misc_feature (1248)..(1248): n is a, c, g, or t
  misc_feature (1250)..(1250): n is a, c, g, or t
  misc_feature (1254)..(1254): n is a, c, g, or t
  misc_feature (1258)..(1258): n is a, c, g, or t
  misc_feature (1261)..(1261): n is a, c, g, or t
  misc_feature (1263)..(1263): n is a, c, g, or t
  misc_feature (1267)..(1267): n is a, c, g, or t
  misc_feature (1277)..(1278): n is a, c, g, or t
  misc_feature (1280)..(1280): n is a, c, g, or t
  misc_feature (1282)..(1282): n is a, c, g, or t
  misc_feature (1284)..(1284): n is a, c, g, or t
  misc_feature (1289)..(1291): n is a, c, g, or t
  misc_feature (1295)..(1295): n is a, c, g, or t
  misc_feature (1298)..(1298): n is a, c, g, or t
  misc_feature (1306)..(1307): n is a, c, g, or t
  misc_feature (1310)..(1310): n is a, c, g, or t
  misc_feature (1323)..(1323): n is a, c, g, or t
  misc_feature (1327)..(1337): n is a, c, g, or t
  misc_feature (1339)..(1342): n is a, c, g, or t
aatagagaaattactatgagaggatcgcatcaccatcaccatcacggatcctatttaggtgacactatagaatcgtcgacccacgcgtccgaggatgcctgcgagcatctggcggagtacttggaagcctattggaaggccacacacccgcccagcagcacgccacccaatccgctgctgaaccgcaccatggctaccgcagccctggctgccagccctgcccctgtctccaacctccagggaccctaccttgcttccggggaccagccactggaacgggccaccggggagcacgccagcatgcacgagtacccaggggagctgggccagcccccaggcctttaccccagcagccacccaccaggccgggcaggcacgctacgggcactgtcccgccaagacacttttgatgccgacacccccggcagccgaaactctgcctacacggagctgggagactcatgtgtggacatggagactgacccctcagaggggccagggcttggagaccctgcagggggcggcacgcccccagcccgacagggatcctgggaggacgaggaagaagactatgaggaagagctgaccgacaaccggaaccggggccggaataaggcccgctactgcgctgagggtgggggtccagttttggggcgcaacaagaatgagctggagggctggggacgaggcgtctacattcgctgagaggcaggggccacacggcgggaggaagggctctgagcccaggggaggggagggagcgaggggctcacacctgacatgtattcgcctccagggggcgctgtctccctcctttcanatgcctttgctcaaagcttggggtttctttggtgttaccatcccagctcccgggaaggcccttaagccccagctgtcggtttttacctgcctgttgtggatggatgggggnatacccacctttctgaantgtccccntttctccccatcttaaaggggnttttcnttccntncacccttcctaaanaaaaaggtggcactttccttaaattttttntnattcgggggcccctnaatgangggtnctaaatgggnatgggntnttcntttntcccaanntnnnanaantggggnaaagggctgggnncntttttcttggaaaagggnangccnaaaaattttttcccanggggggnnttttttcccaaaacccnaaaattcaanggntccntaanccttgnnngnccctttntnccaanntttntnggnanattntttnggntngggnaaaaccaaanntngnanccccnnngggnaantttttttnnggnaggttttgggggnaaannnnnnnnnnnannnnc

SEQ ID NO: 544 - DNA, 1200 bp, Homo Sapiens
  misc_feature (904)..(904): n is a, c, g, or t
  misc_feature (907)..(907): n is a, c, g, or t
  misc_feature (916)..(916): n is a, c, g, or t
  misc_feature (927)..(927): n is a, c, g, or t
  misc_feature (930)..(930): n is a, c, g, or t
  misc_feature (949)..(949): n is a, c, g, or t
  misc_feature (953)..(953): n is a, c, g, or t
  misc_feature (973)..(973): n is a, c, g, or t
  misc_feature (988)..(988): n is a, c, g, or t
  misc_feature (994)..(994): n is a, c, g, or t
  misc_feature (1001)..(1001): n is a, c, g, or t
  misc_feature (1004)..(1004): n is a, c, g, or t
  misc_feature (1008)..(1008): n is a, c, g, or t
  misc_feature (1012)..(1012): n is a, c, g, or t
  misc_feature (1035)..(1035): n is a, c, g, or t
  misc_feature (1044)..(1045): n is a, c, g, or t
  misc_feature (1048)..(1048): n is a, c, g, or t
  misc_feature (1052)..(1053): n is a, c, g, or t
  misc_feature (1056)..(1056): n is a, c, g, or t
  misc_feature (1077)..(1077): n is a, c, g, or t
  misc_feature (1080)..(1080): n is a, c, g, or t
  misc_feature (1082)..(1082): n is a, c, g, or t
  misc_feature (1088)..(1088): n is a, c, g, or t
  misc_feature (1098)..(1098): n is a, c, g, or t
  misc_feature (1121)..(1121): n is a, c, g, or t
  misc_feature (1132)..(1132): n is a, c, g, or t
  misc_feature (1137)..(1137): n is a, c, g, or t
  misc_feature (1148)..(1148): n is a, c, g, or t
  misc_feature (1160)..(1160): n is a, c, g, or t
  misc_feature (1163)..(1163): n is a, c, g, or t
  misc_feature (1170)..(1170): n is a, c, g, or t
  misc_feature (1173)..(1173): n is a, c, g, or t
  misc_feature (1178)..(1178): n is a, c, g, or t
  misc_feature (1187)..(1187): n is a, c, g, or t
  misc_feature (1195)..(1195): n is a, c, g, or t
  misc_feature (1197)..(1197): n is a, c, g, or t
  misc_feature (1199)..(1199): n is a, c, g, or t
gagaaattactatgagaggatcgcatcaccatcaccatcacggatcctatttaggtgacactatagaatcgtcgacccacgcgtccgcgcagtgctcctacttcaagtgcgtgcagaaggacatccaaccctacatgcgcagaatggtggccacctggatgctggaggtctgtgaggaacagaagtgcgaagaagaggtcttccctctggccatgaattacctggaccgtttcttggctggggtcccgactccgaagtcccatctgcaactcctgggtgctgtctgcatgttcctggcctccaaactcaaagagaccagcccgctgaccgcggagaagctgtgcatttacaccgacaactccatcaagcctcaggagctgctggagtgggaactggtggtgctggggaagttgaagtggaacctggcagctgtcactcctcatgacttcattgagcacatcttgcgcaagctgccccagcagcgggagaagctgtctctgatccgcaagcatgctcagaccttcattgctctgtgtgccaccgactttaagtttgccatgtacccaccgtcgatgatcgcaactggaagtgtgggagcagccatctgtgggctccagcaggatgaggaagtgagctcgctcacttgtgatgccctgactgagctgctggctaagatcaccaacacagacgtggattgtctcaaagcttgccaggagcagattgaggcggtgctcctcaatagcctgcagcagtaccgtcaggaccaacgtgacggatccaagtcggaggatgaactggaccaagccagcacccctacagacgtgcgggatatcgacctgtgaggatgccagttgggccgaaagagagagacgcgtccataatctggtctcttcttctttctggntgnttttgttcnttgggttttanggngaacttaaaaaaaaaaatnctgnccccccctaaatcatatttnaagatcttttaaaantgaaanaaaaagntcntacnaaancggaataataaaaagcatttggngcctatttnnaantacnncanaagggaatcccttgtaatgcnaananttttgnttgattttgnaaaagtaaaataaaatgcttacnggaaacctgcnaaaanttaaaaaaatnttgcctgcaaanggnaaaaatnaangaaanttttttttntgttaagncnanc

SEQ ID NO: 545 - DNA, 1200 bp, Homo Sapiens
  misc_feature (3)..(3): n is a, c, g, or t
  misc_feature (25)..(25): n is a, c, g, or t
  misc_feature (908)..(908): n is a, c, g, or t
  misc_feature (914)..(914): n is a, c, g, or t
  misc_feature (920)..(920): n is a, c, g, or t
  misc_feature (941)..(941): n is a, c, g, or t
  misc_feature (956)..(957): n is a, c, g, or t
  misc_feature (962)..(962): n is a, c, g, or t
  misc_feature (967)..(967): n is a, c, g, or t
  misc_feature (986)..(986): n is a, c, g, or t
  misc_feature (994)..(995): n is a, c, g, or t
  misc_feature (1019)..(1020): n is a, c, g, or t
  misc_feature (1027)..(1027): n is a, c, g, or t
  misc_feature (1036)..(1036): n is a, c, g, or t
  misc_feature (1045)..(1045): n is a, c, g, or t
  misc_feature (1049)..(1050): n is a, c, g, or t
  misc_feature (1052)..(1052): n is a, c, g, or t
  misc_feature (1054)..(1054): n is a, c, g, or t
  misc_feature (1064)..(1064): n is a, c, g, or t
  misc_feature (1079)..(1079): n is a, c, g, or t
  misc_feature (1081)..(1081): n is a, c, g, or t
  misc_feature (1083)..(1083): n is a, c, g, or t
  misc_feature (1086)..(1086): n is a, c, g, or t
  misc_feature (1090)..(1090): n is a, c, g, or t
  misc_feature (1095)..(1096): n is a, c, g, or t
  misc_feature (1101)..(1101): n is a, c, g, or t
  misc_feature (1106)..(1107): n is a, c, g, or t
  misc_feature (1117)..(1117): n is a, c, g, or t
  misc_feature (1120)..(1120): n is a, c, g, or t
  misc_feature (1122)..(1122): n is a, c, g, or t
  misc_feature (1137)..(1141): n is a, c, g, or t
  misc_feature (1151)..(1151): n is a, c, g, or t
  misc_feature (1154)..(1155): n is a, c, g, or t
  misc_feature (1159)..(1159): n is a, c, g, or t
  misc_feature (1173)..(1173): n is a, c, g, or t
  misc_feature (1175)..(1175): n is a, c, g, or t
  misc_feature (1181)..(1181): n is a, c, g, or t
  misc_feature (1187)..(1188): n is a, c, g, or t
  misc_feature (1195)..(1196): n is a, c, g, or t
  misc_feature (1199)..(1199): n is a, c, g, or t
atngagaaattactatgagaggatngcatcaccatcaccatcacggatcctatttaggtgacactatagaatcgtcgacccacgcgtccggcaggagctgtcgggaagatcagaagccagtcatggatgaccagcgcgaccttatctccaacaatgagcaactgcccatgctgggccggcgccctggggccccggagagcaagtgcagccgcggagccctgtacacaggcttttccatcctggtgactctgctcctcgctggccaggccaccaccgcctacttcctgtaccagcagcagggccggctggacaaactgacagtcacctcccagaacctgcagctggagaacctgcgcatgaagcttcccaagcctcccaagcctgtgagcaagatgcgcatggccaccccgctgctgatgcaggcgctgcccatgggagccctgccccaggggcccatgcagaatgccaccaagtatggcaacatgacagaggaccatgtgatgcacctgctccagaatgctgaccccctgaaggtgtacccgccactgaaggggagcttcccggagaacctgagacaccttaagaacaccatggagaccatagactggaaggtctttgagagctggatgcaccattggctcctgtttgaaatgagcaggcactccttggagcaaaagcccactgacgctccaccgaaagagtcactggaactggaggacccgtcttctgggctgggtgtgaccaagcaggatctgggcccagtccccatgtgagagcagcagaggcggtcttcaacatcctgccagccccacacagctacagctttcttgctcccttcagcccccagcccctcccccatctcccaccctgtgcctcatcccatgaaaccctggtgcctggctctttcntcaccnttgganaaaaaaaccaagtcggaacancaaataacaatgcannaaggncctgntgcccaatctccatttgtnaaaggggnntgaggtcccagaagtggccaaaanntaaaaanatcccgttncttaaaatnaaannancntccaaaaaanggttccaaaaactangntnttngaanaaaannggaangccannggaaaaaggnatnancttaacccaaacccnnnnnggaatggtgnatnncccncccctccacctttngnctttgntttttnncaattannggng

SEQ ID NO: 546 - DNA, 1462 bp, Homo Sapiens
  misc_feature (6)..(6): n is a, c, g, or t
  misc_feature (19)..(19): n is a, c, g, or t
  misc_feature (373)..(373): n is a, c, g, or t
  misc_feature (549)..(549): n is a, c, g, or t
  misc_feature (650)..(650): n is a, c, g, or t
  misc_feature (705)..(705): n is a, c, g, or t
  misc_feature (721)..(721): n is a, c, g, or t
  misc_feature (725)..(725): n is a, c, g, or t
  misc_feature (749)..(749): n is a, c, g, or t
  misc_feature (762)..(762): n is a, c, g, or t
  misc_feature (778)..(778): n is a, c, g, or t
  misc_feature (797)..(797): n is a, c, g, or t
  misc_feature (815)..(815): n is a, c, g, or t
  misc_feature (825)..(825): n is a, c, g, or t
  misc_feature (833)..(833): n is a, c, g, or t
  misc_feature (838)..(838): n is a, c, g, or t
  misc_feature (844)..(844): n is a, c, g, or t
  misc_feature (851)..(851): n is a, c, g, or t
  misc_feature (854)..(854): n is a, c, g, or t
  misc_feature (856)..(856): n is a, c, g, or t
  misc_feature (865)..(866): n is a, c, g, or t
  misc_feature (872)..(873): n is a, c, g, or t
  misc_feature (883)..(883): n is a, c, g, or t
  misc_feature (892)..(892): n is a, c, g, or t
  misc_feature (894)..(894): n is a, c, g, or t
  misc_feature (908)..(908): n is a, c, g, or t
  misc_feature (911)..(911): n is a, c, g, or t
  misc_feature (918)..(918): n is a, c, g, or t
  misc_feature (929)..(931): n is a, c, g, or t
  misc_feature (934)..(934): n is a, c, g, or t
  misc_feature (939)..(939): n is a, c, g, or t
  misc_feature (943)..(943): n is a, c, g, or t
  misc_feature (946)..(947): n is a, c, g, or t
  misc_feature (949)..(949): n is a, c, g, or t
  misc_feature (953)..(953): n is a, c, g, or t
  misc_feature (963)..(963): n is a, c, g, or t
  misc_feature (968)..(969): n is a, c, g, or t
  misc_feature (978)..(978): n is a, c, g, or t
  misc_feature (988)..(988): n is a, c, g, or t
  misc_feature (997)..(997): n is a, c, g, or t
  misc_feature (1000)..(1000): n is a, c, g, or t
  misc_feature (1003)..(1003): n is a, c, g, or t
  misc_feature (1010)..(1010): n is a, c, g, or t
  misc_feature (1013)..(1014): n is a, c, g, or t
  misc_feature (1018)..(1020): n is a, c, g, or t
  misc_feature (1022)..(1022): n is a, c, g, or t
  misc_feature (1024)..(1025): n is a, c, g, or t
  misc_feature (1032)..(1032): n is a, c, g, or t
  misc_feature (1041)..(1041): n is a, c, g, or t
  misc_feature (1043)..(1043): n is a, c, g, or t
  misc_feature (1048)..(1048): n is a, c, g, or t
  misc_feature (1057)..(1057): n is a, c, g, or t
  misc_feature (1066)..(1066): n is a, c, g, or t
  misc_feature (1068)..(1070): n is a, c, g, or t
  misc_feature (1080)..(1081): n is a, c, g, or t
  misc_feature (1091)..(1091): n is a, c, g, or t
  misc_feature (1094)..(1095): n is a, c, g, or t
  misc_feature (1098)..(1100): n is a, c, g, or t
  misc_feature (1102)..(1102): n is a, c, g, or t
  misc_feature (1106)..(1106): n is a, c, g, or t
  misc_feature (1109)..(1109): n is a, c, g, or t
  misc_feature (1117)..(1118): n is a, c, g, or t
  misc_feature (1122)..(1123): n is a, c, g, or t
  misc_feature (1125)..(1125): n is a, c, g, or t
  misc_feature (1132)..(1132): n is a, c, g, or t
  misc_feature (1137)..(1138): n is a, c, g, or t
  misc_feature (1140)..(1140): n is a, c, g, or t
  misc_feature (1147)..(1147): n is a, c, g, or t
  misc_feature (1154)..(1154): n is a, c, g, or t
  misc_feature (1169)..(1169): n is a, c, g, or t
  misc_feature (1172)..(1172): n is a, c, g, or t
  misc_feature (1174)..(1176): n is a, c, g, or t
  misc_feature (1203)..(1203): n is a, c, g, or t
  misc_feature (1208)..(1208): n is a, c, g, or t
  misc_feature (1212)..(1212): n is a, c, g, or t
  misc_feature (1215)..(1215): n is a, c, g, or t
  misc_feature (1218)..(1218): n is a, c, g, or t
  misc_feature (1236)..(1236): n is a, c, g, or t
  misc_feature (1240)..(1240): n is a, c, g, or t
  misc_feature (1242)..(1244): n is a, c, g, or t
  misc_feature (1252)..(1252): n is a, c, g, or t
  misc_feature (1255)..(1255): n is a, c, g, or t
  misc_feature (1262)..(1262): n is a, c, g, or t
  misc_feature (1268)..(1268): n is a, c, g, or t
  misc_feature (1270)..(1270): n is a, c, g, or t
  misc_feature (1272)..(1273): n is a, c, g, or t
  misc_feature (1281)..(1282): n is a, c, g, or t
  misc_feature (1293)..(1293): n is a, c, g, or t
  misc_feature (1306)..(1308): n is a, c, g, or t
  misc_feature (1316)..(1316): n is a, c, g, or t
  misc_feature (1320)..(1320): n is a, c, g, or t
  misc_feature (1322)..(1322): n is a, c, g, or t
  misc_feature (1325)..(1325): n is a, c, g, or t
  misc_feature (1327)..(1327): n is a, c, g, or t
  misc_feature (1338)..(1339): n is a, c, g, or t
  misc_feature (1344)..(1344): n is a, c, g, or t
  misc_feature (1349)..(1349): n is a, c, g, or t
  misc_feature (1351)..(1351): n is a, c, g, or t
  misc_feature (1363)..(1363): n is a, c, g, or t
  misc_feature (1369)..(1370): n is a, c, g, or t
  misc_feature (1375)..(1375): n is a, c, g, or t
  misc_feature (1377)..(1377): n is a, c, g, or t
  misc_feature (1379)..(1380): n is a, c, g, or t
  misc_feature (1383)..(1383): n is a, c, g, or t
  misc_feature (1389)..(1392): n is a, c, g, or t
  misc_feature (1402)..(1403): n is a, c, g, or t
  misc_feature (1411)..(1411): n is a, c, g, or t
  misc_feature (1414)..(1414): n is a, c, g, or t
  misc_feature (1416)..(1416): n is a, c, g, or t
  misc_feature (1419)..(1420): n is a, c, g, or t
  misc_feature (1424)..(1424): n is a, c, g, or t
  misc_feature (1431)..(1431): n is a, c, g, or t
  misc_feature (1433)..(1435): n is a, c, g, or t
  misc_feature (1440)..(1440): n is a, c, g, or t
  misc_feature (1445)..(1445): n is a, c, g, or t
  misc_feature (1448)..(1448): n is a, c, g, or t
  misc_feature (1454)..(1454): n is a, c, g, or t
  misc_feature (1458)..(1458): n is a, c, g, or t
  misc_feature (1460)..(1460): n is a, c, g, or t
aaaaanaaaagagaaaatnactatgagaggatcgcatcaccatcaccatcacggtatcctatttaggtgacactatagaatcgtcgacccacgcgtccggcgctgtcatgatgttcgttggcttcctgggctgctacggggccatccaggaatcccagtgcctgctggggacgttcttcacctgcctggtcatcctgtttgcctgtgaggtggccgccggcatctggggctttgtcaacaaggaccagatcgccaaggatgtgaagcagttctatgaccaggccctacagcaggccgtggtggatgatgacgccaacaacgccaaggctgtggtgaagaccttccacgagacgcttgactgctgtggctccancacactgactgctttgaccacctcagtgctcaagaacaatttgtgtccctcgggcagcaacatcatcagcaacctcttcaaggaggactgccaccagaagatcgatgacctcttctccgggaagctgtacctcatcggcattgctgccatcgtggtcgctgtgatcatgatcttcnagatgatcctgagcatggtgctgtgctgtggcatccggaacagctccgtgtactgaggccccgcagctctggccacagggacctctgcagtgccccctaantgacccggacacttccgagggggccatcaccgcctgtgtatataacgtttccggnattactctgctacacngtanccttttttacttttgggggttttngtttttgttcctnaaacctttcctgttancctttttcagggcttgaanttcacatgtaggttggcnttgtatgaantggaagancggcncttggntctttgnggnanttggaaggnnaagggnntcctttctgnccctggggntncccaagggtgcctntgncttgctnaaaccaagacnnntcnttggnaaanccnntnctcnccaaaaaaanttcannctttggacnaaatttgggnggggctgtngtncancccaaanccnncccnnncntnnggggctngaaaaactnanccttntttcccctncctgccccnannntccaaaaccnnaatcttgtgnggnnaannntnctgnccntcttggcnncctnntnacctttncaaanncntcccccnttcaaanttgtaaattaaacanatncnnnaatcccgtattttttaaaaaaaaaaangaatncttncgntantctctttaatatatatcntatntnnnataaaacncancaataanaatacntncnnacatcctnnactgataaatnaaccatatattannnaaaaatantacnanggntngcgcccctctnnatagngagantncacaatgtatantattannatatnantnntgncccacnnnntagaaaaatnntctataangancnccnnaatnctcctcnannnatttntatanaancactantgtntncc

SEQ ID NO: 547 - DNA, 971 bp, Homo Sapiens
  misc_feature (853)..(853): n is a, c, g, or t
  misc_feature (856)..(856): n is a, c, g, or t
  misc_feature (862)..(862): n is a, c, g, or t
  misc_feature (885)..(885): n is a, c, g, or t
  misc_feature (903)..(903): n is a, c, g, or t
  misc_feature (910)..(910): n is a, c, g, or t
  misc_feature (922)..(927): n is a, c, g, or t
  misc_feature (929)..(933): n is a, c, g, or t
  misc_feature (935)..(956): n is a, c, g, or t
  misc_feature (959)..(959): n is a, c, g, or t
  misc_feature (962)..(971): n is a, c, g, or t
gaatagagaaattactatgagaggatcgcatcaccatcaccatcacggatcctatttaggtgacactatagaatcgtcgacccacgcgtccggtcgggctttacggcgccggatggctctggacgtgaagtctcgggcaaagcgttatgagaagctggacttccttggggagggacagtttgccaccgtttacaaggccagagataagaataccaaccaaattgtcgccattaagaaaatcaaacttggacatagatcagaagctaaagatggtataaatagaaccgccttaagagagataaaattattacaggagctaagtcatccaaatataattggtctccttgatgcttttggacataaatctaatattagccttgtctttgattttatggaaactgatctagaggtaagattaagattcctggagaaattcctttgtcccagtttatcaaacaagaacctaaatatttgttttctacccaagaagatactggtagtaaaagaaaaaaagcttaattttgttgaaatttggatgtactctgaggcaaaaggatctcgagttattttcttctaatcatttagtgatatccccagtgttacatacaaagatttggatttcattggcatttctgccttctaagttcccatagctagttgacgtcatttttggagaaatgagcattagacctataagatttgtttgcttttttttttttttgtgatggagtctcagtctgttcacccagcctggagtgcaatggcgtgatctgggctctctgcagccatcacctcctgggttccagtgattctctcacttcagcctcccaagtagctgggattacaggtgccnccncgcccngctaaattttatattttaagtanagacggggtgtcacctgngggcccngggctgggtttnnnnnncnnnnncnnnnnnnnnnnnnnnnnnnnnnccnccnnnnnnnnnn

SEQ ID NO: 548 - DNA, 1409 bp, Homo Sapiens
  misc_feature (874)..(874): n is a, c, g, or t
  misc_feature (876)..(876): n is a, c, g, or t
  misc_feature (930)..(930): n is a, c, g, or t
  misc_feature (935)..(935): n is a, c, g, or t
  misc_feature (944)..(944): n is a, c, g, or t
  misc_feature (965)..(965): n is a, c, g, or t
  misc_feature (981)..(981): n is a, c, g, or t
  misc_feature (986)..(986): n is a, c, g, or t
  misc_feature (996)..(996): n is a, c, g, or t
  misc_feature (998)..(998): n is a, c, g, or t
  misc_feature (1009)..(1009): n is a, c, g, or t
  misc_feature (1020)..(1020): n is a, c, g, or t
  misc_feature (1029)..(1030): n is a, c, g, or t
  misc_feature (1035)..(1035): n is a, c, g, or t
  misc_feature (1064)..(1064): n is a, c, g, or t
  misc_feature (1066)..(1066): n is a, c, g, or t
  misc_feature (1068)..(1068): n is a, c, g, or t
  misc_feature (1070)..(1070): n is a, c, g, or t
  misc_feature (1078)..(1078): n is a, c, g, or t
  misc_feature (1089)..(1089): n is a, c, g, or t
  misc_feature (1094)..(1094): n is a, c, g, or t
  misc_feature (1097)..(1097): n is a, c, g, or t
  misc_feature (1103)..(1103): n is a, c, g, or t
  misc_feature (1108)..(1108): n is a, c, g, or t
  misc_feature (1111)..(1111): n is a, c, g, or t
  misc_feature (1118)..(1118): n is a, c, g, or t
  misc_feature (1123)..(1123): n is a, c, g, or t
  misc_feature (1129)..(1129): n is a, c, g, or t
  misc_feature (1131)..(1131): n is a, c, g, or t
  misc_feature (1166)..(1166): n is a, c, g, or t
  misc_feature (1172)..(1173): n is a, c, g, or t
  misc_feature (1176)..(1176): n is a, c, g, or t
  misc_feature (1183)..(1183): n is a, c, g, or t
  misc_feature (1186)..(1187): n is a, c, g, or t
  misc_feature (1195)..(1195): n is a, c, g, or t
  misc_feature (1213)..(1213): n is a, c, g, or t
  misc_feature (1215)..(1215): n is a, c, g, or t
  misc_feature (1223)..(1223): n is a, c, g, or t
  misc_feature (1226)..(1226): n is a, c, g, or t
  misc_feature (1228)..(1228): n is a, c, g, or t
  misc_feature (1235)..(1235): n is a, c, g, or t
  misc_feature (1237)..(1237): n is a, c, g, or t
  misc_feature (1239)..(1239): n is a, c, g, or t
  misc_feature (1252)..(1252): n is a, c, g, or t
  misc_feature (1258)..(1258): n is a, c, g, or t
  misc_feature (1268)..(1268): n is a, c, g, or t
  misc_feature (1274)..(1274): n is a, c, g, or t
  misc_feature (1287)..(1288): n is a, c, g, or t
  misc_feature (1301)..(1302): n is a, c, g, or t
  misc_feature (1304)..(1304): n is a, c, g, or t
  misc_feature (1319)..(1319): n is a, c, g, or t
  misc_feature (1335)..(1335): n is a, c, g, or t
  misc_feature (1342)..(1342): n is a, c, g, or t
  misc_feature (1353)..(1354): n is a, c, g, or t
  misc_feature (1356)..(1356): n is a, c, g, or t
  misc_feature (1370)..(1370): n is a, c, g, or t
  misc_feature (1376)..(1376): n is a, c, g, or t
  misc_feature (1385)..(1385): n is a, c, g, or t
  misc_feature (1389)..(1389): n is a, c, g, or t
  misc_feature (1391)..(1391): n is a, c, g, or t
  misc_feature (1396)..(1396): n is a, c, g, or t
agagaaattactatgagaggatcgcatcaccatcaccatcacggatcctatttaggtgacactatagaatcgtcgacccacgcgtccgaaaagaagaaatgttgcttgaagttaataggtttgcccttgcatctcatttcctctggggactgtggtccattgtacaagccaagatttcatctattgaatttgggtacatggactacgcccaagcaaggtttgatgcctatttccaccagaagaggaagcttggggtgtgactgtggggaggactccatccacctcatcactggactgcatggggaggcagcagagcggggtcccctctgtgcttcgactactgctcctgtggcaggaggctttgggtggctcactactgaacacatgtgtatgatactaaagacggtattaaaatggagcgacgtttatttcatctcttgtttacgatttcactaggactcagaaacgagatcgggaagcagaaatatagtgcaatagtgcaacatctctgaatccttttaatctagagaaggcatttcatatttgggggctaaggtttccagtcagatgaggcaaacagcaagagtaagcagtgttacttgcaggtactttggttaatgttgatttaaattttcatgaatgtgctggtgaacactgtgaccaggcttttgtagatggcgatgtgttatagacggtgctcactcccaagggacagcaagtgagcagagatgtactgcaaagtcgccagtcactgctgcaaggtggcctctgcctggggcctccagaagctgctcctttaccctcttggtcccatggctgaagctggagcagcggattgctctggagcagccaaggccgccagcgtgtggagcananctctcccctcctgctgggcgtgtgtgacactgatgagttcactgtactgcatgngactnctcccctgncccttcctcctgatggagggngcaaacagccatgcgnggccncgggggcagngngaggacctccntgtctcccggnccccctccnngggancccgctgcttgacctaaccctttgggccncncngnccccggcncgccggaaggnccganccngggaanaagcnggnccccccngggcnggttcncnaagggccggttcccggccttactttccggagcccngaatcnnatnttggggnaannaccccgtntgggggggggcgggaacnanggaccggnaancnaaaatanangnccggggaaaaccnaccganttttttcccnaacctntttaattttttgnnaaatccccccccnngntctcccaaaaaaaancccaaaaaaaaagggncccccanggaaaaaaatnnanggcccggaaaaaancccccncttttaacncccngnttttnaaaccaaaaaaaa

SEQ ID NO: 549 - DNA, 1265 bp, Homo Sapiens
  misc_feature (3)..(3): n is a, c, g, or t
  misc_feature (870)..(870): n is a, c, g, or t
  misc_feature (881)..(881): n is a, c, g, or t
  misc_feature (884)..(884): n is a, c, g, or t
  misc_feature (921)..(921): n is a, c, g, or t
  misc_feature (936)..(936): n is a, c, g, or t
  misc_feature (950)..(950): n is a, c, g, or t
  misc_feature (958)..(958): n is a, c, g, or t
  misc_feature (983)..(983): n is a, c, g, or t
  misc_feature (1000)..(1000): n is a, c, g, or t
  misc_feature (1004)..(1004): n is a, c, g, or t
  misc_feature (1008)..(1008): n is a, c, g, or t
  misc_feature (1025)..(1025): n is a, c, g, or t
  misc_feature (1028)..(1028): n is a, c, g, or t
  misc_feature (1052)..(1052): n is a, c, g, or t
  misc_feature (1058)..(1058): n is a, c, g, or t
  misc_feature (1063)..(1063): n is a, c, g, or t
  misc_feature (1074)..(1074): n is a, c, g, or t
  misc_feature (1082)..(1082): n is a, c, g, or t
  misc_feature (1085)..(1086): n is a, c, g, or t
  misc_feature (1090)..(1090): n is a, c, g, or t
  misc_feature (1109)..(1109): n is a, c, g, or t
  misc_feature (1112)..(1112): n is a, c, g, or t
  misc_feature (1118)..(1118): n is a, c, g, or t
  misc_feature (1123)..(1123): n is a, c, g, or t
  misc_feature (1126)..(1126): n is a, c, g, or t
  misc_feature (1128)..(1128): n is a, c, g, or t
  misc_feature (1130)..(1133): n is a, c, g, or t
  misc_feature (1136)..(1136): n is a, c, g, or t
  misc_feature (1152)..(1152): n is a, c, g, or t
  misc_feature (1155)..(1155): n is a, c, g, or t
  misc_feature (1158)..(1158): n is a, c, g, or t
  misc_feature (1162)..(1162): n is a, c, g, or t
  misc_feature (1165)..(1165): n is a, c, g, or t
  misc_feature (1170)..(1172): n is a, c, g, or t
  misc_feature (1175)..(1175): n is a, c, g, or t
  misc_feature (1186)..(1188): n is a, c, g, or t
  misc_feature (1192)..(1192): n is a, c, g, or t
  misc_feature (1194)..(1194): n is a, c, g, or t
  misc_feature (1206)..(1206): n is a, c, g, or t
  misc_feature (1209)..(1212): n is a, c, g, or t
  misc_feature (1215)..(1215): n is a, c, g, or t
  misc_feature (1222)..(1223): n is a, c, g, or t
  misc_feature (1229)..(1229): n is a, c, g, or t
  misc_feature (1232)..(1235): n is a, c, g, or t
  misc_feature (1238)..(1239): n is a, c, g, or t
  misc_feature (1248)..(1249): n is a, c, g, or t
  misc_feature (1259)..(1260): n is a, c, g, or t
  misc_feature (1262)..(1263): n is a, c, g, or t
gantagagaaattactatgagaggatcgcatcaccatcaccatcacggatcctatttaggtgacactatagaatcgtcgacccacgcgtccggggagggcagcaggagaaaggataagaaagggagtgggactggcgcctacggtggccgaagtgggacgcgccgagccggaggctgcaggatgatgcggttcatgctattattcagccggcagggaaaactgcggctgcaaaaatggtacctggccacttcggacaaggaacggaagaagatggtgcgcgagctcatgcaggttgtcctggctcgaaagcccaagatgtgcagcttcctggagtggagggacctcaaagttgtctataagagatatgccagcctctacttctgctgcgccatcgagggccaagacaatgagctcatcacactggagctgatccaccgatacgtggagctcttagacaaatactttggcagtgtgtgcgagctggacatcatcttcaactttgagaaggcctacttcatcctggatgagtttttgatggggggggatgtccaggacacctccaagaagagtgtgctgaaagccatcgagcaggctgacctactgcaagaggaggatgagtcgccacggagtgtgctggaggagatgggtttggcatagcccctgctgggccggggtgtggcgatggggtcctggcagcgtggcgggaacggctgcttctcctctgcccagggccctgttcttggtgggactcggctgcccctcctctgctgcctcacctttcggagtgagctgtgggctcaggcccttcaaacattccctccctctttctccttggctgcagtggggccttttatccagtgccaggggangaacaacatanttnaatttttttctaaccttgccactttgagggaaggaanggttgggggaaaggncaagctttatgggnaccttggntcctggccctggcctttcactccantttctggggtgaagcangacntggnaagggtggggaaggggnaanggggaaaatttccgccctttatgncctttncttcngaaataaaaantaaaaccnttnntggnaaaaaaaaaaaaaaagggncgncccccnccccnaanangnnnnccnatttaaccttaattanctnaancttnganccccnnnttnaaaaaatcccnnnaaangnccccccaaaacnccnnnnggnttttttnnaaaaanccnnnnttnncccccgggnntttttttttnngnnaa

SEQ ID NO: 550 - DNA, 1200 bp, Homo Sapiens
  misc_feature (860)..(860): n is a, c, g, or t
  misc_feature (938)..(938): n is a, c, g, or t
  misc_feature (941)..(941): n is a, c, g, or t
  misc_feature (985)..(985): n is a, c, g, or t
  misc_feature (1011)..(1011): n is a, c, g, or t
  misc_feature (1014)..(1014): n is a, c, g, or t
  misc_feature (1035)..(1035): n is a, c, g, or t
  misc_feature (1037)..(1037): n is a, c, g, or t
  misc_feature (1042)..(1042): n is a, c, g, or t
  misc_feature (1059)..(1059): n is a, c, g, or t
  misc_feature (1062)..(1062): n is a, c, g, or t
  misc_feature (1068)..(1069): n is a, c, g, or t
  misc_feature (1071)..(1071): n is a, c, g, or t
  misc_feature (1075)..(1075): n is a, c, g, or t
  misc_feature (1077)..(1077): n is a, c, g, or t
  misc_feature (1084)..(1084): n is a, c, g, or t
  misc_feature (1088)..(1088): n is a, c, g, or t
  misc_feature (1098)..(1098): n is a, c, g, or t
  misc_feature (1108)..(1108): n is a, c, g, or t
  misc_feature (1118)..(1118): n is a, c, g, or t
  misc_feature (1128)..(1129): n is a, c, g, or t
  misc_feature (1131)..(1131): n is a, c, g, or t
  misc_feature (1144)..(1144): n is a, c, g, or t
  misc_feature (1151)..(1152): n is a, c, g, or t
  misc_feature (1163)..(1163): n is a, c, g, or t
  misc_feature (1165)..(1166): n is a, c, g, or t
  misc_feature (1174)..(1174): n is a, c, g, or t
  misc_feature (1176)..(1176): n is a, c, g, or t
  misc_feature (1179)..(1179): n is a, c, g, or t
  misc_feature (1185)..(1185): n is a, c, g, or t
  misc_feature (1187)..(1187): n is a, c, g, or t
  misc_feature (1189)..(1189): n is a, c, g, or t
  misc_feature (1191)..(1191): n is a, c, g, or t
  misc_feature (1196)..(1196): n is a, c, g, or t
  misc_feature (1199)..(1199): n is a, c, g, or t
tagagaaattactatgagaggatcgcatcaccatcaccatcacggatcctatttaggtgacactatagaatcgtcgacccacgcgtccgcccacgcgtccgcagagaacatcctgtttgtgaattctgagtttgaaaccctctacaatgagcacaagagctgtgaggagaagtcagtgaagaacaccagcatccgagtggctgactttggcagtgccacatttgaccatgagcaccacaccaccattgtggccacccgtcactatcgcccgcctgaggtgatccttgagctgggctgggcacagccctgtgacgtctggagcattggctgcattctctttgagtactaccggggcttcacactcttccagacccacgaaaaccgagagcacctggtgatgatggagaagatcctagggcccatcccatcacacatgatccaccgtaccaggaagcagaaatatttctacaaagggggcctagtttgggatgagaacagctctgacggccggtatgtgaaggagaactgcaaacctctgaaggtcagtttctggctacccccagctgaactcatgccaaggagagaccccaggcactgggcagacatacagcagagacaggccaggccgctaaaggctgcctccttgatccagctctatgggaggcggcacccaagactgctgggtgctggcaatggggcttcttgcaaactgccccagaggggcccttagccctaccccttccccatagggtggctatgaatgtaattggggaacaccagaagagccagatgtcagaagccctgctgcttcctgtccctctctctcctcgaaattttgggaagaactaggcaggactgangtgagggggaagggaagacctaaacatggccaggaagcctctgtcaactgcatttggtgctcggacaagtgaatttcncanaggtgatctctacccacctgtcaggactttgcatgtgggggcanaggcatcaacccagcaagacacctantancctggcaagttccgagcaaancnttaancaggcatgaaaggaaanganctgctnntngtcnangaagggngaantaaatcctcnaggaggatcntgcctcctcnatccatccannangggttccaaaggnagggganntggtgggtttncnnacctggcntnaantgaggncntngntcccnaana

SEQ ID NO: 551 - DNA, 1200 bp, Homo Sapiens
  misc_feature (500)..(500): n is a, c, g, or t
  misc_feature (519)..(519): n is a, c, g, or t
  misc_feature (521)..(521): n is a, c, g, or t
  misc_feature (525)..(525): n is a, c, g, or t
  misc_feature (527)..(527): n is a, c, g, or t
  misc_feature (538)..(538): n is a, c, g, or t
  misc_feature (550)..(551): n is a, c, g, or t
  misc_feature (555)..(556): n is a, c, g, or t
  misc_feature (562)..(562): n is a, c, g, or t
  misc_feature (569)..(569): n is a, c, g, or t
  misc_feature (571)..(571): n is a, c, g, or t
  misc_feature (574)..(574): n is a, c, g, or t
  misc_feature (580)..(580): n is a, c, g, or t
  misc_feature (584)..(585): n is a, c, g, or t
  misc_feature (588)..(588): n is a, c, g, or t
  misc_feature (591)..(591): n is a, c, g, or t
  misc_feature (600)..(600): n is a, c, g, or t
  misc_feature (611)..(611): n is a, c, g, or t
  misc_feature (616)..(616): n is a, c, g, or t
  misc_feature (618)..(618): n is a, c, g, or t
  misc_feature (621)..(623): n is a, c, g, or t
  misc_feature (627)..(627): n is a, c, g, or t
  misc_feature (633)..(634): n is a, c, g, or t
  misc_feature (636)..(638): n is a, c, g, or t
  misc_feature (641)..(641): n is a, c, g, or t
  misc_feature (644)..(644): n is a, c, g, or t
  misc_feature (646)..(647): n is a, c, g, or t
  misc_feature (662)..(663): n is a, c, g, or t
  misc_feature (665)..(665): n is a, c, g, or t
  misc_feature (667)..(668): n is a, c, g, or t
  misc_feature (670)..(670): n is a, c, g, or t
  misc_feature (674)..(675): n is a, c, g, or t
  misc_feature (678)..(679): n is a, c, g, or t
  misc_feature (683)..(683): n is a, c, g, or t
  misc_feature (691)..(691): n is a, c, g, or t
  misc_feature (696)..(696): n is a, c, g, or t
  misc_feature (706)..(707): n is a, c, g, or t
  misc_feature (709)..(709): n is a, c, g, or t
  misc_feature (713)..(713): n is a, c, g, or t
  misc_feature (715)..(715): n is a, c, g, or t
  misc_feature (717)..(719): n is a, c, g, or t
  misc_feature (721)..(723): n is a, c, g, or t
  misc_feature (725)..(727): n is a, c, g, or t
  misc_feature (730)..(730): n is a, c, g, or t
  misc_feature (733)..(733): n is a, c, g, or t
  misc_feature (742)..(742): n is a, c, g, or t
  misc_feature (751)..(751): n is a, c, g, or t
  misc_feature (753)..(753): n is a, c, g, or t
  misc_feature (760)..(760): n is a, c, g, or t
  misc_feature (763)..(763): n is a, c, g, or t
  misc_feature (766)..(766): n is a, c, g, or t
  misc_feature (769)..(769): n is a, c, g, or t
  misc_feature (773)..(773): n is a, c, g, or t
  misc_feature (775)..(776): n is a, c, g, or t
  misc_feature (780)..(780): n is a, c, g, or t
  misc_feature (786)..(787): n is a, c, g, or t
  misc_feature (790)..(790): n is a, c, g, or t
  misc_feature (794)..(794): n is a, c, g, or t
  misc_feature (799)..(799): n is a, c, g, or t
  misc_feature (803)..(803): n is a, c, g, or t
  misc_feature (805)..(805): n is a, c, g, or t
  misc_feature (810)..(810): n is a, c, g, or t
  misc_feature (814)..(814): n is a, c, g, or t
  misc_feature (821)..(824): n is a, c, g, or t
  misc_feature (826)..(830): n is a, c, g, or t
  misc_feature (832)..(833): n is a, c, g, or t
  misc_feature (835)..(835): n is a, c, g, or t
  misc_feature (840)..(840): n is a, c, g, or t
  misc_feature (844)..(845): n is a, c, g, or t
  misc_feature (847)..(847): n is a, c, g, or t
  misc_feature (851)..(851): n is a, c, g, or t
  misc_feature (853)..(853): n is a, c, g, or t
  misc_feature (858)..(858): n is a, c, g, or t
  misc_feature (861)..(862): n is a, c, g, or t
  misc_feature (866)..(868): n is a, c, g, or t
  misc_feature (872)..(873): n is a, c, g, or t
  misc_feature (877)..(879): n is a, c, g, or t
  misc_feature (883)..(883): n is a, c, g, or t
  misc_feature (888)..(888): n is a, c, g, or t
  misc_feature (893)..(893): n is a, c, g, or t
  misc_feature (896)..(897): n is a, c, g, or t
  misc_feature (907)..(907): n is a, c, g, or t
  misc_feature (909)..(909): n is a, c, g, or t
  misc_feature (911)..(911): n is a, c, g, or t
  misc_feature (913)..(914): n is a, c, g, or t
  misc_feature (917)..(917): n is a, c, g, or t
  misc_feature (919)..(919): n is a, c, g, or t
  misc_feature (923)..(923): n is a, c, g, or t
  misc_feature (927)..(928): n is a, c, g, or t
  misc_feature (932)..(932): n is a, c, g, or t
  misc_feature (934)..(938): n is a, c, g, or t
  misc_feature (941)..(942): n is a, c, g, or t
  misc_feature (945)..(945): n is a, c, g, or t
  misc_feature (947)..(947): n is a, c, g, or t
  misc_feature (951)..(956): n is a, c, g, or t
  misc_feature (966)..(967): n is a, c, g, or t
  misc_feature (970)..(970): n is a, c, g, or t
  misc_feature (972)..(972): n is a, c, g, or t
  misc_feature (975)..(976): n is a, c, g, or t
  misc_feature (984)..(984): n is a, c, g, or t
  misc_feature (987)..(989): n is a, c, g, or t
  misc_feature (996)..(996): n is a, c, g, or t
  misc_feature (998)..(1000): n is a, c, g, or t
  misc_feature (1004)..(1004): n is a, c, g, or t
  misc_feature (1007)..(1007): n is a, c, g, or t
  misc_feature (1013)..(1013): n is a, c, g, or t
  misc_feature (1016)..(1016): n is a, c, g, or t
  misc_feature (1018)..(1018): n is a, c, g, or t
  misc_feature (1020)..(1021): n is a, c, g, or t
  misc_feature (1023)..(1023): n is a, c, g, or t
  misc_feature (1029)..(1029): n is a, c, g, or t
  misc_feature (1037)..(1040): n is a, c, g, or t
  misc_feature (1046)..(1046): n is a, c, g, or t
  misc_feature (1052)..(1053): n is a, c, g, or t
  misc_feature (1055)..(1056): n is a, c, g, or t
  misc_feature (1061)..(1061): n is a, c, g, or t
  misc_feature (1065)..(1065): n is a, c, g, or t
  misc_feature (1067)..(1068): n is a, c, g, or t
  misc_feature (1070)..(1071): n is a, c, g, or t
  misc_feature (1073)..(1075): n is a, c, g, or t
  misc_feature (1077)..(1077): n is a, c, g, or t
  misc_feature (1080)..(1081): n is a, c, g, or t
  misc_feature (1087)..(1087): n is a, c, g, or t
  misc_feature (1091)..(1093): n is a, c, g, or t
  misc_feature (1095)..(1095): n is a, c, g, or t
  misc_feature (1099)..(1099): n is a, c, g, or t
  misc_feature (1104)..(1105): n is a, c, g, or t
  misc_feature (1108)..(1109): n is a, c, g, or t
  misc_feature (1116)..(1116): n is a, c, g, or t
  misc_feature (1120)..(1121): n is a, c, g, or t
  misc_feature (1127)..(1128): n is a, c, g, or t
  misc_feature (1138)..(1138): n is a, c, g, or t
  misc_feature (1143)..(1143): n is a, c, g, or t
  misc_feature (1147)..(1147): n is a, c, g, or t
  misc_feature (1151)..(1152): n is a, c, g, or t
  misc_feature (1154)..(1155): n is a, c, g, or t
  misc_feature (1157)..(1158): n is a, c, g, or t
  misc_feature (1160)..(1160): n is a, c, g, or t
  misc_feature (1162)..(1164): n is a, c, g, or t
  misc_feature (1169)..(1170): n is a, c, g, or t
  misc_feature (1172)..(1172): n is a, c, g, or t
  misc_feature (1180)..(1180): n is a, c, g, or t
  misc_feature (1185)..(1188): n is a, c, g, or t
  misc_feature (1190)..(1192): n is a, c, g, or t
  misc_feature (1196)..(1197): n is a, c, g, or t
  misc_feature (1199)..(1200): n is a, c, g, or t
gagaaattactatgagaggatcgcatcaccatcaccatcacggatcctatttaggtgacactatagaatcgtcgacccacgcgtccgtgaaaattatgcatgatgccattggattcagaagtacattaactggcaagaactacacaatggaatggtatgaacttttccaacttggcaactgtacatttccccatctccgacctgaaatggatgcccctttctggtgtaatcaaggcgctgcctgcttttttgagggaattgatgatgttcactggaaggaaaatgggacattagttcaagtagcaactatatcaggtaagttgtgaaaatatagcaatatttgatcattgcatcaaaaaccaaatgaaagaaattgttatacttccattgaaacatttcagtaatgttttacttagaggtcatttgtaaaatgtacttttggaaccattaaactttgggaattttaaaaaaaaaaaaaaaaaaaaaaaaaaaaaaaaaanaaaaaaaaaaaaaaaaagncnaacnanccccaaaaaanaaaaccaaaaanncctnntgaacnaaacctngnaancccgcngaannccnccnggatgaccncaaaacccccnggggncnccnnncaantctcgnntnnnccncgncnntttttttttgggggnnantnncnggcnnccnngggngatttttnggaanaaaaaaaccnnanaggncnannnannntnnnggnaangcccccttnaaaaaaccncngggggtnttnaanccncttngnnaggnatccannccngggnccccnggcncnaaatnccgncccttcnnnngnnnnntnncngcccntttnnancacncncttancannaaannncccnntttnnncccnccccntaatnaanntcccccccancntncnnaangncccncccnnaaantnnnnnggnnaananaaannnnnnggcccacccnnaanangcnnaggttccnccnnngaacacncnnntttnccncgggcnacngnanngntttccncccccttnnnnggaaancccccnnannttccncccntnntnncnnntnccnnaaaacngggnnntncccnaaaannggnncaaaacncaannggtaannaaaaaagttnttccncccnccanntnngnngnannnccccnnanggaaaacncgccnnnngnnncctnncnn

SEQ ID NO: 552 - DNA, 1402 bp, Homo Sapiens
  misc_feature (285)..(285): n is a, c, g, or t
  misc_feature (839)..(839): n is a, c, g, or t
  misc_feature (848)..(848): n is a, c, g, or t
  misc_feature (853)..(853): n is a, c, g, or t
  misc_feature (875)..(875): n is a, c, g, or t
  misc_feature (895)..(895): n is a, c, g, or t
  misc_feature (915)..(915): n is a, c, g, or t
  misc_feature (964)..(964): n is a, c, g, or t
  misc_feature (990)..(990): n is a, c, g, or t
  misc_feature (994)..(994): n is a, c, g, or t
  misc_feature (1008)..(1008): n is a, c, g, or t
  misc_feature (1032)..(1032): n is a, c, g, or t
  misc_feature (1042)..(1042): n is a, c, g, or t
  misc_feature (1061)..(1061): n is a, c, g, or t
  misc_feature (1067)..(1067): n is a, c, g, or t
  misc_feature (1072)..(1072): n is a, c, g, or t
  misc_feature (1078)..(1078): n is a, c, g, or t
  misc_feature (1093)..(1093): n is a, c, g, or t
  misc_feature (1101)..(1101): n is a, c, g, or t
  misc_feature (1111)..(1111): n is a, c, g, or t
  misc_feature (1119)..(1119): n is a, c, g, or t
  misc_feature (1122)..(1122): n is a, c, g, or t
  misc_feature (1127)..(1127): n is a, c, g, or t
  misc_feature (1146)..(1146): n is a, c, g, or t
  misc_feature (1168)..(1168): n is a, c, g, or t
  misc_feature (1180)..(1180): n is a, c, g, or t
  misc_feature (1188)..(1188): n is a, c, g, or t
  misc_feature (1190)..(1190): n is a, c, g, or t
  misc_feature (1192)..(1192): n is a, c, g, or t
  misc_feature (1198)..(1198): n is a, c, g, or t
  misc_feature (1214)..(1215): n is a, c, g, or t
  misc_feature (1222)..(1223): n is a, c, g, or t
  misc_feature (1243)..(1243): n is a, c, g, or t
  misc_feature (1245)..(1245): n is a, c, g, or t
  misc_feature (1254)..(1254): n is a, c, g, or t
  misc_feature (1257)..(1257): n is a, c, g, or t
  misc_feature (1269)..(1269): n is a, c, g, or t
  misc_feature (1271)..(1271): n is a, c, g, or t
  misc_feature (1285)..(1286): n is a, c, g, or t
  misc_feature (1293)..(1293): n is a, c, g, or t
  misc_feature (1299)..(1299): n is a, c, g, or t
  misc_feature (1312)..(1312): n is a, c, g, or t
  misc_feature (1314)..(1314): n is a, c, g, or t
  misc_feature (1325)..(1325): n is a, c, g, or t
  misc_feature (1333)..(1333): n is a, c, g, or t
  misc_feature (1340)..(1340): n is a, c, g, or t
  misc_feature (1348)..(1348): n is a, c, g, or t
  misc_feature (1353)..(1353): n is a, c, g, or t
  misc_feature (1367)..(1367): n is a, c, g, or t
  misc_feature (1369)..(1371): n is a, c, g, or t
  misc_feature (1377)..(1377): n is a, c, g, or t
  misc_feature (1380)..(1382): n is a, c, g, or t
  misc_feature (1388)..(1388): n is a, c, g, or t
  misc_feature (1395)..(1395): n is a, c, g, or t
  misc_feature (1398)..(1398): n is a, c, g, or t
  misc_feature (1402)..(1402): n is a, c, g, or t
tagagaaattactatgagaggatcgcatcaccatcaccatcacggatcctatttaggtgacactatagaatcgtcgacccacgcgtccggcttgtcctcctctcccagtcggcaccacagcggtggctgccgggcgtggtgtcggtgggtcggttggtttttgtctcaccgttggtgtccgtgccgttcagttgcccgccatggctgagctggatccgttcggcgcccctgccggcgcccctggcggtcccgcgctggggaacggagtggccggcgccggcgaanaagacccggctgcggccttcttggcgcagcaagagagcgagattgcgggcatcgagaacgacgaggccttcgccatcctggacggcggcgcccccgggccccagccgcacggcgagccgccggggggtccggatgctgttgatggagtaatgaatggtgaatactaccaggaaagtaatggtccaacagacagttatgcagctatttcacaagtggatcgattgcagtcagagcctgaaagtatccgtaaatggagagaagaacaaatggaacgcttggaagcccttgatgccaattctcggaagcaagaagcagagtggaaagaaaaggcaataaaggagctagaagaatggtatgcaagacaggacgagcagctacagaaaacaaaagcaaacaacagggtggcagatgaagctttctacaaacaacccttcgctgacgtgattggttatgtggcagcagaagaagcctttgtaaatgacattgacgagtcgtcccccaggcactgagtgggaacgggtggcccggctgtgtgactttaaccccaagtctancaagcaagnccaanaatgtctcccgcatgcgctcantcctcatctccctcaagcangccccgctggtgcactgaanaaccaccctgtggaaaacactacatctgcaaaatcttaatcctactcantgaagctctttcacaagtcattggantaantatgtttgaagttntttttggaacaaaaacttttttgncctttaaaanttgtttcaattggtttggnaaattncatgntttccntcccttcaactgggnttcccccntggcattcanaaaagganggnaaagnagaaaaaagaaaggggaanggaaactttcccaaaaaaaaanccccaacccggngcttctgngnantaattncgaaaaaaaaatttcnnttcaaanntgtaaaaaaaaaaaaaaaangngggcccccnccntaaagggagccnantaacctaattaacnnaacctgnaccccnttttaaaaatccnanaagaacccaanccctctgnatttttnaaaaaccngtttncccggggttttttntnnnaaaaanccnnntttggnaattttnganaaan

SEQ ID NO: 553 - DNA, 1429 bp, Homo Sapiens
  misc_feature (858)..(858): n is a, c, g, or t
  misc_feature (892)..(892): n is a, c, g, or t
  misc_feature (899)..(899): n is a, c, g, or t
  misc_feature (901)..(901): n is a, c, g, or t
  misc_feature (941)..(941): n is a, c, g, or t
  misc_feature (945)..(945): n is a, c, g, or t
  misc_feature (972)..(972): n is a, c, g, or t
  misc_feature (976)..(976): n is a, c, g, or t
  misc_feature (986)..(986): n is a, c, g, or t
  misc_feature (997)..(997): n is a, c, g, or t
  misc_feature (1001)..(1001): n is a, c, g, or t
  misc_feature (1005)..(1005): n is a, c, g, or t
  misc_feature (1015)..(1015): n is a, c, g, or t
  misc_feature (1030)..(1030): n is a, c, g, or t
  misc_feature (1038)..(1038): n is a, c, g, or t
  misc_feature (1041)..(1042): n is a, c, g, or t
  misc_feature (1045)..(1045): n is a, c, g, or t
  misc_feature (1066)..(1066): n is a, c, g, or t
  misc_feature (1070)..(1070): n is a, c, g, or t
  misc_feature (1073)..(1073): n is a, c, g, or t
  misc_feature (1079)..(1079): n is a, c, g, or t
  misc_feature (1081)..(1081): n is a, c, g, or t
  misc_feature (1092)..(1092): n is a, c, g, or t
  misc_feature (1096)..(1096): n is a, c, g, or t
  misc_feature (1098)..(1098): n is a, c, g, or t
  misc_feature (1100)..(1100): n is a, c, g, or t
  misc_feature (1122)..(1122): n is a, c, g, or t
  misc_feature (1126)..(1126): n is a, c, g, or t
  misc_feature (1147)..(1147): n is a, c, g, or t
  misc_feature (1152)..(1152): n is a, c, g, or t
  misc_feature (1158)..(1158): n is a, c, g, or t
  misc_feature (1193)..(1193): n is a, c, g, or t
  misc_feature (1195)..(1195): n is a, c, g, or t
  misc_feature (1200)..(1200): n is a, c, g, or t
  misc_feature (1205)..(1205): n is a, c, g, or t
  misc_feature (1212)..(1212): n is a, c, g, or t
  misc_feature (1214)..(1214): n is a, c, g, or t
  misc_feature (1216)..(1216): n is a, c, g, or t
  misc_feature (1224)..(1224): n is a, c, g, or t
  misc_feature (1240)..(1240): n is a, c, g, or t
  misc_feature (1242)..(1242): n is a, c, g, or t
  misc_feature (1244)..(1245): n is a, c, g, or t
  misc_feature (1251)..(1251): n is a, c, g, or t
  misc_feature (1257)..(1257): n is a, c, g, or t
  misc_feature (1260)..(1260): n is a, c, g, or t
  misc_feature (1262)..(1263): n is a, c, g, or t
  misc_feature (1266)..(1266): n is a, c, g, or t
  misc_feature (1269)..(1269): n is a, c, g, or t
  misc_feature (1273)..(1273): n is a, c, g, or t
  misc_feature (1288)..(1288): n is a, c, g, or t
  misc_feature (1291)..(1291): n is a, c, g, or t
  misc_feature (1293)..(1293): n is a, c, g, or t
  misc_feature (1295)..(1295): n is a, c, g, or t
  misc_feature (1298)..(1298): n is a, c, g, or t
  misc_feature (1300)..(1301): n is a, c, g, or t
  misc_feature (1304)..(1305): n is a, c, g, or t
  misc_feature (1307)..(1307): n is a, c, g, or t
  misc_feature (1318)..(1318): n is a, c, g, or t
  misc_feature (1320)..(1320): n is a, c, g, or t
  misc_feature (1330)..(1330): n is a, c, g, or t
  misc_feature (1332)..(1332): n is a, c, g, or t
  misc_feature (1337)..(1337): n is a, c, g, or t
  misc_feature (1353)..(1353): n is a, c, g, or t
  misc_feature (1358)..(1358): n is a, c, g, or t
  misc_feature (1361)..(1362): n is a, c, g, or t
  misc_feature (1367)..(1367): n is a, c, g, or t
  misc_feature (1370)..(1370): n is a, c, g, or t
  misc_feature (1376)..(1376): n is a, c, g, or t
  misc_feature (1381)..(1381): n is a, c, g, or t
  misc_feature (1385)..(1386): n is a, c, g, or t
  misc_feature (1388)..(1388): n is a, c, g, or t
  misc_feature (1390)..(1390): n is a, c, g, or t
  misc_feature (1393)..(1394): n is a, c, g, or t
  misc_feature (1400)..(1400): n is a, c, g, or t
  misc_feature (1407)..(1408): n is a, c, g, or t
  misc_feature (1421)..(1421): n is a, c, g, or t
  misc_feature (1429)..(1429): n is a, c, g, or t
aaagagaaattactatgagaggatcgcatcaccatcaccatcacggatcctatttaggtgacactatagaatcgtcgacccacgcgtccgcgcagagccgcgtcgccaagccgcatcagcgcgagaagatcctaaatgagattgagctgcaccgagacctgcagcaccgccacatcgtgcgtttttcgcaccactttgaggacgctgacaacatctacattttcttggagctctgcagccgaaagtccctggcccacatctggaaggcccggcacaccctgttggagccagaagtgcgctactacctgcggcagatcctttctggcctcaagtacttgcaccagcgcggcatcttgcaccgggacctcaagttgggaaattttttcatcactgagaacatggaactgaaggtgggggattttgggctggcagcccggttggagcctccggagcagaggaagaagaccatctgtggcacccccaactatgtggctccagaagtgctgctgagacagggccacggccctgaggcggatgtatggtcactgggctgtgtcatgtacacgctgctctgcgggagccctccctttgagacggctgacctgaaggagacgtaccgctgcatcaagcaggttcactacacgctgcctgccagcctctcactgcctgcccggcagctcctggccgccatccttcgggcctcaccccgagaccgcccctctattgaccagatcctgcgccatgacttctttaccaagggctacacccccgatcgactccctatcagcagctgcgtgacagtcccagacctgacaccccccaacccagctaggagtctgtttgccaaagttaccaaanccctctttggcagaaagaagaaaattaagaatcntgcccangnaaaggatgaagtctccggttttggtgagcggcctcatgcnccanatccgtttggccatcaggatgccaggnccanaaggctccancaacttttggnccancccntgtcagcctngttaaaaaaacaccntgaaaaanagnntcncccccgtgggaaactggcaancaanggnaaatgnantttaaaaaagntttnantntggccccaaaaaatggaatccncccntttgtgtctcgaaaaattttnaaacncttttncccccacggaaaaaaaacccggccccctgggccancnaaaanccttnggggggntnanaaaggggnttaaaacccaaaaaantncnntttggnaaaaangtncnnccnccngggnttgtttcttcaaaanganantnggncnnttnncnaaaaaaaaggnanttaatccccncnaaaantttccttccggggttncccgnccnnccccnggnatcggnattcncctnngnanccnnaagggnaattccnngaaaaaaaacccncccttctn

SEQ ID NO: 554 - DNA, 1198 bp, Homo Sapiens
  misc_feature (1)..(1): n is a, c, g, or t
  misc_feature (740)..(740): n is a, c, g, or t
  misc_feature (744)..(772): n is a, c, g, or t
  misc_feature (798)..(799): n is a, c, g, or t
  misc_feature (814)..(814): n is a, c, g, or t
  misc_feature (819)..(819): n is a, c, g, or t
  misc_feature (838)..(838): n is a, c, g, or t
  misc_feature (846)..(846): n is a, c, g, or t
  misc_feature (859)..(859): n is a, c, g, or t
  misc_feature (867)..(867): n is a, c, g, or t
  misc_feature (886)..(886): n is a, c, g, or t
  misc_feature (888)..(888): n is a, c, g, or t
  misc_feature (892)..(892): n is a, c, g, or t
  misc_feature (898)..(898): n is a, c, g, or t
  misc_feature (931)..(931): n is a, c, g, or t
  misc_feature (936)..(936): n is a, c, g, or t
  misc_feature (938)..(938): n is a, c, g, or t
  misc_feature (940)..(940): n is a, c, g, or t
  misc_feature (946)..(946): n is a, c, g, or t
  misc_feature (948)..(948): n is a, c, g, or t
  misc_feature (952)..(952): n is a, c, g, or t
  misc_feature (954)..(954): n is a, c, g, or t
  misc_feature (961)..(961): n is a, c, g, or t
  misc_feature (970)..(970): n is a, c, g, or t
  misc_feature (975)..(975): n is a, c, g, or t
  misc_feature (979)..(979): n is a, c, g, or t
  misc_feature (991)..(991): n is a, c, g, or t
  misc_feature (995)..(995): n is a, c, g, or t
  misc_feature (1009)..(1010): n is a, c, g, or t
  misc_feature (1018)..(1019): n is a, c, g, or t
  misc_feature (1024)..(1024): n is a, c, g, or t
  misc_feature (1026)..(1026): n is a, c, g, or t
  misc_feature (1030)..(1031): n is a, c, g, or t
  misc_feature (1035)..(1035): n is a, c, g, or t
  misc_feature (1042)..(1042): n is a, c, g, or t
  misc_feature (1050)..(1051): n is a, c, g, or t
  misc_feature (1053)..(1053): n is a, c, g, or t
  misc_feature (1059)..(1061): n is a, c, g, or t
  misc_feature (1065)..(1065): n is a, c, g, or t
  misc_feature (1067)..(1067): n is a, c, g, or t
  misc_feature (1070)..(1070): n is a, c, g, or t
  misc_feature (1072)..(1072): n is a, c, g, or t
  misc_feature (1074)..(1074): n is a, c, g, or t
  misc_feature (1085)..(1085): n is a, c, g, or t
  misc_feature (1087)..(1087): n is a, c, g, or t
  misc_feature (1090)..(1090): n is a, c, g, or t
  misc_feature (1092)..(1093): n is a, c, g, or t
  misc_feature (1097)..(1097): n is a, c, g, or t
  misc_feature (1101)..(1101): n is a, c, g, or t
  misc_feature (1103)..(1103): n is a, c, g, or t
  misc_feature (1108)..(1108): n is a, c, g, or t
  misc_feature (1115)..(1115): n is a, c, g, or t
  misc_feature (1124)..(1124): n is a, c, g, or t
  misc_feature (1128)..(1129): n is a, c, g, or t
  misc_feature (1140)..(1140): n is a, c, g, or t
  misc_feature (1142)..(1142): n is a, c, g, or t
  misc_feature (1149)..(1149): n is a, c, g, or t
  misc_feature (1161)..(1161): n is a, c, g, or t
  misc_feature (1166)..(1167): n is a, c, g, or t
  misc_feature (1171)..(1171): n is a, c, g, or t
  misc_feature (1179)..(1179): n is a, c, g, or t
  misc_feature (1186)..(1186): n is a, c, g, or t
naattagagaaattactatgagaggatcgcatcaccatcaccatcacggatcctatttaggtgacactatagaatcgtcgacccacgcgtccggttcttcggtccaggaggctgtggcaggtgcagatgtgatcatcacagtcaccctggcaacagagcccattttgtttggtgaatgggtgaagccaggggctcacatcaatgctgttggagccagcagacctgactggagagaactggatgatgagctcatgaaagaagctgtgctgtacgtggattcccaggaggctgccctgaaggagtctggagatgtcctgctgtcaggggccgagatctttgctgagctgggagaagtgattaagggagtgaaaccagcccactgtgagaagaccacggtgttcaagtctttgggaatggcagtggaagacacagttgcagccaaactcatctatgattcctggtcatctggtaaataaaacaaaggaacttgatgttgagatggatgcttgaggaatattgctgctggttctcataatttctagagtaaatgagggagtccagtccccagtgaactctccttttgtgcttatcatgttttaccttaaatgctgagatcctcatttatgtttgtagttggaaagcaaagctaggtagccatttcttctgttctaccaagttataatagcattcatttccctttatatttccctgaaataaagcacattccaattgtgaaaaanaaannnnnnnnnnnnnnnnnnnnnnnnnnnnngggcggccgctccctatagtgagtcnnattaagcttaattanctgancttggaactcctggttganaaaatccngtaatgacccccnaaactccntctggatttgttcaaaacncncggnttgccncccgggcgttttttttttggggaaaaatcccancctancntnggcganantttncnggaactnaaggaaacntaaantggnaaaaaaaaaatncccnggaaaaaccccccnnttgaaaanntcccnangggnntccnaaaaaanatttttgnngnatttcnnncccntngcncnanggacctaaaancnaancnnttcncctngnaaatnacggccntttttaaanaccnnaaaaaaaaaananccccaantttttttccggnctttnnttcnattttttnccccccngaaaaaagcccc

SEQ ID NO: 555 - DNA, 1200 bp, Homo Sapiens
  misc_feature (895)..(895): n is a, c, g, or t
  misc_feature (897)..(897): n is a, c, g, or t
  misc_feature (901)..(901): n is a, c, g, or t
  misc_feature (911)..(911): n is a, c, g, or t
  misc_feature (913)..(913): n is a, c, g, or t
  misc_feature (953)..(953): n is a, c, g, or t
  misc_feature (963)..(963): n is a, c, g, or t
  misc_feature (965)..(965): n is a, c, g, or t
  misc_feature (968)..(968): n is a, c, g, or t
  misc_feature (970)..(970): n is a, c, g, or t
  misc_feature (1000)..(1000): n is a, c, g, or t
  misc_feature (1005)..(1005): n is a, c, g, or t
  misc_feature (1007)..(1008): n is a, c, g, or t
  misc_feature (1018)..(1018): n is a, c, g, or t
  misc_feature (1026)..(1026): n is a, c, g, or t
  misc_feature (1028)..(1028): n is a, c, g, or t
  misc_feature (1031)..(1031): n is a, c, g, or t
  misc_feature (1034)..(1034): n is a, c, g, or t
  misc_feature (1039)..(1039): n is a, c, g, or t
  misc_feature (1044)..(1044): n is a, c, g, or t
  misc_feature (1046)..(1046): n is a, c, g, or t
  misc_feature (1049)..(1049): n is a, c, g, or t
  misc_feature (1058)..(1058): n is a, c, g, or t
  misc_feature (1069)..(1069): n is a, c, g, or t
  misc_feature (1085)..(1085): n is a, c, g, or t
  misc_feature (1088)..(1088): n is a, c, g, or t
  misc_feature (1091)..(1091): n is a, c, g, or t
  misc_feature (1098)..(1098): n is a, c, g, or t
  misc_feature (1100)..(1100): n is a, c, g, or t
  misc_feature (1102)..(1102): n is a, c, g, or t
  misc_feature (1105)..(1106): n is a, c, g, or t
  misc_feature (1121)..(1121): n is a, c, g, or t
  misc_feature (1123)..(1123): n is a, c, g, or t
  misc_feature (1126)..(1126): n is a, c, g, or t
  misc_feature (1128)..(1128): n is a, c, g, or t
  misc_feature (1137)..(1137): n is a, c, g, or t
  misc_feature (1139)..(1139): n is a, c, g, or t
  misc_feature (1150)..(1150): n is a, c, g, or t
  misc_feature (1158)..(1158): n is a, c, g, or t
  misc_feature (1164)..(1166): n is a, c, g, or t
  misc_feature (1168)..(1168): n is a, c, g, or t
  misc_feature (1174)..(1174): n is a, c, g, or t
  misc_feature (1178)..(1178): n is a, c, g, or t
  misc_feature (1181)..(1182): n is a, c, g, or t
  misc_feature (1186)..(1187): n is a, c, g, or t
  misc_feature (1193)..(1195): n is a, c, g, or t
  misc_feature (1197)..(1197): n is a, c, g, or t
  misc_feature (1199)..(1199): n is a, c, g, or t
tagagaaattactatgagaggatcgcatcaccatcaccatcacggatcctatttaggtgacactatagaatcgtcgacccacgcgtccggaggcagggaacagcaatgccaaatttccctctctcgtgagatgggggatcctgtgcaggctgatgaggcacccatgagaaaagccgaaaaagcatgcatcttagaaatagcccctcaattccaggagtcaacatgccgaagaatgaggctggagacaggtagctccgagggaggacttctggcatgagatctcggcacggcaagcccagcatcgcctcagcccagacaggctccaccaggagatcaagcaagggctgcctttcaggagtcacctcctgagccacttcagagttctggaagtgaccacggaccagggtggaggaatagacttctagttcattctgggacacttgagccagagagttgaaagcttggaaagaccagataagaaacctgccctttgtctccctagggacatgagacaccacattccatttgtgctagaaaaacctatccactgatgagtctaactgttccaaacgcctcccacctggtgtgcacagctgcctgggtccattgtcacttgggtgcatcaggttgtcctccgatttttagatgagtttcctgtctagagatgtcctagtctgctcactggctggtggcagtagggtaccctgcgtcctcgaaaagccagagggttcacctagtcagacgaaactccagaacagtgcttgtggagggcctgactgtcctgctcacccacagccgatctgctgcaggtcagcaactgtgtcgtgagcagctgccaaccaccagcctttctggtgctgttctccagttcacgtctgccagctggtgagggcanangcanacctggtcananccagcgcccctcctccctgagggagcatggcacagcctcncacttgaaananggngnttgggtttcccatctaatcaacttaagggnaaccngnntgtacccttnaagggccntntcnccncctantttcngnatnagttggganaaactgagggnggcttttaaaaacccnaanctnggttggnancnctnnccatggaaaaccccnanaangnaccctcccnancctggcttttnggaaaaancccccnnnangggggnggcnggnntccnnaaaaannnangnt

SEQ ID NO: 556 - DNA, 1391 bp, Homo Sapiens
  misc_feature (851)..(851): n is a, c, g, or t
  misc_feature (883)..(883): n is a, c, g, or t
  misc_feature (936)..(936): n is a, c, g, or t
  misc_feature (942)..(942): n is a, c, g, or t
  misc_feature (957)..(957): n is a, c, g, or t
  misc_feature (964)..(964): n is a, c, g, or t
  misc_feature (969)..(969): n is a, c, g, or t
  misc_feature (999)..(999): n is a, c, g, or t
  misc_feature (1009)..(1009): n is a, c, g, or t
  misc_feature (1012)..(1012): n is a, c, g, or t
  misc_feature (1047)..(1047): n is a, c, g, or t
  misc_feature (1059)..(1059): n is a, c, g, or t
  misc_feature (1061)..(1061): n is a, c, g, or t
  misc_feature (1069)..(1069): n is a, c, g, or t
  misc_feature (1078)..(1078): n is a, c, g, or t
  misc_feature (1083)..(1083): n is a, c, g, or t
  misc_feature (1094)..(1094): n is a, c, g, or t
  misc_feature (1102)..(1102): n is a, c, g, or t
  misc_feature (1105)..(1105): n is a, c, g, or t
  misc_feature (1153)..(1153): n is a, c, g, or t
  misc_feature (1172)..(1172): n is a, c, g, or t
  misc_feature (1187)..(1187): n is a, c, g, or t
  misc_feature (1190)..(1190): n is a, c, g, or t
  misc_feature (1196)..(1196): n is a, c, g, or t
  misc_feature (1200)..(1202): n is a, c, g, or t
  misc_feature (1209)..(1209): n is a, c, g, or t
  misc_feature (1213)..(1213): n is a, c, g, or t
  misc_feature (1228)..(1228): n is a, c, g, or t
  misc_feature (1231)..(1231): n is a, c, g, or t
  misc_feature (1240)..(1240): n is a, c, g, or t
  misc_feature (1243)..(1243): n is a, c, g, or t
  misc_feature (1248)..(1248): n is a, c, g, or t
  misc_feature (1259)..(1259): n is a, c, g, or t
  misc_feature (1263)..(1263): n is a, c, g, or t
  misc_feature (1279)..(1279): n is a, c, g, or t
  misc_feature (1287)..(1287): n is a, c, g, or t
  misc_feature (1296)..(1297): n is a, c, g, or t
  misc_feature (1300)..(1300): n is a, c, g, or t
  misc_feature (1310)..(1310): n is a, c, g, or t
  misc_feature (1313)..(1313): n is a, c, g, or t
  misc_feature (1329)..(1330): n is a, c, g, or t
  misc_feature (1332)..(1332): n is a, c, g, or t
  misc_feature (1336)..(1336): n is a, c, g, or t
  misc_feature (1353)..(1353): n is a, c, g, or t
  misc_feature (1357)..(1357): n is a, c, g, or t
aatagagaaaattactatgagaggatcgcatcaccatcaccatcacggatcctatttaggtgacactatagaatcgtcgacccacgcgtccggtctgtccgttcggcccggtccggcccgaagcatggccggcgtcagcttcagcggccaccgcctggagctgctggcggcttacgaggaggtgatccgagaggagagcgcggccgactgggctctgtacacatatgaagatggctccgatgacctcaagcttgcagcatcaggagaagggggcttgcaggagctttcgggacactttgagaaccagaaggtgatgtacggcttctgcagtgtcaaggactcccaagctgctctgccaaaatacgtgctcatcaactgggtgggcgaagatgtgcctgatgcccgcaagtgcgcttgtgccagccacgtggctaaggtggcagagttcttccagggtgtcgacgtgatcgtgaacgccagcagcgtggaagacatagacgcgggtgccatcgggcagcggctctctaacgggctggcgcgactctccagccctgtgctgcaccgactgcggctgcgagaggatgagaacgcagagcccgtgggcaccacctaccagaagacggatgcagctgtggaaatgaagcggattaaccgagagcagttctgggagcaggccaagaaggaagaagagctgcggaaggaggaggagcggaagaaggccctggatgagaggctcaggttcgagcaggagcggatggagcaggagcggcaggagcaagaggagcgcgagcggcgctaccgggagcgggagcagcagatcgaggagcacaggaggaaacagcagactttanaagcggaagaagccaagaggcggttgaaggancagtctatctttggtgaccatcgggatgaggaggaagagaccccatgaaaaantcaaantcggaagtggaagangcagcanctatnattgcccagcggcctgacaacccaaggaanttttcagcancangaaaaaatcccatcggcctctgcggcaactggatntaccctcccccntnaaccatcnacaaggaanccccnttgaaaggccncggaagantgngccccattcccatccccacgggaaaccgtttgattcaaaaacccctcncccttgtccttaaaaaaanaaacgggccctgaanaangttccncctnnnaacctcnccantgccccgcccccccnaancccaaaaanccnagaanccccccccctnaaangggggaaaaaaaaaancccccccngcggggcgnnccnggaaaacccntanaaaggccccccggggnnanaccntcaaaaatttttttttntttnaaaagtttttttttccgaaaaccaaaaaaaaaaa

SEQ ID NO: 557 - DNA, 1200 bp, Homo Sapiens
  misc_feature (902)..(902): n is a, c, g, or t
  misc_feature (910)..(910): n is a, c, g, or t
  misc_feature (922)..(922): n is a, c, g, or t
  misc_feature (959)..(959): n is a, c, g, or t
  misc_feature (965)..(965): n is a, c, g, or t
  misc_feature (968)..(968): n is a, c, g, or t
  misc_feature (987)..(987): n is a, c, g, or t
  misc_feature (994)..(994): n is a, c, g, or t
  misc_feature (999)..(999): n is a, c, g, or t
  misc_feature (1017)..(1017): n is a, c, g, or t
  misc_feature (1025)..(1025): n is a, c, g, or t
  misc_feature (1040)..(1040): n is a, c, g, or t
  misc_feature (1046)..(1046): n is a, c, g, or t
  misc_feature (1066)..(1066): n is a, c, g, or t
  misc_feature (1071)..(1071): n is a, c, g, or t
  misc_feature (1083)..(1083): n is a, c, g, or t
  misc_feature (1089)..(1089): n is a, c, g, or t
  misc_feature (1092)..(1092): n is a, c, g, or t
  misc_feature (1094)..(1094): n is a, c, g, or t
  misc_feature (1099)..(1099): n is a, c, g, or t
  misc_feature (1117)..(1117): n is a, c, g, or t
  misc_feature (1119)..(1119): n is a, c, g, or t
  misc_feature (1121)..(1121): n is a, c, g, or t
  misc_feature (1130)..(1130): n is a, c, g, or t
  misc_feature (1135)..(1135): n is a, c, g, or t
  misc_feature (1152)..(1152): n is a, c, g, or t
  misc_feature (1158)..(1158): n is a, c, g, or t
  misc_feature (1165)..(1165): n is a, c, g, or t
  misc_feature (1167)..(1167): n is a, c, g, or t
  misc_feature (1170)..(1170): n is a, c, g, or t
  misc_feature (1178)..(1178): n is a, c, g, or t
  misc_feature (1186)..(1186): n is a, c, g, or t
  misc_feature (1192)..(1194): n is a, c, g, or t
  misc_feature (1196)..(1196): n is a, c, g, or t
  misc_feature (1200)..(1200): n is a, c, g, or t
aatagagagaattactatgagaggatcgcatcaccatcaccatcacggatcctatttaggtgacactatagaatcgtcgacccacgcgtccgcccacgcgtccggcagcttcggctggtgtcatcggtgtccttcctccgctgccgcccccgcaaggcttcgccgtcatcgaggccatttccagcgacttgtcgcacgcttttctatatacttcgttccccgccaaccgcaaccattgacgccatgtcgggttattcgagtgaccgagaccgcggccgggaccgagggtttggtgcacctcgatttggaggaagtagggcagggcccttatctggaaagaagtttggaaaccctggggagaaattagttaaaaagaagtggaatcttgatgagctgcctaaatttgagaagaatttttatcaagagcaccctgatttggctaggcgcacagcacaagaggtggaaacatacagaagaagcaaggaaattacagttagaggtcacaactgcccgaagccagttctaaatttttatgaagccaatttccctgcaaatgtcatggatgttattgcaagacagaatttcactgaacccactgctattcaagctcagggatggccagttgctctaagtggattggatatggttggagtggcacagactggatctgggaaaacattgtcttatttgcttcctgccattgtccacatcaatcatcagccattcctagagagaggcgatgggcctatttgtttggtgctggcaccaactcgggaactggcccaacaggtgcagcaagtagctgctgaatattgtagagcatgtcgcttgaagtctacttgtatctacggtggtgctcctaagggaccacaaatacgtgatttggagagaggtgtggaaantctgtatngcaacacctggnaagactgattgacttttttaaagggggaaaaaaccantctganaanaacaacctaccttgtcctngatgaancaaanaaaatgcttgatatgggnctttgaanccccaaataaggaanaattgnggatcaaaaaaaaacctganaggcnaacctctaatgngggagngcnanttggnccaaaaaaaataaaaaancntngcttaaaantttcnggaaaaaatattttaanaaaaanttggggncnctngaactggngggcaaanccaaannntntttn

SEQ ID NO: 558 - DNA, 1407 bp, Homo Sapiens
  misc_feature (890)..(890): n is a, c, g, or t
  misc_feature (894)..(894): n is a, c, g, or t
  misc_feature (935)..(935): n is a, c, g, or t
  misc_feature (973)..(973): n is a, c, g, or t
  misc_feature (980)..(980): n is a, c, g, or t
  misc_feature (990)..(990): n is a, c, g, or t
  misc_feature (1002)..(1002): n is a, c, g, or t
  misc_feature (1029)..(1029): n is a, c, g, or t
  misc_feature (1057)..(1057): n is a, c, g, or t
  misc_feature (1060)..(1060): n is a, c, g, or t
  misc_feature (1072)..(1072): n is a, c, g, or t
  misc_feature (1084)..(1084): n is a, c, g, or t
  misc_feature (1104)..(1104): n is a, c, g, or t
  misc_feature (1125)..(1125): n is a, c, g, or t
  misc_feature (1135)..(1136): n is a, c, g, or t
  misc_feature (1138)..(1138): n is a, c, g, or t
  misc_feature (1142)..(1142): n is a, c, g, or t
  misc_feature (1144)..(1144): n is a, c, g, or t
  misc_feature (1146)..(1146): n is a, c, g, or t
  misc_feature (1154)..(1154): n is a, c, g, or t
  misc_feature (1157)..(1160): n is a, c, g, or t
  misc_feature (1163)..(1164): n is a, c, g, or t
  misc_feature (1168)..(1168): n is a, c, g, or t
  misc_feature (1173)..(1173): n is a, c, g, or t
  misc_feature (1175)..(1175): n is a, c, g, or t
  misc_feature (1181)..(1182): n is a, c, g, or t
  misc_feature (1184)..(1184): n is a, c, g, or t
  misc_feature (1196)..(1196): n is a, c, g, or t
  misc_feature (1202)..(1203): n is a, c, g, or t
  misc_feature (1207)..(1208): n is a, c, g, or t
  misc_feature (1212)..(1212): n is a, c, g, or t
  misc_feature (1228)..(1229): n is a, c, g, or t
  misc_feature (1236)..(1236): n is a, c, g, or t
  misc_feature (1241)..(1241): n is a, c, g, or t
  misc_feature (1246)..(1246): n is a, c, g, or t
  misc_feature (1252)..(1252): n is a, c, g, or t
  misc_feature (1258)..(1258): n is a, c, g, or t
  misc_feature (1262)..(1262): n is a, c, g, or t
  misc_feature (1264)..(1265): n is a, c, g, or t
  misc_feature (1271)..(1271): n is a, c, g, or t
  misc_feature (1273)..(1273): n is a, c, g, or t
  misc_feature (1276)..(1276): n is a, c, g, or t
  misc_feature (1278)..(1278): n is a, c, g, or t
  misc_feature (1282)..(1283): n is a, c, g, or t
  misc_feature (1285)..(1285): n is a, c, g, or t
  misc_feature (1287)..(1287): n is a, c, g, or t
  misc_feature (1297)..(1298): n is a, c, g, or t
  misc_feature (1308)..(1308): n is a, c, g, or t
  misc_feature (1320)..(1321): n is a, c, g, or t
  misc_feature (1324)..(1327): n is a, c, g, or t
  misc_feature (1333)..(1333): n is a, c, g, or t
  misc_feature (1337)..(1339): n is a, c, g, or t
  misc_feature (1344)..(1344): n is a, c, g, or t
  misc_feature (1349)..(1349): n is a, c, g, or t
  misc_feature (1360)..(1360): n is a, c, g, or t
  misc_feature (1363)..(1363): n is a, c, g, or t
  misc_feature (1365)..(1366): n is a, c, g, or t
  misc_feature (1370)..(1370): n is a, c, g, or t
  misc_feature (1372)..(1372): n is a, c, g, or t
  misc_feature (1379)..(1379): n is a, c, g, or t
  misc_feature (1381)..(1381): n is a, c, g, or t
  misc_feature (1383)..(1383): n is a, c, g, or t
  misc_feature (1391)..(1391): n is a, c, g, or t
  misc_feature (1399)..(1399): n is a, c, g, or t
  misc_feature (1402)..(1402): n is a, c, g, or t
attagagaaattactatgagaggatcgcatcaccatcaccatcacggatcctatttaggtgacactatagaatcgtcgacccacgcgtccgcccacgcgtccgcccacgcgtccgcccacgcgtccgcccacgcgtccgctaaagtcacggtcaaacctaaacaccgagcctcattaacccaagtgaaccaaccaaagtcaccagttcagaagtgctaagctaataggagtctgacccgagggcctgctgcttcctggttaagtatcttttgagattctagaacacatgggagctttttattttcggggaaaaaccgtatttttttcttgtccaattatttctaaagacacactacatagaaagaggccctataaactcaaaaagtcattgggaaacttaaagtctattctactttgcaagaggagaaatgtgttttatgaacgatagatcacatcagaactcctgtggggaggaaaccttataaattaaacacatggcccccttagagaccacaggcgatgtctgtctccatccttccctctccttttctgtcacctttccccctagctggctcctttggacctacccctgtccttgctgacttgtgttgcattgtattccaaacgtgtttacaggttctcttaagcaatgttgtatttgcaggcttttctgaataccaaatctgctttttgtaaagcgtaaaaacatcacaaagtaggtcattccatcaccacccttgtctctctacacattttgcctttggggatctggttggggttttgggttttttgttgttgttgtttatttgttattttaaaggtaaattgcacttttaaaaaaataattggttgacttaaatatatttgctttttttcttacctgcacttanaggnaaatttgaacaagttggaaaaaaaacaatttttggtttcanttctaagaaaacacttgcagctctagtattcacttgantcttccnggttttcccngtacggggccanggaaattttttgggtggttttggttgntttcttaaaaaaaaagttaaaaccctgnacnatttctgcaggntggggtaaacanggtttaccgggtgggcttgnctttggggggccggtaaaagnaagggccaanngnaaangncnaaaaaaantcnnnnggnnctcnaaaangnaaaaanngncggggacttggnggcccnnaaanngggnaggatttaaaaaaaannggttttnaaccnggaanttgggnttggancccngnngggggnanttncntttnnancnaaaaaggggnnacccaaaaantttttttttttnnccnnnnttgggnaaannnttggnaaaanaccccgggttnttncnnaaantntggtttntncnggaccccnaaaaaaanggnggtta

SEQ ID NO: 559 - DNA, 1886 bp, Homo Sapiens
  misc_feature (3)..(3): n is a, c, g, or t
  misc_feature (5)..(6): n is a, c, g, or t
  misc_feature (8)..(8): n is a, c, g, or t
  misc_feature (13)..(13): n is a, c, g, or t
  misc_feature (19)..(19): n is a, c, g, or t
  misc_feature (45)..(46): n is a, c, g, or t
  misc_feature (48)..(48): n is a, c, g, or t
  misc_feature (50)..(50): n is a, c, g, or t
  misc_feature (52)..(52): n is a, c, g, or t
  misc_feature (59)..(60): n is a, c, g, or t
  misc_feature (67)..(67): n is a, c, g, or t
  misc_feature (71)..(71): n is a, c, g, or t
  misc_feature (75)..(75): n is a, c, g, or t
  misc_feature (81)..(81): n is a, c, g, or t
  misc_feature (86)..(86): n is a, c, g, or t
  misc_feature (90)..(90): n is a, c, g, or t
  misc_feature (92)..(92): n is a, c, g, or t
  misc_feature (100)..(102): n is a, c, g, or t
  misc_feature (106)..(106): n is a, c, g, or t
  misc_feature (109)..(110): n is a, c, g, or t
  misc_feature (116)..(116): n is a, c, g, or t
  misc_feature (120)..(121): n is a, c, g, or t
  misc_feature (123)..(123): n is a, c, g, or t
  misc_feature (125)..(125): n is a, c, g, or t
  misc_feature (132)..(132): n is a, c, g, or t
  misc_feature (134)..(135): n is a, c, g, or t
  misc_feature (139)..(140): n is a, c, g, or t
  misc_feature (147)..(147): n is a, c, g, or t
  misc_feature (154)..(155): n is a, c, g, or t
  misc_feature (170)..(170): n is a, c, g, or t
  misc_feature (176)..(176): n is a, c, g, or t
  misc_feature (180)..(180): n is a, c, g, or t
  misc_feature (183)..(183): n is a, c, g, or t
  misc_feature (186)..(186): n is a, c, g, or t
  misc_feature (189)..(189): n is a, c, g, or t
  misc_feature (193)..(193): n is a, c, g, or t
  misc_feature (195)..(195): n is a, c, g, or t
  misc_feature (201)..(202): n is a, c, g, or t
  misc_feature (207)..(207): n is a, c, g, or t
  misc_feature (221)..(222): n is a, c, g, or t
  misc_feature (227)..(229): n is a, c, g, or t
  misc_feature (236)..(236): n is a, c, g, or t
  misc_feature (245)..(245): n is a, c, g, or t
  misc_feature (247)..(247): n is a, c, g, or t
  misc_feature (250)..(250): n is a, c, g, or t
  misc_feature (263)..(263): n is a, c, g, or t
  misc_feature (271)..(271): n is a, c, g, or t
  misc_feature (276)..(277): n is a, c, g, or t
  misc_feature (280)..(280): n is a, c, g, or t
  misc_feature (284)..(284): n is a, c, g, or t
  misc_feature (287)..(287): n is a, c, g, or t
  misc_feature (291)..(291): n is a, c, g, or t
  misc_feature (294)..(294): n is a, c, g, or t
  misc_feature (301)..(301): n is a, c, g, or t
  misc_feature (303)..(303): n is a, c, g, or t
  misc_feature (305)..(306): n is a, c, g, or t
  misc_feature (309)..(310): n is a, c, g, or t
  misc_feature (316)..(316): n is a, c, g, or t
  misc_feature (318)..(318): n is a, c, g, or t
  misc_feature (320)..(320): n is a, c, g, or t
  misc_feature (322)..(322): n is a, c, g, or t
  misc_feature (325)..(327): n is a, c, g, or t
  misc_feature (338)..(338): n is a, c, g, or t
  misc_feature (340)..(340): n is a, c, g, or t
  misc_feature (360)..(361): n is a, c, g, or t
  misc_feature (370)..(371): n is a, c, g, or t
  misc_feature (373)..(373): n is a, c, g, or t
  misc_feature (375)..(378): n is a, c, g, or t
  misc_feature (386)..(386): n is a, c, g, or t
  misc_feature (388)..(392): n is a, c, g, or t
  misc_feature (395)..(396): n is a, c, g, or t
  misc_feature (400)..(400): n is a, c, g, or t
  misc_feature (402)..(402): n is a, c, g, or t
  misc_feature (406)..(406): n is a, c, g, or t
  misc_feature (410)..(410): n is a, c, g, or t
  misc_feature (415)..(415): n is a, c, g, or t
  misc_feature (420)..(420): n is a, c, g, or t
  misc_feature (426)..(426): n is a, c, g, or t
  misc_feature (431)..(431): n is a, c, g, or t
  misc_feature (433)..(433): n is a, c, g, or t
  misc_feature (436)..(436): n is a, c, g, or t
  misc_feature (439)..(440): n is a, c, g, or t
  misc_feature (445)..(445): n is a, c, g, or t
  misc_feature (449)..(449): n is a, c, g, or t
  misc_feature (453)..(453): n is a, c, g, or t
  misc_feature (455)..(456): n is a, c, g, or t
  misc_feature (459)..(460): n is a, c, g, or t
  misc_feature (468)..(468): n is a, c, g, or t
  misc_feature (471)..(471): n is a, c, g, or t
  misc_feature (475)..(476): n is a, c, g, or t
  misc_feature (478)..(478): n is a, c, g, or t
  misc_feature (481)..(481): n is a, c, g, or t
  misc_feature (489)..(489): n is a, c, g, or t
  misc_feature (493)..(494): n is a, c, g, or t
  misc_feature (499)..(499): n is a, c, g, or t
  misc_feature (502)..(502): n is a, c, g, or t
  misc_feature (504)..(505): n is a, c, g, or t
  misc_feature (510)..(512): n is a, c, g, or t
  misc_feature (514)..(514): n is a, c, g, or t
  misc_feature (519)..(520): n is a, c, g, or t
  misc_feature (522)..(522): n is a, c, g, or t
  misc_feature (524)..(525): n is a, c, g, or t
  misc_feature (531)..(531): n is a, c, g, or t
  misc_feature (533)..(534): n is a, c, g, or t
  misc_feature (536)..(536): n is a, c, g, or t
  misc_feature (540)..(540): n is a, c, g, or t
  misc_feature (542)..(542): n is a, c, g, or t
  misc_feature (545)..(546): n is a, c, g, or t
  misc_feature (548)..(548): n is a, c, g, or t
  misc_feature (553)..(554): n is a, c, g, or t
  misc_feature (557)..(557): n is a, c, g, or t
  misc_feature (564)..(573): n is a, c, g, or t
  misc_feature (579)..(580): n is a, c, g, or t
  misc_feature (589)..(589): n is a, c, g, or t
  misc_feature (594)..(594): n is a, c, g, or t
  misc_feature (596)..(598): n is a, c, g, or t
  misc_feature (600)..(600): n is a, c, g, or t
  misc_feature (603)..(603): n is a, c, g, or t
  misc_feature (605)..(605): n is a, c, g, or t
  misc_feature (611)..(611): n is a, c, g, or t
  misc_feature (617)..(617): n is a, c, g, or t
  misc_feature (620)..(620): n is a, c, g, or t
  misc_feature (622)..(622): n is a, c, g, or t
  misc_feature (626)..(626): n is a, c, g, or t
  misc_feature (639)..(639): n is a, c, g, or t
  misc_feature (641)..(641): n is a, c, g, or t
  misc_feature (643)..(643): n is a, c, g, or t
  misc_feature (646)..(647): n is a, c, g, or t
  misc_feature (649)..(649): n is a, c, g, or t
  misc_feature (655)..(655): n is a, c, g, or t
  misc_feature (657)..(657): n is a, c, g, or t
  misc_feature (662)..(665): n is a, c, g, or t
  misc_feature (667)..(667): n is a, c, g, or t
  misc_feature (677)..(678): n is a, c, g, or t
  misc_feature (680)..(681): n is a, c, g, or t
  misc_feature (683)..(683): n is a, c, g, or t
  misc_feature (686)..(688): n is a, c, g, or t
  misc_feature (695)..(696): n is a, c, g, or t
  misc_feature (700)..(700): n is a, c, g, or t
  misc_feature (703)..(703): n is a, c, g, or t
  misc_feature (705)..(705): n is a, c, g, or t
  misc_feature (710)..(710): n is a, c, g, or t
  misc_feature (713)..(713): n is a, c, g, or t
  misc_feature (715)..(717): n is a, c, g, or t
  misc_feature (725)..(725): n is a, c, g, or t
  misc_feature (728)..(729): n is a, c, g, or t
  misc_feature (732)..(736): n is a, c, g, or t
  misc_feature (739)..(739): n is a, c, g, or t
  misc_feature (746)..(746): n is a, c, g, or t
  misc_feature (748)..(748): n is a, c, g, or t
  misc_feature (751)..(752): n is a, c, g, or t
  misc_feature (757)..(757): n is a, c, g, or t
  misc_feature (759)..(760): n is a, c, g, or t
  misc_feature (764)..(765): n is a, c, g, or t
  misc_feature (770)..(770): n is a, c, g, or t
  misc_feature (772)..(772): n is a, c, g, or t
  misc_feature (774)..(774): n is a, c, g, or t
  misc_feature (776)..(776): n is a, c, g, or t
  misc_feature (781)..(781): n is a, c, g, or t
  misc_feature (786)..(788): n is a, c, g, or t
  misc_feature (792)..(793): n is a, c, g, or t
  misc_feature (798)..(798): n is a, c, g, or t
  misc_feature (804)..(805): n is a, c, g, or t
  misc_feature (809)..(809): n is a, c, g, or t
  misc_feature (812)..(812): n is a, c, g, or t
  misc_feature (819)..(819): n is a, c, g, or t
  misc_feature (822)..(822): n is a, c, g, or t
  misc_feature (827)..(827): n is a, c, g, or t
  misc_feature (829)..(829): n is a, c, g, or t
  misc_feature (831)..(831): n is a, c, g, or t
  misc_feature (840)..(841): n is a, c, g, or t
  misc_feature (844)..(844): n is a, c, g, or t
  misc_feature (847)..(847): n is a, c, g, or t
  misc_feature (849)..(849): n is a, c, g, or t
  misc_feature (854)..(854): n is a, c, g, or t
  misc_feature (858)..(858): n is a, c, g, or t
  misc_feature (860)..(862): n is a, c, g, or t
  misc_feature (866)..(866): n is a, c, g, or t
  misc_feature (868)..(868): n is a, c, g, or t
  misc_feature (871)..(871): n is a, c, g, or t
  misc_feature (873)..(874): n is a, c, g, or t
  misc_feature (883)..(884): n is a, c, g, or t
  misc_feature (891)..(893): n is a, c, g, or t
  misc_feature (895)..(895): n is a, c, g, or t
  misc_feature (900)..(900): n is a, c, g, or t
  misc_feature (902)..(902): n is a, c, g, or t
  misc_feature (904)..(905): n is a, c, g, or t
  misc_feature (909)..(909): n is a, c, g, or t
  misc_feature (913)..(913): n is a, c, g, or t
  misc_feature (921)..(921): n is a, c, g, or t
  misc_feature (927)..(927): n is a, c, g, or t
  misc_feature (930)..(930): n is a, c, g, or t
  misc_feature (934)..(938): n is a, c, g, or t
  misc_feature (941)..(941): n is a, c, g, or t
  misc_feature (943)..(943): n is a, c, g, or t
  misc_feature (945)..(946): n is a, c, g, or t
  misc_feature (952)..(952): n is a, c, g, or t
  misc_feature (954)..(955): n is a, c, g, or t
  misc_feature (959)..(959): n is a, c, g, or t
  misc_feature (963)..(963): n is a, c, g, or t
  misc_feature (969)..(970): n is a, c, g, or t
  misc_feature (973)..(973): n is a, c, g, or t
  misc_feature (977)..(977): n is a, c, g, or t
  misc_feature (981)..(981): n is a, c, g, or t
  misc_feature (984)..(987): n is a, c, g, or t
  misc_feature (991)..(991): n is a, c, g, or t
  misc_feature (994)..(998): n is a, c, g, or t
  misc_feature (1000)..(1001): n is a, c, g, or t
  misc_feature (1003)..(1005): n is a, c, g, or t
  misc_feature (1007)..(1012): n is a, c, g, or t
  misc_feature (1015)..(1015): n is a, c, g, or t
  misc_feature (1024)..(1028): n is a, c, g, or t
  misc_feature (1031)..(1032): n is a, c, g, or t
  misc_feature (1035)..(1035): n is a, c, g, or t
  misc_feature (1038)..(1038): n is a, c, g, or t
  misc_feature (1041)..(1041): n is a, c, g, or t
  misc_feature (1044)..(1045): n is a, c, g, or t
  misc_feature (1048)..(1048): n is a, c, g, or t
  misc_feature (1050)..(1050): n is a, c, g, or t
  misc_feature (1052)..(1052): n is a, c, g, or t
  misc_feature (1055)..(1058): n is a, c, g, or t
  misc_feature (1060)..(1060): n is a, c, g, or t
  misc_feature (1063)..(1063): n is a, c, g, or t
  misc_feature (1065)..(1065): n is a, c, g, or t
  misc_feature (1067)..(1067): n is a, c, g, or t
  misc_feature (1071)..(1071): n is a, c, g, or t
  misc_feature (1073)..(1074): n is a, c, g, or t
  misc_feature (1078)..(1078): n is a, c, g, or t
  misc_feature (1084)..(1084): n is a, c, g, or t
  misc_feature (1094)..(1095): n is a, c, g, or t
  misc_feature (1099)..(1100): n is a, c, g, or t
  misc_feature (1102)..(1102): n is a, c, g, or t
  misc_feature (1104)..(1104): n is a, c, g, or t
  misc_feature (1107)..(1108): n is a, c, g, or t
  misc_feature (1112)..(1114): n is a, c, g, or t
  misc_feature (1121)..(1122): n is a, c, g, or t
  misc_feature (1124)..(1126): n is a, c, g, or t
  misc_feature (1135)..(1136): n is a, c, g, or t
  misc_feature (1139)..(1139): n is a, c, g, or t
  misc_feature (1143)..(1144): n is a, c, g, or t
  misc_feature (1150)..(1151): n is a, c, g, or t
  misc_feature (1156)..(1157): n is a, c, g, or t
  misc_feature (1160)..(1161): n is a, c, g, or t
  misc_feature (1163)..(1164): n is a, c, g, or t
  misc_feature (1166)..(1166): n is a, c, g, or t
  misc_feature (1171)..(1171): n is a, c, g, or t
  misc_feature (1173)..(1173): n is a, c, g, or t
  misc_feature (1175)..(1176): n is a, c, g, or t
  misc_feature (1181)..(1181): n is a, c, g, or t
  misc_feature (1183)..(1184): n is a, c, g, or t
  misc_feature (1187)..(1188): n is a, c, g, or t
  misc_feature (1193)..(1193): n is a, c, g, or t
  misc_feature (1195)..(1195): n is a, c, g, or t
  misc_feature (1198)..(1200): n is a, c, g, or t
  misc_feature (1204)..(1204): n is a, c, g, or t
  misc_feature (1211)..(1211): n is a, c, g, or t
  misc_feature (1214)..(1214): n is a, c, g, or t
  misc_feature (1217)..(1221): n is a, c, g, or t
  misc_feature (1223)..(1223): n is a, c, g, or t
  misc_feature (1226)..(1226): n is a, c, g, or t
  misc_feature (1228)..(1228): n is a, c, g, or t
  misc_feature (1230)..(1231): n is a, c, g, or t
  misc_feature (1233)..(1234): n is a, c, g, or t
  misc_feature (1237)..(1239): n is a, c, g, or t
  misc_feature (1243)..(1243): n is a, c, g, or t
  misc_feature (1248)..(1249): n is a, c, g, or t
  misc_feature (1255)..(1255): n is a, c, g, or t
  misc_feature (1260)..(1262): n is a, c, g, or t
  misc_feature (1264)..(1265): n is a, c, g, or t
  misc_feature (1268)..(1268): n is a, c, g, or t
  misc_feature (1272)..(1272): n is a, c, g, or t
  misc_feature (1279)..(1279): n is a, c, g, or t
  misc_feature (1281)..(1283): n is a, c, g, or t
  misc_feature (1285)..(1285): n is a, c, g, or t
  misc_feature (1290)..(1290): n is a, c, g, or t
  misc_feature (1292)..(1293): n is a, c, g, or t
  misc_feature (1295)..(1295): n is a, c, g, or t
  misc_feature (1298)..(1299): n is a, c, g, or t
  misc_feature (1303)..(1303): n is a, c, g, or t
  misc_feature (1306)..(1308): n is a, c, g, or t
  misc_feature (1311)..(1311): n is a, c, g, or t
  misc_feature (1313)..(1314): n is a, c, g, or t
  misc_feature (1317)..(1318): n is a, c, g, or t
  misc_feature (1321)..(1321): n is a, c, g, or t
  misc_feature (1325)..(1327): n is a, c, g, or t
  misc_feature (1329)..(1330): n is a, c, g, or t
  misc_feature (1335)..(1335): n is a, c, g, or t
  misc_feature (1342)..(1342): n is a, c, g, or t
  misc_feature (1345)..(1347): n is a, c, g, or t
  misc_feature (1351)..(1352): n is a, c, g, or t
  misc_feature (1355)..(1355): n is a, c, g, or t
  misc_feature (1366)..(1366): n is a, c, g, or t
  misc_feature (1370)..(1370): n is a, c, g, or t
  misc_feature (1372)..(1372): n is a, c, g, or t
  misc_feature (1377)..(1377): n is a, c, g, or t
  misc_feature (1379)..(1379): n is a, c, g, or t
  misc_feature (1392)..(1392): n is a, c, g, or t
  misc_feature (1394)..(1397): n is a, c, g, or t
  misc_feature (1405)..(1406): n is a, c, g, or t
  misc_feature (1411)..(1411): n is a, c, g, or t
  misc_feature (1413)..(1413): n is a, c, g, or t
  misc_feature (1419)..(1420): n is a, c, g, or t
  misc_feature (1422)..(1422): n is a, c, g, or t
  misc_feature (1427)..(1427): n is a, c, g, or t
  misc_feature (1431)..(1431): n is a, c, g, or t
  misc_feature (1434)..(1434): n is a, c, g, or t
  misc_feature (1437)..(1437): n is a, c, g, or t
  misc_feature (1439)..(1439): n is a, c, g, or t
  misc_feature (1446)..(1448): n is a, c, g, or t
  misc_feature (1451)..(1451): n is a, c, g, or t
  misc_feature (1456)..(1456): n is a, c, g, or t
  misc_feature (1460)..(1460): n is a, c, g, or t
  misc_feature (1463)..(1463): n is a, c, g, or t
  misc_feature (1466)..(1466): n is a, c, g, or t
  misc_feature (1471)..(1471): n is a, c, g, or t
  misc_feature (1475)..(1475): n is a, c, g, or t
  misc_feature (1483)..(1483): n is a, c, g, or t
  misc_feature (1485)..(1486): n is a, c, g, or t
  misc_feature (1488)..(1488): n is a, c, g, or t
  misc_feature (1491)..(1491): n is a, c, g, or t
  misc_feature (1496)..(1496): n is a, c, g, or t
  misc_feature (1501)..(1501): n is a, c, g, or t
  misc_feature (1504)..(1506): n is a, c, g, or t
  misc_feature (1511)..(1511): n is a, c, g, or t
  misc_feature (1513)..(1513): n is a, c, g, or t
  misc_feature (1519)..(1519): n is a, c, g, or t
  misc_feature (1523)..(1523): n is a, c, g, or t
  misc_feature (1526)..(1526): n is a, c, g, or t
  misc_feature (1528)..(1528): n is a, c, g, or t
  misc_feature (1530)..(1530): n is a, c, g, or t
  misc_feature (1534)..(1535): n is a, c, g, or t
  misc_feature (1538)..(1538): n is a, c, g, or t
  misc_feature (1542)..(1542): n is a, c, g, or t
  misc_feature (1544)..(1544): n is a, c, g, or t
  misc_feature (1546)..(1548): n is a, c, g, or t
  misc_feature (1550)..(1550): n is a, c, g, or t
  misc_feature (1552)..(1553): n is a, c, g, or t
  misc_feature (1555)..(1556): n is a, c, g, or t
  misc_feature (1563)..(1563): n is a, c, g, or t
  misc_feature (1565)..(1565): n is a, c, g, or t
  misc_feature (1567)..(1568): n is a, c, g, or t
  misc_feature (1570)..(1570): n is a, c, g, or t
  misc_feature (1573)..(1573): n is a, c, g, or t
  misc_feature (1576)..(1576): n is a, c, g, or t
  misc_feature (1584)..(1584): n is a, c, g, or t
  misc_feature (1586)..(1587): n is a, c, g, or t
  misc_feature (1590)..(1590): n is a, c, g, or t
  misc_feature (1597)..(1597): n is a, c, g, or t
  misc_feature (1600)..(1601): n is a, c, g, or t
  misc_feature (1604)..(1604): n is a, c, g, or t
  misc_feature (1608)..(1608): n is a, c, g, or t
  misc_feature (1611)..(1612): n is a, c, g, or t
  misc_feature (1614)..(1614): n is a, c, g, or t
  misc_feature (1616)..(1617): n is a, c, g, or t
  misc_feature (1620)..(1620): n is a, c, g, or t
  misc_feature (1627)..(1628): n is a, c, g, or t
  misc_feature (1631)..(1631): n is a, c, g, or t
  misc_feature (1637)..(1638): n is a, c, g, or t
  misc_feature (1640)..(1641): n is a, c, g, or t
  misc_feature (1643)..(1643): n is a, c, g, or t
  misc_feature (1645)..(1645): n is a, c, g, or t
  misc_feature (1653)..(1653): n is a, c, g, or t
  misc_feature (1659)..(1659): n is a, c, g, or t
  misc_feature (1662)..(1665): n is a, c, g, or t
  misc_feature (1667)..(1667): n is a, c, g, or t
  misc_feature (1671)..(1671): n is a, c, g, or t
  misc_feature (1673)..(1673): n is a, c, g, or t
  misc_feature (1685)..(1687): n is a, c, g, or t
  misc_feature (1692)..(1694): n is a, c, g, or t
  misc_feature (1698)..(1698): n is a, c, g, or t
  misc_feature (1702)..(1702): n is a, c, g, or t
  misc_feature (1704)..(1705): n is a, c, g, or t
  misc_feature (1715)..(1715): n is a, c, g, or t
  misc_feature (1726)..(1726): n is a, c, g, or t
  misc_feature (1729)..(1729): n is a, c, g, or t
  misc_feature (1731)..(1732): n is a, c, g, or t
  misc_feature (1734)..(1735): n is a, c, g, or t
  misc_feature (1737)..(1737): n is a, c, g, or t
  misc_feature (1741)..(1741): n is a, c, g, or t
  misc_feature (1751)..(1751): n is a, c, g, or t
  misc_feature (1756)..(1756): n is a, c, g, or t
  misc_feature (1759)..(1759): n is a, c, g, or t
  misc_feature (1761)..(1762): n is a, c, g, or t
  misc_feature (1764)..(1764): n is a, c, g, or t
  misc_feature (1768)..(1768): n is a, c, g, or t
  misc_feature (1773)..(1774): n is a, c, g, or t
  misc_feature (1776)..(1778): n is a, c, g, or t
  misc_feature (1783)..(1786): n is a, c, g, or t
  misc_feature (1790)..(1790): n is a, c, g, or t
  misc_feature (1793)..(1795): n is a, c, g, or t
  misc_feature (1803)..(1803): n is a, c, g, or t
  misc_feature (1808)..(1809): n is a, c, g, or t
  misc_feature (1811)..(1811): n is a, c, g, or t
  misc_feature (1814)..(1815): n is a, c, g, or t
  misc_feature (1818)..(1818): n is a, c, g, or t
  misc_feature (1823)..(1823): n is a, c, g, or t
  misc_feature (1827)..(1827): n is a, c, g, or t
  misc_feature (1831)..(1832): n is a, c, g, or t
  misc_feature (1834)..(1834): n is a, c, g, or t
  misc_feature (1847)..(1847): n is a, c, g, or t
  misc_feature (1850)..(1851): n is a, c, g, or t
  misc_feature (1853)..(1854): n is a, c, g, or t
  misc_feature (1864)..(1864): n is a, c, g, or t
  misc_feature (1866)..(1866): n is a, c, g, or t
  misc_feature (1869)..(1870): n is a, c, g, or t
  misc_feature (1872)..(1872): n is a, c, g, or t
  misc_feature (1884)..(1885): n is a, c, g, or t
tangnngnaaaantatttntggggcgccgcccccccccccccccnngngntnttttttnngggaggntatntaanatattnaaccncccntncccggcannnatanggnntaggcnggtnnananggtcccngnntgtnngcttctncacgctnnctctgtgggtgcttntggctngtcngcnccnccnaggnangcaccnngtccngtggagcttcctcnncttgnnntatcacntcggccgtntnacnagaaccagcccantgtctaantctcnnganatcntcngaanctnccaagantnannggnngcgagnancntntcnnnaccaagtattnanagtcgtttggctctcttgcnnctcaagaanngncnnnngacaagcncnnnnnaannaggngnaaanaatntgacnactangcgtcnccctngncangcnnttgtngagnccangnntgnntcaactcngtncctnncncgnccagaagnacannttgcnatngnnctgcnnngnacaanntntnnttcgtncnnanctcncnttnngngggcnntancgcatcnnnnnnnnnnccagtnnacagtaacncgatncnnncnagngnttagantacctnaananacancttgtgactcctntntntcnngnacgttntncatannnncnagtacgccanncnncncannntcttacnnctcnttncnctcanatnannnaattcctnganngannnnntgnatggtgncnagnntcctncnngctnntccanantnangcccnttcannncacnngctgnaattgnngttnccnaacgagnctnttganantncatcaaggnntcnacnantttangtcncnnngtancnctntnnaggtcttcnntaaatgnnnanatggnancnnctcnctanactttcgnccatcnaancatnnnnncantncnntagatncnngggncacnctctcnngtngtcnccgntannnncatnatnnnnntnntnnngnnnnnntcntttatatgnnnnncanncanccnctntanntantncntannnntnacnancntcgngnncagnatctanattatccagnntatnngngntcnnctcnnnacctttnntnnngggcatttnnatntagnnaccccnncccannttnntnntnagtgnantnntaacntnnaanntccancngtnnnaaanagtcttnacnacnnnnntnagngntnncnnacnnntgtncaagnntatatnccctnnntnnttncccncctgctncnnntntcatntnnancanntatnccnnnagntnntcnnccnaaannnanntcgcnctgatanaannntatnngtnactatcgaacntctngntccantnttcccctattccntnnnnctaacatnnagacntncttctnngngagancatnttnctntncgatatnnnacnccgancacntcncanagatncttnaccatcanannanttntatcncatgntgnnnttctnanttcgcntatnctntncncatnnagngatnanannntnanngnntccattncntnnanctncanacttcctnannttntccctcnaannaantacnctnntncnnatnatctgcnnatntctctnncnntncnatacatgnaactcncannnncnatananatcatactatannncacgnnngtanaaananncgatcgatcnacatcacagcncananntnncnttcnctattaacgntcagngcntnncnatcncttanngnnnaaggnnnnattngtnnngcatacangaganntnagnnccnctatntacnatcnntntaaataatctatngcnncnnatattgtatncntcnncnattactccttcnnc

SEQ ID NO: 560 - DNA, 1345 bp, Homo Sapiens
  misc_feature (1)..(1): n is a, c, g, or t
  misc_feature (975)..(975): n is a, c, g, or t
  misc_feature (1007)..(1007): n is a, c, g, or t
  misc_feature (1019)..(1019): n is a, c, g, or t
  misc_feature (1024)..(1024): n is a, c, g, or t
  misc_feature (1029)..(1029): n is a, c, g, or t
  misc_feature (1052)..(1052): n is a, c, g, or t
  misc_feature (1057)..(1057): n is a, c, g, or t
  misc_feature (1068)..(1068): n is a, c, g, or t
  misc_feature (1090)..(1090): n is a, c, g, or t
  misc_feature (1115)..(1115): n is a, c, g, or t
  misc_feature (1122)..(1122): n is a, c, g, or t
  misc_feature (1128)..(1128): n is a, c, g, or t
  misc_feature (1139)..(1139): n is a, c, g, or t
  misc_feature (1145)..(1145): n is a, c, g, or t
  misc_feature (1154)..(1154): n is a, c, g, or t
  misc_feature (1158)..(1159): n is a, c, g, or t
  misc_feature (1161)..(1162): n is a, c, g, or t
  misc_feature (1167)..(1170): n is a, c, g, or t
  misc_feature (1173)..(1173): n is a, c, g, or t
  misc_feature (1179)..(1179): n is a, c, g, or t
  misc_feature (1183)..(1183): n is a, c, g, or t
  misc_feature (1187)..(1187): n is a, c, g, or t
  misc_feature (1200)..(1200): n is a, c, g, or t
  misc_feature (1210)..(1210): n is a, c, g, or t
  misc_feature (1225)..(1225): n is a, c, g, or t
  misc_feature (1230)..(1230): n is a, c, g, or t
  misc_feature (1234)..(1234): n is a, c, g, or t
  misc_feature (1236)..(1236): n is a, c, g, or t
  misc_feature (1245)..(1245): n is a, c, g, or t
  misc_feature (1247)..(1248): n is a, c, g, or t
  misc_feature (1254)..(1254): n is a, c, g, or t
  misc_feature (1265)..(1265): n is a, c, g, or t
  misc_feature (1273)..(1273): n is a, c, g, or t
  misc_feature (1276)..(1276): n is a, c, g, or t
  misc_feature (1278)..(1279): n is a, c, g, or t
  misc_feature (1286)..(1287): n is a, c, g, or t
  misc_feature (1292)..(1293): n is a, c, g, or t
  misc_feature (1299)..(1299): n is a, c, g, or t
  misc_feature (1301)..(1301): n is a, c, g, or t
  misc_feature (1316)..(1316): n is a, c, g, or t
  misc_feature (1318)..(1318): n is a, c, g, or t
  misc_feature (1321)..(1321): n is a, c, g, or t
  misc_feature (1323)..(1323): n is a, c, g, or t
  misc_feature (1333)..(1333): n is a, c, g, or t
  misc_feature (1337)..(1337): n is a, c, g, or t
naatagagaaattactatgagaggatcgcatcaccatcaccatcacggatcctatttaggtgacactatagaatcgtcgacccacgcgtccggtggggcgcccacaatttgcgcgctctctttctgctgctccccagctctcggatacagccgacaccatgggtttcggagacctgaaaagccctgccggcctccaggtgctcaacgattacctggcggacaagagctacatcgaggggtatgtgccatcacaagcagatgtggcagtatttgaagccgtgtccagcccaccgcctgccgacttgtgtcatgccctacgttggtataatcacatcaagtcttacgaaaaggaaaaggccagcctgccaggagtgaagaaagctttgggcaaatatggtcctgccgatgtggaagacactacaggaagtggagctacagatagtaaagatgatgatgacattgacctctttggatctgatgatgaggaggaaagtgaagaagcaaagaggctaagggaagaacgtcttgcacaatatgaatcaaagaaagccaaaaaacctgcacttgttgccaagtcttccatcttactagatgtgaaaccttgggatgatgagacagatatggcgaaattagaggagtgcgtcagaagcattcaagcagacggcttagtctggggctcatctaaactagttccagtgggatacggaattaagaaacttcaaatacagtgtgtagttgaagatgataaagttggaacagatatgctggaggagcagatcactgcttttgaggactatgtgcagtccatggatgtggctgctttcaacaagatctaaaatccatcctggatcatggcatttaaataaaagattgaaaagattaaaaaaaaaaaaaaaaaaaaaaaaaaaagggcggccgctccctatagtgagtcgtattaagcttaattagctgacctgggactcctgttgatanatccagtaatgacctcaaaactccatctgganttttttcaaacnctcgntgccnccgggcgttttttttggggaaanccaanctagcttgggnaattttcggagctaggaacctnaaatggaaaaaaaatcctggaaaanccccgtnaaattnccatggctccnaaaaanatttgagcnttcnncnntgccnnnnacnaaaacnaacnttcnctggaataccccnttttaaaccnaaaaaaaaaacccanttttntccncnttttccttntnncccccnggaaaagcccnccgaattnttngnnaaaaaannggacnnggaaangnaaagttcccttttancnttntnaaaaaaaaantttncccttgga

SEQ ID NO: 561 - DNA, 1426 bp, Homo Sapiens
  misc_feature (876)..(876): n is a, c, g, or t
  misc_feature (929)..(929): n is a, c, g, or t
  misc_feature (944)..(944): n is a, c, g, or t
  misc_feature (968)..(968): n is a, c, g, or t
  misc_feature (982)..(982): n is a, c, g, or t
  misc_feature (984)..(984): n is a, c, g, or t
  misc_feature (1003)..(1003): n is a, c, g, or t
  misc_feature (1009)..(1009): n is a, c, g, or t
  misc_feature (1011)..(1011): n is a, c, g, or t
  misc_feature (1032)..(1032): n is a, c, g, or t
  misc_feature (1038)..(1038): n is a, c, g, or t
  misc_feature (1043)..(1043): n is a, c, g, or t
  misc_feature (1046)..(1046): n is a, c, g, or t
  misc_feature (1055)..(1055): n is a, c, g, or t
  misc_feature (1082)..(1082): n is a, c, g, or t
  misc_feature (1090)..(1091): n is a, c, g, or t
  misc_feature (1098)..(1098): n is a, c, g, or t
  misc_feature (1101)..(1101): n is a, c, g, or t
  misc_feature (1104)..(1104): n is a, c, g, or t
  misc_feature (1107)..(1107): n is a, c, g, or t
  misc_feature (1110)..(1110): n is a, c, g, or t
  misc_feature (1122)..(1122): n is a, c, g, or t
  misc_feature (1126)..(1126): n is a, c, g, or t
  misc_feature (1157)..(1157): n is a, c, g, or t
  misc_feature (1165)..(1166): n is a, c, g, or t
  misc_feature (1173)..(1175): n is a, c, g, or t
  misc_feature (1188)..(1188): n is a, c, g, or t
  misc_feature (1190)..(1190): n is a, c, g, or t
  misc_feature (1192)..(1192): n is a, c, g, or t
  misc_feature (1194)..(1194): n is a, c, g, or t
  misc_feature (1197)..(1197): n is a, c, g, or t
  misc_feature (1203)..(1203): n is a, c, g, or t
  misc_feature (1207)..(1207): n is a, c, g, or t
  misc_feature (1213)..(1213): n is a, c, g, or t
  misc_feature (1216)..(1217): n is a, c, g, or t
  misc_feature (1219)..(1219): n is a, c, g, or t
  misc_feature (1221)..(1221): n is a, c, g, or t
  misc_feature (1229)..(1229): n is a, c, g, or t
  misc_feature (1233)..(1233): n is a, c, g, or t
  misc_feature (1235)..(1235): n is a, c, g, or t
  misc_feature (1238)..(1238): n is a, c, g, or t
  misc_feature (1249)..(1249): n is a, c, g, or t
  misc_feature (1252)..(1252): n is a, c, g, or t
  misc_feature (1260)..(1260): n is a, c, g, or t
  misc_feature (1265)..(1265): n is a, c, g, or t
  misc_feature (1276)..(1276): n is a, c, g, or t
  misc_feature (1281)..(1286): n is a, c, g, or t
  misc_feature (1289)..(1289): n is a, c, g, or t
  misc_feature (1292)..(1293): n is a, c, g, or t
  misc_feature (1303)..(1305): n is a, c, g, or t
  misc_feature (1308)..(1311): n is a, c, g, or t
  misc_feature (1313)..(1314): n is a, c, g, or t
  misc_feature (1322)..(1324): n is a, c, g, or t
  misc_feature (1327)..(1330): n is a, c, g, or t
  misc_feature (1335)..(1336): n is a, c, g, or t
  misc_feature (1338)..(1341): n is a, c, g, or t
  misc_feature (1344)..(1344): n is a, c, g, or t
  misc_feature (1347)..(1350): n is a, c, g, or t
  misc_feature (1355)..(1355): n is a, c, g, or t
  misc_feature (1358)..(1358): n is a, c, g, or t
  misc_feature (1361)..(1361): n is a, c, g, or t
  misc_feature (1365)..(1377): n is a, c, g, or t
  misc_feature (1382)..(1389): n is a, c, g, or t
  misc_feature (1391)..(1391): n is a, c, g, or t
  misc_feature (1393)..(1393): n is a, c, g, or t
  misc_feature (1400)..(1401): n is a, c, g, or t
  misc_feature (1411)..(1411): n is a, c, g, or t
  misc_feature (1416)..(1416): n is a, c, g, or t
  misc_feature (1426)..(1426): n is a, c, g, or t
tagagagattactatgagaggatcgcatcaccatcaccatcacggatcctatttaggtgacactatagaatcgtcgacccacgcgtccgccggaggagacacaggaagcactcgccgcagcacacgaccacgctgtcgctcagcacactggccacacccaagcgcagcggcaacaacaacggctcagagcccagtgacattatcatcccgctaaggactgcggacagcgtcttctgccctcactacgagaaggtcagcggggactacgggcacccggtgtacatcgtccaggagatgcccccgcagagcccggcgaacatttactacaaggtctgagagggaccctggtggtacctgtgctttcccagaggacacctaatgtcccgatgcctcccttgagggtttgagagcccgcgtgctggagaattgactgaagcacagcaccgggggagagggacactcctcctcggaagagcccgtcgcgctggacagcttacctagtcttgtagcattcggccttggtgaacacacacgctccctggaagctggaagactgtgcagaagacgcccattcggactgctgtgccgcgtcccacgtctcctcctcgaagccatgtgctgcggtcactcaggcctctgcagaagccaagggaagacagtggtttgtggacgagagggctgtgagcatcctggcaggtgccccaggatgccacgcctggaagggccggcttctgcctggggtgcatttcccccgcagtgcataccggacttgtcacacggacctcgggctagttaaggtgtgcaaagatctctagagtttagtccttactgtctcactcgttctgttacccagggctctgcagcacctcacctganacctccactccacatctgcatcactcatggaacactcatgtctggagcccctncctccagccgctggnaacaacagcttcagtcatgggtantccgttcataaaantngtgtttgctaacaaggtgncctttnanccaaatgctaggctgtctgcnaaaaangctanganttctaaaanggaatggggctggggaaaagggctggntgcaattnnaactcantgntgntgnctntgaaaaaaaaanttgnaaaaaaaaaaaaaaaaaaaaaaaaagggggncccccccnnaaggggnnnaataaactttatnantnanctnggaccngttnaaaaanccnnangnccccaaancccntnggnttttttaaaanccnggttcccnggggntttttttgggnaaacnnnnnnttnggnnatttttgggnnnggnnnnanngaaaaaannnggnnnnccccnntnnnnccnggnnnnaaaanttnggntttnnnnnnnnnnnnnaaaannnnnnnntntnttttttnnaaaaaaaaanttttntttttttttn

SEQ ID NO: 562 - DNA, 1199 bp, Homo Sapiens
  misc_feature (807)..(807): n is a, c, g, or t
  misc_feature (827)..(827): n is a, c, g, or t
  misc_feature (860)..(860): n is a, c, g, or t
  misc_feature (874)..(874): n is a, c, g, or t
  misc_feature (876)..(876): n is a, c, g, or t
  misc_feature (888)..(888): n is a, c, g, or t
  misc_feature (897)..(897): n is a, c, g, or t
  misc_feature (913)..(913): n is a, c, g, or t
  misc_feature (927)..(927): n is a, c, g, or t
  misc_feature (930)..(930): n is a, c, g, or t
  misc_feature (932)..(932): n is a, c, g, or t
  misc_feature (936)..(936): n is a, c, g, or t
  misc_feature (951)..(951): n is a, c, g, or t
  misc_feature (959)..(959): n is a, c, g, or t
  misc_feature (963)..(963): n is a, c, g, or t
  misc_feature (965)..(965): n is a, c, g, or t
  misc_feature (990)..(990): n is a, c, g, or t
  misc_feature (995)..(995): n is a, c, g, or t
  misc_feature (1002)..(1002): n is a, c, g, or t
  misc_feature (1006)..(1006): n is a, c, g, or t
  misc_feature (1010)..(1010): n is a, c, g, or t
  misc_feature (1017)..(1017): n is a, c, g, or t
  misc_feature (1020)..(1021): n is a, c, g, or t
  misc_feature (1026)..(1029): n is a, c, g, or t
  misc_feature (1035)..(1036): n is a, c, g, or t
  misc_feature (1042)..(1042): n is a, c, g, or t
  misc_feature (1053)..(1053): n is a, c, g, or t
  misc_feature (1055)..(1058): n is a, c, g, or t
  misc_feature (1061)..(1061): n is a, c, g, or t
  misc_feature (1063)..(1063): n is a, c, g, or t
  misc_feature (1070)..(1070): n is a, c, g, or t
  misc_feature (1075)..(1076): n is a, c, g, or t
  misc_feature (1079)..(1081): n is a, c, g, or t
  misc_feature (1083)..(1084): n is a, c, g, or t
  misc_feature (1086)..(1086): n is a, c, g, or t
  misc_feature (1089)..(1090): n is a, c, g, or t
  misc_feature (1093)..(1095): n is a, c, g, or t
  misc_feature (1098)..(1100): n is a, c, g, or t
  misc_feature (1102)..(1102): n is a, c, g, or t
  misc_feature (1106)..(1109): n is a, c, g, or t
  misc_feature (1114)..(1116): n is a, c, g, or t
  misc_feature (1121)..(1127): n is a, c, g, or t
  misc_feature (1131)..(1134): n is a, c, g, or t
  misc_feature (1137)..(1137): n is a, c, g, or t
  misc_feature (1139)..(1142): n is a, c, g, or t
  misc_feature (1145)..(1153): n is a, c, g, or t
  misc_feature (1155)..(1162): n is a, c, g, or t
  misc_feature (1164)..(1167): n is a, c, g, or t
  misc_feature (1171)..(1171): n is a, c, g, or t
  misc_feature (1173)..(1173): n is a, c, g, or t
  misc_feature (1175)..(1175): n is a, c, g, or t
  misc_feature (1177)..(1187): n is a, c, g, or t
  misc_feature (1189)..(1191): n is a, c, g, or t
  misc_feature (1193)..(1194): n is a, c, g, or t
  misc_feature (1196)..(1199): n is a, c, g, or t
tagagaaattactatgagaggatcgcatcaccatcaccatcacggatcctatttaggtgacactatagaatcgtcgacccacgcgtccgggtttttcggatcatgtctggtggctccgcggattataacagcagagaacatggcggcccagagggaatggaccccgatggtgtcatcgagagcaactggaatgagattgttgataactttgatgatatgaatttaaaggagtctctccttcgtggcatctatgcttacggttttgagaagccttccgctattcagcagagagctattattccctgtattaaagggtatgatgtgattgctcaagctcagtcaggtactggcaagacagccacatttgctatttccatcctgcaacagttggagattgagttcaaggagacccaagcactagtattggcccccaccagagaactggctcaacagatccaaaaggtaattctggcacttggagactatatgggagccacttgtcatgcctgcattggtggaacaaatgttcgaaatgaaatgcaaaaactgcaggctgaagcaccacatattgttgttggtacacccgggagagtgtttgatatgttaaacagaagatacctttctccaaaatggatcaaaatgtttgttttggatgaagcagatgaaatgttgagccgtggttttaaggatcaaatctatgagattttccaaaaactaaacacaagtattcaggttgtgttgctttctgccacaatgccaactgatgtgttggaagtgaccaaaaaaattcatgagagatccaattcnaattctggtgaaaaaggaanaattgacccttgaaggaaatcaaacagttttanattaatgttgaaananaggaatggaaanttggatacnctttgtgacttgtacnaaacactgaccatnacncnggcngttatttttctcaanacaaggcncaangnggactggctgactgaaaaaatgccngccanaaacttnccantttnctgcccngcnnggggnnnnggaccnnaagganaaaaaatttancnnnnggnanttccggncaggnncannncnngntcnnatnnnaannnanttgnnnnccccnnnaattnnnnnnnaaannnnttngnnnnaannnnnnnnncnnnnnnnncnnnnaacnantncnnnnnnnnnnngnnncnntnnnn

SEQ ID NO: 563 - DNA, 1323 bp, Homo Sapiens
  misc_feature (819)..(819): n is a, c, g, or t
  misc_feature (927)..(927): n is a, c, g, or t
  misc_feature (976)..(976): n is a, c, g, or t
  misc_feature (989)..(989): n is a, c, g, or t
  misc_feature (1011)..(1011): n is a, c, g, or t
  misc_feature (1021)..(1021): n is a, c, g, or t
  misc_feature (1036)..(1036): n is a, c, g, or t
  misc_feature (1048)..(1048): n is a, c, g, or t
  misc_feature (1069)..(1069): n is a, c, g, or t
  misc_feature (1085)..(1085): n is a, c, g, or t
  misc_feature (1096)..(1096): n is a, c, g, or t
  misc_feature (1107)..(1107): n is a, c, g, or t
  misc_feature (1111)..(1111): n is a, c, g, or t
  misc_feature (1133)..(1133): n is a, c, g, or t
  misc_feature (1153)..(1154): n is a, c, g, or t
  misc_feature (1167)..(1167): n is a, c, g, or t
  misc_feature (1175)..(1176): n is a, c, g, or t
  misc_feature (1179)..(1179): n is a, c, g, or t
  misc_feature (1191)..(1191): n is a, c, g, or t
  misc_feature (1194)..(1194): n is a, c, g, or t
  misc_feature (1196)..(1197): n is a, c, g, or t
  misc_feature (1199)..(1199): n is a, c, g, or t
  misc_feature (1204)..(1204): n is a, c, g, or t
  misc_feature (1213)..(1213): n is a, c, g, or t
  misc_feature (1217)..(1217): n is a, c, g, or t
  misc_feature (1223)..(1223): n is a, c, g, or t
  misc_feature (1230)..(1230): n is a, c, g, or t
  misc_feature (1232)..(1232): n is a, c, g, or t
  misc_feature (1235)..(1235): n is a, c, g, or t
  misc_feature (1237)..(1238): n is a, c, g, or t
  misc_feature (1241)..(1242): n is a, c, g, or t
  misc_feature (1246)..(1246): n is a, c, g, or t
  misc_feature (1251)..(1252): n is a, c, g, or t
  misc_feature (1255)..(1255): n is a, c, g, or t
  misc_feature (1257)..(1257): n is a, c, g, or t
  misc_feature (1261)..(1267): n is a, c, g, or t
  misc_feature (1283)..(1283): n is a, c, g, or t
  misc_feature (1287)..(1289): n is a, c, g, or t
  misc_feature (1291)..(1291): n is a, c, g, or t
  misc_feature (1294)..(1299): n is a, c, g, or t
  misc_feature (1302)..(1302): n is a, c, g, or t
  misc_feature (1304)..(1309): n is a, c, g, or t
  misc_feature (1312)..(1312): n is a, c, g, or t
  misc_feature (1315)..(1319): n is a, c, g, or t
  misc_feature (1321)..(1322): n is a, c, g, or t
tagagaaattactatgagaggatcgcatcaccatcaccatcacggatcctatttaggtgacactatagaatcgtcgacccacgcgtccggcctgtgctctgcttctcactgcctgtgtctcacgaccatgggtggaagcaaaacttgccttgcaagtgaagcttcgcttggccattctcgtttcttcccgctgtggtgcaccttcttgggctgtttctggatctgtctgcatgcacccacggccacccccatgctcgcctccacctcagagtaagtgttgtgttttgccacgtttcagactactccaaaggattcggcgggaagtatggggtgcagaaggatcggatggataagaatgcgtcaacctttgaggatgtcacccaggtgtcctctgcctaccagaagacagtacctgtcgaagctgtgaccagcaaaacaagtaacatcagagctaactttgaaaacctcgctaaggagaaagagcaggaggacaggcggaaggcggaggcggagagagcccagcggatggccaaggagcggcaggagcaggaagaggccaggaggaagctggaggagcaagccagagccaaaacgcaaacgccccctgtgtcgcccgcacctcagccaaccgaggagaggctgccctcgagccccgtctatgaggatgcggcttccttcaaggcagagctgagctacagaggccctgtgagtgggacggagccggagcccgtgtacagcatggaggccgctgactaccgagaggccagcagccagcagggcctggcctatgccacagaggctgtctatgaaagcgcagangccccgggccactatcccgcagaggacagcacctacgatgagtacgagaacgatctggggatcacagccgtcgccctgtacgactaccaggctgcgggcgatgatganatctcatttgaccctgatgacatcatcaccaacatccaaatgattgacnacggctggtggcncgggtgtgcaagggccggtacnggctcttccnaccaactatgtgganctgcggcagtanggccccagcccccccccgganctgcccctggatctcnactaaaaatangcctttttggntctnggggggtttggggtttttcggntttttttttttttttttttnnagggggggagggnaaaaaccnntgntttaattaaaanttngnnanctttnaaaagtttncccnaaattncaaaaantnaancnntcnnaaanaattnnaangntttnnnnnnngggttttttttttttnaaannngnccnnnnnnttngnnnnnnttnttnnnnntnnc

SEQ ID NO: 564 - DNA, 1290 bp, Homo Sapiens
  misc_feature (3)..(11): n is a, c, g, or t
  misc_feature (858)..(858): n is a, c, g, or t
  misc_feature (864)..(864): n is a, c, g, or t
  misc_feature (898)..(898): n is a, c, g, or t
  misc_feature (918)..(918): n is a, c, g, or t
  misc_feature (953)..(953): n is a, c, g, or t
  misc_feature (973)..(973): n is a, c, g, or t
  misc_feature (976)..(976): n is a, c, g, or t
  misc_feature (982)..(982): n is a, c, g, or t
  misc_feature (984)..(984): n is a, c, g, or t
  misc_feature (1041)..(1041): n is a, c, g, or t
  misc_feature (1046)..(1046): n is a, c, g, or t
  misc_feature (1054)..(1054): n is a, c, g, or t
  misc_feature (1070)..(1070): n is a, c, g, or t
  misc_feature (1076)..(1076): n is a, c, g, or t
  misc_feature (1084)..(1084): n is a, c, g, or t
  misc_feature (1087)..(1087): n is a, c, g, or t
  misc_feature (1094)..(1095): n is a, c, g, or t
  misc_feature (1101)..(1101): n is a, c, g, or t
  misc_feature (1106)..(1106): n is a, c, g, or t
  misc_feature (1117)..(1117): n is a, c, g, or t
  misc_feature (1123)..(1123): n is a, c, g, or t
  misc_feature (1125)..(1125): n is a, c, g, or t
  misc_feature (1141)..(1141): n is a, c, g, or t
  misc_feature (1146)..(1146): n is a, c, g, or t
  misc_feature (1156)..(1157): n is a, c, g, or t
  misc_feature (1160)..(1162): n is a, c, g, or t
  misc_feature (1171)..(1173): n is a, c, g, or t
  misc_feature (1184)..(1184): n is a, c, g, or t
  misc_feature (1188)..(1188): n is a, c, g, or t
  misc_feature (1206)..(1206): n is a, c, g, or t
  misc_feature (1220)..(1220): n is a, c, g, or t
  misc_feature (1239)..(1239): n is a, c, g, or t
  misc_feature (1249)..(1249): n is a, c, g, or t
  misc_feature (1266)..(1266): n is a, c, g, or t
  misc_feature (1268)..(1269): n is a, c, g, or t
  misc_feature (1272)..(1272): n is a, c, g, or t
  misc_feature (1277)..(1277): n is a, c, g, or t
  misc_feature (1281)..(1282): n is a, c, g, or t
  misc_feature (1285)..(1285): n is a, c, g, or t
ctnnnnnnnnngattagagaaattactatgagaggatcgcatcaccatcaccatcacggatcctatttaggtgacactatagaatcgtcgacccacgcgtccggggcggcgcggacagtatctgtgggtacccggagcacggagatctcgccggctttacgttcacctcggtgtctgcagcaccctccgcttcctctcctaggcgacgagacccagtggctagaagttcaccatgtctattctcaagatccatgccagggagatctttgactctcgcgggaatcccactgttgaggttgatctcttcacctcaaaaggtctcttcagagctgctgtgcccagtggtgcttcaactggtatctatgaggccctagagctccgggacaatgataagactcgctatatggggaagggtgtctcaaaggctgttgagcacatcaataaaactattgcgcctgccctggttagcaagaaactgaacgtcacagaacaagagaagattgacaaactgatgatcgagatggatggaacagaaaataaatctaagtttggtgcgaacgccattctgggggtgtcccttgccgtctgcaaagctggtgccgttgagaagggggtccccctgtaccgccacatcgctgacttggctggcaactctgaagtcatcctgccagtcccggcgttcaatgtcatcaatggcggttctcatgctggcaacaagctggccatgcaggagttcatgatcctcccagtcggtgcagcaaacttcagggaagccatgcgcattggagcagaggtttaccacaacctgaagaatgtcatcaaggagaaatatgggaaagatgccaccaatgtgggggnatgaanggcgggtttgctcccaacatcctggagaataaanaaggcctggagctgctgaanactgctattgggaaagctggctacactgataaggnggtcatcggcatggacgtancgncctccnanttcttcaggtctgggaatatgacctggacttcagtctcccgatgaccccacaggtantctcncctgacanctgggttgacctgtanaatccnttctcaangantacccannggggtntatcnaaaatcctttnaacaananaaatggggaacttggnaaaanttccaccccnngcnnnaacccggtnnnggggaaaattncccngggacccaccccaaaagnaatccccagggcgnaaaaaaaaaatcccgcaantccccctgtncaaaaaaaaaaaaattngnnccngaaanaatnnttnggggg

SEQ ID NO: 565 - DNA, 1200 bp, Homo Sapiens
  misc_feature (1)..(1): n is a, c, g, or t
  misc_feature (922)..(922): n is a, c, g, or t
  misc_feature (967)..(967): n is a, c, g, or t
  misc_feature (976)..(976): n is a, c, g, or t
  misc_feature (980)..(980): n is a, c, g, or t
  misc_feature (985)..(985): n is a, c, g, or t
  misc_feature (995)..(995): n is a, c, g, or t
  misc_feature (1007)..(1007): n is a, c, g, or t
  misc_feature (1022)..(1022): n is a, c, g, or t
  misc_feature (1048)..(1048): n is a, c, g, or t
  misc_feature (1057)..(1057): n is a, c, g, or t
  misc_feature (1060)..(1060): n is a, c, g, or t
  misc_feature (1063)..(1063): n is a, c, g, or t
  misc_feature (1068)..(1068): n is a, c, g, or t
  misc_feature (1071)..(1072): n is a, c, g, or t
  misc_feature (1104)..(1104): n is a, c, g, or t
  misc_feature (1106)..(1106): n is a, c, g, or t
  misc_feature (1111)..(1111): n is a, c, g, or t
  misc_feature (1115)..(1115): n is a, c, g, or t
  misc_feature (1124)..(1125): n is a, c, g, or t
  misc_feature (1127)..(1127): n is a, c, g, or t
  misc_feature (1131)..(1131): n is a, c, g, or t
  misc_feature (1144)..(1144): n is a, c, g, or t
  misc_feature (1150)..(1150): n is a, c, g, or t
  misc_feature (1155)..(1155): n is a, c, g, or t
  misc_feature (1158)..(1158): n is a, c, g, or t
  misc_feature (1175)..(1175): n is a, c, g, or t
  misc_feature (1185)..(1185): n is a, c, g, or t
  misc_feature (1190)..(1190): n is a, c, g, or t
naatagagaaattactatgagaggatcgcatcaccatcaccatcacggatcctatttaggtgacactatagaatcgtcgacccacgcgtccgggaaaagaatggcattgaagcagatttccagcaacaagtgctttgggggattgcagaaagtttttgaacatgacagtgttgaactaaactgcaaaatgaaatttgctgtctacttaccaccaaaggcagaaacaggaaagtgccctgcactgtattggctctcaggtttaacttgcacagagcaaaattttatatcaaaatctggttatcatcagtctgcttcagaacatggtcttgttgtcattgctccagataccagccctcgtggctgcaatattaaaggtgaagatgagagctgggactttggcactggtgctggattttatgttgatgccactgaagatccttggaaaaccaactacagaatgtactcttatgtcacagaggagcttccccaactcataaatgccaattttccagtggatccccaaaggatgtctatttttggccactccatgggaggtcatggagctctgatctgtgctttgaaaaatcctggaaaatacaaatctgtgtcagcatttgctccaatttgcaaccctgtactctgtccctggggcaaaaaagcctttagtggatatttgggaacagatcaaagtaaatggaaggcttatgatgctacccaccttgtgaaatcctatccaggatctcagctggacatactaattgatcaagggaaagatgaccagtttcttttagatggacagttactccctgataacttcatagctgcctgtacagaaaagaaaatccccgttgtttttcgattgcaagaggggttatgatcatagctactacttcattgcaacctttattactgaccacatcanacatcatgctaaatacctgaatgcatgaaaaaactcccaaataanaaaatcccntccngaatnataaaaagtngtaaaaatgcanctggtattgctgaancaaaaaaaaaaaaaaaaaggggcggnccccccccnaanaanggagnccnnattaagccttaaattaacctgaaccttgggancncccgnttgnaaaaatccnngnaaangacccccaaaacncccccnggganttngttccaaaaccccccgnttgccccccnggggntttttttttg

SEQ ID NO: 566 - DNA, 1363 bp, Homo Sapiens
  misc_feature (624)..(624): n is a, c, g, or t
  misc_feature (838)..(838): n is a, c, g, or t
  misc_feature (855)..(855): n is a, c, g, or t
  misc_feature (906)..(906): n is a, c, g, or t
  misc_feature (912)..(912): n is a, c, g, or t
  misc_feature (947)..(947): n is a, c, g, or t
  misc_feature (963)..(963): n is a, c, g, or t
  misc_feature (969)..(969): n is a, c, g, or t
  misc_feature (972)..(972): n is a, c, g, or t
  misc_feature (988)..(988): n is a, c, g, or t
  misc_feature (995)..(995): n is a, c, g, or t
  misc_feature (1037)..(1037): n is a, c, g, or t
  misc_feature (1040)..(1040): n is a, c, g, or t
  misc_feature (1042)..(1042): n is a, c, g, or t
  misc_feature (1047)..(1047): n is a, c, g, or t
  misc_feature (1049)..(1049): n is a, c, g, or t
  misc_feature (1053)..(1053): n is a, c, g, or t
  misc_feature (1056)..(1056): n is a, c, g, or t
  misc_feature (1058)..(1058): n is a, c, g, or t
  misc_feature (1073)..(1073): n is a, c, g, or t
  misc_feature (1078)..(1078): n is a, c, g, or t
  misc_feature (1082)..(1082): n is a, c, g, or t
  misc_feature (1084)..(1084): n is a, c, g, or t
  misc_feature (1091)..(1091): n is a, c, g, or t
  misc_feature (1101)..(1101): n is a, c, g, or t
  misc_feature (1105)..(1105): n is a, c, g, or t
  misc_feature (1108)..(1109): n is a, c, g, or t
  misc_feature (1114)..(1114): n is a, c, g, or t
  misc_feature (1116)..(1116): n is a, c, g, or t
  misc_feature (1121)..(1122): n is a, c, g, or t
  misc_feature (1126)..(1126): n is a, c, g, or t
  misc_feature (1136)..(1137): n is a, c, g, or t
  misc_feature (1145)..(1145): n is a, c, g, or t
  misc_feature (1147)..(1147): n is a, c, g, or t
  misc_feature (1154)..(1154): n is a, c, g, or t
  misc_feature (1159)..(1159): n is a, c, g, or t
  misc_feature (1163)..(1164): n is a, c, g, or t
  misc_feature (1173)..(1173): n is a, c, g, or t
  misc_feature (1175)..(1175): n is a, c, g, or t
  misc_feature (1179)..(1179): n is a, c, g, or t
  misc_feature (1188)..(1188): n is a, c, g, or t
  misc_feature (1199)..(1199): n is a, c, g, or t
  misc_feature (1208)..(1208): n is a, c, g, or t
  misc_feature (1211)..(1211): n is a, c, g, or t
  misc_feature (1215)..(1215): n is a, c, g, or t
  misc_feature (1223)..(1223): n is a, c, g, or t
  misc_feature (1229)..(1229): n is a, c, g, or t
  misc_feature (1234)..(1234): n is a, c, g, or t
  misc_feature (1240)..(1240): n is a, c, g, or t
  misc_feature (1267)..(1267): n is a, c, g, or t
  misc_feature (1271)..(1272): n is a, c, g, or t
  misc_feature (1275)..(1275): n is a, c, g, or t
  misc_feature (1277)..(1278): n is a, c, g, or t
  misc_feature (1283)..(1283): n is a, c, g, or t
  misc_feature (1289)..(1290): n is a, c, g, or t
  misc_feature (1301)..(1301): n is a, c, g, or t
  misc_feature (1303)..(1303): n is a, c, g, or t
  misc_feature (1316)..(1316): n is a, c, g, or t
  misc_feature (1326)..(1326): n is a, c, g, or t
  misc_feature (1330)..(1330): n is a, c, g, or t
  misc_feature (1337)..(1337): n is a, c, g, or t
  misc_feature (1341)..(1341): n is a, c, g, or t
  misc_feature (1353)..(1353): n is a, c, g, or t
  misc_feature (1360)..(1360): n is a, c, g, or t
aatagagagattactatgagaggatcgcatcaccatcaccatcacggatcctatttaggtgacactatagaatcgtcgacccacgcgtccggcgggaccgagcaggaatccgtatctgggaacagaatgaacggagaccagaattcagatgtttatgcccaagaaaagcaggatttcgttcagcacttctcccagatcgttagggtgctgactgaggatgagatggggcacccagagataggagatgctattgcccggctcaaggaggtcctggagtacaatgccattggaggcaagtataaccggggtttgacggtggtagtagcattccgggagctggtggagccaaggaaacaggatgctgatagtctccagcgggcctggactgtgggctggtgtgtggaactgctgcaagctttcttcctggtggcagatgacatcatggattcatcccttacccgccggggacagatctgctggtatcagaagccgggcgtgggtttggatgccatcaatgatgctaacctcctggaagcatgtatctaccgcctgctgaagctctattgccgggagcagccctattacctgaacctgatcgagctcttcctgcagagttcctatcanactgagattgggcagaccctggacctcctcacagccccccagggcaatgtggatcttgtcagattcactgaaaagaggtacaaatctattgtcaagtacaagacagctttctactccttctaccttcctatagctgcagccatgtacatggcaggaattgatggcgagaaggagcacgccaatgccaagaagatcctgctggagatgggggganttctttcagattcaggnatgattaccttgacctctttggggaccccagtgtgaccggcaaaattggcnctgacntccagaacaacaaatgcaactggctggggtttcantgtctgcaacggcccnctccanaanagtaccgatcctgaangaaaatnacgggcaaaaggaggctgaaaaaagtggcccgggtgaaggcnctntntaagnanctgnatntncccacaatgttcttngcaantgangnaaaacgnttccgccccntttntgnntcccntngaaanntagnaaaacccctnncccccaancnttttttntgggnttgnncccaaaatntnaagngggaaaatnacctaaaaatnccagggcgnggnaaanagcccccnaaaaanccggnaacctnaaaaaaaaaaaaaggggccccccccangggnnccnannacctnattacnnaactgggcccngnaaaaacccaaaancccaaacccnttgntttttcnaacncctttccccggnttttttntaa

SEQ ID NO: 567 - DNA, 1269 bp, Homo Sapiens
  misc_feature (18)..(18): n is a, c, g, or t
  misc_feature (605)..(605): n is a, c, g, or t
  misc_feature (657)..(657): n is a, c, g, or t
  misc_feature (659)..(659): n is a, c, g, or t
  misc_feature (724)..(724): n is a, c, g, or t
  misc_feature (746)..(746): n is a, c, g, or t
  misc_feature (750)..(750): n is a, c, g, or t
  misc_feature (755)..(756): n is a, c, g, or t
  misc_feature (772)..(772): n is a, c, g, or t
  misc_feature (780)..(780): n is a, c, g, or t
  misc_feature (796)..(796): n is a, c, g, or t
  misc_feature (801)..(801): n is a, c, g, or t
  misc_feature (808)..(808): n is a, c, g, or t
  misc_feature (810)..(810): n is a, c, g, or t
  misc_feature (812)..(812): n is a, c, g, or t
  misc_feature (815)..(815): n is a, c, g, or t
  misc_feature (826)..(826): n is a, c, g, or t
  misc_feature (828)..(828): n is a, c, g, or t
  misc_feature (830)..(831): n is a, c, g, or t
  misc_feature (835)..(835): n is a, c, g, or t
  misc_feature (842)..(842): n is a, c, g, or t
  misc_feature (845)..(845): n is a, c, g, or t
  misc_feature (849)..(849): n is a, c, g, or t
  misc_feature (854)..(854): n is a, c, g, or t
  misc_feature (859)..(860): n is a, c, g, or t
  misc_feature (862)..(862): n is a, c, g, or t
  misc_feature (872)..(872): n is a, c, g, or t
  misc_feature (875)..(875): n is a, c, g, or t
  misc_feature (877)..(877): n is a, c, g, or t
  misc_feature (888)..(889): n is a, c, g, or t
  misc_feature (892)..(893): n is a, c, g, or t
  misc_feature (901)..(901): n is a, c, g, or t
  misc_feature (906)..(906): n is a, c, g, or t
  misc_feature (908)..(908): n is a, c, g, or t
  misc_feature (911)..(911): n is a, c, g, or t
  misc_feature (913)..(913): n is a, c, g, or t
  misc_feature (915)..(915): n is a, c, g, or t
  misc_feature (919)..(919): n is a, c, g, or t
  misc_feature (935)..(936): n is a, c, g, or t
  misc_feature (938)..(938): n is a, c, g, or t
  misc_feature (941)..(941): n is a, c, g, or t
  misc_feature (948)..(949): n is a, c, g, or t
  misc_feature (959)..(959): n is a, c, g, or t
  misc_feature (961)..(963): n is a, c, g, or t
  misc_feature (969)..(969): n is a, c, g, or t
  misc_feature (974)..(974): n is a, c, g, or t
  misc_feature (978)..(978): n is a, c, g, or t
  misc_feature (981)..(981): n is a, c, g, or t
  misc_feature (994)..(995): n is a, c, g, or t
  misc_feature (998)..(999): n is a, c, g, or t
  misc_feature (1005)..(1005): n is a, c, g, or t
  misc_feature (1016)..(1016): n is a, c, g, or t
  misc_feature (1022)..(1023): n is a, c, g, or t
  misc_feature (1030)..(1033): n is a, c, g, or t
  misc_feature (1035)..(1035): n is a, c, g, or t
  misc_feature (1037)..(1038): n is a, c, g, or t
  misc_feature (1044)..(1045): n is a, c, g, or t
  misc_feature (1048)..(1048): n is a, c, g, or t
  misc_feature (1052)..(1052): n is a, c, g, or t
  misc_feature (1058)..(1058): n is a, c, g, or t
  misc_feature (1062)..(1062): n is a, c, g, or t
  misc_feature (1073)..(1073): n is a, c, g, or t
  misc_feature (1090)..(1090): n is a, c, g, or t
  misc_feature (1092)..(1092): n is a, c, g, or t
  misc_feature (1095)..(1097): n is a, c, g, or t
  misc_feature (1105)..(1105): n is a, c, g, or t
  misc_feature (1110)..(1112): n is a, c, g, or t
  misc_feature (1119)..(1119): n is a, c, g, or t
  misc_feature (1122)..(1122): n is a, c, g, or t
  misc_feature (1125)..(1126): n is a, c, g, or t
  misc_feature (1129)..(1129): n is a, c, g, or t
  misc_feature (1131)..(1131): n is a, c, g, or t
  misc_feature (1138)..(1138): n is a, c, g, or t
  misc_feature (1144)..(1144): n is a, c, g, or t
  misc_feature (1146)..(1146): n is a, c, g, or t
  misc_feature (1148)..(1148): n is a, c, g, or t
  misc_feature (1152)..(1152): n is a, c, g, or t
  misc_feature (1154)..(1154): n is a, c, g, or t
  misc_feature (1158)..(1162): n is a, c, g, or t
  misc_feature (1174)..(1174): n is a, c, g, or t
  misc_feature (1179)..(1180): n is a, c, g, or t
  misc_feature (1195)..(1195): n is a, c, g, or t
  misc_feature (1198)..(1198): n is a, c, g, or t
  misc_feature (1201)..(1201): n is a, c, g, or t
  misc_feature (1212)..(1213): n is a, c, g, or t
  misc_feature (1223)..(1223): n is a, c, g, or t
  misc_feature (1230)..(1230): n is a, c, g, or t
  misc_feature (1232)..(1232): n is a, c, g, or t
  misc_feature (1239)..(1239): n is a, c, g, or t
  misc_feature (1244)..(1245): n is a, c, g, or t
  misc_feature (1247)..(1247): n is a, c, g, or t
  misc_feature (1253)..(1254): n is a, c, g, or t
  misc_feature (1259)..(1260): n is a, c, g, or t
  misc_feature (1263)..(1263): n is a, c, g, or t
  misc_feature (1265)..(1265): n is a, c, g, or t
  misc_feature (1267)..(1267): n is a, c, g, or t
ttaaagaaaattactatnagaggatgcatcaccatcaccatcacggatcctatttaggtgacactatagaatcgtcgacccacgcgtccgcggcggcgtcgcgggcagctggcgccgcgcggtcctgctctgccggtcgcacggacgcaccggcgggccgccggccggagggacggggcgggagctgggcccgcggacagcgagccggagcgggagccgcgcgtagcgagccgggctccggcgctcgccagtctcccgagcggcgcccgcctcccgccggtgcccgcgccgggccgtggggggcagcatgcccgcgcgcgctgcctgaggacgccgcggcccccgcccccgccatgggcgcccctgcctgcgccctcgcgctctgcgtggccgtggccatcgtggccggcgcctcctcggagtccttggggacggagcagcgcgtcgtggggcgagcggcagaagtcccgggcccagagcccggccagcaggagcagttggtcttcggcagcggggatgctgtggagctgagctgtcccccgcccgggggtggtcccatggggcccactgtctgggtcaaggatggcacagggctggtgccctcngagcgtgtcctggtggggccccagcggctgcaggtgctgaatgcctcccacnangactccggggcctacagctgccggcagcggctcacgcaacgcgtactgtgccacttcagtgtgcnggtgacaaacgctccatcctcngganatgannaaaacggtgaaggacnaagctgangacacaggtgtggaanacaangggcccntnantgnaaaacggcccnancnngatnggaaaanaanctgntgggncgtgnntngccgacaaanaancnttccgcttccnnctnnccaaaccnatttngnaancncnaatnccttcaatttttttgnntnaanaaatggnnaggaaatttncnnngcaaancaccncaanttnaaaagaattaaannttnngaattnaaaatgtaacnttgttnntgaaaannnntntnncccttnnaancganaaaatnaaanttttttttttnaaaaaaaatttttgaancnttnnntaaaaaantaaannntttgaanttntannaantntttcctnaaaaantntntttntnaaannnnntttttgtaaaanaaaanntatttttttgataanaanttntaatttttttnnaagttataanaaacaanancccaatnaattnntnaaaaanntaaannaanananaa

SEQ ID NO: 568 - DNA, 1342 bp, Homo Sapiens
  misc_feature (948)..(948): n is a, c, g, or t
  misc_feature (1006)..(1006): n is a, c, g, or t
  misc_feature (1031)..(1032): n is a, c, g, or t
  misc_feature (1041)..(1041): n is a, c, g, or t
  misc_feature (1047)..(1047): n is a, c, g, or t
  misc_feature (1076)..(1076): n is a, c, g, or t
  misc_feature (1091)..(1091): n is a, c, g, or t
  misc_feature (1109)..(1109): n is a, c, g, or t
  misc_feature (1116)..(1116): n is a, c, g, or t
  misc_feature (1123)..(1123): n is a, c, g, or t
  misc_feature (1128)..(1128): n is a, c, g, or t
  misc_feature (1138)..(1138): n is a, c, g, or t
  misc_feature (1145)..(1145): n is a, c, g, or t
  misc_feature (1158)..(1158): n is a, c, g, or t
  misc_feature (1160)..(1160): n is a, c, g, or t
  misc_feature (1168)..(1168): n is a, c, g, or t
  misc_feature (1174)..(1176): n is a, c, g, or t
  misc_feature (1179)..(1180): n is a, c, g, or t
  misc_feature (1187)..(1187): n is a, c, g, or t
  misc_feature (1192)..(1192): n is a, c, g, or t
  misc_feature (1197)..(1199): n is a, c, g, or t
  misc_feature (1201)..(1201): n is a, c, g, or t
  misc_feature (1203)..(1203): n is a, c, g, or t
  misc_feature (1205)..(1206): n is a, c, g, or t
  misc_feature (1208)..(1208): n is a, c, g, or t
  misc_feature (1220)..(1220): n is a, c, g, or t
  misc_feature (1236)..(1236): n is a, c, g, or t
  misc_feature (1238)..(1238): n is a, c, g, or t
  misc_feature (1241)..(1241): n is a, c, g, or t
  misc_feature (1245)..(1245): n is a, c, g, or t
  misc_feature (1269)..(1269): n is a, c, g, or t
  misc_feature (1271)..(1271): n is a, c, g, or t
  misc_feature (1275)..(1275): n is a, c, g, or t
  misc_feature (1281)..(1281): n is a, c, g, or t
  misc_feature (1291)..(1292): n is a, c, g, or t
  misc_feature (1295)..(1295): n is a, c, g, or t
  misc_feature (1301)..(1301): n is a, c, g, or t
  misc_feature (1304)..(1304): n is a, c, g, or t
  misc_feature (1308)..(1308): n is a, c, g, or t
  misc_feature (1322)..(1322): n is a, c, g, or t
  misc_feature (1326)..(1326): n is a, c, g, or t
  misc_feature (1334)..(1334): n is a, c, g, or t
aatatagagaaattactatgagaggatcgcatcaccatcaccatcacggatcctatttaggtgacactatagaatcgtcgacccacgcgtccgcactacaaggctcggagctccgggcactcagacatcatgagttggtccttgcacccccggaatttaattctctacttctatgctcttttatttctctcttcaacatgtgtagcatatgttgctaccagagacaactgctgcatcttagatgaaagattcggtagttattgtccaactacctgtggcattgcagatttcctgtctacttatcaaaccaaagtagacaaggatctacagtctttggaagacatcttacatcaagttgaaaacaaaacatcagaagtcaaacagctgataaaagcaatccaactcacttataatcctgatgaatcatcaaaaccaaatatgatagacgctgctactttgaagtccaggaaaatgttagaagaaattatgaaatatgaagcatcgattttaacacatgactcaagtattcgatatttgcaggaaatatataattcaaataatcaaaagattgttaacctgaaagagaaggtagcccagcttgaagcacagtgccaggaaccttgcaaagacacggtgcaaatccatgatatcactgggaaagattgtcaagacattgccaataagggagctaaacagagcgggctttactttattaaacctctgaaagctaaccagcaattcttagtctactgtgaaatcgatgggtctggaaatggatggactgtgtttcagaagagacttgatggcagtgtagatttcaagaaaaactggattcaatataaagaaggatttggacatctgtctcctactgggcacaacagaattttggctgggaaatgaaaagattcatttgataagcccacagtctgccatcccatatgcattaanagtggaaactgggaaaactggaaatgggccaaacccagtactgccaaaacttaggccntggttcaagggggggaacctggaannctgaacaangtaccnccctaaaaatatgccctacctttcccctnggggggggaatgctngaaaaagcccctttgaanggctttngaatttnggccnaagaatcccnagggganaagttttttccantnccccaaanagggcnnngcnngttccanacccngggannnangncnnangaaaaaatttgnaaggccaccggggccnanaangganaggattctgggttgggggaaaaananaagngccccnccgggccccnnccngggaanttntttnccagggggggcccnttcnccaaaacncctccccc

SEQ ID NO: 569 - DNA, 1384 bp, Homo Sapiens
  misc_feature (901)..(901): n is a, c, g, or t
  misc_feature (923)..(923): n is a, c, g, or t
  misc_feature (928)..(928): n is a, c, g, or t
  misc_feature (959)..(959): n is a, c, g, or t
  misc_feature (970)..(970): n is a, c, g, or t
  misc_feature (972)..(972): n is a, c, g, or t
  misc_feature (999)..(999): n is a, c, g, or t
  misc_feature (1003)..(1003): n is a, c, g, or t
  misc_feature (1013)..(1014): n is a, c, g, or t
  misc_feature (1016)..(1016): n is a, c, g, or t
  misc_feature (1018)..(1018): n is a, c, g, or t
  misc_feature (1021)..(1021): n is a, c, g, or t
  misc_feature (1025)..(1025): n is a, c, g, or t
  misc_feature (1030)..(1071): n is a, c, g, or t
  misc_feature (1077)..(1077): n is a, c, g, or t
  misc_feature (1087)..(1087): n is a, c, g, or t
  misc_feature (1094)..(1095): n is a, c, g, or t
  misc_feature (1098)..(1098): n is a, c, g, or t
  misc_feature (1101)..(1101): n is a, c, g, or t
  misc_feature (1103)..(1103): n is a, c, g, or t
  misc_feature (1106)..(1106): n is a, c, g, or t
  misc_feature (1113)..(1113): n is a, c, g, or t
  misc_feature (1122)..(1123): n is a, c, g, or t
  misc_feature (1127)..(1127): n is a, c, g, or t
  misc_feature (1135)..(1135): n is a, c, g, or t
  misc_feature (1138)..(1138): n is a, c, g, or t
  misc_feature (1140)..(1140): n is a, c, g, or t
  misc_feature (1142)..(1142): n is a, c, g, or t
  misc_feature (1145)..(1145): n is a, c, g, or t
  misc_feature (1153)..(1154): n is a, c, g, or t
  misc_feature (1157)..(1157): n is a, c, g, or t
  misc_feature (1159)..(1159): n is a, c, g, or t
  misc_feature (1162)..(1162): n is a, c, g, or t
  misc_feature (1168)..(1168): n is a, c, g, or t
  misc_feature (1175)..(1175): n is a, c, g, or t
  misc_feature (1182)..(1182): n is a, c, g, or t
  misc_feature (1196)..(1197): n is a, c, g, or t
  misc_feature (1205)..(1205): n is a, c, g, or t
  misc_feature (1209)..(1209): n is a, c, g, or t
  misc_feature (1233)..(1234): n is a, c, g, or t
  misc_feature (1247)..(1248): n is a, c, g, or t
  misc_feature (1251)..(1252): n is a, c, g, or t
  misc_feature (1254)..(1255): n is a, c, g, or t
  misc_feature (1259)..(1259): n is a, c, g, or t
  misc_feature (1262)..(1263): n is a, c, g, or t
  misc_feature (1265)..(1266): n is a, c, g, or t
  misc_feature (1269)..(1269): n is a, c, g, or t
  misc_feature (1284)..(1286): n is a, c, g, or t
  misc_feature (1292)..(1292): n is a, c, g, or t
  misc_feature (1297)..(1297): n is a, c, g, or t
  misc_feature (1303)..(1303): n is a, c, g, or t
  misc_feature (1307)..(1307): n is a, c, g, or t
  misc_feature (1310)..(1310): n is a, c, g, or t
  misc_feature (1328)..(1334): n is a, c, g, or t
  misc_feature (1336)..(1336): n is a, c, g, or t
  misc_feature (1339)..(1339): n is a, c, g, or t
  misc_feature (1343)..(1343): n is a, c, g, or t
  misc_feature (1345)..(1345): n is a, c, g, or t
  misc_feature (1350)..(1350): n is a, c, g, or t
  misc_feature (1353)..(1358): n is a, c, g, or t
  misc_feature (1365)..(1366): n is a, c, g, or t
  misc_feature (1368)..(1368): n is a, c, g, or t
  misc_feature (1378)..(1379): n is a, c, g, or t
attagagaaattactatgagaggatcgcatcaccatcaccatcacggatcctatttaggtgacactatagaatcgtcgacccacgcgtccggtttctccgcgcccctgtgctgccccgactcacatactcgtccagaaccggcctcagcctctccgcgcagaagtttcccggagccatggccgagtactcctacgtgaagtctaccaagctcgtgctcaagggaaccaagacgaagagtaagaagaaaaagagcaaagataagaaaagaaaaagagaagaagatgaagaaacccagcttgatattgttggaatctggtggacagtaacaaactttggtgaaatttcaggaaccatagccattgaaatggataagggaacctatatacatgcactcgacaatggtctttttaccctgggagctccacacaaagaagttgatgagggccctagtcctccagagcagtttacggctgtcaaattatctgattccagaatcgccctgaagtctggctatggaaaatatcttggtataaattcagatggacttgttgttgggcgttcagatgcaattggaccaagagaacaatgggaaccagtctttcaaaatgggaaaatggctttgttggcctcaaatagctgctttattagatgcaatgaagcaggggacatagaagcaaaaagtaaaacagcaggagaagaagaaatgatcaagattagatcctgtgctgaaagagaaaccaagaaaaaagatgacattccagaagaagacaaaggaaatgtaaaacaatgtgaaatcaattatgtaaagaaatttcagagcttccaagaccacaaacttaaaataagtaaagaagacagtaaaattcttaaaaaggctcggaaagatggattttgcatganacgcttctggacaggagagccnaaatngaaagccgacagatactgcaagtgactgggnatttttggttncngcccttaaccttccggggtttttttcngaanaaaaaattcnnangnaantgcnttttnnnnnnnnnnnnnnnnnnnnnnnnnnnnnnnnnnnnnnnnnnaaaaangggggggccnccccccnnaanggngnccnaattaancttaattanngaancttggacnccngntnganaaatcccnnaangnccnccaaanccccctngggattntttcaaaaccctgnnttcccccngggnttttttttgggggaaacccacctnntttgggaaatttnnggnncnngggnccnnannggnaaaaaatcccggggnnnccccgntgaanttcccngggnccnaaaaaattttggggtttnnnnnnngnccngggncnaaaanaannnnnngggaatnngncttttaaacnnaaaaa

SEQ ID NO: 570 - DNA, 1734 bp, Homo Sapiens
  misc_feature (1)..(1): n is a, c, g, or t
  misc_feature (4)..(4): n is a, c, g, or t
  misc_feature (6)..(8): n is a, c, g, or t
  misc_feature (11)..(12): n is a, c, g, or t
  misc_feature (15)..(15): n is a, c, g, or t
  misc_feature (17)..(17): n is a, c, g, or t
  misc_feature (19)..(19): n is a, c, g, or t
  misc_feature (21)..(21): n is a, c, g, or t
  misc_feature (24)..(24): n is a, c, g, or t
  misc_feature (32)..(32): n is a, c, g, or t
  misc_feature (48)..(48): n is a, c, g, or t
  misc_feature (55)..(55): n is a, c, g, or t
  misc_feature (58)..(58): n is a, c, g, or t
  misc_feature (63)..(63): n is a, c, g, or t
  misc_feature (70)..(70): n is a, c, g, or t
  misc_feature (72)..(72): n is a, c, g, or t
  misc_feature (79)..(79): n is a, c, g, or t
  misc_feature (83)..(83): n is a, c, g, or t
  misc_feature (85)..(85): n is a, c, g, or t
  misc_feature (93)..(93): n is a, c, g, or t
  misc_feature (138)..(138): n is a, c, g, or t
  misc_feature (148)..(148): n is a, c, g, or t
  misc_feature (158)..(159): n is a, c, g, or t
  misc_feature (167)..(167): n is a, c, g, or t
  misc_feature (183)..(183): n is a, c, g, or t
  misc_feature (190)..(190): n is a, c, g, or t
  misc_feature (202)..(202): n is a, c, g, or t
  misc_feature (215)..(215): n is a, c, g, or t
  misc_feature (218)..(218): n is a, c, g, or t
  misc_feature (221)..(222): n is a, c, g, or t
  misc_feature (227)..(227): n is a, c, g, or t
  misc_feature (231)..(231): n is a, c, g, or t
  misc_feature (236)..(236): n is a, c, g, or t
  misc_feature (239)..(239): n is a, c, g, or t
  misc_feature (242)..(242): n is a, c, g, or t
  misc_feature (250)..(250): n is a, c, g, or t
  misc_feature (253)..(253): n is a, c, g, or t
  misc_feature (260)..(261): n is a, c, g, or t
  misc_feature (264)..(267): n is a, c, g, or t
  misc_feature (272)..(273): n is a, c, g, or t
  misc_feature (277)..(277): n is a, c, g, or t
  misc_feature (283)..(284): n is a, c, g, or t
  misc_feature (291)..(295): n is a, c, g, or t
  misc_feature (303)..(303): n is a, c, g, or t
  misc_feature (305)..(305): n is a, c, g, or t
  misc_feature (310)..(311): n is a, c, g, or t
  misc_feature (313)..(313): n is a, c, g, or t
  misc_feature (319)..(319): n is a, c, g, or t
  misc_feature (324)..(324): n is a, c, g, or t
  misc_feature (339)..(339): n is a, c, g, or t
  misc_feature (345)..(345): n is a, c, g, or t
  misc_feature (348)..(348): n is a, c, g, or t
  misc_feature (362)..(363): n is a, c, g, or t
  misc_feature (365)..(365): n is a, c, g, or t
  misc_feature (374)..(374): n is a, c, g, or t
  misc_feature (377)..(377): n is a, c, g, or t
  misc_feature (380)..(380): n is a, c, g, or t
  misc_feature (392)..(393): n is a, c, g, or t
  misc_feature (404)..(405): n is a, c, g, or t
  misc_feature (407)..(408): n is a, c, g, or t
  misc_feature (420)..(420): n is a, c, g, or t
  misc_feature (424)..(424): n is a, c, g, or t
  misc_feature (427)..(429): n is a, c, g, or t
  misc_feature (431)..(431): n is a, c, g, or t
  misc_feature (433)..(433): n is a, c, g, or t
  misc_feature (441)..(442): n is a, c, g, or t
  misc_feature (445)..(446): n is a, c, g, or t
  misc_feature (457)..(457): n is a, c, g, or t
  misc_feature (460)..(460): n is a, c, g, or t
  misc_feature (471)..(471): n is a, c, g, or t
  misc_feature (474)..(474): n is a, c, g, or t
  misc_feature (478)..(478): n is a, c, g, or t
  misc_feature (483)..(483): n is a, c, g, or t
  misc_feature (485)..(485): n is a, c, g, or t
  misc_feature (487)..(487): n is a, c, g, or t
  misc_feature (494)..(496): n is a, c, g, or t
  misc_feature (499)..(500): n is a, c, g, or t
  misc_feature (505)..(506): n is a, c, g, or t
  misc_feature (511)..(511): n is a, c, g, or t
  misc_feature (514)..(514): n is a, c, g, or t
  misc_feature (520)..(520): n is a, c, g, or t
  misc_feature (525)..(527): n is a, c, g, or t
  misc_feature (529)..(530): n is a, c, g, or t
  misc_feature (533)..(534): n is a, c, g, or t
  misc_feature (539)..(539): n is a, c, g, or t
  misc_feature (545)..(546): n is a, c, g, or t
  misc_feature (550)..(550): n is a, c, g, or t
  misc_feature (555)..(556): n is a, c, g, or t
  misc_feature (568)..(568): n is a, c, g, or t
  misc_feature (576)..(577): n is a, c, g, or t
  misc_feature (584)..(584): n is a, c, g, or t
  misc_feature (586)..(586): n is a, c, g, or t
  misc_feature (590)..(590): n is a, c, g, or t
  misc_feature (592)..(594): n is a, c, g, or t
  misc_feature (596)..(596): n is a, c, g, or t
  misc_feature (601)..(601): n is a, c, g, or t
  misc_feature (603)..(603): n is a, c, g, or t
  misc_feature (623)..(627): n is a, c, g, or t
  misc_feature (630)..(630): n is a, c, g, or t
  misc_feature (633)..(633): n is a, c, g, or t
  misc_feature (635)..(635): n is a, c, g, or t
  misc_feature (639)..(642): n is a, c, g, or t
  misc_feature (648)..(649): n is a, c, g, or t
  misc_feature (651)..(651): n is a, c, g, or t
  misc_feature (655)..(655): n is a, c, g, or t
  misc_feature (660)..(660): n is a, c, g, or t
  misc_feature (666)..(666): n is a, c, g, or t
  misc_feature (673)..(673): n is a, c, g, or t
  misc_feature (675)..(675): n is a, c, g, or t
  misc_feature (688)..(688): n is a, c, g, or t
  misc_feature (693)..(693): n is a, c, g, or t
  misc_feature (699)..(700): n is a, c, g, or t
  misc_feature (711)..(713): n is a, c, g, or t
  misc_feature (715)..(715): n is a, c, g, or t
  misc_feature (717)..(717): n is a, c, g, or t
  misc_feature (720)..(720): n is a, c, g, or t
  misc_feature (726)..(727): n is a, c, g, or t
  misc_feature (733)..(734): n is a, c, g, or t
  misc_feature (741)..(743): n is a, c, g, or t
  misc_feature (746)..(746): n is a, c, g, or t
  misc_feature (749)..(749): n is a, c, g, or t
  misc_feature (751)..(751): n is a, c, g, or t
  misc_feature (757)..(758): n is a, c, g, or t
  misc_feature (763)..(763): n is a, c, g, or t
  misc_feature (765)..(766): n is a, c, g, or t
  misc_feature (772)..(772): n is a, c, g, or t
  misc_feature (775)..(776): n is a, c, g, or t
  misc_feature (780)..(780): n is a, c, g, or t
  misc_feature (784)..(784): n is a, c, g, or t
  misc_feature (786)..(786): n is a, c, g, or t
  misc_feature (792)..(792): n is a, c, g, or t
  misc_feature (795)..(797): n is a, c, g, or t
  misc_feature (803)..(805): n is a, c, g, or t
  misc_feature (812)..(813): n is a, c, g, or t
  misc_feature (817)..(817): n is a, c, g, or t
  misc_feature (822)..(822): n is a, c, g, or t
  misc_feature (824)..(824): n is a, c, g, or t
  misc_feature (826)..(827): n is a, c, g, or t
  misc_feature (842)..(843): n is a, c, g, or t
  misc_feature (847)..(847): n is a, c, g, or t
  misc_feature (854)..(856): n is a, c, g, or t
  misc_feature (858)..(858): n is a, c, g, or t
  misc_feature (865)..(865): n is a, c, g, or t
  misc_feature (870)..(870): n is a, c, g, or t
  misc_feature (876)..(876): n is a, c, g, or t
  misc_feature (879)..(879): n is a, c, g, or t
  misc_feature (881)..(881): n is a, c, g, or t
  misc_feature (883)..(883): n is a, c, g, or t
  misc_feature (886)..(887): n is a, c, g, or t
  misc_feature (890)..(890): n is a, c, g, or t
  misc_feature (893)..(894): n is a, c, g, or t
  misc_feature (899)..(899): n is a, c, g, or t
  misc_feature (906)..(910): n is a, c, g, or t
  misc_feature (912)..(912): n is a, c, g, or t
  misc_feature (914)..(914): n is a, c, g, or t
  misc_feature (916)..(918): n is a, c, g, or t
  misc_feature (921)..(922): n is a, c, g, or t
  misc_feature (925)..(925): n is a, c, g, or t
  misc_feature (929)..(934): n is a, c, g, or t
  misc_feature (941)..(941): n is a, c, g, or t
  misc_feature (948)..(948): n is a, c, g, or t
  misc_feature (952)..(952): n is a, c, g, or t
  misc_feature (955)..(955): n is a, c, g, or t
  misc_feature (958)..(959): n is a, c, g, or t
  misc_feature (965)..(966): n is a, c, g, or t
  misc_feature (968)..(968): n is a, c, g, or t
  misc_feature (971)..(971): n is a, c, g, or t
  misc_feature (985)..(986): n is a, c, g, or t
  misc_feature (988)..(988): n is a, c, g, or t
  misc_feature (990)..(991): n is a, c, g, or t
  misc_feature (997)..(997): n is a, c, g, or t
  misc_feature (1003)..(1005): n is a, c, g, or t
  misc_feature (1008)..(1008): n is a, c, g, or t
  misc_feature (1013)..(1013): n is a, c, g, or t
  misc_feature (1018)..(1018): n is a, c, g, or t
  misc_feature (1022)..(1024): n is a, c, g, or t
  misc_feature (1026)..(1026): n is a, c, g, or t
  misc_feature (1029)..(1029): n is a, c, g, or t
  misc_feature (1034)..(1034): n is a, c, g, or t
  misc_feature (1038)..(1038): n is a, c, g, or t
  misc_feature (1040)..(1040): n is a, c, g, or t
  misc_feature (1048)..(1049): n is a, c, g, or t
  misc_feature (1052)..(1054): n is a, c, g, or t
  misc_feature (1057)..(1057): n is a, c, g, or t
  misc_feature (1059)..(1059): n is a, c, g, or t
  misc_feature (1063)..(1063): n is a, c, g, or t
  misc_feature (1065)..(1067): n is a, c, g, or t
  misc_feature (1069)..(1069): n is a, c, g, or t
  misc_feature (1071)..(1071): n is a, c, g, or t
  misc_feature (1074)..(1074): n is a, c, g, or t
  misc_feature (1076)..(1077): n is a, c, g, or t
  misc_feature (1082)..(1082): n is a, c, g, or t
  misc_feature (1084)..(1084): n is a, c, g, or t
  misc_feature (1088)..(1090): n is a, c, g, or t
  misc_feature (1092)..(1096): n is a, c, g, or t
  misc_feature (1099)..(1099): n is a, c, g, or t
  misc_feature (1104)..(1106): n is a, c, g, or t
  misc_feature (1108)..(1108): n is a, c, g, or t
  misc_feature (1115)..(1115): n is a, c, g, or t
  misc_feature (1121)..(1125): n is a, c, g, or t
  misc_feature (1132)..(1132): n is a, c, g, or t
  misc_feature (1137)..(1137): n is a, c, g, or t
  misc_feature (1139)..(1139): n is a, c, g, or t
  misc_feature (1141)..(1141): n is a, c, g, or t
  misc_feature (1146)..(1146): n is a, c, g, or t
  misc_feature (1149)..(1150): n is a, c, g, or t
  misc_feature (1154)..(1154): n is a, c, g, or t
  misc_feature (1156)..(1156): n is a, c, g, or t
  misc_feature (1159)..(1159): n is a, c, g, or t
  misc_feature (1164)..(1164): n is a, c, g, or t
  misc_feature (1170)..(1172): n is a, c, g, or t
  misc_feature (1178)..(1181): n is a, c, g, or t
  misc_feature (1183)..(1183): n is a, c, g, or t
  misc_feature (1185)..(1191): n is a, c, g, or t
  misc_feature (1194)..(1194): n is a, c, g, or t
  misc_feature (1196)..(1197): n is a, c, g, or t
  misc_feature (1199)..(1199): n is a, c, g, or t
  misc_feature (1205)..(1207): n is a, c, g, or t
  misc_feature (1213)..(1215): n is a, c, g, or t
  misc_feature (1217)..(1217): n is a, c, g, or t
  misc_feature (1222)..(1222): n is a, c, g, or t
  misc_feature (1232)..(1232): n is a, c, g, or t
  misc_feature (1234)..(1238): n is a, c, g, or t
  misc_feature (1240)..(1240): n is a, c, g, or t
  misc_feature (1244)..(1246): n is a, c, g, or t
  misc_feature (1250)..(1252): n is a, c, g, or t
  misc_feature (1255)..(1255): n is a, c, g, or t
  misc_feature (1257)..(1257): n is a, c, g, or t
  misc_feature (1259)..(1260): n is a, c, g, or t
  misc_feature (1264)..(1265): n is a, c, g, or t
  misc_feature (1267)..(1267): n is a, c, g, or t
  misc_feature (1272)..(1272): n is a, c, g, or t
  misc_feature (1275)..(1275): n is a, c, g, or t
  misc_feature (1277)..(1277): n is a, c, g, or t
  misc_feature (1283)..(1283): n is a, c, g, or t
  misc_feature (1286)..(1287): n is a, c, g, or t
  misc_feature (1289)..(1289): n is a, c, g, or t
  misc_feature (1292)..(1295): n is a, c, g, or t
  misc_feature (1299)..(1300): n is a, c, g, or t
  misc_feature (1305)..(1305): n is a, c, g, or t
  misc_feature (1307)..(1307): n is a, c, g, or t
  misc_feature (1310)..(1310): n is a, c, g, or t
  misc_feature (1315)..(1317): n is a, c, g, or t
  misc_feature (1320)..(1320): n is a, c, g, or t
  misc_feature (1324)..(1324): n is a, c, g, or t
  misc_feature (1330)..(1330): n is a, c, g, or t
  misc_feature (1338)..(1340): n is a, c, g, or t
  misc_feature (1343)..(1344): n is a, c, g, or t
  misc_feature (1346)..(1346): n is a, c, g, or t
  misc_feature (1348)..(1348): n is a, c, g, or t
  misc_feature (1352)..(1352): n is a, c, g, or t
  misc_feature (1357)..(1358): n is a, c, g, or t
  misc_feature (1360)..(1360): n is a, c, g, or t
  misc_feature (1368)..(1368): n is a, c, g, or t
  misc_feature (1370)..(1374): n is a, c, g, or t
  misc_feature (1377)..(1378): n is a, c, g, or t
  misc_feature (1387)..(1387): n is a, c, g, or t
  misc_feature (1389)..(1389): n is a, c, g, or t
  misc_feature (1391)..(1391): n is a, c, g, or t
  misc_feature (1394)..(1395): n is a, c, g, or t
  misc_feature (1398)..(1398): n is a, c, g, or t
  misc_feature (1403)..(1403): n is a, c, g, or t
  misc_feature (1405)..(1405): n is a, c, g, or t
  misc_feature (1408)..(1409): n is a, c, g, or t
  misc_feature (1414)..(1418): n is a, c, g, or t
  misc_feature (1425)..(1425): n is a, c, g, or t
  misc_feature (1429)..(1429): n is a, c, g, or t
  misc_feature (1436)..(1436): n is a, c, g, or t
  misc_feature (1439)..(1440): n is a, c, g, or t
  misc_feature (1443)..(1443): n is a, c, g, or t
  misc_feature (1447)..(1447): n is a, c, g, or t
  misc_feature (1449)..(1449): n is a, c, g, or t
  misc_feature (1455)..(1455): n is a, c, g, or t
  misc_feature (1458)..(1458): n is a, c, g, or t
  misc_feature (1461)..(1461): n is a, c, g, or t
  misc_feature (1463)..(1463): n is a, c, g, or t
  misc_feature (1470)..(1470): n is a, c, g, or t
  misc_feature (1473)..(1473): n is a, c, g, or t
  misc_feature (1477)..(1477): n is a, c, g, or t
  misc_feature (1480)..(1480): n is a, c, g, or t
  misc_feature (1484)..(1484): n is a, c, g, or t
  misc_feature (1493)..(1493): n is a, c, g, or t
  misc_feature (1497)..(1497): n is a, c, g, or t
  misc_feature (1499)..(1499): n is a, c, g, or t
  misc_feature (1501)..(1501): n is a, c, g, or t
  misc_feature (1505)..(1505): n is a, c, g, or t
  misc_feature (1507)..(1507): n is a, c, g, or t
  misc_feature (1509)..(1509): n is a, c, g, or t
  misc_feature (1514)..(1515): n is a, c, g, or t
  misc_feature (1518)..(1519): n is a, c, g, or t
  misc_feature (1523)..(1524): n is a, c, g, or t
  misc_feature (1529)..(1531): n is a, c, g, or t
  misc_feature (1535)..(1535): n is a, c, g, or t
  misc_feature (1537)..(1537): n is a, c, g, or t
  misc_feature (1542)..(1542): n is a, c, g, or t
  misc_feature (1546)..(1546): n is a, c, g, or t
  misc_feature (1554)..(1554): n is a, c, g, or t
  misc_feature (1558)..(1558): n is a, c, g, or t
  misc_feature (1568)..(1568): n is a, c, g, or t
  misc_feature (1570)..(1570): n is a, c, g, or t
  misc_feature (1575)..(1575): n is a, c, g, or t
  misc_feature (1577)..(1579): n is a, c, g, or t
  misc_feature (1583)..(1583): n is a, c, g, or t
  misc_feature (1587)..(1588): n is a, c, g, or t
  misc_feature (1592)..(1592): n is a, c, g, or t
  misc_feature (1595)..(1595): n is a, c, g, or t
  misc_feature (1597)..(1600): n is a, c, g, or t
  misc_feature (1602)..(1602): n is a, c, g, or t
  misc_feature (1609)..(1613): n is a, c, g, or t
  misc_feature (1616)..(1616): n is a, c, g, or t
  misc_feature (1622)..(1624): n is a, c, g, or t
  misc_feature (1628)..(1628): n is a, c, g, or t
  misc_feature (1630)..(1631): n is a, c, g, or t
  misc_feature (1634)..(1635): n is a, c, g, or t
  misc_feature (1639)..(1639): n is a, c, g, or t
  misc_feature (1642)..(1642): n is a, c, g, or t
  misc_feature (1647)..(1648): n is a, c, g, or t
  misc_feature (1652)..(1652): n is a, c, g, or t
  misc_feature (1654)..(1654): n is a, c, g, or t
  misc_feature (1660)..(1660): n is a, c, g, or t
  misc_feature (1662)..(1662): n is a, c, g, or t
  misc_feature (1669)..(1672): n is a, c, g, or t
  misc_feature (1674)..(1674): n is a, c, g, or t
  misc_feature (1677)..(1678): n is a, c, g, or t
  misc_feature (1681)..(1681): n is a, c, g, or t
  misc_feature (1685)..(1686): n is a, c, g, or t
  misc_feature (1688)..(1689): n is a, c, g, or t
  misc_feature (1692)..(1692): n is a, c, g, or t
  misc_feature (1696)..(1696): n is a, c, g, or t
  misc_feature (1707)..(1707): n is a, c, g, or t
  misc_feature (1709)..(1711): n is a, c, g, or t
  misc_feature (1714)..(1715): n is a, c, g, or t
  misc_feature (1718)..(1720): n is a, c, g, or t
  misc_feature (1723)..(1723): n is a, c, g, or t
  misc_feature (1733)..(1733): n is a, c, g, or t
nccnannnacnnaangnangnaanaaaattanttagggagggggggangggctcnccnctccncactcancncgtggantgtntnttgttatngttgggctgaatatataatatcgatcgcatcccaccgccgcgtcngtccacgaangcagatcgcnncatagaantggtcgcagtagggtnaccatgngaaaccggcacnccggggatgtggncgnggnncatcnaccnacaancgnggncgtgcacnaangtgacgnnaannnngcgcnngtanagcgannatacggnnnnnatagaaangngcatnnangatccntgtcnctggagtcacaatgnctgtcnatncctggctgtggtgnnanaggccttgntantgntgtatacatganntgacatcatcnngnnaagctatgtgangcgntcnnncnangatggaanntgnntggtctggggngcnccgtatactgntgnccgngcaantncncccctcnnnaannctccnnattcngtngctgtntctgnnntnnacnnaacanctggannaaangactnngccatgattganaacatccnnaaatttntnattnannntngtgcnanaggtggagtaacatcctctnnnnncanagngnaatnnnnagaacnntntagngctangatatnctgccgnantttgcctatgaangcccntgcacnnatttttatcannnancngancaaccnngcccannatatctnnntanctncncctacnnttaantnnataaantcnnatantganantagcanttnnnggactnnnggccccnntaantactnanannataaaactaaacctnncaantctaatnnntnataaatntgccnacatcnaanantnatnnatnaanncaccnaattatnnnnntnangnnnacnnacncatnnnnnnaattttngtaaaanaaanacnaanntgcaanntntcntaacgatacactanncncnnttatangtgtcnnnccnaaatnccaangccnnntnaantcaancccnantatttttnnccnnntcncncctngnnntnantcngnnactcncnatannnannnnnatnccctnnnanagtatancctctnnnnnatcaagntaatntncnctagntcnnttgntnctnaaatnaatcgnnncttctnnnngntnnnnnnnacnannanatgttnnnacaatnnncnactcntattttcccnannnnncncccnnncaannnatnantnncccnncnctttnctntnacattntcnntnaannnnaaannttgangnccnaaagnnnatngcanccgccnctaatttnnntcnntntncatntatanncntttatatnannnnnttnntcctaaaantntngtnnaanaaatntnacnngaagnnnnnctcttcntacnatattanaannttntttncncatctnatnaancnctttttntcnaatnacntatntctttcctntatncnantttntntnaagtnntanntcanntcatnnnctcncnctatnttcnaatccctnaatncactaattcncnctgtngnnnacantctnnaaanctncnnnnanttttacnnnnnagntccaannnaacnanntannattnctntctanncatntnagcgtncnatacatnnnntnaanncanaacnnannggntacnacagtagcacntnnntcnncannnccnattgcatgana

SEQ ID NO: 571 - DNA, 1454 bp, Homo Sapiens
  misc_feature (1)..(1): n is a, c, g, or t
  misc_feature (6)..(6): n is a, c, g, or t
  misc_feature (8)..(9): n is a, c, g, or t
  misc_feature (14)..(15): n is a, c, g, or t
  misc_feature (18)..(18): n is a, c, g, or t
  misc_feature (23)..(24): n is a, c, g, or t
  misc_feature (27)..(27): n is a, c, g, or t
  misc_feature (39)..(39): n is a, c, g, or t
  misc_feature (44)..(44): n is a, c, g, or t
  misc_feature (55)..(55): n is a, c, g, or t
  misc_feature (60)..(61): n is a, c, g, or t
  misc_feature (68)..(68): n is a, c, g, or t
  misc_feature (71)..(71): n is a, c, g, or t
  misc_feature (75)..(75): n is a, c, g, or t
  misc_feature (85)..(85): n is a, c, g, or t
  misc_feature (89)..(90): n is a, c, g, or t
  misc_feature (93)..(93): n is a, c, g, or t
  misc_feature (104)..(106): n is a, c, g, or t
  misc_feature (113)..(113): n is a, c, g, or t
  misc_feature (116)..(116): n is a, c, g, or t
  misc_feature (122)..(122): n is a, c, g, or t
  misc_feature (125)..(125): n is a, c, g, or t
  misc_feature (142)..(142): n is a, c, g, or t
  misc_feature (147)..(147): n is a, c, g, or t
  misc_feature (162)..(162): n is a, c, g, or t
  misc_feature (166)..(166): n is a, c, g, or t
  misc_feature (172)..(172): n is a, c, g, or t
  misc_feature (183)..(183): n is a, c, g, or t
  misc_feature (192)..(192): n is a, c, g, or t
  misc_feature (207)..(207): n is a, c, g, or t
  misc_feature (212)..(212): n is a, c, g, or t
  misc_feature (214)..(214): n is a, c, g, or t
  misc_feature (216)..(216): n is a, c, g, or t
  misc_feature (222)..(222): n is a, c, g, or t
  misc_feature (229)..(230): n is a, c, g, or t
  misc_feature (247)..(248): n is a, c, g, or t
  misc_feature (252)..(252): n is a, c, g, or t
  misc_feature (255)..(255): n is a, c, g, or t
  misc_feature (282)..(282): n is a, c, g, or t
  misc_feature (284)..(284): n is a, c, g, or t
  misc_feature (296)..(297): n is a, c, g, or t
  misc_feature (304)..(304): n is a, c, g, or t
  misc_feature (313)..(313): n is a, c, g, or t
  misc_feature (316)..(316): n is a, c, g, or t
  misc_feature (322)..(322): n is a, c, g, or t
  misc_feature (332)..(332): n is a, c, g, or t
  misc_feature (337)..(339): n is a, c, g, or t
  misc_feature (342)..(343): n is a, c, g, or t
  misc_feature (350)..(350): n is a, c, g, or t
  misc_feature (354)..(354): n is a, c, g, or t
  misc_feature (357)..(357): n is a, c, g, or t
  misc_feature (360)..(360): n is a, c, g, or t
  misc_feature (375)..(375): n is a, c, g, or t
  misc_feature (379)..(379): n is a, c, g, or t
  misc_feature (386)..(386): n is a, c, g, or t
  misc_feature (390)..(390): n is a, c, g, or t
  misc_feature (398)..(398): n is a, c, g, or t
  misc_feature (404)..(404): n is a, c, g, or t
  misc_feature (407)..(408): n is a, c, g, or t
  misc_feature (414)..(414): n is a, c, g, or t
  misc_feature (416)..(416): n is a, c, g, or t
  misc_feature (418)..(418): n is a, c, g, or t
  misc_feature (429)..(429): n is a, c, g, or t
  misc_feature (442)..(442): n is a, c, g, or t
  misc_feature (444)..(444): n is a, c, g, or t
  misc_feature (456)..(456): n is a, c, g, or t
  misc_feature (458)..(458): n is a, c, g, or t
  misc_feature (464)..(467): n is a, c, g, or t
  misc_feature (470)..(470): n is a, c, g, or t
  misc_feature (474)..(475): n is a, c, g, or t
  misc_feature (481)..(482): n is a, c, g, or t
  misc_feature (489)..(489): n is a, c, g, or t
  misc_feature (499)..(499): n is a, c, g, or t
  misc_feature (505)..(505): n is a, c, g, or t
  misc_feature (509)..(510): n is a, c, g, or t
  misc_feature (518)..(518): n is a, c, g, or t
  misc_feature (522)..(523): n is a, c, g, or t
  misc_feature (525)..(525): n is a, c, g, or t
  misc_feature (529)..(529): n is a, c, g, or t
  misc_feature (535)..(535): n is a, c, g, or t
  misc_feature (541)..(541): n is a, c, g, or t
  misc_feature (547)..(547): n is a, c, g, or t
  misc_feature (553)..(554): n is a, c, g, or t
  misc_feature (558)..(558): n is a, c, g, or t
  misc_feature (560)..(562): n is a, c, g, or t
  misc_feature (567)..(567): n is a, c, g, or t
  misc_feature (571)..(571): n is a, c, g, or t
  misc_feature (574)..(574): n is a, c, g, or t
  misc_feature (582)..(582): n is a, c, g, or t
  misc_feature (587)..(587): n is a, c, g, or t
  misc_feature (589)..(589): n is a, c, g, or t
  misc_feature (594)..(594): n is a, c, g, or t
  misc_feature (597)..(598): n is a, c, g, or t
  misc_feature (609)..(609): n is a, c, g, or t
  misc_feature (611)..(611): n is a, c, g, or t
  misc_feature (613)..(614): n is a, c, g, or t
  misc_feature (619)..(619): n is a, c, g, or t
  misc_feature (621)..(621): n is a, c, g, or t
  misc_feature (624)..(625): n is a, c, g, or t
  misc_feature (627)..(627): n is a, c, g, or t
  misc_feature (629)..(629): n is a, c, g, or t
  misc_feature (641)..(642): n is a, c, g, or t
  misc_feature (645)..(645): n is a, c, g, or t
  misc_feature (648)..(648): n is a, c, g, or t
  misc_feature (650)..(652): n is a, c, g, or t
  misc_feature (655)..(655): n is a, c, g, or t
  misc_feature (669)..(669): n is a, c, g, or t
  misc_feature (671)..(671): n is a, c, g, or t
  misc_feature (677)..(677): n is a, c, g, or t
  misc_feature (680)..(680): n is a, c, g, or t
  misc_feature (692)..(692): n is a, c, g, or t
  misc_feature (701)..(702): n is a, c, g, or t
  misc_feature (706)..(708): n is a, c, g, or t
  misc_feature (711)..(711): n is a, c, g, or t
  misc_feature (719)..(719): n is a, c, g, or t
  misc_feature (727)..(727): n is a, c, g, or t
  misc_feature (729)..(729): n is a, c, g, or t
  misc_feature (739)..(739): n is a, c, g, or t
  misc_feature (742)..(742): n is a, c, g, or t
  misc_feature (753)..(753): n is a, c, g, or t
  misc_feature (755)..(755): n is a, c, g, or t
  misc_feature (759)..(759): n is a, c, g, or t
  misc_feature (761)..(761): n is a, c, g, or t
  misc_feature (764)..(764): n is a, c, g, or t
  misc_feature (767)..(767): n is a, c, g, or t
  misc_feature (776)..(777): n is a, c, g, or t
  misc_feature (792)..(796): n is a, c, g, or t
  misc_feature (803)..(803): n is a, c, g, or t
  misc_feature (808)..(809): n is a, c, g, or t
  misc_feature (811)..(811): n is a, c, g, or t
  misc_feature (813)..(813): n is a, c, g, or t
  misc_feature (816)..(819): n is a, c, g, or t
  misc_feature (832)..(833): n is a, c, g, or t
  misc_feature (837)..(837): n is a, c, g, or t
  misc_feature (840)..(841): n is a, c, g, or t
  misc_feature (844)..(846): n is a, c, g, or t
  misc_feature (851)..(851): n is a, c, g, or t
  misc_feature (853)..(853): n is a, c, g, or t
  misc_feature (855)..(855): n is a, c, g, or t
  misc_feature (863)..(863): n is a, c, g, or t
  misc_feature (867)..(867): n is a, c, g, or t
  misc_feature (870)..(870): n is a, c, g, or t
  misc_feature (874)..(874): n is a, c, g, or t
  misc_feature (883)..(884): n is a, c, g, or t
  misc_feature (886)..(886): n is a, c, g, or t
  misc_feature (888)..(888): n is a, c, g, or t
  misc_feature (892)..(892): n is a, c, g, or t
  misc_feature (896)..(896): n is a, c, g, or t
  misc_feature (900)..(900): n is a, c, g, or t
  misc_feature (902)..(902): n is a, c, g, or t
  misc_feature (907)..(907): n is a, c, g, or t
  misc_feature (909)..(910): n is a, c, g, or t
  misc_feature (912)..(912): n is a, c, g, or t
  misc_feature (914)..(914): n is a, c, g, or t
  misc_feature (920)..(920): n is a, c, g, or t
  misc_feature (923)..(926): n is a, c, g, or t
  misc_feature (928)..(928): n is a, c, g, or t
  misc_feature (942)..(942): n is a, c, g, or t
  misc_feature (947)..(947): n is a, c, g, or t
  misc_feature (957)..(957): n is a, c, g, or t
  misc_feature (959)..(959): n is a, c, g, or t
  misc_feature (961)..(961): n is a, c, g, or t
  misc_feature (969)..(969): n is a, c, g, or t
  misc_feature (971)..(971): n is a, c, g, or t
  misc_feature (977)..(977): n is a, c, g, or t
  misc_feature (979)..(980): n is a, c, g, or t
  misc_feature (983)..(985): n is a, c, g, or t
  misc_feature (998)..(1000): n is a, c, g, or t
  misc_feature (1003)..(1003): n is a, c, g, or t
  misc_feature (1006)..(1006): n is a, c, g, or t
  misc_feature (1011)..(1011): n is a, c, g, or t
  misc_feature (1013)..(1013): n is a, c, g, or t
  misc_feature (1017)..(1017): n is a, c, g, or t
  misc_feature (1022)..(1023): n is a, c, g, or t
  misc_feature (1030)..(1030): n is a, c, g, or t
  misc_feature (1033)..(1033): n is a, c, g, or t
  misc_feature (1041)..(1041): n is a, c, g, or t
  misc_feature (1045)..(1045): n is a, c, g, or t
  misc_feature (1047)..(1047): n is a, c, g, or t
  misc_feature (1056)..(1056): n is a, c, g, or t
  misc_feature (1061)..(1062): n is a, c, g, or t
  misc_feature (1067)..(1067): n is a, c, g, or t
  misc_feature (1069)..(1069): n is a, c, g, or t
  misc_feature (1071)..(1071): n is a, c, g, or t
  misc_feature (1073)..(1073): n is a, c, g, or t
  misc_feature (1076)..(1076): n is a, c, g, or t
  misc_feature (1083)..(1085): n is a, c, g, or t
  misc_feature (1087)..(1088): n is a, c, g, or t
  misc_feature (1091)..(1091): n is a, c, g, or t
  misc_feature (1094)..(1094): n is a, c, g, or t
  misc_feature (1096)..(1096): n is a, c, g, or t
  misc_feature (1103)..(1104): n is a, c, g, or t
  misc_feature (1109)..(1109): n is a, c, g, or t
  misc_feature (1112)..(1112): n is a, c, g, or t
  misc_feature (1114)..(1114): n is a, c, g, or t
  misc_feature (1122)..(1126): n is a, c, g, or t
  misc_feature (1131)..(1131): n is a, c, g, or t
  misc_feature (1136)..(1137): n is a, c, g, or t
  misc_feature (1139)..(1139): n is a, c, g, or t
  misc_feature (1142)..(1144): n is a, c, g, or t
  misc_feature (1155)..(1157): n is a, c, g, or t
  misc_feature (1161)..(1162): n is a, c, g, or t
  misc_feature (1164)..(1164): n is a, c, g, or t
  misc_feature (1167)..(1168): n is a, c, g, or t
  misc_feature (1170)..(1170): n is a, c, g, or t
  misc_feature (1173)..(1173): n is a, c, g, or t
  misc_feature (1175)..(1175): n is a, c, g, or t
  misc_feature (1177)..(1177): n is a, c, g, or t
  misc_feature (1179)..(1179): n is a, c, g, or t
  misc_feature (1187)..(1187): n is a, c, g, or t
  misc_feature (1196)..(1196): n is a, c, g, or t
  misc_feature (1198)..(1198): n is a, c, g, or t
  misc_feature (1204)..(1204): n is a, c, g, or t
  misc_feature (1208)..(1208): n is a, c, g, or t
  misc_feature (1213)..(1213): n is a, c, g, or t
  misc_feature (1219)..(1219): n is a, c, g, or t
  misc_feature (1222)..(1223): n is a, c, g, or t
  misc_feature (1225)..(1225): n is a, c, g, or t
  misc_feature (1231)..(1232): n is a, c, g, or t
  misc_feature (1234)..(1235): n is a, c, g, or t
  misc_feature (1238)..(1238): n is a, c, g, or t
  misc_feature (1242)..(1242): n is a, c, g, or t
  misc_feature (1244)..(1244): n is a, c, g, or t
  misc_feature (1247)..(1247): n is a, c, g, or t
  misc_feature (1249)..(1249): n is a, c, g, or t
  misc_feature (1256)..(1256): n is a, c, g, or t
  misc_feature (1260)..(1261): n is a, c, g, or t
  misc_feature (1263)..(1263): n is a, c, g, or t
  misc_feature (1265)..(1265): n is a, c, g, or t
  misc_feature (1267)..(1267): n is a, c, g, or t
  misc_feature (1270)..(1270): n is a, c, g, or t
  misc_feature (1272)..(1272): n is a, c, g, or t
  misc_feature (1274)..(1274): n is a, c, g, or t
  misc_feature (1283)..(1283): n is a, c, g, or t
  misc_feature (1290)..(1290): n is a, c, g, or t
  misc_feature (1293)..(1293): n is a, c, g, or t
  misc_feature (1296)..(1296): n is a, c, g, or t
  misc_feature (1299)..(1299): n is a, c, g, or t
  misc_feature (1301)..(1302): n is a, c, g, or t
  misc_feature (1304)..(1304): n is a, c, g, or t
  misc_feature (1308)..(1308): n is a, c, g, or t
  misc_feature (1311)..(1311): n is a, c, g, or t
  misc_feature (1325)..(1327): n is a, c, g, or t
  misc_feature (1329)..(1329): n is a, c, g, or t
  misc_feature (1331)..(1331): n is a, c, g, or t
  misc_feature (1334)..(1334): n is a, c, g, or t
  misc_feature (1338)..(1338): n is a, c, g, or t
  misc_feature (1348)..(1348): n is a, c, g, or t
  misc_feature (1352)..(1352): n is a, c, g, or t
  misc_feature (1361)..(1361): n is a, c, g, or t
  misc_feature (1363)..(1363): n is a, c, g, or t
  misc_feature (1367)..(1367): n is a, c, g, or t
  misc_feature (1370)..(1370): n is a, c, g, or t
  misc_feature (1374)..(1375): n is a, c, g, or t
  misc_feature (1383)..(1383): n is a, c, g, or t
  misc_feature (1385)..(1385): n is a, c, g, or t
  misc_feature (1393)..(1393): n is a, c, g, or t
  misc_feature (1395)..(1395): n is a, c, g, or t
  misc_feature (1399)..(1399): n is a, c, g, or t
  misc_feature (1404)..(1406): n is a, c, g, or t
  misc_feature (1409)..(1409): n is a, c, g, or t
  misc_feature (1413)..(1413): n is a, c, g, or t
  misc_feature (1416)..(1416): n is a, c, g, or t
  misc_feature (1421)..(1422): n is a, c, g, or t
  misc_feature (1436)..(1438): n is a, c, g, or t
  misc_feature (1444)..(1444): n is a, c, g, or t
  misc_feature (1446)..(1446): n is a, c, g, or t
nctgtntnnacaannaanagaannaanttaggagggatnggatncccctctcccnctccnngatgggnttntatntgagtgacanatanncanccacccacccnnncggtccncgntattcnganaccagcggatctcggcnaaccntctttctcagaccanccancatacnacttctgtgcnaagcttggnggctgatggcggcgncctcngntnaactgntcatcannggctggtacatcttccnngtgntgntgcaagtgttcctggaatgctgcattnantgggtaggattnncttttcnaaatcctcntgngacacngcccattgcnagaannnagnngttcatntacnccntgnagaacctggtatacntggngacacgnaccngaggtatncgtgtnggnngagcgnangnatcgagccccnatgtgactgccananctcatcatgtcntngggcgnnnntancatnncgtgcnnttgtgcntcatcgagcnataacngtgnngcctatgncccnnanagantgtganggtatngtgtgntccatnnccanannnagagnatgntgncgacagtngaggngncaagntanncccggataatnantnntgaananganncnanaatcccaaatcnnttntgnannnctnttgcatcaattcanantgatgnaanatggtagatctnggaagaggnnaatnnnganaccaaacnaccagaanancttgtggcanttngcccccgaaantnatgntnttnatntacatatanngattagtaccgaatnnnnnttcatanaaganntngnatnnnnatcgaaaagaatnncaanccnntgnnnaaacnananaaaccttngagngantccntattggtanntncnaganccanacanancccananncncnttgaantcnnnnantttgaaccaattangcaantaggtttttnangngaaattanancgaaangnnatnnnttacaacctactnnnganaancatananaaanttctnncgaatcnccnttcttagnctgntnccttggtanagatnntaccntntnanttncaacaannntnnaangtntncatctcnncatanctncngatttccnnnnnaaaangaccnnanaannncaataccccannncaannantannangtnantntnatattaanaataattcncncttcanaganaaatnaagacnatnnanttactnncnnaanaaanantcntncttaacncccnntntnanttntnanagatttatnatatttnctngtnccnannanaatngangtgtttttaagtannncnanctntttnggtagggaancttntaagttgantntaanttngttnncaccttcntnattcctcncntagnaatcnnncgntttnatnttatnnataagatacgagtnnnaccgcntntgcctcag

SEQ ID NO: 572 - DNA, 1342 bp, Homo Sapiens
  misc_feature (876)..(876): n is a, c, g, or t
  misc_feature (884)..(884): n is a, c, g, or t
  misc_feature (893)..(893): n is a, c, g, or t
  misc_feature (898)..(898): n is a, c, g, or t
  misc_feature (900)..(900): n is a, c, g, or t
  misc_feature (949)..(949): n is a, c, g, or t
  misc_feature (972)..(972): n is a, c, g, or t
  misc_feature (979)..(979): n is a, c, g, or t
  misc_feature (983)..(983): n is a, c, g, or t
  misc_feature (988)..(988): n is a, c, g, or t
  misc_feature (991)..(991): n is a, c, g, or t
  misc_feature (995)..(995): n is a, c, g, or t
  misc_feature (999)..(999): n is a, c, g, or t
  misc_feature (1007)..(1007): n is a, c, g, or t
  misc_feature (1011)..(1011): n is a, c, g, or t
  misc_feature (1014)..(1014): n is a, c, g, or t
  misc_feature (1018)..(1018): n is a, c, g, or t
  misc_feature (1024)..(1024): n is a, c, g, or t
  misc_feature (1026)..(1026): n is a, c, g, or t
  misc_feature (1028)..(1028): n is a, c, g, or t
  misc_feature (1031)..(1032): n is a, c, g, or t
  misc_feature (1045)..(1045): n is a, c, g, or t
  misc_feature (1050)..(1050): n is a, c, g, or t
  misc_feature (1055)..(1055): n is a, c, g, or t
  misc_feature (1063)..(1063): n is a, c, g, or t
  misc_feature (1066)..(1066): n is a, c, g, or t
  misc_feature (1075)..(1076): n is a, c, g, or t
  misc_feature (1090)..(1091): n is a, c, g, or t
  misc_feature (1097)..(1097): n is a, c, g, or t
  misc_feature (1100)..(1100): n is a, c, g, or t
  misc_feature (1111)..(1111): n is a, c, g, or t
  misc_feature (1113)..(1113): n is a, c, g, or t
  misc_feature (1120)..(1120): n is a, c, g, or t
  misc_feature (1123)..(1123): n is a, c, g, or t
  misc_feature (1126)..(1127): n is a, c, g, or t
  misc_feature (1134)..(1135): n is a, c, g, or t
  misc_feature (1142)..(1142): n is a, c, g, or t
  misc_feature (1151)..(1151): n is a, c, g, or t
  misc_feature (1165)..(1165): n is a, c, g, or t
  misc_feature (1172)..(1173): n is a, c, g, or t
  misc_feature (1182)..(1182): n is a, c, g, or t
  misc_feature (1187)..(1187): n is a, c, g, or t
  misc_feature (1189)..(1194): n is a, c, g, or t
  misc_feature (1196)..(1196): n is a, c, g, or t
  misc_feature (1201)..(1202): n is a, c, g, or t
  misc_feature (1212)..(1213): n is a, c, g, or t
  misc_feature (1221)..(1221): n is a, c, g, or t
  misc_feature (1223)..(1223): n is a, c, g, or t
  misc_feature (1225)..(1226): n is a, c, g, or t
  misc_feature (1228)..(1228): n is a, c, g, or t
  misc_feature (1232)..(1232): n is a, c, g, or t
  misc_feature (1245)..(1245): n is a, c, g, or t
  misc_feature (1252)..(1252): n is a, c, g, or t
  misc_feature (1259)..(1259): n is a, c, g, or t
  misc_feature (1265)..(1265): n is a, c, g, or t
  misc_feature (1267)..(1267): n is a, c, g, or t
  misc_feature (1271)..(1272): n is a, c, g, or t
  misc_feature (1276)..(1277): n is a, c, g, or t
  misc_feature (1289)..(1289): n is a, c, g, or t
  misc_feature (1295)..(1295): n is a, c, g, or t
  misc_feature (1306)..(1307): n is a, c, g, or t
  misc_feature (1312)..(1312): n is a, c, g, or t
  misc_feature (1321)..(1322): n is a, c, g, or t
  misc_feature (1328)..(1328): n is a, c, g, or t
  misc_feature (1334)..(1335): n is a, c, g, or t
  misc_feature (1339)..(1341): n is a, c, g, or t
tagagaaattactatgagaggatcgcatcaccatcaccatcacggatcctatttaggtgacactatagaatcgtcgacccacgcgtccggcggtggcggcggcggcggtggcggcggcgactgctgcggtgaaggaggaggaggagccgagcgggcgctggcaccgaggcctgaccatggacgaggaatacgatgtgatcgtgctggggaccggtctcaccgaatgcatcctgtcgggcatcatgtctgtgaacgggaagaaggtgctgcacatggaccggaacccctactacgggggcgagagctcctccatcacacccctggaggagctgtataagcgttttcagttgctggaggggccccctgagtcgatgggccgaggccgagactggaatgttgacctgattcccaaattcctcatggctaacgggcagctggtaaagatgctactgtatacagaggtgactcgctacctggacttcaaggtggtggagggcagctttgtctacaaggggggcaagatctacaaagtgccgtccactgagactgaggccttggcttccaatctgatgggcatgtttgagaaacggcgcttccgcaagttcctggtgtttgtggcaaacttcgatgagaatgaccccaagacctttgagggcgttgacccccagactaccagcatgcgtgacgtctaccggaagtttgatctgggccaggatgtcatcgatttcactggccatgccctggcgctctaccgcactgatgactacctggaccagccctgccttgagaccgtcaaccgcatcaagttgtacagtgagtccctggcccggtatggcaagagcccatatttatacccgctctacggcttgggccganctgccccnagggttttngcaanantgagtgccatctatgggggggacatatatgctgaacaaaccctgtggantgacatcatcatggaaaacggcnaggttgntggnccttnaantctnaagnaaaagtgncccnctncaancaactnantnttnnaccccacctcatncccgnaaccntttgccgnaangctggccannttatccccatcatnnttattnttnacccccccccntnaaaaaanccnaannaacccanntcctgcnaaaaattcntccccccaaaaccnggtccannaggaaatcnaaaantnnnnnntnggcannattccccttnnccccaaantngnngncccngggaaaaaaatanctttttnccccccntattgngnaaanncccnncccttaaaaaangggganccccccttgannttttnaaccctttnnccaaanttttgnntttnnna

SEQ ID NO: 573 - DNA, 1368 bp, Homo Sapiens
  misc_feature (949)..(949): n is a, c, g, or t
  misc_feature (955)..(956): n is a, c, g, or t
  misc_feature (962)..(962): n is a, c, g, or t
  misc_feature (971)..(971): n is a, c, g, or t
  misc_feature (993)..(993): n is a, c, g, or t
  misc_feature (1020)..(1020): n is a, c, g, or t
  misc_feature (1025)..(1025): n is a, c, g, or t
  misc_feature (1050)..(1050): n is a, c, g, or t
  misc_feature (1064)..(1065): n is a, c, g, or t
  misc_feature (1074)..(1074): n is a, c, g, or t
  misc_feature (1080)..(1080): n is a, c, g, or t
  misc_feature (1091)..(1091): n is a, c, g, or t
  misc_feature (1093)..(1093): n is a, c, g, or t
  misc_feature (1100)..(1100): n is a, c, g, or t
  misc_feature (1102)..(1102): n is a, c, g, or t
  misc_feature (1104)..(1104): n is a, c, g, or t
  misc_feature (1108)..(1108): n is a, c, g, or t
  misc_feature (1111)..(1111): n is a, c, g, or t
  misc_feature (1113)..(1113): n is a, c, g, or t
  misc_feature (1141)..(1142): n is a, c, g, or t
  misc_feature (1150)..(1150): n is a, c, g, or t
  misc_feature (1158)..(1158): n is a, c, g, or t
  misc_feature (1161)..(1161): n is a, c, g, or t
  misc_feature (1163)..(1164): n is a, c, g, or t
  misc_feature (1170)..(1171): n is a, c, g, or t
  misc_feature (1183)..(1183): n is a, c, g, or t
  misc_feature (1187)..(1187): n is a, c, g, or t
  misc_feature (1194)..(1194): n is a, c, g, or t
  misc_feature (1197)..(1198): n is a, c, g, or t
  misc_feature (1201)..(1201): n is a, c, g, or t
  misc_feature (1203)..(1203): n is a, c, g, or t
  misc_feature (1206)..(1206): n is a, c, g, or t
  misc_feature (1212)..(1212): n is a, c, g, or t
  misc_feature (1218)..(1218): n is a, c, g, or t
  misc_feature (1223)..(1223): n is a, c, g, or t
  misc_feature (1227)..(1229): n is a, c, g, or t
  misc_feature (1231)..(1231): n is a, c, g, or t
  misc_feature (1235)..(1235): n is a, c, g, or t
  misc_feature (1239)..(1239): n is a, c, g, or t
  misc_feature (1241)..(1241): n is a, c, g, or t
  misc_feature (1246)..(1246): n is a, c, g, or t
  misc_feature (1252)..(1254): n is a, c, g, or t
  misc_feature (1270)..(1270): n is a, c, g, or t
  misc_feature (1274)..(1275): n is a, c, g, or t
  misc_feature (1281)..(1281): n is a, c, g, or t
  misc_feature (1284)..(1285): n is a, c, g, or t
  misc_feature (1288)..(1288): n is a, c, g, or t
  misc_feature (1290)..(1290): n is a, c, g, or t
  misc_feature (1294)..(1294): n is a, c, g, or t
  misc_feature (1308)..(1308): n is a, c, g, or t
  misc_feature (1314)..(1315): n is a, c, g, or t
  misc_feature (1318)..(1318): n is a, c, g, or t
  misc_feature (1324)..(1324): n is a, c, g, or t
  misc_feature (1327)..(1327): n is a, c, g, or t
  misc_feature (1336)..(1336): n is a, c, g, or t
  misc_feature (1339)..(1339): n is a, c, g, or t
  misc_feature (1341)..(1342): n is a, c, g, or t
  misc_feature (1348)..(1348): n is a, c, g, or t
  misc_feature (1355)..(1355): n is a, c, g, or t
  misc_feature (1362)..(1362): n is a, c, g, or t
  misc_feature (1365)..(1366): n is a, c, g, or t
atagagaaattactatgagaggatcgcatcaccatcaccatcacggatcctatttaggtgacactatagaatcgtcgacccacgcgtccggccatcatcttcgtggtggccagcagcagctacaacatggtcatccgggaggacaaccagaccaaccgcctgcaggaggctctgaacctcttcaagagcatctggaacaacagatggctgcgcaccatctctgtgatcctgttcctcaacaagcaagatctgctcgctgagaaagtccttgctgggaaatcgaagattgaggactactttccagaatttgctcgctacactactcctgaggatgctactcccgagcccggagaggacccacgcgtgacccgggccaagtacttcattcgagatgagtttctgaggatcagcactgccagtggagatgggcgtcactactgctaccctcatttcacctgcgctgtggacactgagaacatccgccgtgtgttcaacgactgccgtgacatcattcagcgcatgcaccttcgtcagtacgagctgctctaagaagggaacccccaaatttaattaaagccttaagcacaattaattaaaagtgaaacgtaattgtacaagcagttaatcacccaccatagggcatgattaacaaagcaacctttcccttcccccgagtgattttgcgaaacccccttttcccttcagcttgcttagatgttccaaatttagaaagcttaaggcggcctacagaaaaaggaaaaaaggccacaaaagttccctctcactttcagtaaaaataaataaaacagcagcagcaaacaaataaaatgaaataaaagaaacaaatgaaataatattgtgttgtgcagcattaaaaaaaatcaaaataaaaattaaatgtgagcaaaaaaaaaaaaaaaaaaaaaaaggggcggccgctccctatagngagtcnnattaancttaattanctgaacttggactcctgttganaaatccagtaatgacctcaaaactccntctgnatttgttcaaaaccctcggttgccnccgggggttttttnntggggaaantccaanctagcttgggnanattttcngnanctanggnancttaaatgggaaaaaaaaaccctgggannacccccgntgaaattnccnannggctcnnaaaaaaattttngggnatttcanccnntgncncanggaccnaaaacnaaccnttcnnngnaatnacgncnttttnaaaacnnnaaaaaaaaaacccaantttnnccgccnttnntcnantttngcccccgaaaaggncccccnnaantttttnggnaaaaaaaanggnanngggaanggaaaanttccccnttnncc

SEQ ID NO: 574 - DNA, 1200 bp, Homo Sapiens
  misc_feature (1)..(1): n is a, c, g, or t
  misc_feature (900)..(900): n is a, c, g, or t
  misc_feature (926)..(926): n is a, c, g, or t
  misc_feature (929)..(929): n is a, c, g, or t
  misc_feature (950)..(950): n is a, c, g, or t
  misc_feature (981)..(981): n is a, c, g, or t
  misc_feature (989)..(989): n is a, c, g, or t
  misc_feature (1001)..(1001): n is a, c, g, or t
  misc_feature (1004)..(1004): n is a, c, g, or t
  misc_feature (1014)..(1014): n is a, c, g, or t
  misc_feature (1021)..(1021): n is a, c, g, or t
  misc_feature (1027)..(1027): n is a, c, g, or t
  misc_feature (1033)..(1034): n is a, c, g, or t
  misc_feature (1036)..(1036): n is a, c, g, or t
  misc_feature (1047)..(1047): n is a, c, g, or t
  misc_feature (1064)..(1064): n is a, c, g, or t
  misc_feature (1070)..(1070): n is a, c, g, or t
  misc_feature (1074)..(1074): n is a, c, g, or t
  misc_feature (1077)..(1077): n is a, c, g, or t
  misc_feature (1093)..(1093): n is a, c, g, or t
  misc_feature (1097)..(1097): n is a, c, g, or t
  misc_feature (1122)..(1122): n is a, c, g, or t
  misc_feature (1143)..(1143): n is a, c, g, or t
  misc_feature (1149)..(1149): n is a, c, g, or t
  misc_feature (1160)..(1160): n is a, c, g, or t
  misc_feature (1164)..(1164): n is a, c, g, or t
  misc_feature (1167)..(1167): n is a, c, g, or t
  misc_feature (1170)..(1170): n is a, c, g, or t
  misc_feature (1175)..(1176): n is a, c, g, or t
  misc_feature (1180)..(1180): n is a, c, g, or t
  misc_feature (1183)..(1183): n is a, c, g, or t
naatagagaaattactatgaagaggatcgcatcaccatcaccatcacggatcctatttaggtgacactatagaatcgtcgacccacgcgtccgggcagttaccttactactgggtaggaatcaagctgtatgatttggttgcaggaagcaattgcctaaaaagcagttatgtcctcagcaaatcaagagcccttgaacatttcccaatgctccagaaggacaaactggtaggagcaattgtctactatgacggacaacataacgatgcacggatgaaccttgccattgctctgactgctgccaggtatggggctgccacagccaattacatggaggtagtgagcttgctcaagaagacagacccccagacagggaaagtgcgtgtgagcggcgcacggtgcaaggatgtcctcacagggcaggaatttgacgtgagagccaaatgtgttatcaatgccacgggacctttcacggactctgtgcgcaaaatggatgataaagacgcagcagctatctgccagccaagtgctggtgtccatattgtgatgcctggttattacagcccagagagcatgggacttcttgacccagcgaccagtgatgggcgagttattttcttcttaccctggcaaaagatgacgatcgctggcactactgatactccaactgatgttacacaccatccaattccttcagaagaagatatcaacttcattttgaatgaagtgcgtaattacctgagttgtgatgttgaagtgagaagaggggatgtcctggcagcatggagtggaatccgtcctcttgttacagaccccaaatctgcagatactcagtctatctccccgaaatcatgttgttgatatcagtgagagtggccttattactatagcaggtggaaangtggacaacttatcggtctatggcanaanataccataaatgctgctgtcnaaactcataatttaaaagcaggaccaagtanaacagttngggcttttcctncangggggtaaanattggancccccnctctanntnaggctttgcangaattatggacttgaancgaggnggcncancctcttgccccccctntggngaaaggcctttgaggggccaaatgncaaggtgatgggcaaaggggncctatngtggaaacccnttgntcnaanttccnntttnganccaagggaaaatgggat

SEQ ID NO: 575 - DNA, 1200 bp, Homo Sapiens
  misc_feature (7)..(7): n is a, c, g, or t
  misc_feature (14)..(14): n is a, c, g, or t
  misc_feature (19)..(19): n is a, c, g, or t
  misc_feature (22)..(22): n is a, c, g, or t
  misc_feature (26)..(26): n is a, c, g, or t
  misc_feature (37)..(37): n is a, c, g, or t
  misc_feature (43)..(43): n is a, c, g, or t
  misc_feature (62)..(63): n is a, c, g, or t
  misc_feature (65)..(65): n is a, c, g, or t
  misc_feature (69)..(69): n is a, c, g, or t
  misc_feature (79)..(79): n is a, c, g, or t
  misc_feature (91)..(92): n is a, c, g, or t
  misc_feature (102)..(102): n is a, c, g, or t
  misc_feature (105)..(105): n is a, c, g, or t
  misc_feature (115)..(115): n is a, c, g, or t
  misc_feature (117)..(117): n is a, c, g, or t
  misc_feature (122)..(123): n is a, c, g, or t
  misc_feature (125)..(125): n is a, c, g, or t
  misc_feature (127)..(127): n is a, c, g, or t
  misc_feature (129)..(129): n is a, c, g, or t
  misc_feature (133)..(133): n is a, c, g, or t
  misc_feature (147)..(148): n is a, c, g, or t
  misc_feature (153)..(153): n is a, c, g, or t
  misc_feature (157)..(157): n is a, c, g, or t
  misc_feature (160)..(160): n is a, c, g, or t
  misc_feature (171)..(172): n is a, c, g, or t
  misc_feature (176)..(176): n is a, c, g, or t
  misc_feature (178)..(178): n is a, c, g, or t
  misc_feature (181)..(181): n is a, c, g, or t
  misc_feature (189)..(189): n is a, c, g, or t
  misc_feature (199)..(199): n is a, c, g, or t
  misc_feature (205)..(205): n is a, c, g, or t
  misc_feature (207)..(207): n is a, c, g, or t
  misc_feature (215)..(215): n is a, c, g, or t
  misc_feature (219)..(221): n is a, c, g, or t
  misc_feature (237)..(237): n is a, c, g, or t
  misc_feature (239)..(239): n is a, c, g, or t
  misc_feature (241)..(242): n is a, c, g, or t
  misc_feature (245)..(245): n is a, c, g, or t
  misc_feature (249)..(251): n is a, c, g, or t
  misc_feature (254)..(256): n is a, c, g, or t
  misc_feature (259)..(259): n is a, c, g, or t
  misc_feature (272)..(272): n is a, c, g, or t
  misc_feature (279)..(279): n is a, c, g, or t
  misc_feature (286)..(287): n is a, c, g, or t
  misc_feature (291)..(291): n is a, c, g, or t
  misc_feature (293)..(293): n is a, c, g, or t
  misc_feature (297)..(297): n is a, c, g, or t
  misc_feature (301)..(302): n is a, c, g, or t
  misc_feature (305)..(305): n is a, c, g, or t
  misc_feature (309)..(310): n is a, c, g, or t
  misc_feature (314)..(314): n is a, c, g, or t
  misc_feature (317)..(317): n is a, c, g, or t
  misc_feature (319)..(319): n is a, c, g, or t
  misc_feature (321)..(321): n is a, c, g, or t
  misc_feature (324)..(324): n is a, c, g, or t
  misc_feature (328)..(329): n is a, c, g, or t
  misc_feature (333)..(333): n is a, c, g, or t
  misc_feature (337)..(338): n is a, c, g, or t
  misc_feature (350)..(350): n is a, c, g, or t
  misc_feature (353)..(353): n is a, c, g, or t
  misc_feature (359)..(359): n is a, c, g, or t
  misc_feature (363)..(363): n is a, c, g, or t
  misc_feature (367)..(367): n is a, c, g, or t
  misc_feature (382)..(383): n is a, c, g, or t
  misc_feature (393)..(393): n is a, c, g, or t
  misc_feature (395)..(395): n is a, c, g, or t
  misc_feature (398)..(398): n is a, c, g, or t
  misc_feature (404)..(406): n is a, c, g, or t
  misc_feature (414)..(414): n is a, c, g, or t
  misc_feature (416)..(416): n is a, c, g, or t
  misc_feature (423)..(425): n is a, c, g, or t
  misc_feature (430)..(430): n is a, c, g, or t
  misc_feature (434)..(435): n is a, c, g, or t
  misc_feature (437)..(437): n is a, c, g, or t
  misc_feature (442)..(442): n is a, c, g, or t
  misc_feature (444)..(445): n is a, c, g, or t
  misc_feature (449)..(449): n is a, c, g, or t
  misc_feature (451)..(451): n is a, c, g, or t
  misc_feature (455)..(455): n is a, c, g, or t
  misc_feature (458)..(458): n is a, c, g, or t
  misc_feature (464)..(464): n is a, c, g, or t
  misc_feature (466)..(466): n is a, c, g, or t
  misc_feature (470)..(470): n is a, c, g, or t
  misc_feature (476)..(477): n is a, c, g, or t
  misc_feature (480)..(480): n is a, c, g, or t
  misc_feature (485)..(485): n is a, c, g, or t
  misc_feature (490)..(490): n is a, c, g, or t
  misc_feature (495)..(495): n is a, c, g, or t
  misc_feature (498)..(499): n is a, c, g, or t
  misc_feature (510)..(510): n is a, c, g, or t
  misc_feature (514)..(514): n is a, c, g, or t
  misc_feature (520)..(521): n is a, c, g, or t
  misc_feature (527)..(527): n is a, c, g, or t
  misc_feature (531)..(532): n is a, c, g, or t
  misc_feature (539)..(539): n is a, c, g, or t
  misc_feature (544)..(544): n is a, c, g, or t
  misc_feature (559)..(560): n is a, c, g, or t
  misc_feature (564)..(564): n is a, c, g, or t
  misc_feature (569)..(569): n is a, c, g, or t
  misc_feature (573)..(573): n is a, c, g, or t
  misc_feature (575)..(575): n is a, c, g, or t
  misc_feature (579)..(581): n is a, c, g, or t
  misc_feature (583)..(583): n is a, c, g, or t
  misc_feature (586)..(586): n is a, c, g, or t
  misc_feature (594)..(594): n is a, c, g, or t
  misc_feature (597)..(597): n is a, c, g, or t
  misc_feature (604)..(604): n is a, c, g, or t
  misc_feature (610)..(610): n is a, c, g, or t
  misc_feature (613)..(615): n is a, c, g, or t
  misc_feature (617)..(617): n is a, c, g, or t
  misc_feature (621)..(621): n is a, c, g, or t
  misc_feature (624)..(624): n is a, c, g, or t
  misc_feature (634)..(634): n is a, c, g, or t
  misc_feature (639)..(639): n is a, c, g, or t
  misc_feature (655)..(656): n is a, c, g, or t
  misc_feature (660)..(660): n is a, c, g, or t
  misc_feature (667)..(669): n is a, c, g, or t
  misc_feature (671)..(671): n is a, c, g, or t
  misc_feature (674)..(675): n is a, c, g, or t
  misc_feature (685)..(685): n is a, c, g, or t
  misc_feature (688)..(688): n is a, c, g, or t
  misc_feature (692)..(692): n is a, c, g, or t
  misc_feature (695)..(695): n is a, c, g, or t
  misc_feature (698)..(698): n is a, c, g, or t
  misc_feature (702)..(702): n is a, c, g, or t
  misc_feature (706)..(707): n is a, c, g, or t
  misc_feature (712)..(712): n is a, c, g, or t
  misc_feature (716)..(717): n is a, c, g, or t
  misc_feature (728)..(728): n is a, c, g, or t
  misc_feature (732)..(732): n is a, c, g, or t
  misc_feature (735)..(735): n is a, c, g, or t
  misc_feature (737)..(738): n is a, c, g, or t
  misc_feature (741)..(741): n is a, c, g, or t
  misc_feature (745)..(745): n is a, c, g, or t
  misc_feature (748)..(751): n is a, c, g, or t
  misc_feature (758)..(758): n is a, c, g, or t
  misc_feature (761)..(761): n is a, c, g, or t
  misc_feature (764)..(764): n is a, c, g, or t
  misc_feature (766)..(766): n is a, c, g, or t
  misc_feature (773)..(774): n is a, c, g, or t
  misc_feature (776)..(776): n is a, c, g, or t
  misc_feature (784)..(784): n is a, c, g, or t
  misc_feature (789)..(789): n is a, c, g, or t
  misc_feature (791)..(791): n is a, c, g, or t
  misc_feature (795)..(796): n is a, c, g, or t
  misc_feature (799)..(800): n is a, c, g, or t
  misc_feature (804)..(804): n is a, c, g, or t
  misc_feature (814)..(814): n is a, c, g, or t
  misc_feature (818)..(819): n is a, c, g, or t
  misc_feature (821)..(821): n is a, c, g, or t
  misc_feature (823)..(823): n is a, c, g, or t
  misc_feature (825)..(825): n is a, c, g, or t
  misc_feature (827)..(827): n is a, c, g, or t
  misc_feature (833)..(833): n is a, c, g, or t
  misc_feature (836)..(836): n is a, c, g, or t
  misc_feature (839)..(841): n is a, c, g, or t
  misc_feature (844)..(844): n is a, c, g, or t
  misc_feature (847)..(847): n is a, c, g, or t
  misc_feature (856)..(856): n is a, c, g, or t
  misc_feature (865)..(865): n is a, c, g, or t
  misc_feature (870)..(870): n is a, c, g, or t
  misc_feature (873)..(873): n is a, c, g, or t
  misc_feature (878)..(878): n is a, c, g, or t
  misc_feature (884)..(884): n is a, c, g, or t
  misc_feature (890)..(891): n is a, c, g, or t
  misc_feature (895)..(895): n is a, c, g, or t
  misc_feature (898)..(898): n is a, c, g, or t
  misc_feature (904)..(904): n is a, c, g, or t
  misc_feature (908)..(908): n is a, c, g, or t
  misc_feature (911)..(911): n is a, c, g, or t
  misc_feature (914)..(914): n is a, c, g, or t
  misc_feature (921)..(921): n is a, c, g, or t
  misc_feature (927)..(927): n is a, c, g, or t
  misc_feature (929)..(929): n is a, c, g, or t
  misc_feature (932)..(932): n is a, c, g, or t
  misc_feature (934)..(935): n is a, c, g, or t
  misc_feature (937)..(938): n is a, c, g, or t
  misc_feature (941)..(943): n is a, c, g, or t
  misc_feature (949)..(950): n is a, c, g, or t
  misc_feature (955)..(955): n is a, c, g, or t
  misc_feature (959)..(959): n is a, c, g, or t
  misc_feature (961)..(963): n is a, c, g, or t
  misc_feature (970)..(970): n is a, c, g, or t
  misc_feature (972)..(975): n is a, c, g, or t
  misc_feature (977)..(977): n is a, c, g, or t
  misc_feature (984)..(984): n is a, c, g, or t
  misc_feature (988)..(988): n is a, c, g, or t
  misc_feature (990)..(990): n is a, c, g, or t
  misc_feature (992)..(992): n is a, c, g, or t
  misc_feature (997)..(998): n is a, c, g, or t
  misc_feature (1000)..(1002): n is a, c, g, or t
  misc_feature (1005)..(1005): n is a, c, g, or t
  misc_feature (1007)..(1007): n is a, c, g, or t
  misc_feature (1010)..(1010): n is a, c, g, or t
  misc_feature (1016)..(1016): n is a, c, g, or t
  misc_feature (1018)..(1019): n is a, c, g, or t
  misc_feature (1025)..(1026): n is a, c, g, or t
  misc_feature (1028)..(1028): n is a, c, g, or t
  misc_feature (1039)..(1039): n is a, c, g, or t
  misc_feature (1043)..(1043): n is a, c, g, or t
  misc_feature (1047)..(1047): n is a, c, g, or t
  misc_feature (1049)..(1051): n is a, c, g, or t
  misc_feature (1053)..(1054): n is a, c, g, or t
  misc_feature (1061)..(1062): n is a, c, g, or t
  misc_feature (1065)..(1065): n is a, c, g, or t
  misc_feature (1070)..(1070): n is a, c, g, or t
  misc_feature (1076)..(1076): n is a, c, g, or t
  misc_feature (1082)..(1082): n is a, c, g, or t
  misc_feature (1088)..(1088): n is a, c, g, or t
  misc_feature (1094)..(1095): n is a, c, g, or t
  misc_feature (1099)..(1100): n is a, c, g, or t
  misc_feature (1102)..(1102): n is a, c, g, or t
  misc_feature (1106)..(1106): n is a, c, g, or t
  misc_feature (1109)..(1109): n is a, c, g, or t
  misc_feature (1117)..(1117): n is a, c, g, or t
  misc_feature (1125)..(1125): n is a, c, g, or t
  misc_feature (1127)..(1129): n is a, c, g, or t
  misc_feature (1132)..(1133): n is a, c, g, or t
  misc_feature (1137)..(1137): n is a, c, g, or t
  misc_feature (1140)..(1141): n is a, c, g, or t
  misc_feature (1146)..(1146): n is a, c, g, or t
  misc_feature (1151)..(1151): n is a, c, g, or t
  misc_feature (1160)..(1160): n is a, c, g, or t
  misc_feature (1168)..(1171): n is a, c, g, or t
  misc_feature (1179)..(1179): n is a, c, g, or t
  misc_feature (1181)..(1181): n is a, c, g, or t
  misc_feature (1183)..(1183): n is a, c, g, or t
  misc_feature (1186)..(1186): n is a, c, g, or t
  misc_feature (1190)..(1190): n is a, c, g, or t
  misc_feature (1192)..(1192): n is a, c, g, or t
acgagantggacanaattngcnaagngttgggctccnacctcntcatccacttaggtgaatnntntttngggtggcatntaaattcaatcnncccacccagngcngtgccggcantnatccnngntntnattngttctgttcaacanntgccnatgncgntagtctctganngtantnctncaaagaantgggtgacgnagatcntntatgcatnatgnnngatgcacttgcagagngncnnggngccnnnagnnngcncgggaacgaatantcactgntgacacnntcancnacancganngtncagnngtgntgnanangangctnntganccanngccaacttttgngtncatganttgncgcntggatgatgatgccnnaagctcatcnanggntcctgnnncaagatgnantctttcnnnttccnagtnntnatcgntnnctgnanccgncgnacctgngntaanaacatnntcnatgcncatcngcatnggnnttgggggctcntacntaaatnncctatnggtnnaatgaantcctnaaaaccatagaattnnaagncctcnccanantccnnnanatntgtcctcnacngttgtgnactcanacnnncngaanccncgggccactntgaantctcaagtcctccctnnaccnctcattnnntnagnntacattaacnacncaanatngcncccntaanntaaantaanngcaactaagtnctcnctncnngangccnctnnnncaattcnttncananccttaannantttcctcngaccngntttnntanncctncccgaatccnaaanncnantntngatttngancannncanaanaaattcctngcaagtttntggantantttcnttgaanaaactnngccnccntacttnccanggnccncaaccanatcttnanctnanncnntgnnncctgannacaanttcngnnntattcgncnnnntnataatanaaancntnggatnncnnnatncnggntccaangnncaaagnncntcccttaatcnttanagcncnnnanncgcctcnnatntctgnaaaaanccgcancttccnccctgnngcannantacnttnattatatntctctccngnnnatnnaatnacnntttgnctttnaaaatgggnacaaacannnnaactcgcngncnttnctcntnttatcatt

SEQ ID NO: 576 - DNA, 1375 bp, Homo Sapiens
  misc_feature (4)..(4): n is a, c, g, or t
  misc_feature (831)..(831): n is a, c, g, or t
  misc_feature (858)..(858): n is a, c, g, or t
  misc_feature (865)..(865): n is a, c, g, or t
  misc_feature (884)..(884): n is a, c, g, or t
  misc_feature (901)..(901): n is a, c, g, or t
  misc_feature (921)..(921): n is a, c, g, or t
  misc_feature (931)..(931): n is a, c, g, or t
  misc_feature (934)..(934): n is a, c, g, or t
  misc_feature (971)..(971): n is a, c, g, or t
  misc_feature (974)..(974): n is a, c, g, or t
  misc_feature (993)..(993): n is a, c, g, or t
  misc_feature (997)..(997): n is a, c, g, or t
  misc_feature (1002)..(1002): n is a, c, g, or t
  misc_feature (1004)..(1004): n is a, c, g, or t
  misc_feature (1017)..(1018): n is a, c, g, or t
  misc_feature (1020)..(1020): n is a, c, g, or t
  misc_feature (1027)..(1027): n is a, c, g, or t
  misc_feature (1035)..(1035): n is a, c, g, or t
  misc_feature (1044)..(1044): n is a, c, g, or t
  misc_feature (1047)..(1047): n is a, c, g, or t
  misc_feature (1061)..(1061): n is a, c, g, or t
  misc_feature (1063)..(1063): n is a, c, g, or t
  misc_feature (1070)..(1071): n is a, c, g, or t
  misc_feature (1084)..(1084): n is a, c, g, or t
  misc_feature (1097)..(1097): n is a, c, g, or t
  misc_feature (1105)..(1105): n is a, c, g, or t
  misc_feature (1114)..(1115): n is a, c, g, or t
  misc_feature (1117)..(1117): n is a, c, g, or t
  misc_feature (1123)..(1123): n is a, c, g, or t
  misc_feature (1128)..(1128): n is a, c, g, or t
  misc_feature (1133)..(1133): n is a, c, g, or t
  misc_feature (1135)..(1135): n is a, c, g, or t
  misc_feature (1138)..(1138): n is a, c, g, or t
  misc_feature (1157)..(1157): n is a, c, g, or t
  misc_feature (1159)..(1160): n is a, c, g, or t
  misc_feature (1178)..(1180): n is a, c, g, or t
  misc_feature (1183)..(1183): n is a, c, g, or t
  misc_feature (1185)..(1185): n is a, c, g, or t
  misc_feature (1198)..(1199): n is a, c, g, or t
  misc_feature (1208)..(1208): n is a, c, g, or t
  misc_feature (1218)..(1219): n is a, c, g, or t
  misc_feature (1228)..(1228): n is a, c, g, or t
  misc_feature (1234)..(1235): n is a, c, g, or t
  misc_feature (1256)..(1259): n is a, c, g, or t
  misc_feature (1264)..(1265): n is a, c, g, or t
  misc_feature (1270)..(1271): n is a, c, g, or t
  misc_feature (1278)..(1278): n is a, c, g, or t
  misc_feature (1303)..(1304): n is a, c, g, or t
  misc_feature (1312)..(1314): n is a, c, g, or t
  misc_feature (1318)..(1320): n is a, c, g, or t
  misc_feature (1322)..(1323): n is a, c, g, or t
  misc_feature (1325)..(1325): n is a, c, g, or t
  misc_feature (1327)..(1328): n is a, c, g, or t
  misc_feature (1330)..(1330): n is a, c, g, or t
  misc_feature (1332)..(1333): n is a, c, g, or t
  misc_feature (1337)..(1338): n is a, c, g, or t
  misc_feature (1340)..(1340): n is a, c, g, or t
  misc_feature (1344)..(1344): n is a, c, g, or t
  misc_feature (1346)..(1347): n is a, c, g, or t
  misc_feature (1353)..(1353): n is a, c, g, or t
  misc_feature (1357)..(1357): n is a, c, g, or t
  misc_feature (1361)..(1361): n is a, c, g, or t
  misc_feature (1370)..(1370): n is a, c, g, or t
  misc_feature (1375)..(1375): n is a, c, g, or t
ctantagagaaattactatgagaggatcgcatcaccatcaccatcacggatcctatttaggtgacactatagaatcgtcgacccacgcgtccggctacatcattctgtacaactaccgccatggtggccgccaggggcagataatctataactggcagggtgcccagtctacccaggatgaggtcgctgcatctgccatcctgactgctcagctggatgaggagctgggaggtacccctgtccagagccgtgtggtccaaggcaaggagcccgcccacctcatgagcctgtttggtgggaagcccatgatcatctacaagggcggcacctcccgcgagggcgggcagacagcccctgccagcacccgcctcttccaggtccgcgccaacagcgctggagccacccgggctgttgaggtattgcctaaggctggtgcactgaactccaacgatgcctttgttctgaaaaccccctcagccgcctacctgtgggtgggtacaggagccagcgaggcagagaagacgggggcccaggagctgctcagggtgctgcgggcccaacctgtgcaggtggcagaaggcagcgagccagatggcttctgggaggccctgggcgggaaggctgcctaccgcacatccccacggctgaaggacaagaagatggatgcccatcctcctcgcctctttgcctgctccaacaagattggacgttttgtgatcgaagaggttcctggtgagctcatgcaggaagacctggcaacggatgacgtcatgcttctggacacctgggaccaggtctttgtctgggttggaaaggattctcaagaagaanaaagacagaagccttgacttctgctangcggtanatcgagacggacccagccnaatcgggatcggcggancccccatcaccgtggtgaancaaggctttnaancctccctcctttgtgggcctggttccttggctgggangangaattactggtcttgggancccnttggnanagggccatggctnnanctggctntccttgangaggggcanggncccacccatgtcancnggtcaanngcctttttgaaantgttcctttcccncaaaaagnccttaaaannanaaaaanaactntgccnanaanggggggggggggggggggntnntttcttttttttttttannntancnaaaaaaaaccctnnaaaaatttnaaaacctttnnaaattttcnaaaagnncgggtttgggaaaaaaattcnnnnaaaannttttnnaggggtnaaaaaaaaaaaaaaaaaaaaggggnncccccccnnngggnnnannantnnantnngaanngncccntnnaaaccnaaancccnaaaccctgnttttn

SEQ ID NO: 577 - DNA, 1429 bp, Homo Sapiens
  misc_feature (715)..(715): n is a, c, g, or t
  misc_feature (794)..(794): n is a, c, g, or t
  misc_feature (882)..(882): n is a, c, g, or t
  misc_feature (893)..(893): n is a, c, g, or t
  misc_feature (904)..(904): n is a, c, g, or t
  misc_feature (911)..(911): n is a, c, g, or t
  misc_feature (923)..(923): n is a, c, g, or t
  misc_feature (987)..(987): n is a, c, g, or t
  misc_feature (998)..(998): n is a, c, g, or t
  misc_feature (1004)..(1004): n is a, c, g, or t
  misc_feature (1026)..(1026): n is a, c, g, or t
  misc_feature (1034)..(1034): n is a, c, g, or t
  misc_feature (1036)..(1036): n is a, c, g, or t
  misc_feature (1039)..(1039): n is a, c, g, or t
  misc_feature (1041)..(1041): n is a, c, g, or t
  misc_feature (1051)..(1051): n is a, c, g, or t
  misc_feature (1069)..(1069): n is a, c, g, or t
  misc_feature (1072)..(1072): n is a, c, g, or t
  misc_feature (1074)..(1074): n is a, c, g, or t
  misc_feature (1079)..(1079): n is a, c, g, or t
  misc_feature (1083)..(1083): n is a, c, g, or t
  misc_feature (1088)..(1088): n is a, c, g, or t
  misc_feature (1096)..(1096): n is a, c, g, or t
  misc_feature (1100)..(1101): n is a, c, g, or t
  misc_feature (1106)..(1106): n is a, c, g, or t
  misc_feature (1108)..(1108): n is a, c, g, or t
  misc_feature (1112)..(1112): n is a, c, g, or t
  misc_feature (1116)..(1116): n is a, c, g, or t
  misc_feature (1125)..(1125): n is a, c, g, or t
  misc_feature (1131)..(1131): n is a, c, g, or t
  misc_feature (1153)..(1153): n is a, c, g, or t
  misc_feature (1158)..(1158): n is a, c, g, or t
  misc_feature (1164)..(1165): n is a, c, g, or t
  misc_feature (1172)..(1172): n is a, c, g, or t
  misc_feature (1195)..(1196): n is a, c, g, or t
  misc_feature (1206)..(1206): n is a, c, g, or t
  misc_feature (1213)..(1213): n is a, c, g, or t
  misc_feature (1223)..(1225): n is a, c, g, or t
  misc_feature (1230)..(1230): n is a, c, g, or t
  misc_feature (1239)..(1240): n is a, c, g, or t
  misc_feature (1243)..(1243): n is a, c, g, or t
  misc_feature (1256)..(1256): n is a, c, g, or t
  misc_feature (1265)..(1265): n is a, c, g, or t
  misc_feature (1271)..(1271): n is a, c, g, or t
  misc_feature (1273)..(1276): n is a, c, g, or t
  misc_feature (1278)..(1278): n is a, c, g, or t
  misc_feature (1284)..(1284): n is a, c, g, or t
  misc_feature (1292)..(1292): n is a, c, g, or t
  misc_feature (1297)..(1297): n is a, c, g, or t
  misc_feature (1311)..(1311): n is a, c, g, or t
  misc_feature (1317)..(1318): n is a, c, g, or t
  misc_feature (1323)..(1323): n is a, c, g, or t
  misc_feature (1325)..(1325): n is a, c, g, or t
  misc_feature (1331)..(1331): n is a, c, g, or t
  misc_feature (1333)..(1333): n is a, c, g, or t
  misc_feature (1347)..(1347): n is a, c, g, or t
  misc_feature (1350)..(1350): n is a, c, g, or t
  misc_feature (1352)..(1352): n is a, c, g, or t
  misc_feature (1355)..(1355): n is a, c, g, or t
  misc_feature (1357)..(1357): n is a, c, g, or t
  misc_feature (1360)..(1362): n is a, c, g, or t
  misc_feature (1366)..(1366): n is a, c, g, or t
  misc_feature (1370)..(1370): n is a, c, g, or t
  misc_feature (1373)..(1373): n is a, c, g, or t
  misc_feature (1387)..(1387): n is a, c, g, or t
  misc_feature (1394)..(1394): n is a, c, g, or t
  misc_feature (1397)..(1397): n is a, c, g, or t
  misc_feature (1407)..(1407): n is a, c, g, or t
  misc_feature (1412)..(1413): n is a, c, g, or t
  misc_feature (1418)..(1418): n is a, c, g, or t
  misc_feature (1422)..(1422): n is a, c, g, or t
  misc_feature (1424)..(1424): n is a, c, g, or t
aatagagaaattaactatgagaggatcgcatcaccatcaccatcacggatcctatttaggtgacactatagaatcgtcgacccacgcgtccgcccacgcgtccgttggcgaggagacaaagtcttgctgtgttgcccaggctgatcttgaactcctggcctcaagcgatcctcccaccttggcctcccaaagtgttgagattacaggcatgagccactgcgcccagcccagcacatgattcttgagccagcagctgtaaataagagcaccttcccagtttgataagcacttgttcctaccaactgtttttccctcaaccctcatcgtgatcatttatttatgcaagtgtttttcagcttgagtgtgcgtcagaatcccctgaagagcttgttaaaacacaaggtgctggccccatccagaattgctgattcggggcagccattttggggggtgctgatggatacctgcggggtcggctatgttgccctgggggaggccggccccgtggggaacatgactgtggtagactctcctggacaagaggtgctaaatcagcttgatgtcaagacctcttcagaaatgaccagtgcagaggcttccgtagagatgtcattacctacccctttgcctggatttgaggattctcctgatcagaggaggctccctccagagcaggaaagcctctccagactggaacagccagatctttcttcanagatgtcaaaggtctcaaagcctagggcctcaaagcctggccggaagagaggtggtaggacacgaaaaggccccaaaangccccaacagcctaatcctccatcagccccactggttcctggtctcttaaatcaatccaaccctctgtccaaccccccatgcctaaanaaacgaggtcnaaagtcccaangcaaaanctgctgctgctnaagttgtcaaaaaacctaaatcggccaaaatctcaatctccaaagaagccccctgaagaatttnaaaaccccttntggggnaacaaccccccccaaagggctncccaagtngnacntnctgtatcttnaagaactggctgaaaaanctntnaaaancccngcctncccctggnttcnngttcngnaggncccnaggtgaacncccccncaaaaccaaaaaaaatccggcnccaanaccttnnccaaggngaaaaaaaaagaaaggggccccnnggaaaaaaantttttcnccagttaagnnnaaaantggaaaaannganggcccaagaaaancctttaaanccgaangnnnngncccaanccccccanaattnttttggaaaaaaancccctnncaaananggcccngngtaaaaaaaaatanggncnggngnaannncccncccnaanttcaaaaaaaaatntggggtntgnagacctttcnaaganncttanaatntnccccc

SEQ ID NO: 578 - DNA, 1412 bp, Homo Sapiens
  misc_feature (831)..(831): n is a, c, g, or t
  misc_feature (836)..(836): n is a, c, g, or t
  misc_feature (854)..(854): n is a, c, g, or t
  misc_feature (872)..(872): n is a, c, g, or t
  misc_feature (902)..(902): n is a, c, g, or t
  misc_feature (934)..(934): n is a, c, g, or t
  misc_feature (949)..(949): n is a, c, g, or t
  misc_feature (952)..(952): n is a, c, g, or t
  misc_feature (954)..(954): n is a, c, g, or t
  misc_feature (983)..(983): n is a, c, g, or t
  misc_feature (985)..(985): n is a, c, g, or t
  misc_feature (990)..(990): n is a, c, g, or t
  misc_feature (993)..(993): n is a, c, g, or t
  misc_feature (1001)..(1001): n is a, c, g, or t
  misc_feature (1003)..(1003): n is a, c, g, or t
  misc_feature (1019)..(1019): n is a, c, g, or t
  misc_feature (1022)..(1023): n is a, c, g, or t
  misc_feature (1029)..(1030): n is a, c, g, or t
  misc_feature (1035)..(1035): n is a, c, g, or t
  misc_feature (1038)..(1038): n is a, c, g, or t
  misc_feature (1044)..(1044): n is a, c, g, or t
  misc_feature (1049)..(1049): n is a, c, g, or t
  misc_feature (1061)..(1061): n is a, c, g, or t
  misc_feature (1063)..(1063): n is a, c, g, or t
  misc_feature (1089)..(1089): n is a, c, g, or t
  misc_feature (1095)..(1095): n is a, c, g, or t
  misc_feature (1099)..(1099): n is a, c, g, or t
  misc_feature (1121)..(1121): n is a, c, g, or t
  misc_feature (1127)..(1127): n is a, c, g, or t
  misc_feature (1129)..(1129): n is a, c, g, or t
  misc_feature (1131)..(1131): n is a, c, g, or t
  misc_feature (1141)..(1141): n is a, c, g, or t
  misc_feature (1143)..(1143): n is a, c, g, or t
  misc_feature (1145)..(1145): n is a, c, g, or t
  misc_feature (1147)..(1147): n is a, c, g, or t
  misc_feature (1151)..(1153): n is a, c, g, or t
  misc_feature (1162)..(1162): n is a, c, g, or t
  misc_feature (1164)..(1164): n is a, c, g, or t
  misc_feature (1170)..(1170): n is a, c, g, or t
  misc_feature (1177)..(1177): n is a, c, g, or t
  misc_feature (1182)..(1182): n is a, c, g, or t
  misc_feature (1184)..(1184): n is a, c, g, or t
  misc_feature (1187)..(1187): n is a, c, g, or t
  misc_feature (1210)..(1211): n is a, c, g, or t
  misc_feature (1221)..(1221): n is a, c, g, or t
  misc_feature (1223)..(1223): n is a, c, g, or t
  misc_feature (1253)..(1253): n is a, c, g, or t
  misc_feature (1255)..(1255): n is a, c, g, or t
  misc_feature (1266)..(1266): n is a, c, g, or t
  misc_feature (1275)..(1275): n is a, c, g, or t
  misc_feature (1277)..(1278): n is a, c, g, or t
  misc_feature (1280)..(1280): n is a, c, g, or t
  misc_feature (1282)..(1282): n is a, c, g, or t
  misc_feature (1284)..(1284): n is a, c, g, or t
  misc_feature (1287)..(1287): n is a, c, g, or t
  misc_feature (1290)..(1290): n is a, c, g, or t
  misc_feature (1306)..(1307): n is a, c, g, or t
  misc_feature (1311)..(1311): n is a, c, g, or t
  misc_feature (1319)..(1319): n is a, c, g, or t
  misc_feature (1323)..(1323): n is a, c, g, or t
  misc_feature (1336)..(1336): n is a, c, g, or t
  misc_feature (1338)..(1338): n is a, c, g, or t
  misc_feature (1348)..(1348): n is a, c, g, or t
  misc_feature (1367)..(1367): n is a, c, g, or t
  misc_feature (1374)..(1374): n is a, c, g, or t
  misc_feature (1380)..(1384): n is a, c, g, or t
  misc_feature (1386)..(1387): n is a, c, g, or t
  misc_feature (1389)..(1389): n is a, c, g, or t
  misc_feature (1391)..(1391): n is a, c, g, or t
  misc_feature (1401)..(1401): n is a, c, g, or t
  misc_feature (1412)..(1412): n is a, c, g, or t
tagagaaattactatgagaggatcgcatcaccatcaccatcacggatcctatttaggtgacactatagaatcgtcgacccacgcgtccggcccggcccgggtcatggtggtgggccgagggctgctcggccgccgcagcctcgccgcgctgggagccgcctgcgcccgccgaggcctcggtccagccctgctgggagttttctgccacacagatttgcggaagaacctgaccgtggacgagggcaccatgaaggtagaggtgctgcctgccctgaccgacaactacatgtacctggtcattgatgatgagaccaaggaggctgccattgtggatccggtgcagccccagaaggtcgtggacgcggcgagaaagcacggggtgaaactgaccacagtgctcaccacccaccaccactgggaccatgctggcgggaatgagaaactggtcaagctggagtcgggactgaaggtgtacgggggtgacgaccgtatcggggccctgactcacaagatcactcacctgtccacactgcaggtggggtctctgaacgtcaagtgcctggcgaccccgtgccacacttcaggacacatttgttacttcgtgagcaagcccggaggctcggagccccctgccgtgttcacaggtgacaccttgtttgtggctggctgcgggaagttctatgaagggactgcggatgagatgtgtaaagctctgctggaggtcttgggccggctccccccggacacaagagtctactgtggccacgagtacaccatcaacaaacctcaagtttgcacgccacgtggagcccggcaatgccgccatccggnagaanctggcctgggccaagaanaaatacagcatcggggancccacagtgccatccaccctggcaaaagantttacctacaacccctttcttgaaaatgaggnaaaaaaacggtgcancancncccaggtgaaaacggaacccggtgaacancnttgcnggnccgttgcncnagggaaaaagaaccanttnnaaaatnnccccnggnaatgangcccnccctgcaccttnancggaatttggggaattaagctctttnaggaantggnttttctggctggcccggggggnaaattnancnttgatttaancntnantttnnnccccttggntntgtttntcggacnttttngnctntttttaaaaaaaattttaaaaanntttttttccntnaaaaaaaaaaaaaaaaaaaaaaggggcccncncccttaagggnccaaaaacntnntnangnacntgnaccccttttaaaaacnnaaancccaaacncccngtttttttaaacntntttcccgggnttttttttgaaaacccccnttttggntttttnnnnnannanangaaaaacttnttaaccccttn

SEQ ID NO: 579 - DNA, 1385 bp, Homo Sapiens
  misc_feature (901)..(901): n is a, c, g, or t
  misc_feature (942)..(942): n is a, c, g, or t
  misc_feature (965)..(965): n is a, c, g, or t
  misc_feature (978)..(978): n is a, c, g, or t
  misc_feature (982)..(982): n is a, c, g, or t
  misc_feature (1003)..(1003): n is a, c, g, or t
  misc_feature (1016)..(1016): n is a, c, g, or t
  misc_feature (1018)..(1018): n is a, c, g, or t
  misc_feature (1026)..(1026): n is a, c, g, or t
  misc_feature (1032)..(1032): n is a, c, g, or t
  misc_feature (1038)..(1038): n is a, c, g, or t
  misc_feature (1060)..(1060): n is a, c, g, or t
  misc_feature (1072)..(1072): n is a, c, g, or t
  misc_feature (1079)..(1079): n is a, c, g, or t
  misc_feature (1083)..(1084): n is a, c, g, or t
  misc_feature (1086)..(1086): n is a, c, g, or t
  misc_feature (1093)..(1095): n is a, c, g, or t
  misc_feature (1105)..(1105): n is a, c, g, or t
  misc_feature (1108)..(1109): n is a, c, g, or t
  misc_feature (1111)..(1111): n is a, c, g, or t
  misc_feature (1117)..(1117): n is a, c, g, or t
  misc_feature (1121)..(1121): n is a, c, g, or t
  misc_feature (1132)..(1132): n is a, c, g, or t
  misc_feature (1140)..(1141): n is a, c, g, or t
  misc_feature (1152)..(1152): n is a, c, g, or t
  misc_feature (1155)..(1155): n is a, c, g, or t
  misc_feature (1161)..(1161): n is a, c, g, or t
  misc_feature (1172)..(1172): n is a, c, g, or t
  misc_feature (1177)..(1177): n is a, c, g, or t
  misc_feature (1183)..(1183): n is a, c, g, or t
  misc_feature (1185)..(1185): n is a, c, g, or t
  misc_feature (1194)..(1194): n is a, c, g, or t
  misc_feature (1198)..(1198): n is a, c, g, or t
  misc_feature (1204)..(1204): n is a, c, g, or t
  misc_feature (1210)..(1210): n is a, c, g, or t
  misc_feature (1215)..(1215): n is a, c, g, or t
  misc_feature (1227)..(1228): n is a, c, g, or t
  misc_feature (1230)..(1231): n is a, c, g, or t
  misc_feature (1234)..(1234): n is a, c, g, or t
  misc_feature (1237)..(1237): n is a, c, g, or t
  misc_feature (1245)..(1245): n is a, c, g, or t
  misc_feature (1248)..(1249): n is a, c, g, or t
  misc_feature (1253)..(1254): n is a, c, g, or t
  misc_feature (1258)..(1258): n is a, c, g, or t
  misc_feature (1266)..(1266): n is a, c, g, or t
  misc_feature (1270)..(1272): n is a, c, g, or t
  misc_feature (1278)..(1278): n is a, c, g, or t
  misc_feature (1295)..(1295): n is a, c, g, or t
  misc_feature (1313)..(1313): n is a, c, g, or t
  misc_feature (1316)..(1317): n is a, c, g, or t
  misc_feature (1321)..(1321): n is a, c, g, or t
  misc_feature (1323)..(1324): n is a, c, g, or t
  misc_feature (1326)..(1327): n is a, c, g, or t
  misc_feature (1331)..(1332): n is a, c, g, or t
  misc_feature (1334)..(1334): n is a, c, g, or t
  misc_feature (1341)..(1341): n is a, c, g, or t
  misc_feature (1343)..(1343): n is a, c, g, or t
  misc_feature (1345)..(1345): n is a, c, g, or t
  misc_feature (1356)..(1360): n is a, c, g, or t
  misc_feature (1369)..(1369): n is a, c, g, or t
  misc_feature (1374)..(1374): n is a, c, g, or t
  misc_feature (1381)..(1381): n is a, c, g, or t
  misc_feature (1383)..(1385): n is a, c, g, or t
gagaaattactatgagaggatcgcatcaccatcaccatcacggatcctatttaggtgacactatagaatcgtcgacccacgcgtccgaacaggtttacaaaaaagtggaagaaaaagtgcgaaagcagactaaaggcctttatcctgcacctctgaaaataattgatgtggtaaagactggaattgagcaagggagtgatgccggttatctctgtgaatctcagaaatttggagagcttgtaatgaccaaagaatcaaaggccttgatgggactctaccatggtcaggtcctgtgcaagaagaataaatttggagctccacagaaggatgttaagcatctggctattcttggtgcagggctgatgggagcaggcatcgcccaagtctccgtggataaggggctaaagactatacttaaagatgccaccctcactgcgctagaccgaggacagcaacaagtgttcaaaggattgaatgacaaagtgaagaagaaagctctaacatcatttgaaagggattccatcttcagcaacttgactgggcagcttgattaccaaggttttgaaaaggccgacatggtgattgaagctgtgtttgaggaccttagtcttaagcacagagtgctaaaggaagtagaagcggtgattccagatcactgtatctttgccagtaacacatctgctctcccaatcagtgaaatcgctgctgtcagcaaaagacctgagaaggtgattggcatgcactacttctctcccgtggacaagatgcagctgctggagattatcacgaccgagaaaacttccaaagacaccagtgcttcagctgtagcagttggtctcaagcaggggaaggtcatcattgtggttaaggatggacctggcttctatactaccaggtgtcnttgcgcccatgatgtctgaagttcatcccgaatcctccagnaaaggagttgaacccgaaaaaanctggattccctgnaccncaagcttttggctttccctgnggggtgccccccncnctggtggnatgaanttgggntggaatgtaacccaaaacatgngggcggaaaatntggggcnaaanncnttggggnnncggtttgggnagnngnaacccnaaanctgctgaaccnaaaggggnnccaagggcctnccnaggccntaaatcctggnaaggncttttncntcctttccnggangggggnaaaaanaaagnatttaaattccnnannggnaanaaattttnccnngccnnaacncccccccnaatnnnaaaccncccaaaaaaaaaccccnttccccccggggaaaaanttnnaaananncnncctnncnccaaaangnantttgccccccnnnnnagaaaaccnacccntttggtntnnn

SEQ ID NO: 580 - DNA, 1381 bp, Homo Sapiens
  misc_feature (752)..(753): n is a, c, g, or t
  misc_feature (756)..(775): n is a, c, g, or t
  misc_feature (778)..(789): n is a, c, g, or t
  misc_feature (791)..(796): n is a, c, g, or t
  misc_feature (820)..(820): n is a, c, g, or t
  misc_feature (822)..(823): n is a, c, g, or t
  misc_feature (830)..(832): n is a, c, g, or t
  misc_feature (835)..(835): n is a, c, g, or t
  misc_feature (838)..(838): n is a, c, g, or t
  misc_feature (849)..(849): n is a, c, g, or t
  misc_feature (859)..(859): n is a, c, g, or t
  misc_feature (872)..(872): n is a, c, g, or t
  misc_feature (880)..(881): n is a, c, g, or t
  misc_feature (888)..(888): n is a, c, g, or t
  misc_feature (891)..(891): n is a, c, g, or t
  misc_feature (893)..(893): n is a, c, g, or t
  misc_feature (899)..(900): n is a, c, g, or t
  misc_feature (903)..(903): n is a, c, g, or t
  misc_feature (925)..(925): n is a, c, g, or t
  misc_feature (937)..(937): n is a, c, g, or t
  misc_feature (943)..(943): n is a, c, g, or t
  misc_feature (954)..(954): n is a, c, g, or t
  misc_feature (956)..(956): n is a, c, g, or t
  misc_feature (958)..(958): n is a, c, g, or t
  misc_feature (964)..(965): n is a, c, g, or t
  misc_feature (971)..(971): n is a, c, g, or t
  misc_feature (982)..(984): n is a, c, g, or t
  misc_feature (1040)..(1041): n is a, c, g, or t
  misc_feature (1045)..(1045): n is a, c, g, or t
  misc_feature (1049)..(1049): n is a, c, g, or t
  misc_feature (1056)..(1056): n is a, c, g, or t
  misc_feature (1067)..(1067): n is a, c, g, or t
  misc_feature (1069)..(1069): n is a, c, g, or t
  misc_feature (1091)..(1092): n is a, c, g, or t
  misc_feature (1097)..(1097): n is a, c, g, or t
  misc_feature (1099)..(1099): n is a, c, g, or t
  misc_feature (1110)..(1110): n is a, c, g, or t
  misc_feature (1114)..(1114): n is a, c, g, or t
  misc_feature (1120)..(1120): n is a, c, g, or t
  misc_feature (1124)..(1124): n is a, c, g, or t
  misc_feature (1127)..(1127): n is a, c, g, or t
  misc_feature (1131)..(1131): n is a, c, g, or t
  misc_feature (1133)..(1133): n is a, c, g, or t
  misc_feature (1136)..(1136): n is a, c, g, or t
  misc_feature (1140)..(1140): n is a, c, g, or t
  misc_feature (1143)..(1143): n is a, c, g, or t
  misc_feature (1148)..(1148): n is a, c, g, or t
  misc_feature (1151)..(1151): n is a, c, g, or t
  misc_feature (1163)..(1163): n is a, c, g, or t
  misc_feature (1174)..(1174): n is a, c, g, or t
  misc_feature (1176)..(1176): n is a, c, g, or t
  misc_feature (1180)..(1180): n is a, c, g, or t
  misc_feature (1183)..(1183): n is a, c, g, or t
  misc_feature (1188)..(1188): n is a, c, g, or t
  misc_feature (1191)..(1191): n is a, c, g, or t
  misc_feature (1195)..(1195): n is a, c, g, or t
  misc_feature (1198)..(1198): n is a, c, g, or t
  misc_feature (1201)..(1201): n is a, c, g, or t
  misc_feature (1204)..(1204): n is a, c, g, or t
  misc_feature (1206)..(1207): n is a, c, g, or t
  misc_feature (1211)..(1211): n is a, c, g, or t
  misc_feature (1222)..(1222): n is a, c, g, or t
  misc_feature (1227)..(1227): n is a, c, g, or t
  misc_feature (1231)..(1231): n is a, c, g, or t
  misc_feature (1237)..(1237): n is a, c, g, or t
  misc_feature (1239)..(1239): n is a, c, g, or t
  misc_feature (1253)..(1253): n is a, c, g, or t
  misc_feature (1256)..(1256): n is a, c, g, or t
  misc_feature (1260)..(1260): n is a, c, g, or t
  misc_feature (1273)..(1273): n is a, c, g, or t
  misc_feature (1277)..(1277): n is a, c, g, or t
  misc_feature (1282)..(1282): n is a, c, g, or t
  misc_feature (1284)..(1284): n is a, c, g, or t
  misc_feature (1296)..(1297): n is a, c, g, or t
  misc_feature (1319)..(1319): n is a, c, g, or t
  misc_feature (1321)..(1321): n is a, c, g, or t
  misc_feature (1325)..(1326): n is a, c, g, or t
  misc_feature (1331)..(1331): n is a, c, g, or t
  misc_feature (1340)..(1340): n is a, c, g, or t
  misc_feature (1342)..(1343): n is a, c, g, or t
  misc_feature (1348)..(1348): n is a, c, g, or t
  misc_feature (1353)..(1353): n is a, c, g, or t
  misc_feature (1358)..(1358): n is a, c, g, or t
  misc_feature (1362)..(1362): n is a, c, g, or t
  misc_feature (1367)..(1368): n is a, c, g, or t
  misc_feature (1371)..(1371): n is a, c, g, or t
agaaattactatgagaggatcgcatcaccatcaccatcacggatcctatttaggtgacactatagaatcgtcgacccacgcgtccgaggacacggagctcgtggagaccaggcctgcaggggatggaaccttccagaagtgggcggctgtggtggtgccttctggacaggagcagagatacacctgccatgtgcagcatgagggtttgcccaagcccctcaccctgagatgggagccgtcttcccagcccaccatccccatcgtgggcatcattgctggcctggttctctttggagctgtgatcactggagctgtggtcgctgctgtgatgtggaggaggaagagctcagatagaaaaggagggagctactctcaggctgcaagcagtgacagtgcccagggctctgatgtgtctctcacagcttgtaaagtgtgagacagctgccttgtgtgggactgagaggcaagagttgttcctgcccttccctttgtgacttgaagaaccctgactttgtttctgcaaaggcacctgcatgtgtctgtgttcgtgtaggcataatgtgaggaggtggggagaccaccccacccccatgtccaccatgaccctcttcccacgctgacctgtgctccctccccaatcatctttcctgttccagagaggtggggctgaggtgtctccatctctgtctcaacttcatggtgcactgagctgtaacttcttccttccctattaaaattagaacctgaaaaannaannnnnnnnnnnnnnnnnnnnaannnnnnnnnnnnannnnnnaaaaagggcggccccctcccctanannggagtcnnnatnaancttaattaacntgaaccttgnactcctgttgaanaaaatccnntaatganccncnaaaacnnccnttctggaatttttttcaaaaanctcggttgcccnccgggngtttttttttngngngaaaannccaaancttaccttggnnnaaatttttccgggagcttaaggaaccttaaaatggaaaaaaaaaattcctgggaannaccncccnttgaaanatcccaatggncntcctaaaaaaaaattttgaggnnttttnanccatttgcccnaagnacctanaccnaanccgntnccntggnaanttaanccntttttaaaaacngaaaaaaaaanancccnaantttanccnggcnttnttnaantnnttgncccccgaaaangcccntccnaaattncnatgaaaaaaaaaanggnaacngggaaaggaaaangttnccccntntaaccctttttnnaaaaaaaaaaaattttttcccntngaannaaacnaaaaatttncnnttttnaaaanttccnaaanggggnntangaaaaacccc

SEQ ID NO: 581 - DNA, 1200 bp, Homo Sapiens
  misc_feature (849)..(849): n is a, c, g, or t
  misc_feature (908)..(908): n is a, c, g, or t
  misc_feature (966)..(966): n is a, c, g, or t
  misc_feature (969)..(969): n is a, c, g, or t
  misc_feature (976)..(976): n is a, c, g, or t
  misc_feature (982)..(982): n is a, c, g, or t
  misc_feature (991)..(991): n is a, c, g, or t
  misc_feature (996)..(996): n is a, c, g, or t
  misc_feature (1004)..(1004): n is a, c, g, or t
  misc_feature (1007)..(1007): n is a, c, g, or t
  misc_feature (1022)..(1022): n is a, c, g, or t
  misc_feature (1025)..(1025): n is a, c, g, or t
  misc_feature (1030)..(1030): n is a, c, g, or t
  misc_feature (1032)..(1032): n is a, c, g, or t
  misc_feature (1037)..(1037): n is a, c, g, or t
  misc_feature (1040)..(1040): n is a, c, g, or t
  misc_feature (1043)..(1043): n is a, c, g, or t
  misc_feature (1047)..(1047): n is a, c, g, or t
  misc_feature (1052)..(1052): n is a, c, g, or t
  misc_feature (1059)..(1059): n is a, c, g, or t
  misc_feature (1065)..(1065): n is a, c, g, or t
  misc_feature (1071)..(1071): n is a, c, g, or t
  misc_feature (1079)..(1079): n is a, c, g, or t
  misc_feature (1098)..(1098): n is a, c, g, or t
  misc_feature (1102)..(1103): n is a, c, g, or t
  misc_feature (1106)..(1106): n is a, c, g, or t
  misc_feature (1108)..(1109): n is a, c, g, or t
  misc_feature (1114)..(1114): n is a, c, g, or t
  misc_feature (1121)..(1121): n is a, c, g, or t
  misc_feature (1123)..(1123): n is a, c, g, or t
  misc_feature (1127)..(1127): n is a, c, g, or t
  misc_feature (1129)..(1130): n is a, c, g, or t
  misc_feature (1134)..(1136): n is a, c, g, or t
  misc_feature (1139)..(1139): n is a, c, g, or t
  misc_feature (1143)..(1143): n is a, c, g, or t
  misc_feature (1148)..(1148): n is a, c, g, or t
  misc_feature (1156)..(1156): n is a, c, g, or t
  misc_feature (1160)..(1160): n is a, c, g, or t
  misc_feature (1163)..(1163): n is a, c, g, or t
  misc_feature (1167)..(1167): n is a, c, g, or t
  misc_feature (1173)..(1175): n is a, c, g, or t
  misc_feature (1177)..(1177): n is a, c, g, or t
  misc_feature (1181)..(1182): n is a, c, g, or t
  misc_feature (1186)..(1187): n is a, c, g, or t
  misc_feature (1191)..(1192): n is a, c, g, or t
  misc_feature (1196)..(1196): n is a, c, g, or t
gagaaattactatgagaggatcgcatcaccatcaccatcacggatcctatttaggtgacactatagaatcgtcgacccacgcgtccgtccagcctctgatgaagcaggagagaaagaagccaagtctgattaataaccatataccatgtcttatcagtggtccctgtctcccttcttgtacaatccagaggaatatttttatcaactattttgtaaatgcaagttttttagtagctctagaaacatttttaagaaggagggaatcccacctcatcccattttttaagtgtaaatgcttttttttaagaggtgaaatcatttgctggttgtttattttttggtacaaccagaaaatagtgtgggatattgaattatgggaggctctgactgtctcgggtgtcagcttaacattccacagatggggggttagtttttatatcctataatacaaagcatattaaatggcaatatggagtcagtcctgcatttaatgtcttgaacattttaaattacttctattaccatgttgttttttagtagaattgtttcctaaagaaaaccactctttgatcatggctctctctgccagaattgtgtgcactctgtaacatctttggttgtggtagtcctgttttcctaataactttgttactgtgctgtgaaagattacagatttgaacatgtagtgtacgtgctattgagttgtgaactggtgggccgtatgtaacagctgaccaacgtgaagatactggtacttgatagcctcttaaggaaaatttgcttccaaattttaagctggaaagtcactggaataactttaaaaaagaattacaatacatggctttttanaatttcgttacgtatgttaagatttgtgtacaaattgaaatgtctgtactgatcctcanccaataaaatctcagttatgaaaataaaaaaaaaaaaaaaagggcggccgctccctanagngagtcgnattaancttaattanctgancttggacnccngtggaaaaatccagnaangaccncnaaacnccntcngganttgtncaaaacncccggntgcccnccgggcgnttttttattgggggaaaancccnnccnanntgggnaaatttncnggancnnaggnnnccnaaanggggnaaaaaaancccnggnaaancccccnnngnaaanncccnngggnncccnaaaa

SEQ ID NO: 582 - DNA, 1300 bp, Homo Sapiens
  misc_feature (1)..(1): n is a, c, g, or t
  misc_feature (887)..(887): n is a, c, g, or t
  misc_feature (954)..(954): n is a, c, g, or t
  misc_feature (959)..(959): n is a, c, g, or t
  misc_feature (964)..(964): n is a, c, g, or t
  misc_feature (973)..(973): n is a, c, g, or t
  misc_feature (981)..(981): n is a, c, g, or t
  misc_feature (985)..(985): n is a, c, g, or t
  misc_feature (995)..(995): n is a, c, g, or t
  misc_feature (999)..(999): n is a, c, g, or t
  misc_feature (1025)..(1025): n is a, c, g, or t
  misc_feature (1028)..(1028): n is a, c, g, or t
  misc_feature (1037)..(1037): n is a, c, g, or t
  misc_feature (1040)..(1040): n is a, c, g, or t
  misc_feature (1060)..(1060): n is a, c, g, or t
  misc_feature (1062)..(1062): n is a, c, g, or t
  misc_feature (1069)..(1069): n is a, c, g, or t
  misc_feature (1072)..(1072): n is a, c, g, or t
  misc_feature (1083)..(1083): n is a, c, g, or t
  misc_feature (1091)..(1091): n is a, c, g, or t
  misc_feature (1101)..(1101): n is a, c, g, or t
  misc_feature (1110)..(1110): n is a, c, g, or t
  misc_feature (1115)..(1115): n is a, c, g, or t
  misc_feature (1119)..(1119): n is a, c, g, or t
  misc_feature (1123)..(1124): n is a, c, g, or t
  misc_feature (1136)..(1136): n is a, c, g, or t
  misc_feature (1151)..(1152): n is a, c, g, or t
  misc_feature (1160)..(1160): n is a, c, g, or t
  misc_feature (1168)..(1168): n is a, c, g, or t
  misc_feature (1175)..(1175): n is a, c, g, or t
  misc_feature (1178)..(1178): n is a, c, g, or t
  misc_feature (1181)..(1181): n is a, c, g, or t
  misc_feature (1198)..(1200): n is a, c, g, or t
  misc_feature (1212)..(1212): n is a, c, g, or t
  misc_feature (1215)..(1215): n is a, c, g, or t
  misc_feature (1217)..(1217): n is a, c, g, or t
  misc_feature (1247)..(1247): n is a, c, g, or t
  misc_feature (1256)..(1256): n is a, c, g, or t
  misc_feature (1260)..(1261): n is a, c, g, or t
  misc_feature (1277)..(1277): n is a, c, g, or t
  misc_feature (1281)..(1281): n is a, c, g, or t
  misc_feature (1283)..(1285): n is a, c, g, or t
  misc_feature (1287)..(1288): n is a, c, g, or t
  misc_feature (1292)..(1292): n is a, c, g, or t
  misc_feature (1295)..(1296): n is a, c, g, or t
  misc_feature (1300)..(1300): n is a, c, g, or t
nttagagaaattactatgagaggatcgcatcaccatcaccatcacggatcctatttaggtgacactatagaatcgtcgacccacgcgtccggccgaagaagcatcgttaaagtctctcttcaccctgccgtcatgtctaagtcagagtctcctaaagagcccgaacagctgaggaagctcttcattggagggttgagctttgaaacaactgatgagagcctgaggagccattttgagcaatggggaacgctcacggactgtgtggtaatgagagatccaaacaccaagcgctccaggggctttgggtttgtcacatatgccactgtggaggaggtggatgcagctatgaatgcaaggccacacaaggtggatggaagagttgtggaaccaaagagagctgtctccagagaagattctcaaagaccaggtgcccacttaactgtgaaaaagatatttgttggtggcattaaagaagacactgaagaacatcacctaagagattattttgaacagtatggaaaaattgaagtgattgaaatcatgactgaccgaggcagtggcaagaaaaggggctttgcctttgtaacctttgacgaccatgactccgtggataagattgtcattcagaaataccatactgtgaatggccacaactgtgaagttagaaaagccctgtcaaagcaagagatggctagtgcttcatccagccaaagaggtcgaagtggttctggaaactttggtggtggtcgtggaggtggtttcggtgggaatgacaacttcggtcgtggaggaaacttcagtggtcgtggtggctttggtggcagccgtggtggtggtggatatggtggcagtggggatggctataatggatttggtaatgatggaancaattttggaggtggtggaagctacaatgattttgggaattacaacaatcagtcttcaaattttggnacccntgaangggagaaanttttggangcanaagctctggncccntatggcggggggaggccaatactttngcnaaacccccnaanccaaggggggctatgggggntncccgccnccnccattaacttntgggcagnggccaaaaanttttatttnggaancaancctnncccgggaaaggnaaaccccaaaaattnnccgggaancccccggnttcaacnaanttnggaaccccccccacccnnngggggggggggnccnancttccaaaaaaaaaagttttttaaaaaaanccttggttngggnnaaaaccccgggggggntttngnnnanntttnaannggtn

SEQ ID NO: 583 - DNA, 1346 bp, Homo Sapiens
  misc_feature (2)..(2): n is a, c, g, or t
  misc_feature (840)..(840): n is a, c, g, or t
  misc_feature (942)..(942): n is a, c, g, or t
  misc_feature (950)..(950): n is a, c, g, or t
  misc_feature (967)..(967): n is a, c, g, or t
  misc_feature (972)..(972): n is a, c, g, or t
  misc_feature (980)..(980): n is a, c, g, or t
  misc_feature (994)..(994): n is a, c, g, or t
  misc_feature (1004)..(1004): n is a, c, g, or t
  misc_feature (1006)..(1006): n is a, c, g, or t
  misc_feature (1019)..(1019): n is a, c, g, or t
  misc_feature (1029)..(1029): n is a, c, g, or t
  misc_feature (1032)..(1032): n is a, c, g, or t
  misc_feature (1050)..(1050): n is a, c, g, or t
  misc_feature (1061)..(1061): n is a, c, g, or t
  misc_feature (1075)..(1075): n is a, c, g, or t
  misc_feature (1077)..(1077): n is a, c, g, or t
  misc_feature (1079)..(1080): n is a, c, g, or t
  misc_feature (1093)..(1093): n is a, c, g, or t
  misc_feature (1101)..(1101): n is a, c, g, or t
  misc_feature (1122)..(1122): n is a, c, g, or t
  misc_feature (1131)..(1131): n is a, c, g, or t
  misc_feature (1134)..(1135): n is a, c, g, or t
  misc_feature (1155)..(1155): n is a, c, g, or t
  misc_feature (1158)..(1158): n is a, c, g, or t
  misc_feature (1161)..(1162): n is a, c, g, or t
  misc_feature (1166)..(1166): n is a, c, g, or t
  misc_feature (1179)..(1179): n is a, c, g, or t
  misc_feature (1192)..(1192): n is a, c, g, or t
  misc_feature (1195)..(1195): n is a, c, g, or t
  misc_feature (1204)..(1204): n is a, c, g, or t
  misc_feature (1213)..(1215): n is a, c, g, or t
  misc_feature (1221)..(1222): n is a, c, g, or t
  misc_feature (1227)..(1227): n is a, c, g, or t
  misc_feature (1231)..(1231): n is a, c, g, or t
  misc_feature (1236)..(1236): n is a, c, g, or t
  misc_feature (1248)..(1249): n is a, c, g, or t
  misc_feature (1258)..(1258): n is a, c, g, or t
  misc_feature (1273)..(1273): n is a, c, g, or t
  misc_feature (1279)..(1280): n is a, c, g, or t
  misc_feature (1289)..(1289): n is a, c, g, or t
  misc_feature (1300)..(1300): n is a, c, g, or t
  misc_feature (1306)..(1306): n is a, c, g, or t
  misc_feature (1318)..(1318): n is a, c, g, or t
  misc_feature (1337)..(1338): n is a, c, g, or t
  misc_feature (1340)..(1340): n is a, c, g, or t
  misc_feature (1344)..(1344): n is a, c, g, or t
  misc_feature (1346)..(1346): n is a, c, g, or t
cnatagagaaattactatgagaggatcgcatcaccatcaccatcacggatcctatttaggtgacactatagaatcgtcgacccacgcgtccgagaaaggcggagataaaaagaggggtgttaaaagaccacgagaagatcatggccgtggatattttgagtacattgaagagaacaagtatagcagagccaaatctcctcagccacctgttgaagaagaagatgaacacttcgatgacacagtggtttgtcttgatacttataattgtgatctacattttaaaatatcaagagatcgtctcagtgcttcttcccttacaatggagagttttgcttttctttgggctggaggaagagcatcctatggtgtgtcaaaaggcaaagtgtgttttgagatgaaggttacagagaagatcccagtaaggcatttatatacaaaagatattgacatacatgaagttcgtattggctggtcactaactacaagtggaatgttacttggtgaagaagaattttcttatgggtattctctaaaaggaataaaaacatgcaactgtgagactgaagattatggagaaaagtttgatgaaaatgatgtgattacatgttttgctaactttgaaagtgatgaagtagaactctcgtatgctaagaatggacaagatcttggcgttgccttcaaaatcagtaaggaagttcttgctggacggccactgttcccgcatgttctctgccacaactgtgcagttgaatttaattttggtcagaaggaaaagccatattttccaatacctgaagagtatactttcatccagaacgtccccttagaggatcgagttanaggaccaaaggggcctgaagagaagaaagattgtgaagttgtgatgatgattggcttgccaggagctggaaaaactacctgggttactaaacatgccaccanaaaatccngggaaatataacattcntggcncaaatacnaattatgggataanatgatggggncngggttttaaaaanccaatggcanaanactggaaaacctgaaccnccctgtttgcnaaaaagcccccccngngnncttgggaaaattnattgaaantgcctgccccaaaaaaacccnaaatttttntcnnggatcaaacaaatgtgtccnccngcnncccnaaaagaaaaaaantgggccccggttnccnggcctcccncccaaaaannngttgtnnttttncccnaaaantggaaccctttnnccccaaaanccccaaaaaaacccnaaattnnggggaaaancccccccaaangggggncccccaaaaaangaaacctttccccccccanngngcgnan

SEQ ID NO: 584 - DNA, 1200 bp, Homo Sapiens
  misc_feature (968)..(968): n is a, c, g, or t
  misc_feature (977)..(977): n is a, c, g, or t
  misc_feature (981)..(981): n is a, c, g, or t
  misc_feature (997)..(997): n is a, c, g, or t
  misc_feature (1013)..(1013): n is a, c, g, or t
  misc_feature (1018)..(1018): n is a, c, g, or t
  misc_feature (1034)..(1034): n is a, c, g, or t
  misc_feature (1043)..(1043): n is a, c, g, or t
  misc_feature (1045)..(1045): n is a, c, g, or t
  misc_feature (1047)..(1047): n is a, c, g, or t
  misc_feature (1058)..(1058): n is a, c, g, or t
  misc_feature (1062)..(1062): n is a, c, g, or t
  misc_feature (1076)..(1076): n is a, c, g, or t
  misc_feature (1079)..(1079): n is a, c, g, or t
  misc_feature (1104)..(1104): n is a, c, g, or t
  misc_feature (1109)..(1109): n is a, c, g, or t
  misc_feature (1116)..(1116): n is a, c, g, or t
  misc_feature (1132)..(1132): n is a, c, g, or t
  misc_feature (1136)..(1136): n is a, c, g, or t
  misc_feature (1149)..(1149): n is a, c, g, or t
  misc_feature (1153)..(1153): n is a, c, g, or t
  misc_feature (1159)..(1159): n is a, c, g, or t
  misc_feature (1161)..(1200): n is a, c, g, or t
tagagaaattactatgagaggatcgcatcaccatcaccatcacggatcctatttaggtgacactatagaatcgtcgacccacgcgtccgtttcaaagcccaagtataaccacattttgaaaccagaagactgtctctctgaaccgtgcactatattgcagttggacatgagaaccgtgcaaatttctgatctagagaccctgaggggcgagctgcgcttcgacatcaggaaggcggggaccctgcacggcttcacggcctggtttagcgtccacttccagagcctgcaggaggggcagccgccgcaggtgctcagcaccgggcccttccaccccaccacacactggaagcagacgctgttcatgatggacgacccagtccctgtccatacaggagacgtggtcacgggttcagttgtgttgcagagaaacccagtgtggagaaggcacatgtctgtggctctgagctgggctgtcacttccagacaagaccccacatctcaaaaagttggagaaaaagtcttccccatctggagatgacagttgatgctttatttggaaagcagtgtgcatatcttgaggggtgatgaacacaagcaaaccaagttgcacctggcttctgcacactcctgcgaaagtcggtgaacattcactccacattgacccctccctagcctggcaggtgacgtcagggtccttcacagacaaacacgcttgggctcggcaggagctgccgtggccacccccgctgcccagtgtctgccctctagaagtaggctgtgtttccaggtgttcacccgtggtgcccacagtgccgacccgtggctgggtcggagctccatgttcctaagctaggtctaggtctacactcctaggacgcacgcatatcagcccgtgtaccctgtgacagtgactgtccccacctcctgtgttagtggtgcccttactgccgtcgctcatccactcgtgngggacgtangatngcacagggctgtgccnatggcgtgtaaggaanactgncctggctcaccgtgcnaactaaggngncnatgtatgccangggnactctgcatggganaanaaagttgtgtaaacctcttccaaanaaatnatgggtnggggcctcccaatgcnccanaaaattttttaangggnggaaanannnnnnnnnnnnnnnnnnnnnnnnnnnnnnnnnnnnnnnn

SEQ ID NO: 585 - DNA, 1200 bp, Homo Sapiens
  misc_feature (943)..(943): n is a, c, g, or t
  misc_feature (972)..(972): n is a, c, g, or t
  misc_feature (1009)..(1009): n is a, c, g, or t
  misc_feature (1012)..(1012): n is a, c, g, or t
  misc_feature (1037)..(1037): n is a, c, g, or t
  misc_feature (1039)..(1039): n is a, c, g, or t
  misc_feature (1064)..(1064): n is a, c, g, or t
  misc_feature (1090)..(1090): n is a, c, g, or t
  misc_feature (1092)..(1093): n is a, c, g, or t
  misc_feature (1113)..(1113): n is a, c, g, or t
  misc_feature (1116)..(1116): n is a, c, g, or t
  misc_feature (1119)..(1119): n is a, c, g, or t
  misc_feature (1121)..(1121): n is a, c, g, or t
  misc_feature (1131)..(1131): n is a, c, g, or t
  misc_feature (1137)..(1137): n is a, c, g, or t
  misc_feature (1140)..(1143): n is a, c, g, or t
  misc_feature (1145)..(1146): n is a, c, g, or t
  misc_feature (1148)..(1148): n is a, c, g, or t
  misc_feature (1150)..(1160): n is a, c, g, or t
  misc_feature (1171)..(1171): n is a, c, g, or t
  misc_feature (1174)..(1174): n is a, c, g, or t
  misc_feature (1178)..(1178): n is a, c, g, or t
  misc_feature (1182)..(1182): n is a, c, g, or t
  misc_feature (1186)..(1187): n is a, c, g, or t
  misc_feature (1195)..(1195): n is a, c, g, or t
  misc_feature (1198)..(1198): n is a, c, g, or t
tagagaaattactatgagaggatcgcatcaccatcaccatcacggatcctatttaggtgacactatagaatcgtcgacccacgcgtccgcccggttcttggaggtggaaacgtcgtggccggtggactgcaccctagacgggctttttccagcctcagaggcccaggtctacctggcgctgggggaccagatgctgaatgcgacagtcatgaaccacggggacacgctaacggccacagccacagccacggcgcgcgcggatcaggagggtgcccgggagatcgtctgcaacgtgaccctagggggcgagagacgggaggcccgggagaacttgacggtctttagcttcctaggacccattgtgaacctcagcgagcccaccgcccatgaggggtccacagtgaccgtgagttgcatggctggggctcgagtccaggtcacgctggacggagttccggccgcggccccggggcagccagctcaacttcagctaaatgctaccgagagtgacgacggacgcagcttcttctgcagtgccactctcgaggtggacggcgagttcttgcacaggaacagtagcgtccagctgcgagtcctgtatggtcccaaaattgaccgagccacatgcccccagcacttgaaatggaaagataaaacgagacacgtcctgcagtgccaagccaggggcaacccgtaccccgagctgcggtgtttgaaggaaggctccagccgggaggtgccggtggggatcccgttcttcgtcaacgtaacacataatggtacttatcagtgccaagcgtccagctcacgaggcaaatacaccctggtcgtggtgatggacattgaggctgggagctcccactttgtccccgtcttcgtggcggtgttactgaccctgggcgtggtgactatcgtactggccttaatgtacgtcttcagggancaccaacggagcggcagttaccatgttanggaagaaagcacctatctgcccctcacgtctatgcanccnaaaaaaacaatggggggaaaaaccntncaaaactgaatgaacctgggattcnggaatcaaatttggcgggggcttggntnntccctcaaattcccaacaanaanccntnaaactccttnaaaaanaannnnannanannnnnnnnnnnggggggccccnccnaaangganccanntaaacttnatnaa

SEQ ID NO: 586 - DNA, 1200 bp, Homo Sapiens
  misc_feature (747)..(747): n is a, c, g, or t
  misc_feature (792)..(792): n is a, c, g, or t
  misc_feature (822)..(822): n is a, c, g, or t
  misc_feature (825)..(825): n is a, c, g, or t
  misc_feature (827)..(827): n is a, c, g, or t
  misc_feature (861)..(861): n is a, c, g, or t
  misc_feature (891)..(891): n is a, c, g, or t
  misc_feature (898)..(898): n is a, c, g, or t
  misc_feature (907)..(907): n is a, c, g, or t
  misc_feature (922)..(922): n is a, c, g, or t
  misc_feature (944)..(944): n is a, c, g, or t
  misc_feature (952)..(952): n is a, c, g, or t
  misc_feature (955)..(955): n is a, c, g, or t
  misc_feature (964)..(964): n is a, c, g, or t
  misc_feature (966)..(966): n is a, c, g, or t
  misc_feature (969)..(969): n is a, c, g, or t
  misc_feature (972)..(972): n is a, c, g, or t
  misc_feature (983)..(983): n is a, c, g, or t
  misc_feature (985)..(985): n is a, c, g, or t
  misc_feature (1012)..(1012): n is a, c, g, or t
  misc_feature (1015)..(1016): n is a, c, g, or t
  misc_feature (1031)..(1033): n is a, c, g, or t
  misc_feature (1040)..(1041): n is a, c, g, or t
  misc_feature (1044)..(1044): n is a, c, g, or t
  misc_feature (1046)..(1046): n is a, c, g, or t
  misc_feature (1050)..(1050): n is a, c, g, or t
  misc_feature (1053)..(1053): n is a, c, g, or t
  misc_feature (1062)..(1062): n is a, c, g, or t
  misc_feature (1076)..(1076): n is a, c, g, or t
  misc_feature (1080)..(1080): n is a, c, g, or t
  misc_feature (1104)..(1104): n is a, c, g, or t
  misc_feature (1106)..(1108): n is a, c, g, or t
  misc_feature (1115)..(1116): n is a, c, g, or t
  misc_feature (1120)..(1120): n is a, c, g, or t
  misc_feature (1125)..(1125): n is a, c, g, or t
  misc_feature (1135)..(1135): n is a, c, g, or t
  misc_feature (1145)..(1145): n is a, c, g, or t
  misc_feature (1149)..(1149): n is a, c, g, or t
  misc_feature (1152)..(1152): n is a, c, g, or t
  misc_feature (1155)..(1155): n is a, c, g, or t
  misc_feature (1158)..(1161): n is a, c, g, or t
  misc_feature (1166)..(1166): n is a, c, g, or t
  misc_feature (1171)..(1171): n is a, c, g, or t
  misc_feature (1179)..(1179): n is a, c, g, or t
  misc_feature (1183)..(1183): n is a, c, g, or t
  misc_feature (1185)..(1185): n is a, c, g, or t
  misc_feature (1189)..(1189): n is a, c, g, or t
  misc_feature (1198)..(1198): n is a, c, g, or t
  misc_feature (1200)..(1200): n is a, c, g, or t
tagagagaattactatgagaggatcgcatcaccatcaccatcacggatcctatttaggtgacactatagaatcgtcgacccacgcgtccggggaggagcggcgcgcgctcggacctctcccgccctgctcgttcgctctccagcttgggatggccggctacctgcgggtcgtgcgctcgctctgcagagcctcaggctcgcggccggcctgggcgccggcggccctgacagcccccacctcgcaagagcagccgcggcgccactatgccgacaaaaggatcaaggtggcgaagcccgtggtggagatggatggtgatgagatgacccgtattatctggcagttcatcaaggagaagctcatcctgccccacgtggacatccagctaaagtattttgacctcgggctcccaaaccgtgaccagactgatgaccaggtcaccattgactctgcactggccacccagaagtacagtgtggctgtcaagtgtgccaccatcacccctgatgaggcccgtgtggaagagttcaagctgaagaagatgtggaaaagtcccaatggaactatccggaacatcctgggggggactgtcttccgggagcccatcatctgcaaaaacatcccacgcctagtccctggctggaccaagcccatcaccattggcaggcacgcccatggcgaccagtacaaggccacagactttgtggcagaccgggccggcactttcaaaatggtcttcaccccaaaanatggcagtggtgtcaaggagtgggaagtgtacaacttccccgcangcggcgtgggcatgggcatgtacaacaccnacnantccatctcaagtttttgcgcacagctgcttcaantatgccatccaaaaaaaatggccgctgtanatgaacncccaaaaanaccatactgaaagcntacaatgggcgttttcaagganatttttcnagnaaatttttnanaancantattaaaaccnantttccaaaaaaaaaaaaatttggtatnaanncccggctccattgannnaaatggnnggntnaggnccntaaattttncggggggttttttntggncctgcaaaaattttaaggaaattntnnncaaaatnnttgncccanggttttttcnttggcctaanaaanccnccnggnnnnccctnatggnaaaaaaangagntnaagnccttttggnan

SEQ ID NO: 587 - DNA, 1383 bp, Homo Sapiens
  misc_feature (2)..(2): n is a, c, g, or t
  misc_feature (609)..(609): n is a, c, g, or t
  misc_feature (633)..(633): n is a, c, g, or t
  misc_feature (675)..(675): n is a, c, g, or t
  misc_feature (728)..(728): n is a, c, g, or t
  misc_feature (732)..(732): n is a, c, g, or t
  misc_feature (746)..(746): n is a, c, g, or t
  misc_feature (759)..(759): n is a, c, g, or t
  misc_feature (794)..(795): n is a, c, g, or t
  misc_feature (803)..(803): n is a, c, g, or t
  misc_feature (806)..(806): n is a, c, g, or t
  misc_feature (811)..(811): n is a, c, g, or t
  misc_feature (826)..(826): n is a, c, g, or t
  misc_feature (830)..(831): n is a, c, g, or t
  misc_feature (846)..(846): n is a, c, g, or t
  misc_feature (853)..(853): n is a, c, g, or t
  misc_feature (857)..(858): n is a, c, g, or t
  misc_feature (861)..(861): n is a, c, g, or t
  misc_feature (886)..(886): n is a, c, g, or t
  misc_feature (890)..(891): n is a, c, g, or t
  misc_feature (894)..(895): n is a, c, g, or t
  misc_feature (898)..(900): n is a, c, g, or t
  misc_feature (903)..(903): n is a, c, g, or t
  misc_feature (907)..(908): n is a, c, g, or t
  misc_feature (912)..(912): n is a, c, g, or t
  misc_feature (915)..(916): n is a, c, g, or t
  misc_feature (921)..(922): n is a, c, g, or t
  misc_feature (924)..(924): n is a, c, g, or t
  misc_feature (926)..(926): n is a, c, g, or t
  misc_feature (928)..(930): n is a, c, g, or t
  misc_feature (934)..(934): n is a, c, g, or t
  misc_feature (936)..(938): n is a, c, g, or t
  misc_feature (946)..(946): n is a, c, g, or t
  misc_feature (948)..(948): n is a, c, g, or t
  misc_feature (951)..(956): n is a, c, g, or t
  misc_feature (958)..(958): n is a, c, g, or t
  misc_feature (961)..(962): n is a, c, g, or t
  misc_feature (965)..(965): n is a, c, g, or t
  misc_feature (967)..(967): n is a, c, g, or t
  misc_feature (969)..(970): n is a, c, g, or t
  misc_feature (972)..(977): n is a, c, g, or t
  misc_feature (980)..(980): n is a, c, g, or t
  misc_feature (982)..(982): n is a, c, g, or t
  misc_feature (984)..(985): n is a, c, g, or t
  misc_feature (988)..(989): n is a, c, g, or t
  misc_feature (991)..(993): n is a, c, g, or t
  misc_feature (995)..(995): n is a, c, g, or t
  misc_feature (999)..(999): n is a, c, g, or t
  misc_feature (1001)..(1001): n is a, c, g, or t
  misc_feature (1007)..(1008): n is a, c, g, or t
  misc_feature (1011)..(1013): n is a, c, g, or t
  misc_feature (1016)..(1016): n is a, c, g, or t
  misc_feature (1020)..(1022): n is a, c, g, or t
  misc_feature (1025)..(1025): n is a, c, g, or t
  misc_feature (1027)..(1029): n is a, c, g, or t
  misc_feature (1038)..(1040): n is a, c, g, or t
  misc_feature (1045)..(1046): n is a, c, g, or t
  misc_feature (1048)..(1048): n is a, c, g, or t
  misc_feature (1051)..(1051): n is a, c, g, or t
  misc_feature (1053)..(1055): n is a, c, g, or t
  misc_feature (1057)..(1057): n is a, c, g, or t
  misc_feature (1062)..(1063): n is a, c, g, or t
  misc_feature (1065)..(1065): n is a, c, g, or t
  misc_feature (1070)..(1070): n is a, c, g, or t
  misc_feature (1073)..(1073): n is a, c, g, or t
  misc_feature (1075)..(1075): n is a, c, g, or t
  misc_feature (1084)..(1084): n is a, c, g, or t
  misc_feature (1086)..(1086): n is a, c, g, or t
  misc_feature (1089)..(1089): n is a, c, g, or t
  misc_feature (1094)..(1094): n is a, c, g, or t
  misc_feature (1100)..(1104): n is a, c, g, or t
  misc_feature (1108)..(1108): n is a, c, g, or t
  misc_feature (1112)..(1117): n is a, c, g, or t
  misc_feature (1119)..(1120): n is a, c, g, or t
  misc_feature (1127)..(1127): n is a, c, g, or t
  misc_feature (1132)..(1132): n is a, c, g, or t
  misc_feature (1138)..(1139): n is a, c, g, or t
  misc_feature (1145)..(1146): n is a, c, g, or t
  misc_feature (1152)..(1152): n is a, c, g, or t
  misc_feature (1158)..(1158): n is a, c, g, or t
  misc_feature (1160)..(1161): n is a, c, g, or t
  misc_feature (1164)..(1167): n is a, c, g, or t
  misc_feature (1174)..(1174): n is a, c, g, or t
  misc_feature (1183)..(1183): n is a, c, g, or t
  misc_feature (1185)..(1185): n is a, c, g, or t
  misc_feature (1187)..(1187): n is a, c, g, or t
  misc_feature (1189)..(1189): n is a, c, g, or t
  misc_feature (1191)..(1191): n is a, c, g, or t
  misc_feature (1193)..(1194): n is a, c, g, or t
  misc_feature (1196)..(1197): n is a, c, g, or t
  misc_feature (1201)..(1201): n is a, c, g, or t
  misc_feature (1207)..(1208): n is a, c, g, or t
  misc_feature (1218)..(1218): n is a, c, g, or t
  misc_feature (1220)..(1221): n is a, c, g, or t
  misc_feature (1224)..(1224): n is a, c, g, or t
  misc_feature (1230)..(1230): n is a, c, g, or t
  misc_feature (1233)..(1233): n is a, c, g, or t
  misc_feature (1237)..(1238): n is a, c, g, or t
  misc_feature (1246)..(1246): n is a, c, g, or t
  misc_feature (1250)..(1251): n is a, c, g, or t
  misc_feature (1254)..(1254): n is a, c, g, or t
  misc_feature (1257)..(1257): n is a, c, g, or t
  misc_feature (1261)..(1263): n is a, c, g, or t
  misc_feature (1267)..(1267): n is a, c, g, or t
  misc_feature (1273)..(1273): n is a, c, g, or t
  misc_feature (1277)..(1277): n is a, c, g, or t
  misc_feature (1284)..(1284): n is a, c, g, or t
  misc_feature (1286)..(1286): n is a, c, g, or t
  misc_feature (1288)..(1289): n is a, c, g, or t
  misc_feature (1292)..(1293): n is a, c, g, or t
  misc_feature (1295)..(1296): n is a, c, g, or t
  misc_feature (1298)..(1298): n is a, c, g, or t
  misc_feature (1300)..(1300): n is a, c, g, or t
  misc_feature (1302)..(1303): n is a, c, g, or t
  misc_feature (1306)..(1306): n is a, c, g, or t
  misc_feature (1308)..(1308): n is a, c, g, or t
  misc_feature (1311)..(1312): n is a, c, g, or t
  misc_feature (1316)..(1316): n is a, c, g, or t
  misc_feature (1318)..(1320): n is a, c, g, or t
  misc_feature (1323)..(1323): n is a, c, g, or t
  misc_feature (1325)..(1325): n is a, c, g, or t
  misc_feature (1336)..(1338): n is a, c, g, or t
  misc_feature (1341)..(1342): n is a, c, g, or t
  misc_feature (1346)..(1346): n is a, c, g, or t
  misc_feature (1348)..(1349): n is a, c, g, or t
  misc_feature (1353)..(1353): n is a, c, g, or t
  misc_feature (1356)..(1358): n is a, c, g, or t
  misc_feature (1361)..(1361): n is a, c, g, or t
  misc_feature (1365)..(1365): n is a, c, g, or t
  misc_feature (1373)..(1373): n is a, c, g, or t
  misc_feature (1376)..(1377): n is a, c, g, or t
  misc_feature (1379)..(1380): n is a, c, g, or t
anaatagagagaattactatgagaggatcgcatcaccatcaccatcacgggatcctatttaggtgacactatagaatcgtcgacccacgcgctccgggaaagcctgtccccataagctatctgtccccacaccttcccccaacccctggcacccgctggtgggcttttgtccctgtggagtggcttcttctggacgtgtcacaggagcagagtcactgcccggcatccttctgccctccacccactctccttcgtcttgcctccccaggctacgaggaacaccggcaagagtatcgccaataagaacatcgccaaccccacggccaccctgctggccagctgcatgatgctggaccacctcaagctgcactcctatgccacctccatccgtaaggctgtcctggcatccatggacaatgagaatgtgaggttcccctcgcaccctaccctgctgccccgcccagtctccccctgcagcctcctgtagcccgcctcatgcactgaccacagcccccaggggaggatggtactggatctggccccatcttctggcccttagctggtgccacttccctcctgtggcaatcccagtcctgcacgtcacagganacagcggggggtggcagggcctgntgtgtgccgagcctgcctgtgtcctacagatgcacactccgnacatcgggggacagggcacaacatctgaagccatccaggacgtcatccgccanatcngcgtcatcaacggncgggccgtggaangcctaggctggccctaagaccttcttggtttgctnnttggattnccnttccnactccagcaccccanccannctgggtacgcaaatnccaaaanaaannacntttcttcccttaaaaaaaaaaaaanaaannaannaannnaanatannaatnaanntaatnnanantnnnaaanannnaaaaatcnanttnnnnnntntannaanananntnnnnnntantnannaannannntntggngngtctcnntcnnnatngaannnaanannnttatataannnaattnnanccngnnnanaaaanncnaaaantananaaaattttntnganttatnaaaaannnnnattnctcnnnnnntnnttttttntaaanaaaaannttttgnnaaaaanttattnannaannnnttaagtnaaaaaattntnananancnntnnaaanctaaannaaaaaaaaantnnaantttttntanattnntatttaanaaannttntgnattnnntttntttaanatanaaaaatnananntannanntntntnnttntnccnnaaantnnnaantntaaaaaataannnaannaatnannaaantcnnnatnttanaaaaattnttnntnnaaa

SEQ ID NO: 588 - DNA, 1776 bp, Homo Sapiens
  misc_feature (4)..(4): n is a, c, g, or t
  misc_feature (7)..(7): n is a, c, g, or t
  misc_feature (12)..(13): n is a, c, g, or t
  misc_feature (35)..(35): n is a, c, g, or t
  misc_feature (46)..(46): n is a, c, g, or t
  misc_feature (48)..(49): n is a, c, g, or t
  misc_feature (60)..(60): n is a, c, g, or t
  misc_feature (66)..(66): n is a, c, g, or t
  misc_feature (69)..(70): n is a, c, g, or t
  misc_feature (77)..(78): n is a, c, g, or t
  misc_feature (82)..(82): n is a, c, g, or t
  misc_feature (84)..(84): n is a, c, g, or t
  misc_feature (86)..(86): n is a, c, g, or t
  misc_feature (90)..(90): n is a, c, g, or t
  misc_feature (99)..(99): n is a, c, g, or t
  misc_feature (101)..(101): n is a, c, g, or t
  misc_feature (110)..(110): n is a, c, g, or t
  misc_feature (126)..(126): n is a, c, g, or t
  misc_feature (130)..(131): n is a, c, g, or t
  misc_feature (133)..(133): n is a, c, g, or t
  misc_feature (136)..(137): n is a, c, g, or t
  misc_feature (153)..(154): n is a, c, g, or t
  misc_feature (161)..(161): n is a, c, g, or t
  misc_feature (166)..(166): n is a, c, g, or t
  misc_feature (169)..(169): n is a, c, g, or t
  misc_feature (171)..(171): n is a, c, g, or t
  misc_feature (173)..(173): n is a, c, g, or t
  misc_feature (182)..(183): n is a, c, g, or t
  misc_feature (187)..(188): n is a, c, g, or t
  misc_feature (192)..(192): n is a, c, g, or t
  misc_feature (196)..(197): n is a, c, g, or t
  misc_feature (200)..(201): n is a, c, g, or t
  misc_feature (203)..(203): n is a, c, g, or t
  misc_feature (205)..(205): n is a, c, g, or t
  misc_feature (212)..(212): n is a, c, g, or t
  misc_feature (217)..(217): n is a, c, g, or t
  misc_feature (222)..(222): n is a, c, g, or t
  misc_feature (239)..(239): n is a, c, g, or t
  misc_feature (241)..(241): n is a, c, g, or t
  misc_feature (247)..(247): n is a, c, g, or t
  misc_feature (258)..(258): n is a, c, g, or t
  misc_feature (264)..(264): n is a, c, g, or t
  misc_feature (270)..(271): n is a, c, g, or t
  misc_feature (278)..(278): n is a, c, g, or t
  misc_feature (280)..(282): n is a, c, g, or t
  misc_feature (286)..(286): n is a, c, g, or t
  misc_feature (290)..(290): n is a, c, g, or t
  misc_feature (298)..(298): n is a, c, g, or t
  misc_feature (300)..(300): n is a, c, g, or t
  misc_feature (302)..(302): n is a, c, g, or t
  misc_feature (305)..(305): n is a, c, g, or t
  misc_feature (322)..(322): n is a, c, g, or t
  misc_feature (325)..(325): n is a, c, g, or t
  misc_feature (329)..(329): n is a, c, g, or t
  misc_feature (343)..(343): n is a, c, g, or t
  misc_feature (346)..(346): n is a, c, g, or t
  misc_feature (348)..(348): n is a, c, g, or t
  misc_feature (355)..(355): n is a, c, g, or t
  misc_feature (357)..(357): n is a, c, g, or t
  misc_feature (361)..(361): n is a, c, g, or t
  misc_feature (363)..(363): n is a, c, g, or t
  misc_feature (365)..(368): n is a, c, g, or t
  misc_feature (372)..(372): n is a, c, g, or t
  misc_feature (376)..(376): n is a, c, g, or t
  misc_feature (381)..(381): n is a, c, g, or t
  misc_feature (396)..(396): n is a, c, g, or t
  misc_feature (402)..(402): n is a, c, g, or t
  misc_feature (407)..(407): n is a, c, g, or t
  misc_feature (413)..(413): n is a, c, g, or t
  misc_feature (420)..(420): n is a, c, g, or t
  misc_feature (426)..(426): n is a, c, g, or t
  misc_feature (428)..(429): n is a, c, g, or t
  misc_feature (438)..(438): n is a, c, g, or t
  misc_feature (443)..(443): n is a, c, g, or t
  misc_feature (446)..(447): n is a, c, g, or t
  misc_feature (459)..(459): n is a, c, g, or t
  misc_feature (462)..(462): n is a, c, g, or t
  misc_feature (466)..(466): n is a, c, g, or t
  misc_feature (473)..(473): n is a, c, g, or t
  misc_feature (476)..(476): n is a, c, g, or t
  misc_feature (488)..(488): n is a, c, g, or t
  misc_feature (490)..(490): n is a, c, g, or t
  misc_feature (493)..(493): n is a, c, g, or t
  misc_feature (498)..(498): n is a, c, g, or t
  misc_feature (501)..(501): n is a, c, g, or t
  misc_feature (506)..(506): n is a, c, g, or t
  misc_feature (508)..(508): n is a, c, g, or t
  misc_feature (510)..(510): n is a, c, g, or t
  misc_feature (516)..(516): n is a, c, g, or t
  misc_feature (520)..(521): n is a, c, g, or t
  misc_feature (526)..(526): n is a, c, g, or t
  misc_feature (532)..(532): n is a, c, g, or t
  misc_feature (536)..(536): n is a, c, g, or t
  misc_feature (543)..(543): n is a, c, g, or t
  misc_feature (549)..(549): n is a, c, g, or t
  misc_feature (552)..(552): n is a, c, g, or t
  misc_feature (558)..(558): n is a, c, g, or t
  misc_feature (563)..(563): n is a, c, g, or t
  misc_feature (574)..(574): n is a, c, g, or t
  misc_feature (577)..(578): n is a, c, g, or t
  misc_feature (582)..(582): n is a, c, g, or t
  misc_feature (584)..(584): n is a, c, g, or t
  misc_feature (587)..(588): n is a, c, g, or t
  misc_feature (592)..(592): n is a, c, g, or t
  misc_feature (596)..(596): n is a, c, g, or t
  misc_feature (602)..(603): n is a, c, g, or t
  misc_feature (607)..(608): n is a, c, g, or t
  misc_feature (612)..(612): n is a, c, g, or t
  misc_feature (616)..(616): n is a, c, g, or t
  misc_feature (621)..(625): n is a, c, g, or t
  misc_feature (629)..(631): n is a, c, g, or t
  misc_feature (633)..(634): n is a, c, g, or t
  misc_feature (646)..(647): n is a, c, g, or t
  misc_feature (650)..(650): n is a, c, g, or t
  misc_feature (656)..(657): n is a, c, g, or t
  misc_feature (662)..(662): n is a, c, g, or t
  misc_feature (666)..(666): n is a, c, g, or t
  misc_feature (668)..(668): n is a, c, g, or t
  misc_feature (673)..(673): n is a, c, g, or t
  misc_feature (681)..(681): n is a, c, g, or t
  misc_feature (684)..(684): n is a, c, g, or t
  misc_feature (687)..(687): n is a, c, g, or t
  misc_feature (691)..(691): n is a, c, g, or t
  misc_feature (693)..(693): n is a, c, g, or t
  misc_feature (702)..(703): n is a, c, g, or t
  misc_feature (707)..(708): n is a, c, g, or t
  misc_feature (710)..(710): n is a, c, g, or t
  misc_feature (713)..(713): n is a, c, g, or t
  misc_feature (716)..(716): n is a, c, g, or t
  misc_feature (718)..(718): n is a, c, g, or t
  misc_feature (743)..(743): n is a, c, g, or t
  misc_feature (746)..(746): n is a, c, g, or t
  misc_feature (750)..(750): n is a, c, g, or t
  misc_feature (754)..(754): n is a, c, g, or t
  misc_feature (760)..(760): n is a, c, g, or t
  misc_feature (762)..(762): n is a, c, g, or t
  misc_feature (768)..(768): n is a, c, g, or t
  misc_feature (770)..(770): n is a, c, g, or t
  misc_feature (774)..(774): n is a, c, g, or t
  misc_feature (781)..(781): n is a, c, g, or t
  misc_feature (783)..(783): n is a, c, g, or t
  misc_feature (788)..(788): n is a, c, g, or t
  misc_feature (793)..(793): n is a, c, g, or t
  misc_feature (798)..(799): n is a, c, g, or t
  misc_feature (802)..(802): n is a, c, g, or t
  misc_feature (806)..(807): n is a, c, g, or t
  misc_feature (827)..(828): n is a, c, g, or t
  misc_feature (830)..(830): n is a, c, g, or t
  misc_feature (834)..(834): n is a, c, g, or t
  misc_feature (837)..(838): n is a, c, g, or t
  misc_feature (843)..(847): n is a, c, g, or t
  misc_feature (849)..(849): n is a, c, g, or t
  misc_feature (852)..(852): n is a, c, g, or t
  misc_feature (863)..(863): n is a, c, g, or t
  misc_feature (866)..(866): n is a, c, g, or t
  misc_feature (869)..(869): n is a, c, g, or t
  misc_feature (875)..(875): n is a, c, g, or t
  misc_feature (888)..(889): n is a, c, g, or t
  misc_feature (893)..(894): n is a, c, g, or t
  misc_feature (897)..(897): n is a, c, g, or t
  misc_feature (906)..(906): n is a, c, g, or t
  misc_feature (911)..(911): n is a, c, g, or t
  misc_feature (916)..(916): n is a, c, g, or t
  misc_feature (921)..(921): n is a, c, g, or t
  misc_feature (923)..(923): n is a, c, g, or t
  misc_feature (926)..(927): n is a, c, g, or t
  misc_feature (930)..(930): n is a, c, g, or t
  misc_feature (936)..(936): n is a, c, g, or t
  misc_feature (946)..(946): n is a, c, g, or t
  misc_feature (948)..(948): n is a, c, g, or t
  misc_feature (951)..(952): n is a, c, g, or t
  misc_feature (955)..(955): n is a, c, g, or t
  misc_feature (966)..(966): n is a, c, g, or t
  misc_feature (971)..(971): n is a, c, g, or t
  misc_feature (973)..(973): n is a, c, g, or t
  misc_feature (979)..(979): n is a, c, g, or t
  misc_feature (982)..(982): n is a, c, g, or t
  misc_feature (988)..(988): n is a, c, g, or t
  misc_feature (990)..(990): n is a, c, g, or t
  misc_feature (992)..(992): n is a, c, g, or t
  misc_feature (994)..(994): n is a, c, g, or t
  misc_feature (997)..(997): n is a, c, g, or t
  misc_feature (999)..(999): n is a, c, g, or t
  misc_feature (1005)..(1005): n is a, c, g, or t
  misc_feature (1010)..(1011): n is a, c, g, or t
  misc_feature (1014)..(1014): n is a, c, g, or t
  misc_feature (1018)..(1018): n is a, c, g, or t
  misc_feature (1020)..(1020): n is a, c, g, or t
  misc_feature (1024)..(1024): n is a, c, g, or t
  misc_feature (1026)..(1026): n is a, c, g, or t
  misc_feature (1029)..(1031): n is a, c, g, or t
  misc_feature (1034)..(1035): n is a, c, g, or t
  misc_feature (1038)..(1039): n is a, c, g, or t
  misc_feature (1041)..(1041): n is a, c, g, or t
  misc_feature (1044)..(1044): n is a, c, g, or t
  misc_feature (1049)..(1049): n is a, c, g, or t
  misc_feature (1057)..(1057): n is a, c, g, or t
  misc_feature (1063)..(1063): n is a, c, g, or t
  misc_feature (1069)..(1069): n is a, c, g, or t
  misc_feature (1072)..(1073): n is a, c, g, or t
  misc_feature (1075)..(1075): n is a, c, g, or t
  misc_feature (1078)..(1079): n is a, c, g, or t
  misc_feature (1081)..(1081): n is a, c, g, or t
  misc_feature (1085)..(1086): n is a, c, g, or t
  misc_feature (1090)..(1090): n is a, c, g, or t
  misc_feature (1092)..(1092): n is a, c, g, or t
  misc_feature (1094)..(1094): n is a, c, g, or t
  misc_feature (1102)..(1103): n is a, c, g, or t
  misc_feature (1106)..(1107): n is a, c, g, or t
  misc_feature (1109)..(1109): n is a, c, g, or t
  misc_feature (1111)..(1111): n is a, c, g, or t
  misc_feature (1113)..(1113): n is a, c, g, or t
  misc_feature (1121)..(1121): n is a, c, g, or t
  misc_feature (1133)..(1133): n is a, c, g, or t
  misc_feature (1140)..(1140): n is a, c, g, or t
  misc_feature (1142)..(1143): n is a, c, g, or t
  misc_feature (1146)..(1146): n is a, c, g, or t
  misc_feature (1150)..(1151): n is a, c, g, or t
  misc_feature (1155)..(1155): n is a, c, g, or t
  misc_feature (1158)..(1158): n is a, c, g, or t
  misc_feature (1161)..(1161): n is a, c, g, or t
  misc_feature (1164)..(1164): n is a, c, g, or t
  misc_feature (1175)..(1176): n is a, c, g, or t
  misc_feature (1178)..(1178): n is a, c, g, or t
  misc_feature (1181)..(1181): n is a, c, g, or t
  misc_feature (1183)..(1184): n is a, c, g, or t
  misc_feature (1187)..(1187): n is a, c, g, or t
  misc_feature (1194)..(1196): n is a, c, g, or t
  misc_feature (1200)..(1202): n is a, c, g, or t
  misc_feature (1205)..(1205): n is a, c, g, or t
  misc_feature (1208)..(1209): n is a, c, g, or t
  misc_feature (1211)..(1211): n is a, c, g, or t
  misc_feature (1213)..(1213): n is a, c, g, or t
  misc_feature (1215)..(1219): n is a, c, g, or t
  misc_feature (1223)..(1225): n is a, c, g, or t
  misc_feature (1231)..(1231): n is a, c, g, or t
  misc_feature (1238)..(1239): n is a, c, g, or t
  misc_feature (1243)..(1243): n is a, c, g, or t
  misc_feature (1248)..(1248): n is a, c, g, or t
  misc_feature (1257)..(1257): n is a, c, g, or t
  misc_feature (1260)..(1260): n is a, c, g, or t
  misc_feature (1265)..(1265): n is a, c, g, or t
  misc_feature (1267)..(1269): n is a, c, g, or t
  misc_feature (1272)..(1272): n is a, c, g, or t
  misc_feature (1274)..(1275): n is a, c, g, or t
  misc_feature (1279)..(1280): n is a, c, g, or t
  misc_feature (1283)..(1283): n is a, c, g, or t
  misc_feature (1285)..(1286): n is a, c, g, or t
  misc_feature (1289)..(1289): n is a, c, g, or t
  misc_feature (1292)..(1292): n is a, c, g, or t
  misc_feature (1297)..(1297): n is a, c, g, or t
  misc_feature (1299)..(1299): n is a, c, g, or t
  misc_feature (1303)..(1303): n is a, c, g, or t
  misc_feature (1309)..(1309): n is a, c, g, or t
  misc_feature (1311)..(1311): n is a, c, g, or t
  misc_feature (1313)..(1313): n is a, c, g, or t
  misc_feature (1317)..(1318): n is a, c, g, or t
  misc_feature (1320)..(1320): n is a, c, g, or t
  misc_feature (1322)..(1322): n is a, c, g, or t
  misc_feature (1325)..(1325): n is a, c, g, or t
  misc_feature (1327)..(1327): n is a, c, g, or t
  misc_feature (1331)..(1331): n is a, c, g, or t
  misc_feature (1334)..(1334): n is a, c, g, or t
  misc_feature (1338)..(1338): n is a, c, g, or t
  misc_feature (1342)..(1342): n is a, c, g, or t
  misc_feature (1346)..(1346): n is a, c, g, or t
  misc_feature (1349)..(1349): n is a, c, g, or t
  misc_feature (1353)..(1356): n is a, c, g, or t
  misc_feature (1366)..(1366): n is a, c, g, or t
  misc_feature (1369)..(1369): n is a, c, g, or t
  misc_feature (1372)..(1373): n is a, c, g, or t
  misc_feature (1377)..(1377): n is a, c, g, or t
  misc_feature (1382)..(1383): n is a, c, g, or t
  misc_feature (1389)..(1389): n is a, c, g, or t
  misc_feature (1394)..(1395): n is a, c, g, or t
  misc_feature (1400)..(1400): n is a, c, g, or t
  misc_feature (1406)..(1407): n is a, c, g, or t
  misc_feature (1415)..(1415): n is a, c, g, or t
  misc_feature (1420)..(1420): n is a, c, g, or t
  misc_feature (1424)..(1425): n is a, c, g, or t
  misc_feature (1430)..(1434): n is a, c, g, or t
  misc_feature (1436)..(1436): n is a, c, g, or t
  misc_feature (1444)..(1444): n is a, c, g, or t
  misc_feature (1446)..(1447): n is a, c, g, or t
  misc_feature (1449)..(1449): n is a, c, g, or t
  misc_feature (1456)..(1456): n is a, c, g, or t
  misc_feature (1459)..(1459): n is a, c, g, or t
  misc_feature (1462)..(1462): n is a, c, g, or t
  misc_feature (1470)..(1470): n is a, c, g, or t
  misc_feature (1473)..(1473): n is a, c, g, or t
  misc_feature (1476)..(1477): n is a, c, g, or t
  misc_feature (1479)..(1479): n is a, c, g, or t
  misc_feature (1488)..(1489): n is a, c, g, or t
  misc_feature (1493)..(1493): n is a, c, g, or t
  misc_feature (1499)..(1499): n is a, c, g, or t
  misc_feature (1505)..(1505): n is a, c, g, or t
  misc_feature (1513)..(1514): n is a, c, g, or t
  misc_feature (1516)..(1516): n is a, c, g, or t
  misc_feature (1520)..(1520): n is a, c, g, or t
  misc_feature (1522)..(1524): n is a, c, g, or t
  misc_feature (1528)..(1528): n is a, c, g, or t
  misc_feature (1531)..(1531): n is a, c, g, or t
  misc_feature (1534)..(1535): n is a, c, g, or t
  misc_feature (1539)..(1539): n is a, c, g, or t
  misc_feature (1545)..(1545): n is a, c, g, or t
  misc_feature (1547)..(1547): n is a, c, g, or t
  misc_feature (1551)..(1551): n is a, c, g, or t
  misc_feature (1556)..(1556): n is a, c, g, or t
  misc_feature (1562)..(1562): n is a, c, g, or t
  misc_feature (1569)..(1569): n is a, c, g, or t
  misc_feature (1572)..(1572): n is a, c, g, or t
  misc_feature (1585)..(1585): n is a, c, g, or t
  misc_feature (1587)..(1587): n is a, c, g, or t
  misc_feature (1595)..(1595): n is a, c, g, or t
  misc_feature (1599)..(1600): n is a, c, g, or t
  misc_feature (1603)..(1604): n is a, c, g, or t
  misc_feature (1607)..(1609): n is a, c, g, or t
  misc_feature (1612)..(1612): n is a, c, g, or t
  misc_feature (1615)..(1615): n is a, c, g, or t
  misc_feature (1631)..(1633): n is a, c, g, or t
  misc_feature (1635)..(1635): n is a, c, g, or t
  misc_feature (1640)..(1640): n is a, c, g, or t
  misc_feature (1642)..(1642): n is a, c, g, or t
  misc_feature (1646)..(1646): n is a, c, g, or t
  misc_feature (1650)..(1650): n is a, c, g, or t
  misc_feature (1654)..(1654): n is a, c, g, or t
  misc_feature (1657)..(1658): n is a, c, g, or t
  misc_feature (1666)..(1667): n is a, c, g, or t
  misc_feature (1669)..(1670): n is a, c, g, or t
  misc_feature (1674)..(1675): n is a, c, g, or t
  misc_feature (1683)..(1684): n is a, c, g, or t
  misc_feature (1693)..(1693): n is a, c, g, or t
  misc_feature (1697)..(1697): n is a, c, g, or t
  misc_feature (1706)..(1706): n is a, c, g, or t
  misc_feature (1711)..(1711): n is a, c, g, or t
  misc_feature (1720)..(1720): n is a, c, g, or t
  misc_feature (1724)..(1727): n is a, c, g, or t
  misc_feature (1729)..(1729): n is a, c, g, or t
  misc_feature (1735)..(1735): n is a, c, g, or t
  misc_feature (1744)..(1745): n is a, c, g, or t
  misc_feature (1747)..(1747): n is a, c, g, or t
  misc_feature (1754)..(1754): n is a, c, g, or t
  misc_feature (1760)..(1760): n is a, c, g, or t
  misc_feature (1762)..(1762): n is a, c, g, or t
  misc_feature (1766)..(1766): n is a, c, g, or t
  misc_feature (1774)..(1776): n is a, c, g, or t
aaanaanaaagnnaagaataaattaggaagggggnatggggcttcntnntccacccatcngggganttnnattattnngggngnangtanataaaaaancngttcgaacncaccgccgttcggtcnggannancannttcatggaggttcgtnntggtctngccgntcntncntgggaacanngccnngtgngctnngtnncncntgagagntgtantggcngaccacttccacttccncnaccagncaccgactgcntcagtnattccnntctcctngnnngcanagancatgcttnanancgncttcacatccagatttnagngacnccaccatcagcctnctncnttgtgantngatngnannnnaggncatnttgtnacttgcgttaatcangctctnccatntatcancgacganccacancnnggacgatanatgtntanntgaaaaggttcntantcanggggggngcntgacactatctntnatntgcangtngcatncngngtggtnttcnncggancatgcntgtngcagganacacantangcgagntcaantcccagcggcnacnnactntncannaaanaatnccctanngccnnacangtcntcctnnnnntgcnnngnnagtgagcccaannagnaatacnnacgcngctntntgctnacccgctnganganaacntnctaaacatnnccanncngangananaaagtgctgagggctgtatgtttcncgncggngctnacctcncntcatgntnaccncgtgatntntaaanagccnacaannatntcanngactttatgcaattaatatnncnccangtnntaacnnnnncntanttaaatagagnaanccnccctcntcatttctaaagnnaggnncanaattcttcnttccnggctnccatngnatnntanaacggnacactccaantnttnnganaaatcactccntgcantnaactcnacncttaancnantnctntncgggangaaannccngttncnattncntgnnnctnnacnncnctntacantttttccngccacncatcanccnngnaanncntttnnaccntnantttaaatnnccnncntntnaatttttnttgtaagaaatntcctttntnnttnaaanncaanaanatnttnttacaataagnntnttncnnaancataatnnncctnnnggnganncncncnnnnntttnnnaaccanccactanngaantatcnctctccaantanccccnannnctntnnaccnntgntnntcncantaatntncccnacatanantntctnncnanctncnaacnctntgtncttntacnttnatannnnttatgtatcngtntgnncttncccgnngttgtntatannttctngtaaanntcacaccntcctntccnntgggnnnnntntctttctnanngncacaccnccncanagaacccntanatnntnaagagaagnntatnttccgntcttantcacacanncntctntnnnaatntanccnncttncatctnanactntaaantactcntatatangcncactaccctctananactggagngatnntcnntgnnnctncanatacctccacctcctnnnanctgtntnactntttntatnctnntacatatnntnnctgnnatacagtnncatatcacncatnctatatgantatantatttcatnatcnnnncncacatntctcgcttnnanatgtatntgcacncnactnaaatgtannn

SEQ ID NO: 589 - DNA, 1519 bp, Homo Sapiens
  misc_feature (4)..(13): n is a, c, g, or t
  misc_feature (19)..(19): n is a, c, g, or t
  misc_feature (22)..(23): n is a, c, g, or t
  misc_feature (41)..(41): n is a, c, g, or t
  misc_feature (43)..(43): n is a, c, g, or t
  misc_feature (48)..(48): n is a, c, g, or t
  misc_feature (54)..(54): n is a, c, g, or t
  misc_feature (59)..(59): n is a, c, g, or t
  misc_feature (66)..(66): n is a, c, g, or t
  misc_feature (109)..(109): n is a, c, g, or t
  misc_feature (119)..(119): n is a, c, g, or t
  misc_feature (185)..(185): n is a, c, g, or t
  misc_feature (320)..(321): n is a, c, g, or t
  misc_feature (358)..(358): n is a, c, g, or t
  misc_feature (364)..(364): n is a, c, g, or t
  misc_feature (384)..(384): n is a, c, g, or t
  misc_feature (387)..(387): n is a, c, g, or t
  misc_feature (417)..(417): n is a, c, g, or t
  misc_feature (419)..(421): n is a, c, g, or t
  misc_feature (426)..(428): n is a, c, g, or t
  misc_feature (439)..(439): n is a, c, g, or t
  misc_feature (441)..(441): n is a, c, g, or t
  misc_feature (444)..(445): n is a, c, g, or t
  misc_feature (449)..(450): n is a, c, g, or t
  misc_feature (470)..(470): n is a, c, g, or t
  misc_feature (494)..(494): n is a, c, g, or t
  misc_feature (497)..(499): n is a, c, g, or t
  misc_feature (502)..(502): n is a, c, g, or t
  misc_feature (506)..(507): n is a, c, g, or t
  misc_feature (510)..(510): n is a, c, g, or t
  misc_feature (514)..(516): n is a, c, g, or t
  misc_feature (518)..(519): n is a, c, g, or t
  misc_feature (522)..(522): n is a, c, g, or t
  misc_feature (524)..(524): n is a, c, g, or t
  misc_feature (528)..(528): n is a, c, g, or t
  misc_feature (531)..(532): n is a, c, g, or t
  misc_feature (535)..(535): n is a, c, g, or t
  misc_feature (539)..(539): n is a, c, g, or t
  misc_feature (543)..(543): n is a, c, g, or t
  misc_feature (545)..(545): n is a, c, g, or t
  misc_feature (548)..(548): n is a, c, g, or t
  misc_feature (556)..(557): n is a, c, g, or t
  misc_feature (569)..(569): n is a, c, g, or t
  misc_feature (571)..(571): n is a, c, g, or t
  misc_feature (578)..(578): n is a, c, g, or t
  misc_feature (588)..(589): n is a, c, g, or t
  misc_feature (594)..(594): n is a, c, g, or t
  misc_feature (608)..(608): n is a, c, g, or t
  misc_feature (616)..(617): n is a, c, g, or t
  misc_feature (623)..(623): n is a, c, g, or t
  misc_feature (625)..(625): n is a, c, g, or t
  misc_feature (627)..(627): n is a, c, g, or t
  misc_feature (631)..(631): n is a, c, g, or t
  misc_feature (634)..(635): n is a, c, g, or t
  misc_feature (638)..(638): n is a, c, g, or t
  misc_feature (643)..(644): n is a, c, g, or t
  misc_feature (649)..(649): n is a, c, g, or t
  misc_feature (651)..(655): n is a, c, g, or t
  misc_feature (662)..(662): n is a, c, g, or t
  misc_feature (665)..(665): n is a, c, g, or t
  misc_feature (671)..(672): n is a, c, g, or t
  misc_feature (675)..(675): n is a, c, g, or t
  misc_feature (679)..(680): n is a, c, g, or t
  misc_feature (684)..(684): n is a, c, g, or t
  misc_feature (686)..(687): n is a, c, g, or t
  misc_feature (689)..(689): n is a, c, g, or t
  misc_feature (698)..(698): n is a, c, g, or t
  misc_feature (700)..(700): n is a, c, g, or t
  misc_feature (703)..(703): n is a, c, g, or t
  misc_feature (705)..(705): n is a, c, g, or t
  misc_feature (715)..(715): n is a, c, g, or t
  misc_feature (721)..(721): n is a, c, g, or t
  misc_feature (723)..(723): n is a, c, g, or t
  misc_feature (729)..(729): n is a, c, g, or t
  misc_feature (735)..(736): n is a, c, g, or t
  misc_feature (747)..(747): n is a, c, g, or t
  misc_feature (751)..(751): n is a, c, g, or t
  misc_feature (754)..(754): n is a, c, g, or t
  misc_feature (756)..(758): n is a, c, g, or t
  misc_feature (764)..(764): n is a, c, g, or t
  misc_feature (768)..(769): n is a, c, g, or t
  misc_feature (771)..(771): n is a, c, g, or t
  misc_feature (773)..(774): n is a, c, g, or t
  misc_feature (776)..(777): n is a, c, g, or t
  misc_feature (781)..(782): n is a, c, g, or t
  misc_feature (784)..(784): n is a, c, g, or t
  misc_feature (786)..(787): n is a, c, g, or t
  misc_feature (791)..(791): n is a, c, g, or t
  misc_feature (793)..(793): n is a, c, g, or t
  misc_feature (797)..(797): n is a, c, g, or t
  misc_feature (808)..(808): n is a, c, g, or t
  misc_feature (812)..(812): n is a, c, g, or t
  misc_feature (814)..(814): n is a, c, g, or t
  misc_feature (818)..(818): n is a, c, g, or t
  misc_feature (820)..(821): n is a, c, g, or t
  misc_feature (824)..(824): n is a, c, g, or t
  misc_feature (827)..(827): n is a, c, g, or t
  misc_feature (829)..(831): n is a, c, g, or t
  misc_feature (834)..(837): n is a, c, g, or t
  misc_feature (839)..(841): n is a, c, g, or t
  misc_feature (843)..(845): n is a, c, g, or t
  misc_feature (857)..(857): n is a, c, g, or t
  misc_feature (860)..(860): n is a, c, g, or t
  misc_feature (863)..(865): n is a, c, g, or t
  misc_feature (869)..(869): n is a, c, g, or t
  misc_feature (878)..(878): n is a, c, g, or t
  misc_feature (881)..(881): n is a, c, g, or t
  misc_feature (883)..(883): n is a, c, g, or t
  misc_feature (885)..(887): n is a, c, g, or t
  misc_feature (889)..(891): n is a, c, g, or t
  misc_feature (893)..(893): n is a, c, g, or t
  misc_feature (898)..(898): n is a, c, g, or t
  misc_feature (904)..(907): n is a, c, g, or t
  misc_feature (909)..(910): n is a, c, g, or t
  misc_feature (912)..(913): n is a, c, g, or t
  misc_feature (916)..(916): n is a, c, g, or t
  misc_feature (920)..(922): n is a, c, g, or t
  misc_feature (924)..(928): n is a, c, g, or t
  misc_feature (930)..(931): n is a, c, g, or t
  misc_feature (939)..(939): n is a, c, g, or t
  misc_feature (948)..(952): n is a, c, g, or t
  misc_feature (958)..(959): n is a, c, g, or t
  misc_feature (963)..(963): n is a, c, g, or t
  misc_feature (965)..(965): n is a, c, g, or t
  misc_feature (967)..(967): n is a, c, g, or t
  misc_feature (971)..(972): n is a, c, g, or t
  misc_feature (977)..(977): n is a, c, g, or t
  misc_feature (980)..(981): n is a, c, g, or t
  misc_feature (989)..(989): n is a, c, g, or t
  misc_feature (992)..(992): n is a, c, g, or t
  misc_feature (996)..(996): n is a, c, g, or t
  misc_feature (1002)..(1002): n is a, c, g, or t
  misc_feature (1005)..(1005): n is a, c, g, or t
  misc_feature (1009)..(1010): n is a, c, g, or t
  misc_feature (1012)..(1012): n is a, c, g, or t
  misc_feature (1014)..(1015): n is a, c, g, or t
  misc_feature (1018)..(1021): n is a, c, g, or t
  misc_feature (1023)..(1025): n is a, c, g, or t
  misc_feature (1028)..(1030): n is a, c, g, or t
  misc_feature (1038)..(1038): n is a, c, g, or t
  misc_feature (1045)..(1046): n is a, c, g, or t
  misc_feature (1048)..(1048): n is a, c, g, or t
  misc_feature (1055)..(1056): n is a, c, g, or t
  misc_feature (1066)..(1066): n is a, c, g, or t
  misc_feature (1068)..(1068): n is a, c, g, or t
  misc_feature (1071)..(1072): n is a, c, g, or t
  misc_feature (1076)..(1076): n is a, c, g, or t
  misc_feature (1088)..(1088): n is a, c, g, or t
  misc_feature (1098)..(1099): n is a, c, g, or t
  misc_feature (1104)..(1108): n is a, c, g, or t
  misc_feature (1111)..(1112): n is a, c, g, or t
  misc_feature (1115)..(1118): n is a, c, g, or t
  misc_feature (1125)..(1125): n is a, c, g, or t
  misc_feature (1127)..(1128): n is a, c, g, or t
  misc_feature (1135)..(1135): n is a, c, g, or t
  misc_feature (1137)..(1138): n is a, c, g, or t
  misc_feature (1142)..(1149): n is a, c, g, or t
  misc_feature (1152)..(1155): n is a, c, g, or t
  misc_feature (1157)..(1158): n is a, c, g, or t
  misc_feature (1160)..(1163): n is a, c, g, or t
  misc_feature (1165)..(1166): n is a, c, g, or t
  misc_feature (1174)..(1174): n is a, c, g, or t
  misc_feature (1185)..(1185): n is a, c, g, or t
  misc_feature (1189)..(1194): n is a, c, g, or t
  misc_feature (1196)..(1198): n is a, c, g, or t
  misc_feature (1200)..(1200): n is a, c, g, or t
  misc_feature (1203)..(1203): n is a, c, g, or t
  misc_feature (1205)..(1208): n is a, c, g, or t
  misc_feature (1211)..(1211): n is a, c, g, or t
  misc_feature (1215)..(1215): n is a, c, g, or t
  misc_feature (1218)..(1219): n is a, c, g, or t
  misc_feature (1223)..(1223): n is a, c, g, or t
  misc_feature (1225)..(1225): n is a, c, g, or t
  misc_feature (1228)..(1229): n is a, c, g, or t
  misc_feature (1231)..(1231): n is a, c, g, or t
  misc_feature (1233)..(1233): n is a, c, g, or t
  misc_feature (1235)..(1235): n is a, c, g, or t
  misc_feature (1238)..(1238): n is a, c, g, or t
  misc_feature (1240)..(1241): n is a, c, g, or t
  misc_feature (1243)..(1243): n is a, c, g, or t
  misc_feature (1246)..(1246): n is a, c, g, or t
  misc_feature (1248)..(1249): n is a, c, g, or t
  misc_feature (1251)..(1255): n is a, c, g, or t
  misc_feature (1259)..(1261): n is a, c, g, or t
  misc_feature (1263)..(1263): n is a, c, g, or t
  misc_feature (1265)..(1265): n is a, c, g, or t
  misc_feature (1267)..(1268): n is a, c, g, or t
  misc_feature (1270)..(1275): n is a, c, g, or t
  misc_feature (1277)..(1277): n is a, c, g, or t
  misc_feature (1284)..(1284): n is a, c, g, or t
  misc_feature (1286)..(1286): n is a, c, g, or t
  misc_feature (1289)..(1289): n is a, c, g, or t
  misc_feature (1299)..(1300): n is a, c, g, or t
  misc_feature (1302)..(1307): n is a, c, g, or t
  misc_feature (1315)..(1315): n is a, c, g, or t
  misc_feature (1317)..(1319): n is a, c, g, or t
  misc_feature (1323)..(1324): n is a, c, g, or t
  misc_feature (1326)..(1328): n is a, c, g, or t
  misc_feature (1337)..(1337): n is a, c, g, or t
  misc_feature (1339)..(1342): n is a, c, g, or t
  misc_feature (1344)..(1344): n is a, c, g, or t
  misc_feature (1347)..(1347): n is a, c, g, or t
  misc_feature (1351)..(1351): n is a, c, g, or t
  misc_feature (1356)..(1356): n is a, c, g, or t
  misc_feature (1358)..(1359): n is a, c, g, or t
  misc_feature (1362)..(1363): n is a, c, g, or t
  misc_feature (1365)..(1365): n is a, c, g, or t
  misc_feature (1367)..(1374): n is a, c, g, or t
  misc_feature (1381)..(1381): n is a, c, g, or t
  misc_feature (1383)..(1383): n is a, c, g, or t
  misc_feature (1385)..(1387): n is a, c, g, or t
  misc_feature (1389)..(1390): n is a, c, g, or t
  misc_feature (1393)..(1395): n is a, c, g, or t
  misc_feature (1397)..(1407): n is a, c, g, or t
  misc_feature (1409)..(1409): n is a, c, g, or t
  misc_feature (1412)..(1412): n is a, c, g, or t
  misc_feature (1415)..(1415): n is a, c, g, or t
  misc_feature (1417)..(1419): n is a, c, g, or t
  misc_feature (1422)..(1422): n is a, c, g, or t
  misc_feature (1424)..(1424): n is a, c, g, or t
  misc_feature (1426)..(1427): n is a, c, g, or t
  misc_feature (1429)..(1429): n is a, c, g, or t
  misc_feature (1432)..(1434): n is a, c, g, or t
  misc_feature (1437)..(1442): n is a, c, g, or t
  misc_feature (1444)..(1445): n is a, c, g, or t
  misc_feature (1447)..(1447): n is a, c, g, or t
  misc_feature (1452)..(1452): n is a, c, g, or t
  misc_feature (1457)..(1460): n is a, c, g, or t
  misc_feature (1462)..(1462): n is a, c, g, or t
  misc_feature (1465)..(1468): n is a, c, g, or t
  misc_feature (1470)..(1474): n is a, c, g, or t
  misc_feature (1476)..(1476): n is a, c, g, or t
  misc_feature (1478)..(1479): n is a, c, g, or t
  misc_feature (1483)..(1484): n is a, c, g, or t
  misc_feature (1487)..(1490): n is a, c, g, or t
  misc_feature (1493)..(1493): n is a, c, g, or t
  misc_feature (1497)..(1498): n is a, c, g, or t
  misc_feature (1500)..(1509): n is a, c, g, or t
  misc_feature (1511)..(1514): n is a, c, g, or t
  misc_feature (1516)..(1519): n is a, c, g, or t
ctcnnnnnnnnnnagaaanttnnggaggaaaaaattacctngngaggngggatngccantcaccantcaccagtcacggggaatccttatttttagggtggacacctantagtaatcgntcgacccacgtcggtccggcggctcccgcgcttcgcagggccgtgccacctgcccgcccgcccgcntcgctcgctcgcccgccgcgccgcgctgccgaccgccagcatgctgccgagagtgggctgccccgcgctgccgctgccgccgccgccgctgctgccgctgctgccgctgctgctgctgctactggacgcgaatgnnggcggcggcggggctcgcgcggatgtgcatgttccgntgcccnccctgctcacgccgagcgcntgntctgcctgcgggccccctccggttgcgccncnnnccgcnnnggccgaatcgnancgnnggcnnccgcttgtcatgttcgcaanctcgatcatcgaagccgggtctgnttnnngcngttnngtntgcnnncnnctntnggtngannagngacncctncntanactacggnnctgtcgttgaancngagctgntacatgcctnntcccnccatgactctgctncctagatnnccctgnananacantgnnttnaatgnnccaangnnnnntttttantancctctnnccngccnncctnanntntatggcttnancangngtggatggtnttcctnanaaattngtttanncaccaaccacnaatngcngnnntgaatntaannantnncnngggnngntnncttngnttantgttttttggnaggngnatananntgnttngnnntgnnnncnnntnnntattgttagttnaantannnaaantcttttccnttntnannnannnantaccntcctannnntnntnntantaannncnnnnnanntgtcattncttgaaaannnnntttttnncttngntngtannaaatnttnnattttccntanaccntttttnatntaannanannccnnnngnnnttnnngggtttcntttaacnntntcccttnnattaagaaancnttnncaanattctcctttcntgccatcctnngcttnnnnntannttnnnncaacttnannttttatntnncttnnnnnnnntannnntnnannnntnntttctttnccctcctattncccnnnnnntnnntnttntnnnnatnaaanaanntttnanggnntntntnacntnnanttntnnannnnntttnnntnananncnnnnnnantctacantnaanggggtcaatnncnnnnnntatttttntnnncccnntnnnttatttctntnnnncntcntttntatcntnncannantnnnnnnnntttttananannntnnttnnntnnnnnnnnnnncnctntancnnnttntntnnanaannnatnnnnnnanntnttttnttttnnnntnctnnnnannnnntntnncccnnctnnnnttntttnntnnnnnnnnnncnnnnannnn

SEQ ID NO: 590 - DNA, 1377 bp, Homo Sapiens
  misc_feature (3)..(4): n is a, c, g, or t
  misc_feature (830)..(830): n is a, c, g, or t
  misc_feature (920)..(920): n is a, c, g, or t
  misc_feature (973)..(973): n is a, c, g, or t
  misc_feature (1037)..(1037): n is a, c, g, or t
  misc_feature (1058)..(1058): n is a, c, g, or t
  misc_feature (1060)..(1061): n is a, c, g, or t
  misc_feature (1085)..(1085): n is a, c, g, or t
  misc_feature (1103)..(1103): n is a, c, g, or t
  misc_feature (1111)..(1111): n is a, c, g, or t
  misc_feature (1117)..(1117): n is a, c, g, or t
  misc_feature (1124)..(1124): n is a, c, g, or t
  misc_feature (1136)..(1136): n is a, c, g, or t
  misc_feature (1140)..(1140): n is a, c, g, or t
  misc_feature (1151)..(1152): n is a, c, g, or t
  misc_feature (1157)..(1157): n is a, c, g, or t
  misc_feature (1173)..(1173): n is a, c, g, or t
  misc_feature (1205)..(1206): n is a, c, g, or t
  misc_feature (1212)..(1212): n is a, c, g, or t
  misc_feature (1216)..(1216): n is a, c, g, or t
  misc_feature (1218)..(1219): n is a, c, g, or t
  misc_feature (1221)..(1221): n is a, c, g, or t
  misc_feature (1225)..(1225): n is a, c, g, or t
  misc_feature (1227)..(1227): n is a, c, g, or t
  misc_feature (1232)..(1232): n is a, c, g, or t
  misc_feature (1235)..(1235): n is a, c, g, or t
  misc_feature (1243)..(1243): n is a, c, g, or t
  misc_feature (1254)..(1254): n is a, c, g, or t
  misc_feature (1261)..(1261): n is a, c, g, or t
  misc_feature (1264)..(1264): n is a, c, g, or t
  misc_feature (1278)..(1279): n is a, c, g, or t
  misc_feature (1281)..(1281): n is a, c, g, or t
  misc_feature (1288)..(1288): n is a, c, g, or t
  misc_feature (1298)..(1298): n is a, c, g, or t
  misc_feature (1302)..(1303): n is a, c, g, or t
  misc_feature (1306)..(1306): n is a, c, g, or t
  misc_feature (1309)..(1309): n is a, c, g, or t
  misc_feature (1312)..(1313): n is a, c, g, or t
  misc_feature (1337)..(1338): n is a, c, g, or t
  misc_feature (1342)..(1342): n is a, c, g, or t
  misc_feature (1344)..(1344): n is a, c, g, or t
  misc_feature (1349)..(1349): n is a, c, g, or t
  misc_feature (1352)..(1352): n is a, c, g, or t
  misc_feature (1356)..(1357): n is a, c, g, or t
  misc_feature (1365)..(1366): n is a, c, g, or t
  misc_feature (1369)..(1369): n is a, c, g, or t
  misc_feature (1377)..(1377): n is a, c, g, or t
cannagagaaattactatgagaggatcgcatcaccatcaccatcacggatcctatttaggtgacactatagaatcgtcgacccacgcgtccgcccacgcgtccgctcctgaggctgacatgaatatttttgaagacattggggattacgtaccctccacaaccaagacacctcgggacaaggagcgggagagatatcgggaacgggagcgtgatcgggaaagagacagagaccgtgaccgagagcgagagcgagaacgagatcgggaacgagagcgagagcgggaccgagagagagaagaggaaaagaagagacacagctactttgagaagccaaaagtagatgatgagcccatggacgttgacaaaggacctgggtctaccaaggagttgatcaagtccatcaatgaaaagtttgctgggtctgctggctgggaaggcacagaatcgttgaagaagccagaagacaaaaagcagctgggagatttctttggcatgtccaacagttatgcagagtgctacccagccacgatggatgacatggctgtggatagtgatgaggaggtggattatagcaaaatggaccagggtaacaagaaggggcccttaggccgttgggactttgatacccaggaagaatacagcgagtatatgaacaacaaagaagctttgcccaaggctgcattccagtatggtatcaaaatgtctgaagggcggaaaaccaggcgcttcaaggaaaccaatgacaaagcagagcttgatcgccagtggaagaagattagtgcaatcattgagaagaggaagaagatggaagctgatggggttgaagtcnaaagaccaaaatactaatcactagttacaacccagagatgctccacaagggatatgctcccccacggtttttcttttctacaattttccnaaaggttgccaagatgtttttttttgtggatgaaatataaaatttttattggngtaattaccttgggttccccattaaaattgggttaccttgcctaaaaaaaaaaaaaaaaaaaanggccggccccctcccctattngnnggatcccttattaacccttatttnacctgaaccttggaaccnccctgttngattanatccccnttattggacccncccnaaacccccctnntggantttttttcaaaacccnccgtttgccccccggggcgttttttttttttnngaaaantccnanncnttcntnggccnaantttttttnggacctatggnaagcctnaanttggaaaaaaaaanncntggaatntccccccctntttnnttnccnatnngccccttaaaaaacttttttgggnntttncnccccnttncccnnggcccctnnacncccccctn

SEQ ID NO: 591 - DNA, 1387 bp, Homo Sapiens
  misc_feature (12)..(12): n is a, c, g, or t
  misc_feature (842)..(842): n is a, c, g, or t
  misc_feature (896)..(896): n is a, c, g, or t
  misc_feature (903)..(903): n is a, c, g, or t
  misc_feature (925)..(925): n is a, c, g, or t
  misc_feature (933)..(933): n is a, c, g, or t
  misc_feature (937)..(937): n is a, c, g, or t
  misc_feature (943)..(943): n is a, c, g, or t
  misc_feature (945)..(945): n is a, c, g, or t
  misc_feature (947)..(947): n is a, c, g, or t
  misc_feature (956)..(957): n is a, c, g, or t
  misc_feature (960)..(961): n is a, c, g, or t
  misc_feature (964)..(964): n is a, c, g, or t
  misc_feature (970)..(970): n is a, c, g, or t
  misc_feature (973)..(974): n is a, c, g, or t
  misc_feature (981)..(981): n is a, c, g, or t
  misc_feature (991)..(991): n is a, c, g, or t
  misc_feature (994)..(994): n is a, c, g, or t
  misc_feature (997)..(997): n is a, c, g, or t
  misc_feature (1000)..(1000): n is a, c, g, or t
  misc_feature (1011)..(1011): n is a, c, g, or t
  misc_feature (1015)..(1015): n is a, c, g, or t
  misc_feature (1024)..(1024): n is a, c, g, or t
  misc_feature (1027)..(1027): n is a, c, g, or t
  misc_feature (1029)..(1034): n is a, c, g, or t
  misc_feature (1038)..(1038): n is a, c, g, or t
  misc_feature (1044)..(1045): n is a, c, g, or t
  misc_feature (1051)..(1051): n is a, c, g, or t
  misc_feature (1053)..(1054): n is a, c, g, or t
  misc_feature (1060)..(1060): n is a, c, g, or t
  misc_feature (1065)..(1065): n is a, c, g, or t
  misc_feature (1067)..(1069): n is a, c, g, or t
  misc_feature (1076)..(1076): n is a, c, g, or t
  misc_feature (1078)..(1078): n is a, c, g, or t
  misc_feature (1083)..(1083): n is a, c, g, or t
  misc_feature (1085)..(1085): n is a, c, g, or t
  misc_feature (1088)..(1088): n is a, c, g, or t
  misc_feature (1090)..(1090): n is a, c, g, or t
  misc_feature (1092)..(1092): n is a, c, g, or t
  misc_feature (1095)..(1095): n is a, c, g, or t
  misc_feature (1098)..(1098): n is a, c, g, or t
  misc_feature (1100)..(1100): n is a, c, g, or t
  misc_feature (1104)..(1105): n is a, c, g, or t
  misc_feature (1107)..(1107): n is a, c, g, or t
  misc_feature (1112)..(1112): n is a, c, g, or t
  misc_feature (1125)..(1125): n is a, c, g, or t
  misc_feature (1130)..(1130): n is a, c, g, or t
  misc_feature (1136)..(1142): n is a, c, g, or t
  misc_feature (1144)..(1144): n is a, c, g, or t
  misc_feature (1155)..(1155): n is a, c, g, or t
  misc_feature (1158)..(1161): n is a, c, g, or t
  misc_feature (1163)..(1163): n is a, c, g, or t
  misc_feature (1166)..(1167): n is a, c, g, or t
  misc_feature (1172)..(1172): n is a, c, g, or t
  misc_feature (1183)..(1183): n is a, c, g, or t
  misc_feature (1191)..(1191): n is a, c, g, or t
  misc_feature (1194)..(1194): n is a, c, g, or t
  misc_feature (1199)..(1199): n is a, c, g, or t
  misc_feature (1202)..(1204): n is a, c, g, or t
  misc_feature (1211)..(1215): n is a, c, g, or t
  misc_feature (1218)..(1219): n is a, c, g, or t
  misc_feature (1222)..(1222): n is a, c, g, or t
  misc_feature (1225)..(1234): n is a, c, g, or t
  misc_feature (1237)..(1238): n is a, c, g, or t
  misc_feature (1240)..(1241): n is a, c, g, or t
  misc_feature (1245)..(1252): n is a, c, g, or t
  misc_feature (1258)..(1258): n is a, c, g, or t
  misc_feature (1262)..(1269): n is a, c, g, or t
  misc_feature (1273)..(1280): n is a, c, g, or t
  misc_feature (1282)..(1300): n is a, c, g, or t
  misc_feature (1303)..(1312): n is a, c, g, or t
  misc_feature (1314)..(1378): n is a, c, g, or t
  misc_feature (1382)..(1384): n is a, c, g, or t
tagagaaattanctatgagaggatcgcatcaccatcaccatcacggatcctatttaggtgacactatagaatcgtcgacccacgcgtccgatgactttctcattctccctgggtacatcgacttcactgcagaccaggtggacctgacttctgctctgaccaagaaaatcactcttaagaccccactggtttcctctcccatggacacagtcacagaggctgggatggccatagcaatggcgcttacaggcggtattggcttcatccaccacaactgtacacctgaattccaggccaatgaagttcggaaagtgaagaaatatgaacagggattcatcacagaccctgtggtcctcagccccaaggatcgcgtgcgggatgtttttgaggccaaggcccggcatggtttctgcggtatcccaatcacagacacaggccggatggggagccgcttggtgggcatcatctcctccagggacattgattttctcaaagaggaggaacatgactgtttcttggaagagataatgacaaagagggaagacttggtggtagcccctgcaggcatcacactgaaggaggcaaatgaaattctgcagcgcagcaagaagggaaagttgcccattgtaaatgaagatgatgagcttgtggccatcattgcccggacagacctgaagaagaatcgggactacccactagcctccaaagatgccaagaaacagctgctgtgtggggcagccattggcactcatgaggatgacaagtataggctggacttgctcgcccaggctggtgtggatgtagtggttttggactcttcccagggaaattccatcttccanatcaatatgatcaagtacatcaaagacaaataccctatctccaagtcattggangcaatgnggtcactgctgcccaggccaanaacctcantgangcaggngngnatgccctgnnggnnggncatggnaannggctccntctgcattanccnagnaantgctggcctgngggnggccccaancanannnnnngtanaagggnncaaaananncccggnccttngnnnttccggncntgctnanggngnanccnaangngggnnantttgnaaaaccttggccntgggncccccnnnnnnnangggttcctccnggnnnncnccnnggagncccggggaaantttttttncanggganccnnnaaaaaannnnnggnnggnttnnnnnnnnnnggnnanncccnnnnnnnnaaaaantttnnnnnnnnaaannnnnnnncnnnnnnnnnnnnnnnnnnnaannnnnnnnnntnnnnnnnnnnnnnnnnnnnnnnnnnnnnnnnnnnnnnnnnnnnnnnnnnnnnnnnnnnnnnnnnnaaannnccc

SEQ ID NO: 592 - DNA, 1349 bp, Homo Sapiens
  misc_feature (1)..(1): n is a, c, g, or t
  misc_feature (804)..(804): n is a, c, g, or t
  misc_feature (899)..(899): n is a, c, g, or t
  misc_feature (906)..(906): n is a, c, g, or t
  misc_feature (918)..(918): n is a, c, g, or t
  misc_feature (923)..(923): n is a, c, g, or t
  misc_feature (927)..(927): n is a, c, g, or t
  misc_feature (935)..(935): n is a, c, g, or t
  misc_feature (937)..(938): n is a, c, g, or t
  misc_feature (946)..(946): n is a, c, g, or t
  misc_feature (950)..(950): n is a, c, g, or t
  misc_feature (960)..(960): n is a, c, g, or t
  misc_feature (965)..(965): n is a, c, g, or t
  misc_feature (972)..(973): n is a, c, g, or t
  misc_feature (976)..(976): n is a, c, g, or t
  misc_feature (999)..(999): n is a, c, g, or t
  misc_feature (1002)..(1002): n is a, c, g, or t
  misc_feature (1007)..(1007): n is a, c, g, or t
  misc_feature (1009)..(1009): n is a, c, g, or t
  misc_feature (1013)..(1014): n is a, c, g, or t
  misc_feature (1016)..(1016): n is a, c, g, or t
  misc_feature (1024)..(1024): n is a, c, g, or t
  misc_feature (1026)..(1026): n is a, c, g, or t
  misc_feature (1028)..(1028): n is a, c, g, or t
  misc_feature (1031)..(1031): n is a, c, g, or t
  misc_feature (1038)..(1038): n is a, c, g, or t
  misc_feature (1047)..(1047): n is a, c, g, or t
  misc_feature (1050)..(1050): n is a, c, g, or t
  misc_feature (1059)..(1059): n is a, c, g, or t
  misc_feature (1062)..(1062): n is a, c, g, or t
  misc_feature (1064)..(1064): n is a, c, g, or t
  misc_feature (1066)..(1068): n is a, c, g, or t
  misc_feature (1081)..(1081): n is a, c, g, or t
  misc_feature (1083)..(1085): n is a, c, g, or t
  misc_feature (1108)..(1109): n is a, c, g, or t
  misc_feature (1119)..(1120): n is a, c, g, or t
  misc_feature (1122)..(1123): n is a, c, g, or t
  misc_feature (1127)..(1127): n is a, c, g, or t
  misc_feature (1131)..(1133): n is a, c, g, or t
  misc_feature (1139)..(1139): n is a, c, g, or t
  misc_feature (1151)..(1151): n is a, c, g, or t
  misc_feature (1157)..(1157): n is a, c, g, or t
  misc_feature (1160)..(1160): n is a, c, g, or t
  misc_feature (1169)..(1169): n is a, c, g, or t
  misc_feature (1171)..(1171): n is a, c, g, or t
  misc_feature (1175)..(1175): n is a, c, g, or t
  misc_feature (1178)..(1178): n is a, c, g, or t
  misc_feature (1182)..(1184): n is a, c, g, or t
  misc_feature (1186)..(1193): n is a, c, g, or t
  misc_feature (1196)..(1197): n is a, c, g, or t
  misc_feature (1199)..(1200): n is a, c, g, or t
  misc_feature (1203)..(1204): n is a, c, g, or t
  misc_feature (1206)..(1207): n is a, c, g, or t
  misc_feature (1212)..(1213): n is a, c, g, or t
  misc_feature (1225)..(1226): n is a, c, g, or t
  misc_feature (1228)..(1228): n is a, c, g, or t
  misc_feature (1234)..(1234): n is a, c, g, or t
  misc_feature (1237)..(1238): n is a, c, g, or t
  misc_feature (1242)..(1242): n is a, c, g, or t
  misc_feature (1244)..(1245): n is a, c, g, or t
  misc_feature (1247)..(1247): n is a, c, g, or t
  misc_feature (1249)..(1250): n is a, c, g, or t
  misc_feature (1254)..(1269): n is a, c, g, or t
  misc_feature (1274)..(1277): n is a, c, g, or t
  misc_feature (1279)..(1282): n is a, c, g, or t
  misc_feature (1289)..(1294): n is a, c, g, or t
  misc_feature (1302)..(1303): n is a, c, g, or t
  misc_feature (1305)..(1306): n is a, c, g, or t
  misc_feature (1310)..(1311): n is a, c, g, or t
  misc_feature (1313)..(1321): n is a, c, g, or t
  misc_feature (1326)..(1331): n is a, c, g, or t
  misc_feature (1334)..(1336): n is a, c, g, or t
  misc_feature (1338)..(1349): n is a, c, g, or t
naaatagagaaattactatgagaggatcgcatcaccatcaccatcacggatcctatttaggtgacactatagaatcgtcgacccacgcgtccggtgaagcagagcttcctgaccgaggtggagcagctgtccaggtttcgtcacccaaacattgtggactttgctggctactgtgctcagaacggcttctactgcctggtgtacggcttcctgcccaacggctccctggaggaccgtctccactgccagacccaggcctgcccacctctctcctggcctcagcgactggacatccttctgggtacagcccgggcaattcagtttctacatcaggacagccccagcctcatccatggagacatcaagagttccaacgtccttctggatgagaggctgacacccaagctgggagactttggcctggcccggttcagccgctttgccgggtccagccccagccagagcagcatggtggcccggacacagacagtgcggggcaccctggcctacctgcccgaggagtacatcaagacgggaaggctggctgtggacacggacaccttcagctttggggtggtagtgctagagaccttggctggtcagagggctgtgaagacgcacggtgccaggaccaagtatctgaaagacctggtggaagaggaggctgaggaggctggagtggctttgagaagcacccagagcacactgcaagcaggtctggctgcagatgcctgggctgctcccatcgccatgcagatctacaagaagcacctggaccccaggcccgggccctgcccacctganctgggcctgggcctgggccactggcctgctgctgcctgcaccgccgggccaaaaggaggcctcctatgacccaaggaaaactcctacgtgtccancactggnaaaacccacagnggggntgcntccatggnanncccctggnaacnccatcagganccagngcccaannaancaaaaaactgcaaaaagccccancancccgngnaaannanaaaaaccnangnggnctcttgntggcctggnctntggaaattnaancnannntgcctctgggacnannncccttaaggaagccggtttcccnnggggaaaacnnannaaanccannngggaanggcccaaaaccnccccanccnggaaaaaangncttngantttnnntnnnnnnnnaanncnnaannanntaccnncccaaaaaaaanncnaaaatnccnnaaananngncnnaaannnnnnnnnnnnnnnnccccnnnntnnnnaaaaaannnnnncaaaaaannannaaannannnnnnnnnacccnnnnnnaannntnnnnnnnnnnnn

SEQ ID NO: 593 - DNA, 1719 bp, Homo Sapiens
  misc_feature (5)..(5): n is a, c, g, or t
  misc_feature (10)..(11): n is a, c, g, or t
  misc_feature (18)..(18): n is a, c, g, or t
  misc_feature (27)..(27): n is a, c, g, or t
  misc_feature (46)..(46): n is a, c, g, or t
  misc_feature (53)..(54): n is a, c, g, or t
  misc_feature (56)..(56): n is a, c, g, or t
  misc_feature (61)..(61): n is a, c, g, or t
  misc_feature (70)..(70): n is a, c, g, or t
  misc_feature (76)..(78): n is a, c, g, or t
  misc_feature (85)..(85): n is a, c, g, or t
  misc_feature (99)..(99): n is a, c, g, or t
  misc_feature (101)..(101): n is a, c, g, or t
  misc_feature (110)..(110): n is a, c, g, or t
  misc_feature (112)..(112): n is a, c, g, or t
  misc_feature (119)..(119): n is a, c, g, or t
  misc_feature (122)..(122): n is a, c, g, or t
  misc_feature (125)..(127): n is a, c, g, or t
  misc_feature (129)..(129): n is a, c, g, or t
  misc_feature (131)..(131): n is a, c, g, or t
  misc_feature (134)..(135): n is a, c, g, or t
  misc_feature (143)..(143): n is a, c, g, or t
  misc_feature (146)..(146): n is a, c, g, or t
  misc_feature (156)..(158): n is a, c, g, or t
  misc_feature (164)..(164): n is a, c, g, or t
  misc_feature (166)..(166): n is a, c, g, or t
  misc_feature (174)..(175): n is a, c, g, or t
  misc_feature (178)..(178): n is a, c, g, or t
  misc_feature (185)..(186): n is a, c, g, or t
  misc_feature (192)..(192): n is a, c, g, or t
  misc_feature (199)..(199): n is a, c, g, or t
  misc_feature (203)..(205): n is a, c, g, or t
  misc_feature (214)..(214): n is a, c, g, or t
  misc_feature (220)..(220): n is a, c, g, or t
  misc_feature (222)..(222): n is a, c, g, or t
  misc_feature (227)..(227): n is a, c, g, or t
  misc_feature (229)..(229): n is a, c, g, or t
  misc_feature (241)..(241): n is a, c, g, or t
  misc_feature (250)..(250): n is a, c, g, or t
  misc_feature (255)..(255): n is a, c, g, or t
  misc_feature (258)..(258): n is a, c, g, or t
  misc_feature (261)..(261): n is a, c, g, or t
  misc_feature (264)..(264): n is a, c, g, or t
  misc_feature (271)..(271): n is a, c, g, or t
  misc_feature (275)..(275): n is a, c, g, or t
  misc_feature (281)..(281): n is a, c, g, or t
  misc_feature (286)..(286): n is a, c, g, or t
  misc_feature (294)..(294): n is a, c, g, or t
  misc_feature (309)..(309): n is a, c, g, or t
  misc_feature (312)..(312): n is a, c, g, or t
  misc_feature (314)..(314): n is a, c, g, or t
  misc_feature (318)..(318): n is a, c, g, or t
  misc_feature (322)..(323): n is a, c, g, or t
  misc_feature (326)..(326): n is a, c, g, or t
  misc_feature (335)..(335): n is a, c, g, or t
  misc_feature (338)..(338): n is a, c, g, or t
  misc_feature (342)..(342): n is a, c, g, or t
  misc_feature (347)..(347): n is a, c, g, or t
  misc_feature (350)..(350): n is a, c, g, or t
  misc_feature (354)..(354): n is a, c, g, or t
  misc_feature (360)..(360): n is a, c, g, or t
  misc_feature (363)..(365): n is a, c, g, or t
  misc_feature (367)..(367): n is a, c, g, or t
  misc_feature (369)..(369): n is a, c, g, or t
  misc_feature (375)..(376): n is a, c, g, or t
  misc_feature (378)..(380): n is a, c, g, or t
  misc_feature (382)..(382): n is a, c, g, or t
  misc_feature (389)..(390): n is a, c, g, or t
  misc_feature (396)..(396): n is a, c, g, or t
  misc_feature (398)..(398): n is a, c, g, or t
  misc_feature (401)..(401): n is a, c, g, or t
  misc_feature (404)..(404): n is a, c, g, or t
  misc_feature (408)..(408): n is a, c, g, or t
  misc_feature (411)..(411): n is a, c, g, or t
  misc_feature (414)..(414): n is a, c, g, or t
  misc_feature (417)..(417): n is a, c, g, or t
  misc_feature (419)..(419): n is a, c, g, or t
  misc_feature (423)..(423): n is a, c, g, or t
  misc_feature (426)..(426): n is a, c, g, or t
  misc_feature (428)..(428): n is a, c, g, or t
  misc_feature (430)..(430): n is a, c, g, or t
  misc_feature (434)..(434): n is a, c, g, or t
  misc_feature (438)..(438): n is a, c, g, or t
  misc_feature (444)..(444): n is a, c, g, or t
  misc_feature (446)..(446): n is a, c, g, or t
  misc_feature (450)..(450): n is a, c, g, or t
  misc_feature (457)..(457): n is a, c, g, or t
  misc_feature (462)..(462): n is a, c, g, or t
  misc_feature (464)..(464): n is a, c, g, or t
  misc_feature (467)..(467): n is a, c, g, or t
  misc_feature (470)..(470): n is a, c, g, or t
  misc_feature (474)..(474): n is a, c, g, or t
  misc_feature (478)..(478): n is a, c, g, or t
  misc_feature (484)..(484): n is a, c, g, or t
  misc_feature (487)..(487): n is a, c, g, or t
  misc_feature (489)..(489): n is a, c, g, or t
  misc_feature (499)..(499): n is a, c, g, or t
  misc_feature (511)..(511): n is a, c, g, or t
  misc_feature (515)..(515): n is a, c, g, or t
  misc_feature (520)..(521): n is a, c, g, or t
  misc_feature (524)..(524): n is a, c, g, or t
  misc_feature (526)..(526): n is a, c, g, or t
  misc_feature (535)..(535): n is a, c, g, or t
  misc_feature (542)..(542): n is a, c, g, or t
  misc_feature (545)..(546): n is a, c, g, or t
  misc_feature (551)..(551): n is a, c, g, or t
  misc_feature (555)..(555): n is a, c, g, or t
  misc_feature (564)..(564): n is a, c, g, or t
  misc_feature (572)..(572): n is a, c, g, or t
  misc_feature (574)..(575): n is a, c, g, or t
  misc_feature (592)..(593): n is a, c, g, or t
  misc_feature (603)..(603): n is a, c, g, or t
  misc_feature (609)..(610): n is a, c, g, or t
  misc_feature (620)..(622): n is a, c, g, or t
  misc_feature (628)..(629): n is a, c, g, or t
  misc_feature (638)..(638): n is a, c, g, or t
  misc_feature (640)..(641): n is a, c, g, or t
  misc_feature (646)..(646): n is a, c, g, or t
  misc_feature (649)..(649): n is a, c, g, or t
  misc_feature (652)..(652): n is a, c, g, or t
  misc_feature (656)..(656): n is a, c, g, or t
  misc_feature (659)..(659): n is a, c, g, or t
  misc_feature (662)..(666): n is a, c, g, or t
  misc_feature (671)..(671): n is a, c, g, or t
  misc_feature (674)..(674): n is a, c, g, or t
  misc_feature (676)..(676): n is a, c, g, or t
  misc_feature (680)..(680): n is a, c, g, or t
  misc_feature (684)..(684): n is a, c, g, or t
  misc_feature (696)..(697): n is a, c, g, or t
  misc_feature (702)..(706): n is a, c, g, or t
  misc_feature (708)..(708): n is a, c, g, or t
  misc_feature (732)..(732): n is a, c, g, or t
  misc_feature (736)..(736): n is a, c, g, or t
  misc_feature (738)..(739): n is a, c, g, or t
  misc_feature (744)..(744): n is a, c, g, or t
  misc_feature (749)..(750): n is a, c, g, or t
  misc_feature (755)..(756): n is a, c, g, or t
  misc_feature (764)..(764): n is a, c, g, or t
  misc_feature (768)..(769): n is a, c, g, or t
  misc_feature (776)..(777): n is a, c, g, or t
  misc_feature (781)..(781): n is a, c, g, or t
  misc_feature (784)..(784): n is a, c, g, or t
  misc_feature (788)..(788): n is a, c, g, or t
  misc_feature (793)..(794): n is a, c, g, or t
  misc_feature (801)..(801): n is a, c, g, or t
  misc_feature (806)..(806): n is a, c, g, or t
  misc_feature (809)..(810): n is a, c, g, or t
  misc_feature (814)..(815): n is a, c, g, or t
  misc_feature (819)..(819): n is a, c, g, or t
  misc_feature (823)..(823): n is a, c, g, or t
  misc_feature (831)..(831): n is a, c, g, or t
  misc_feature (834)..(835): n is a, c, g, or t
  misc_feature (842)..(844): n is a, c, g, or t
  misc_feature (847)..(847): n is a, c, g, or t
  misc_feature (855)..(855): n is a, c, g, or t
  misc_feature (859)..(859): n is a, c, g, or t
  misc_feature (865)..(866): n is a, c, g, or t
  misc_feature (869)..(869): n is a, c, g, or t
  misc_feature (873)..(873): n is a, c, g, or t
  misc_feature (876)..(876): n is a, c, g, or t
  misc_feature (880)..(882): n is a, c, g, or t
  misc_feature (885)..(885): n is a, c, g, or t
  misc_feature (889)..(889): n is a, c, g, or t
  misc_feature (891)..(891): n is a, c, g, or t
  misc_feature (895)..(899): n is a, c, g, or t
  misc_feature (901)..(902): n is a, c, g, or t
  misc_feature (904)..(904): n is a, c, g, or t
  misc_feature (907)..(911): n is a, c, g, or t
  misc_feature (914)..(914): n is a, c, g, or t
  misc_feature (921)..(921): n is a, c, g, or t
  misc_feature (924)..(925): n is a, c, g, or t
  misc_feature (945)..(945): n is a, c, g, or t
  misc_feature (947)..(947): n is a, c, g, or t
  misc_feature (949)..(951): n is a, c, g, or t
  misc_feature (953)..(953): n is a, c, g, or t
  misc_feature (967)..(967): n is a, c, g, or t
  misc_feature (969)..(970): n is a, c, g, or t
  misc_feature (975)..(975): n is a, c, g, or t
  misc_feature (979)..(979): n is a, c, g, or t
  misc_feature (982)..(982): n is a, c, g, or t
  misc_feature (992)..(992): n is a, c, g, or t
  misc_feature (996)..(996): n is a, c, g, or t
  misc_feature (1001)..(1001): n is a, c, g, or t
  misc_feature (1003)..(1003): n is a, c, g, or t
  misc_feature (1008)..(1008): n is a, c, g, or t
  misc_feature (1013)..(1013): n is a, c, g, or t
  misc_feature (1020)..(1020): n is a, c, g, or t
  misc_feature (1029)..(1029): n is a, c, g, or t
  misc_feature (1032)..(1032): n is a, c, g, or t
  misc_feature (1037)..(1037): n is a, c, g, or t
  misc_feature (1040)..(1040): n is a, c, g, or t
  misc_feature (1042)..(1042): n is a, c, g, or t
  misc_feature (1044)..(1044): n is a, c, g, or t
  misc_feature (1047)..(1047): n is a, c, g, or t
  misc_feature (1057)..(1057): n is a, c, g, or t
  misc_feature (1059)..(1059): n is a, c, g, or t
  misc_feature (1061)..(1061): n is a, c, g, or t
  misc_feature (1064)..(1066): n is a, c, g, or t
  misc_feature (1068)..(1068): n is a, c, g, or t
  misc_feature (1074)..(1075): n is a, c, g, or t
  misc_feature (1079)..(1079): n is a, c, g, or t
  misc_feature (1081)..(1081): n is a, c, g, or t
  misc_feature (1085)..(1085): n is a, c, g, or t
  misc_feature (1087)..(1087): n is a, c, g, or t
  misc_feature (1089)..(1089): n is a, c, g, or t
  misc_feature (1095)..(1095): n is a, c, g, or t
  misc_feature (1097)..(1097): n is a, c, g, or t
  misc_feature (1111)..(1112): n is a, c, g, or t
  misc_feature (1126)..(1127): n is a, c, g, or t
  misc_feature (1131)..(1131): n is a, c, g, or t
  misc_feature (1134)..(1135): n is a, c, g, or t
  misc_feature (1144)..(1145): n is a, c, g, or t
  misc_feature (1148)..(1148): n is a, c, g, or t
  misc_feature (1152)..(1152): n is a, c, g, or t
  misc_feature (1162)..(1162): n is a, c, g, or t
  misc_feature (1166)..(1166): n is a, c, g, or t
  misc_feature (1170)..(1170): n is a, c, g, or t
  misc_feature (1175)..(1175): n is a, c, g, or t
  misc_feature (1177)..(1177): n is a, c, g, or t
  misc_feature (1181)..(1181): n is a, c, g, or t
  misc_feature (1183)..(1183): n is a, c, g, or t
  misc_feature (1189)..(1190): n is a, c, g, or t
  misc_feature (1192)..(1193): n is a, c, g, or t
  misc_feature (1198)..(1198): n is a, c, g, or t
  misc_feature (1200)..(1200): n is a, c, g, or t
  misc_feature (1203)..(1203): n is a, c, g, or t
  misc_feature (1209)..(1210): n is a, c, g, or t
  misc_feature (1212)..(1212): n is a, c, g, or t
  misc_feature (1215)..(1215): n is a, c, g, or t
  misc_feature (1220)..(1223): n is a, c, g, or t
  misc_feature (1229)..(1233): n is a, c, g, or t
  misc_feature (1239)..(1240): n is a, c, g, or t
  misc_feature (1243)..(1243): n is a, c, g, or t
  misc_feature (1248)..(1248): n is a, c, g, or t
  misc_feature (1254)..(1254): n is a, c, g, or t
  misc_feature (1256)..(1257): n is a, c, g, or t
  misc_feature (1264)..(1265): n is a, c, g, or t
  misc_feature (1270)..(1270): n is a, c, g, or t
  misc_feature (1275)..(1275): n is a, c, g, or t
  misc_feature (1277)..(1277): n is a, c, g, or t
  misc_feature (1283)..(1284): n is a, c, g, or t
  misc_feature (1289)..(1289): n is a, c, g, or t
  misc_feature (1292)..(1292): n is a, c, g, or t
  misc_feature (1296)..(1296): n is a, c, g, or t
  misc_feature (1298)..(1298): n is a, c, g, or t
  misc_feature (1301)..(1302): n is a, c, g, or t
  misc_feature (1306)..(1306): n is a, c, g, or t
  misc_feature (1308)..(1308): n is a, c, g, or t
  misc_feature (1312)..(1312): n is a, c, g, or t
  misc_feature (1315)..(1315): n is a, c, g, or t
  misc_feature (1322)..(1322): n is a, c, g, or t
  misc_feature (1324)..(1324): n is a, c, g, or t
  misc_feature (1327)..(1327): n is a, c, g, or t
  misc_feature (1331)..(1331): n is a, c, g, or t
  misc_feature (1334)..(1334): n is a, c, g, or t
  misc_feature (1336)..(1340): n is a, c, g, or t
  misc_feature (1345)..(1345): n is a, c, g, or t
  misc_feature (1348)..(1348): n is a, c, g, or t
  misc_feature (1350)..(1350): n is a, c, g, or t
  misc_feature (1354)..(1355): n is a, c, g, or t
  misc_feature (1361)..(1362): n is a, c, g, or t
  misc_feature (1366)..(1367): n is a, c, g, or t
  misc_feature (1370)..(1370): n is a, c, g, or t
  misc_feature (1373)..(1373): n is a, c, g, or t
  misc_feature (1383)..(1383): n is a, c, g, or t
  misc_feature (1386)..(1386): n is a, c, g, or t
  misc_feature (1389)..(1389): n is a, c, g, or t
  misc_feature (1392)..(1392): n is a, c, g, or t
  misc_feature (1412)..(1412): n is a, c, g, or t
  misc_feature (1414)..(1415): n is a, c, g, or t
  misc_feature (1419)..(1419): n is a, c, g, or t
  misc_feature (1429)..(1431): n is a, c, g, or t
  misc_feature (1433)..(1433): n is a, c, g, or t
  misc_feature (1435)..(1435): n is a, c, g, or t
  misc_feature (1438)..(1439): n is a, c, g, or t
  misc_feature (1441)..(1441): n is a, c, g, or t
  misc_feature (1448)..(1449): n is a, c, g, or t
  misc_feature (1452)..(1453): n is a, c, g, or t
  misc_feature (1456)..(1457): n is a, c, g, or t
  misc_feature (1461)..(1461): n is a, c, g, or t
  misc_feature (1463)..(1463): n is a, c, g, or t
  misc_feature (1465)..(1465): n is a, c, g, or t
  misc_feature (1467)..(1467): n is a, c, g, or t
  misc_feature (1474)..(1474): n is a, c, g, or t
  misc_feature (1476)..(1477): n is a, c, g, or t
  misc_feature (1479)..(1479): n is a, c, g, or t
  misc_feature (1487)..(1487): n is a, c, g, or t
  misc_feature (1490)..(1490): n is a, c, g, or t
  misc_feature (1495)..(1495): n is a, c, g, or t
  misc_feature (1502)..(1502): n is a, c, g, or t
  misc_feature (1507)..(1509): n is a, c, g, or t
  misc_feature (1523)..(1524): n is a, c, g, or t
  misc_feature (1526)..(1526): n is a, c, g, or t
  misc_feature (1529)..(1529): n is a, c, g, or t
  misc_feature (1531)..(1531): n is a, c, g, or t
  misc_feature (1534)..(1534): n is a, c, g, or t
  misc_feature (1537)..(1537): n is a, c, g, or t
  misc_feature (1539)..(1539): n is a, c, g, or t
  misc_feature (1546)..(1546): n is a, c, g, or t
  misc_feature (1550)..(1550): n is a, c, g, or t
  misc_feature (1552)..(1552): n is a, c, g, or t
  misc_feature (1554)..(1554): n is a, c, g, or t
  misc_feature (1560)..(1560): n is a, c, g, or t
  misc_feature (1569)..(1570): n is a, c, g, or t
  misc_feature (1573)..(1573): n is a, c, g, or t
  misc_feature (1575)..(1575): n is a, c, g, or t
  misc_feature (1578)..(1578): n is a, c, g, or t
  misc_feature (1582)..(1582): n is a, c, g, or t
  misc_feature (1588)..(1588): n is a, c, g, or t
  misc_feature (1592)..(1593): n is a, c, g, or t
  misc_feature (1597)..(1597): n is a, c, g, or t
  misc_feature (1599)..(1599): n is a, c, g, or t
  misc_feature (1602)..(1602): n is a, c, g, or t
  misc_feature (1608)..(1608): n is a, c, g, or t
  misc_feature (1612)..(1612): n is a, c, g, or t
  misc_feature (1624)..(1624): n is a, c, g, or t
  misc_feature (1627)..(1627): n is a, c, g, or t
  misc_feature (1629)..(1629): n is a, c, g, or t
  misc_feature (1636)..(1636): n is a, c, g, or t
  misc_feature (1638)..(1638): n is a, c, g, or t
  misc_feature (1651)..(1652): n is a, c, g, or t
  misc_feature (1662)..(1662): n is a, c, g, or t
  misc_feature (1677)..(1677): n is a, c, g, or t
  misc_feature (1689)..(1689): n is a, c, g, or t
  misc_feature (1692)..(1692): n is a, c, g, or t
  misc_feature (1694)..(1694): n is a, c, g, or t
  misc_feature (1699)..(1699): n is a, c, g, or t
  misc_feature (1704)..(1705): n is a, c, g, or t
  misc_feature (1709)..(1710): n is a, c, g, or t
  misc_feature (1714)..(1715): n is a, c, g, or t
aaggngaaanntatttgnggagggggntcccctcccccccccctcncggggtnncnttttngggggactntataannnctttaancccccgcttcccgncnacgtgcggngngccatcnganggnnncntnccnncctgtcanagncatggacacnnnggaagnantacacaannatntaccttnngtttcnttgcccnctannnacccttgangtgagnanaacgnantacatctttaancatgagccngcccntgnacntcncagcggnagcntcccgntcaancatatcgntgccaacttctgaanagntnatcnggtnnatnaatatggcntcnaccncccanagnaccntaccanggnnncngngcaccnntnnnanaggagcnnttgccngncgnacnacanggnaancanangagncananangttnctcnataccntnctgnagaatanagagncntgnagnactnaatntgttcnctnangtccttttgncaatatctttanaccngaacnnacntntgatttgancacccantgnncgaanaaantttctactntacaaaangnncctaaacagtaggtcannagaactgccntgactnngtcttggtannnccttanngcaagatgncnnatcanctngtncttnccngannnnnttttnatntnaccnactncactggctagcnnacaannnnncnctggtcctagaggcaccccgtccntatntnncgagnattcnncactnnaaataccncatnntttacgnncatnaanaatntttcnnattttgngcccnttnncccnnatgngtcnatacaacncanncccagannncangactactnttancccttnntcngatntantttnnntgnttanangatnnnnncnncngannnnnctnactggcnttnnaaccacccagggtccccaancnannncnagtctcccctagancnncccancttnaanaacaccgaancccnccacntnaacanatatnacctacncttttcatnaanccctnagnantnggngcctccctancntnccnnncncttttnntcantngcantntnaagacncnaataaacatacttnnttttgtaaaaaaanntgtntanncatttctcnncgntctntatttttttngtantttnataancntatncncctttnntnnaaccncnatnaagccnnanacntacannnnccctannnnnaagccnnaanctccnaaaacnanngattccnnctttngctcncncaaaanntgagnctncttnantcnncccncnccangcngaaaaanancantcanagngnnnnncctcnctncntgcnntattcnnactnnganacntccttttttngtngcnctnttgtacctctcatacttatnannacanctcttcttannntnanctnnantttcccnnttnntanngaanangncnactctcnanntncaccacgngantaacntcagatnatacnnntttatgttgcactnntntananacncantntaattanacantntnctatanaatatcttnnttntntgnctcngcatantatnnttancnttncttgcnctgngcacggcaaganatntntcatctntntctcctactacannttattctctntatacatcatcgtgncgactcgatatnatntncaccnttacnnatgnntgtnngtga

SEQ ID NO: 594 - DNA, 1427 bp, Homo Sapiens
  misc_feature (93)..(93): n is a, c, g, or t
  misc_feature (95)..(95): n is a, c, g, or t
  misc_feature (97)..(98): n is a, c, g, or t
  misc_feature (115)..(115): n is a, c, g, or t
  misc_feature (122)..(122): n is a, c, g, or t
  misc_feature (130)..(130): n is a, c, g, or t
  misc_feature (133)..(133): n is a, c, g, or t
  misc_feature (156)..(156): n is a, c, g, or t
  misc_feature (174)..(174): n is a, c, g, or t
  misc_feature (199)..(199): n is a, c, g, or t
  misc_feature (242)..(242): n is a, c, g, or t
  misc_feature (246)..(246): n is a, c, g, or t
  misc_feature (252)..(252): n is a, c, g, or t
  misc_feature (277)..(277): n is a, c, g, or t
  misc_feature (281)..(281): n is a, c, g, or t
  misc_feature (286)..(286): n is a, c, g, or t
  misc_feature (292)..(292): n is a, c, g, or t
  misc_feature (294)..(294): n is a, c, g, or t
  misc_feature (299)..(299): n is a, c, g, or t
  misc_feature (307)..(307): n is a, c, g, or t
  misc_feature (312)..(312): n is a, c, g, or t
  misc_feature (319)..(319): n is a, c, g, or t
  misc_feature (331)..(332): n is a, c, g, or t
  misc_feature (340)..(341): n is a, c, g, or t
  misc_feature (346)..(346): n is a, c, g, or t
  misc_feature (349)..(349): n is a, c, g, or t
  misc_feature (352)..(352): n is a, c, g, or t
  misc_feature (360)..(361): n is a, c, g, or t
  misc_feature (363)..(363): n is a, c, g, or t
  misc_feature (367)..(367): n is a, c, g, or t
  misc_feature (375)..(375): n is a, c, g, or t
  misc_feature (395)..(395): n is a, c, g, or t
  misc_feature (413)..(413): n is a, c, g, or t
  misc_feature (429)..(430): n is a, c, g, or t
  misc_feature (438)..(438): n is a, c, g, or t
  misc_feature (440)..(440): n is a, c, g, or t
  misc_feature (451)..(451): n is a, c, g, or t
  misc_feature (454)..(454): n is a, c, g, or t
  misc_feature (476)..(476): n is a, c, g, or t
  misc_feature (488)..(489): n is a, c, g, or t
  misc_feature (571)..(571): n is a, c, g, or t
  misc_feature (587)..(587): n is a, c, g, or t
  misc_feature (590)..(590): n is a, c, g, or t
  misc_feature (599)..(599): n is a, c, g, or t
  misc_feature (609)..(609): n is a, c, g, or t
  misc_feature (618)..(618): n is a, c, g, or t
  misc_feature (625)..(625): n is a, c, g, or t
  misc_feature (653)..(655): n is a, c, g, or t
  misc_feature (658)..(659): n is a, c, g, or t
  misc_feature (689)..(689): n is a, c, g, or t
  misc_feature (691)..(691): n is a, c, g, or t
  misc_feature (697)..(697): n is a, c, g, or t
  misc_feature (701)..(701): n is a, c, g, or t
  misc_feature (738)..(738): n is a, c, g, or t
  misc_feature (744)..(744): n is a, c, g, or t
  misc_feature (764)..(764): n is a, c, g, or t
  misc_feature (772)..(772): n is a, c, g, or t
  misc_feature (774)..(774): n is a, c, g, or t
  misc_feature (780)..(780): n is a, c, g, or t
  misc_feature (813)..(813): n is a, c, g, or t
  misc_feature (816)..(816): n is a, c, g, or t
  misc_feature (818)..(818): n is a, c, g, or t
  misc_feature (830)..(830): n is a, c, g, or t
  misc_feature (832)..(832): n is a, c, g, or t
  misc_feature (835)..(835): n is a, c, g, or t
  misc_feature (847)..(847): n is a, c, g, or t
  misc_feature (857)..(857): n is a, c, g, or t
  misc_feature (863)..(863): n is a, c, g, or t
  misc_feature (867)..(867): n is a, c, g, or t
  misc_feature (871)..(871): n is a, c, g, or t
  misc_feature (873)..(873): n is a, c, g, or t
  misc_feature (880)..(880): n is a, c, g, or t
  misc_feature (887)..(887): n is a, c, g, or t
  misc_feature (889)..(889): n is a, c, g, or t
  misc_feature (897)..(897): n is a, c, g, or t
  misc_feature (900)..(900): n is a, c, g, or t
  misc_feature (909)..(909): n is a, c, g, or t
  misc_feature (920)..(920): n is a, c, g, or t
  misc_feature (925)..(925): n is a, c, g, or t
  misc_feature (927)..(927): n is a, c, g, or t
  misc_feature (932)..(933): n is a, c, g, or t
  misc_feature (940)..(940): n is a, c, g, or t
  misc_feature (942)..(943): n is a, c, g, or t
  misc_feature (961)..(961): n is a, c, g, or t
  misc_feature (975)..(975): n is a, c, g, or t
  misc_feature (983)..(983): n is a, c, g, or t
  misc_feature (990)..(990): n is a, c, g, or t
  misc_feature (994)..(994): n is a, c, g, or t
  misc_feature (996)..(997): n is a, c, g, or t
  misc_feature (999)..(999): n is a, c, g, or t
  misc_feature (1001)..(1002): n is a, c, g, or t
  misc_feature (1004)..(1006): n is a, c, g, or t
  misc_feature (1009)..(1010): n is a, c, g, or t
  misc_feature (1019)..(1019): n is a, c, g, or t
  misc_feature (1024)..(1024): n is a, c, g, or t
  misc_feature (1027)..(1027): n is a, c, g, or t
  misc_feature (1032)..(1033): n is a, c, g, or t
  misc_feature (1045)..(1045): n is a, c, g, or t
  misc_feature (1049)..(1049): n is a, c, g, or t
  misc_feature (1055)..(1055): n is a, c, g, or t
  misc_feature (1058)..(1058): n is a, c, g, or t
  misc_feature (1061)..(1061): n is a, c, g, or t
  misc_feature (1063)..(1064): n is a, c, g, or t
  misc_feature (1071)..(1071): n is a, c, g, or t
  misc_feature (1073)..(1073): n is a, c, g, or t
  misc_feature (1076)..(1076): n is a, c, g, or t
  misc_feature (1084)..(1084): n is a, c, g, or t
  misc_feature (1098)..(1098): n is a, c, g, or t
  misc_feature (1103)..(1103): n is a, c, g, or t
  misc_feature (1110)..(1110): n is a, c, g, or t
  misc_feature (1113)..(1113): n is a, c, g, or t
  misc_feature (1116)..(1116): n is a, c, g, or t
  misc_feature (1121)..(1123): n is a, c, g, or t
  misc_feature (1126)..(1127): n is a, c, g, or t
  misc_feature (1139)..(1143): n is a, c, g, or t
  misc_feature (1153)..(1153): n is a, c, g, or t
  misc_feature (1155)..(1155): n is a, c, g, or t
  misc_feature (1161)..(1162): n is a, c, g, or t
  misc_feature (1168)..(1168): n is a, c, g, or t
  misc_feature (1170)..(1170): n is a, c, g, or t
  misc_feature (1176)..(1176): n is a, c, g, or t
  misc_feature (1182)..(1182): n is a, c, g, or t
  misc_feature (1187)..(1187): n is a, c, g, or t
  misc_feature (1206)..(1206): n is a, c, g, or t
  misc_feature (1211)..(1212): n is a, c, g, or t
  misc_feature (1218)..(1218): n is a, c, g, or t
  misc_feature (1220)..(1220): n is a, c, g, or t
  misc_feature (1222)..(1222): n is a, c, g, or t
  misc_feature (1226)..(1228): n is a, c, g, or t
  misc_feature (1235)..(1235): n is a, c, g, or t
  misc_feature (1239)..(1239): n is a, c, g, or t
  misc_feature (1241)..(1241): n is a, c, g, or t
  misc_feature (1245)..(1246): n is a, c, g, or t
  misc_feature (1260)..(1260): n is a, c, g, or t
  misc_feature (1262)..(1262): n is a, c, g, or t
  misc_feature (1274)..(1275): n is a, c, g, or t
  misc_feature (1279)..(1279): n is a, c, g, or t
  misc_feature (1283)..(1283): n is a, c, g, or t
  misc_feature (1290)..(1290): n is a, c, g, or t
  misc_feature (1292)..(1293): n is a, c, g, or t
  misc_feature (1306)..(1306): n is a, c, g, or t
  misc_feature (1317)..(1317): n is a, c, g, or t
  misc_feature (1322)..(1322): n is a, c, g, or t
  misc_feature (1324)..(1324): n is a, c, g, or t
  misc_feature (1329)..(1329): n is a, c, g, or t
  misc_feature (1331)..(1332): n is a, c, g, or t
  misc_feature (1334)..(1335): n is a, c, g, or t
  misc_feature (1339)..(1339): n is a, c, g, or t
  misc_feature (1344)..(1344): n is a, c, g, or t
  misc_feature (1351)..(1351): n is a, c, g, or t
  misc_feature (1354)..(1354): n is a, c, g, or t
  misc_feature (1356)..(1356): n is a, c, g, or t
  misc_feature (1362)..(1362): n is a, c, g, or t
  misc_feature (1364)..(1364): n is a, c, g, or t
  misc_feature (1368)..(1368): n is a, c, g, or t
  misc_feature (1377)..(1377): n is a, c, g, or t
  misc_feature (1379)..(1379): n is a, c, g, or t
  misc_feature (1387)..(1387): n is a, c, g, or t
  misc_feature (1389)..(1389): n is a, c, g, or t
  misc_feature (1394)..(1394): n is a, c, g, or t
  misc_feature (1401)..(1403): n is a, c, g, or t
  misc_feature (1406)..(1407): n is a, c, g, or t
  misc_feature (1413)..(1413): n is a, c, g, or t
  misc_feature (1418)..(1418): n is a, c, g, or t
  misc_feature (1423)..(1423): n is a, c, g, or t
  misc_feature (1427)..(1427): n is a, c, g, or t
tagagaaattactatgagaggatcgcatcaccatcaccatcacggatcctatttaggtgacactatagaatcgtcgacccacgcgtccgcagncncnnagatcgtggtgtctaancccgagnacatcaantcnatacaacctggagctctatgganccggcggcggaggcatcnctggaggaggcggcggaggtggcgngagcgggcacggcagcagcagtggcaccaagtccagcaaaaanaaanaccacnaacatcggctacaagctgggccacnggcncgccntgttcnanaagcncaagcggntcatngactacncgctcatcttcnncatgttcnncatcntgntcntggtcatnnanaccnacctgtcntggggcgcctacaacaaggngtcgctgtattccttagntctgaaatgccttatnnctctctcnangatcatcctgntcngtctgatcatcatgtaccaggncagggaaatacnnttgttcatggtggacaatgtagcatatgactggagaatagccatgacttatgagcgtattttcttcatctgcttggaaatantggtgtgtgctattcntcncatacctgngaattatacnttcacatgnactgccnggcttgccttctcctatgccccatccannnccnncgctgatgtggatattattttatctatacnantgttcntaanactctatctgattgccagagtcatgcttttacatatnacactnttcactgatgcctcctctanaattttgnancacttnataaaataaactttcaatacactttttgttatnaanantttaattgactntnttncccaagaacctntactcttggnttttanaatntcantnattgcangattttncngcatgganctntcgaacttntgaaaaagtancctgntncaacnngatgttnannaaccaactttccttggancgatgtggttgaantccataancttttcntccncnntngnntnnngannaatttgtancctanacncatannggggaaaaaagngacncccccntanttnannggaaatnanggnttgcttgntttccaaaaccttntgggntaccttnttntgngccannnaanntttaatttttcnnnnnccaaaaaacncngtgccnnaatttntngaaaanaaaccnccctnaataaaaaaaataaaaaanccccnntcccantnantctnnnaaaactntccntntttnnaaaaaaaaacctgngngaataaaaattnnccanaganaaaaaantnnaaatttttcccanaaaattccaanattangntacantnncnnaaanacatnaaacctncananttttgngntttnaaaaacctnancgtgttgnanacatncaactannnggnnacctcntaaanaagtnttcn

SEQ ID NO: 595 - DNA, 1457 bp, Homo Sapiens
  misc_feature (600)..(600): n is a, c, g, or t
  misc_feature (605)..(605): n is a, c, g, or t
  misc_feature (711)..(711): n is a, c, g, or t
  misc_feature (820)..(820): n is a, c, g, or t
  misc_feature (828)..(828): n is a, c, g, or t
  misc_feature (836)..(836): n is a, c, g, or t
  misc_feature (859)..(859): n is a, c, g, or t
  misc_feature (863)..(863): n is a, c, g, or t
  misc_feature (877)..(877): n is a, c, g, or t
  misc_feature (881)..(881): n is a, c, g, or t
  misc_feature (894)..(894): n is a, c, g, or t
  misc_feature (903)..(903): n is a, c, g, or t
  misc_feature (914)..(914): n is a, c, g, or t
  misc_feature (921)..(921): n is a, c, g, or t
  misc_feature (927)..(927): n is a, c, g, or t
  misc_feature (930)..(930): n is a, c, g, or t
  misc_feature (941)..(941): n is a, c, g, or t
  misc_feature (945)..(945): n is a, c, g, or t
  misc_feature (954)..(954): n is a, c, g, or t
  misc_feature (965)..(965): n is a, c, g, or t
  misc_feature (969)..(969): n is a, c, g, or t
  misc_feature (974)..(975): n is a, c, g, or t
  misc_feature (979)..(979): n is a, c, g, or t
  misc_feature (984)..(984): n is a, c, g, or t
  misc_feature (997)..(998): n is a, c, g, or t
  misc_feature (1002)..(1003): n is a, c, g, or t
  misc_feature (1011)..(1011): n is a, c, g, or t
  misc_feature (1018)..(1018): n is a, c, g, or t
  misc_feature (1028)..(1028): n is a, c, g, or t
  misc_feature (1033)..(1033): n is a, c, g, or t
  misc_feature (1037)..(1037): n is a, c, g, or t
  misc_feature (1039)..(1039): n is a, c, g, or t
  misc_feature (1042)..(1042): n is a, c, g, or t
  misc_feature (1044)..(1044): n is a, c, g, or t
  misc_feature (1047)..(1047): n is a, c, g, or t
  misc_feature (1052)..(1052): n is a, c, g, or t
  misc_feature (1054)..(1054): n is a, c, g, or t
  misc_feature (1061)..(1061): n is a, c, g, or t
  misc_feature (1063)..(1063): n is a, c, g, or t
  misc_feature (1067)..(1067): n is a, c, g, or t
  misc_feature (1072)..(1072): n is a, c, g, or t
  misc_feature (1078)..(1078): n is a, c, g, or t
  misc_feature (1081)..(1081): n is a, c, g, or t
  misc_feature (1089)..(1089): n is a, c, g, or t
  misc_feature (1096)..(1096): n is a, c, g, or t
  misc_feature (1099)..(1099): n is a, c, g, or t
  misc_feature (1101)..(1101): n is a, c, g, or t
  misc_feature (1104)..(1104): n is a, c, g, or t
  misc_feature (1106)..(1106): n is a, c, g, or t
  misc_feature (1110)..(1110): n is a, c, g, or t
  misc_feature (1115)..(1115): n is a, c, g, or t
  misc_feature (1127)..(1127): n is a, c, g, or t
  misc_feature (1137)..(1137): n is a, c, g, or t
  misc_feature (1141)..(1141): n is a, c, g, or t
  misc_feature (1148)..(1148): n is a, c, g, or t
  misc_feature (1150)..(1150): n is a, c, g, or t
  misc_feature (1152)..(1152): n is a, c, g, or t
  misc_feature (1157)..(1157): n is a, c, g, or t
  misc_feature (1163)..(1163): n is a, c, g, or t
  misc_feature (1180)..(1180): n is a, c, g, or t
  misc_feature (1195)..(1195): n is a, c, g, or t
  misc_feature (1198)..(1198): n is a, c, g, or t
  misc_feature (1200)..(1200): n is a, c, g, or t
  misc_feature (1202)..(1203): n is a, c, g, or t
  misc_feature (1209)..(1209): n is a, c, g, or t
  misc_feature (1223)..(1223): n is a, c, g, or t
  misc_feature (1233)..(1235): n is a, c, g, or t
  misc_feature (1237)..(1237): n is a, c, g, or t
  misc_feature (1241)..(1243): n is a, c, g, or t
  misc_feature (1247)..(1247): n is a, c, g, or t
  misc_feature (1263)..(1265): n is a, c, g, or t
  misc_feature (1267)..(1267): n is a, c, g, or t
  misc_feature (1270)..(1270): n is a, c, g, or t
  misc_feature (1277)..(1277): n is a, c, g, or t
  misc_feature (1281)..(1283): n is a, c, g, or t
  misc_feature (1287)..(1287): n is a, c, g, or t
  misc_feature (1289)..(1289): n is a, c, g, or t
  misc_feature (1296)..(1296): n is a, c, g, or t
  misc_feature (1298)..(1299): n is a, c, g, or t
  misc_feature (1302)..(1302): n is a, c, g, or t
  misc_feature (1304)..(1306): n is a, c, g, or t
  misc_feature (1311)..(1311): n is a, c, g, or t
  misc_feature (1318)..(1318): n is a, c, g, or t
  misc_feature (1320)..(1322): n is a, c, g, or t
  misc_feature (1327)..(1327): n is a, c, g, or t
  misc_feature (1332)..(1332): n is a, c, g, or t
  misc_feature (1350)..(1350): n is a, c, g, or t
  misc_feature (1354)..(1354): n is a, c, g, or t
  misc_feature (1356)..(1356): n is a, c, g, or t
  misc_feature (1366)..(1366): n is a, c, g, or t
  misc_feature (1370)..(1372): n is a, c, g, or t
  misc_feature (1376)..(1376): n is a, c, g, or t
  misc_feature (1379)..(1379): n is a, c, g, or t
  misc_feature (1382)..(1382): n is a, c, g, or t
  misc_feature (1396)..(1396): n is a, c, g, or t
  misc_feature (1400)..(1401): n is a, c, g, or t
  misc_feature (1428)..(1428): n is a, c, g, or t
  misc_feature (1431)..(1432): n is a, c, g, or t
  misc_feature (1438)..(1438): n is a, c, g, or t
  misc_feature (1440)..(1441): n is a, c, g, or t
  misc_feature (1444)..(1445): n is a, c, g, or t
  misc_feature (1449)..(1449): n is a, c, g, or t
  misc_feature (1451)..(1452): n is a, c, g, or t
  misc_feature (1456)..(1456): n is a, c, g, or t
tagagagattactatgagaggatcgcatcaccatcaccatcacggatcctatttaggtgacactatagaatcgtcgacccacgcgtccgcccacgcgtccgcttcaggcagggctgcagatgcgcggcccagctgtacctcgcgtgtcccgggtcgggagtcggagacgcaggtgcaggagagtgcggggcaagtagcgcattttctctttgcattctcgagatcgcttagccgcgctttaaaaaggtttgcatcagctgtgagtccatctgacaagcgaggaaactaaggctgagaagtgggaggcgttgccatctgcaggcccaggcaacctgctacgggaagaccggggaccaagacctctgggttggctttcctagacccgctcgggtcttcgggtgtcgcgaggaagggccctgctcctttcgttccctgcacccctggccgctgcaggtggctccctggaggaggagctcccacgcggaggaggagccagggcagctgggagcggggacaccatcctcctggataagaggcagaggccgggaggaaccccgtcagccgggcgggcaggaagctctgggagtagcctcatggaanagaancagatcctgtgcgtggggctagtggtgctggacgtcatcagcctggtggacaagtaccctaaggaggactcggagataaggagcctgccagatgtgtctgctacanactttgagaaggttgatctgacccagttcaagtggatccacattgagggccggaacgcatcggagcaggtgaagatgctgcaatcgggataaaacgcacacaacaccanggcagccntcccaaancaaaaaaatccgggtgtccgtgnaagntggaagaagccacnagangaaactctttccngcttgtttnggctacagaanacttggntgtttntcnaacaaaaaagntggnccaaagcantttggggtttncaantcaannaaangaaanccctttaaagggnnttgnnttgttccntgtaaangaaaagggcntgtgntttntnctntnccntggcntnaagaaangngccncaaancccctnggnccctgaanggcaaanttncnccnantcgnaaagntttttccccccnccccccggtngggnataaccntngnaaacnggaaanaccttaaaagccttccncattcttaactcctnccnangnnaaaaancgggcagaaaactnctttaaattnnngngccnnngttncccgcaaaaatgtggnnntnccnggtcttntatnnnactntngaaaaananngtncnnntctcnccccccnannnaaaanatttngggggaatatccttcttncccntnaaaatgtggnctcnnnttcnccnctncggaaaaatacacnttgnnggggaaattctctgtttttcttctccncannaaaaantnntgnngagngnntgana

SEQ ID NO: 596 - DNA, 1200 bp, Homo Sapiens
  misc_feature (943)..(943): n is a, c, g, or t
  misc_feature (996)..(996): n is a, c, g, or t
  misc_feature (1016)..(1016): n is a, c, g, or t
  misc_feature (1027)..(1027): n is a, c, g, or t
  misc_feature (1052)..(1052): n is a, c, g, or t
  misc_feature (1066)..(1066): n is a, c, g, or t
  misc_feature (1089)..(1089): n is a, c, g, or t
  misc_feature (1093)..(1093): n is a, c, g, or t
  misc_feature (1097)..(1097): n is a, c, g, or t
  misc_feature (1099)..(1099): n is a, c, g, or t
  misc_feature (1106)..(1106): n is a, c, g, or t
  misc_feature (1115)..(1115): n is a, c, g, or t
  misc_feature (1129)..(1130): n is a, c, g, or t
  misc_feature (1134)..(1134): n is a, c, g, or t
  misc_feature (1137)..(1138): n is a, c, g, or t
  misc_feature (1147)..(1147): n is a, c, g, or t
  misc_feature (1149)..(1149): n is a, c, g, or t
  misc_feature (1162)..(1162): n is a, c, g, or t
  misc_feature (1167)..(1167): n is a, c, g, or t
  misc_feature (1171)..(1171): n is a, c, g, or t
  misc_feature (1175)..(1176): n is a, c, g, or t
  misc_feature (1180)..(1180): n is a, c, g, or t
  misc_feature (1182)..(1182): n is a, c, g, or t
  misc_feature (1184)..(1185): n is a, c, g, or t
  misc_feature (1192)..(1192): n is a, c, g, or t
  misc_feature (1195)..(1195): n is a, c, g, or t
  misc_feature (1197)..(1197): n is a, c, g, or t
aattagaggaaattactatgagaggatcgcatcaccatcaccatcacggatcctatttaggtgacactatagaatcgtcgacccacgcgtccgctttgaacgcagtcgccctacagccgctgattccccccgcatcgcctcccgtggaagcccaggcccgcttcgcagctttctccctttgtctcataaccatgtccaccaacgagaatgctaatacaccagctgcccgtcttcacagattcaagaacaagggaaaagacagtacagaaatgaggcgtcgcagaatagaggtcaatgtggagctgaggaaagctaagaaggatgaccagatgctgaagaggagaaatgtaagctcatttcctgatgatgctacttctccgctgcaggaaaaccgcaacaaccagggcactgtaaattggtctgttgatgacattgtcaaaggcataaatagcagcaatgtggaaaatcagctccaagctactcaagctgccaggaaactactttccagagaaaaacagccccccatagacaacataatccgggctggtttgattccgaaatttgtgtccttcttgggcagaactgattgtagtcccattcagtttgaatctgcttgggcactcactaacattgcttctgggacatcagaacaaaccaaggctgtggtagatggaggtgccatcccagcattcatttctctgttggcatctccccatgctcacatcagtgaacaagctgtctgggctctaggaaacattgcaggtgatggctcagtgttccgagacttggttattaagtacggtgcagttgacccactgttggctctccttgcagttcctgatatgtcatctttagcatgtggctacttacgtaatcttacctggacactttctaatctttgccgcaacaagaatcctgcacccccgatagatgctgttgacanattcttcctaccttagttcggctctgcatcatgatgatccaaagtgttagcanaaacctgctgggctatttcnaccttactganggccaaaggaacgaattggcatggnggtgaaaacagganttgggccccacttgggaacttcnagancttngnaattgcnattgggacnctgccctaaaaccnnaggnaanntgtcctggnanaatgaaaaactcnggtgngatngagnngganantnncgttttncancnggt

SEQ ID NO: 597 - DNA, 1348 bp, Homo Sapiens
  misc_feature (953)..(953): n is a, c, g, or t
  misc_feature (1011)..(1011): n is a, c, g, or t
  misc_feature (1017)..(1017): n is a, c, g, or t
  misc_feature (1023)..(1023): n is a, c, g, or t
  misc_feature (1025)..(1025): n is a, c, g, or t
  misc_feature (1027)..(1027): n is a, c, g, or t
  misc_feature (1031)..(1031): n is a, c, g, or t
  misc_feature (1033)..(1033): n is a, c, g, or t
  misc_feature (1051)..(1051): n is a, c, g, or t
  misc_feature (1054)..(1054): n is a, c, g, or t
  misc_feature (1077)..(1078): n is a, c, g, or t
  misc_feature (1093)..(1093): n is a, c, g, or t
  misc_feature (1114)..(1114): n is a, c, g, or t
  misc_feature (1117)..(1117): n is a, c, g, or t
  misc_feature (1128)..(1129): n is a, c, g, or t
  misc_feature (1133)..(1133): n is a, c, g, or t
  misc_feature (1142)..(1142): n is a, c, g, or t
  misc_feature (1144)..(1144): n is a, c, g, or t
  misc_feature (1148)..(1148): n is a, c, g, or t
  misc_feature (1153)..(1153): n is a, c, g, or t
  misc_feature (1157)..(1157): n is a, c, g, or t
  misc_feature (1159)..(1159): n is a, c, g, or t
  misc_feature (1162)..(1162): n is a, c, g, or t
  misc_feature (1181)..(1182): n is a, c, g, or t
  misc_feature (1189)..(1189): n is a, c, g, or t
  misc_feature (1191)..(1191): n is a, c, g, or t
  misc_feature (1199)..(1199): n is a, c, g, or t
  misc_feature (1203)..(1203): n is a, c, g, or t
  misc_feature (1214)..(1214): n is a, c, g, or t
  misc_feature (1217)..(1217): n is a, c, g, or t
  misc_feature (1223)..(1223): n is a, c, g, or t
  misc_feature (1225)..(1225): n is a, c, g, or t
  misc_feature (1230)..(1230): n is a, c, g, or t
  misc_feature (1237)..(1237): n is a, c, g, or t
  misc_feature (1244)..(1244): n is a, c, g, or t
  misc_feature (1249)..(1249): n is a, c, g, or t
  misc_feature (1253)..(1253): n is a, c, g, or t
  misc_feature (1270)..(1270): n is a, c, g, or t
  misc_feature (1273)..(1273): n is a, c, g, or t
  misc_feature (1279)..(1281): n is a, c, g, or t
  misc_feature (1291)..(1291): n is a, c, g, or t
  misc_feature (1294)..(1294): n is a, c, g, or t
  misc_feature (1296)..(1296): n is a, c, g, or t
  misc_feature (1307)..(1307): n is a, c, g, or t
  misc_feature (1315)..(1316): n is a, c, g, or t
  misc_feature (1327)..(1327): n is a, c, g, or t
  misc_feature (1338)..(1338): n is a, c, g, or t
  misc_feature (1348)..(1348): n is a, c, g, or t
aatagagaaattactatgagaggatcgcatcaccatcaccatcacggatcctatttaggtgacactatagaatcgtcgacccacgcgtccgcccacgcgtccgcccacgcgtccgcccacgcgtccggtttggtggtgtataaccgtgattgcgttaccttagcaataacaattggtcgtcttggttacgtttgtcctcaagaggtggcccccatgctacagcagtttataagaccctggtgcacctctctgagaaacataagagacaatgaggaaaaggattcagcattccgtggaatttgtaccatgatcagtgtgaatcccagtggcgtaatccaagattttatatttttttgtgatgccgttgcatcatggattaacccaaaagatgatctcagagacatgttctgtaagatccttcatggatttaaaaatcaagttggcgatgaaaattggaggcgtttctctgaccagtttcctcttcccttaaaagagcgtcttgcagctttttatggtgtttaatctaatacacttaagctgcagtcccaaaattaggggtccttcagtcttggagactataagggagcctctgcacccagggaaaatgttaccctttacaggggggaagggtaaaccagtagggaatacagtacaatcccaaccctactgggaggggcgggagggaggtgttgccgtcactgtattaagtcgatgttgggaaacgttttaacatctggagcctttgtgggtggaaatatgtctccagttacaactccgcagtggatgtgaagaagcaaaaaaaaaaaaaaagggcggccgctccctatagtgagtcgtattaagcttaattagctgagcttggactcctgttgatagatccagtaatgacctcagaactccatctggaatttgttcaaaacgctcggttgccgccgggcgtttttattggtganaatccaagctagctggcgagatttcaggagctaaggaagctaaatggaaaaaaaatcnctgganaaaccncngntgananatcccaaggcacctaaanaanatttgaggcattcagccgttgcnnaagtacctaaaccanaccgttcactggaaattacgnccnttttaaaaacnntaanaaaaaaaancnaaantttanccgncnttnttccattctgccccccgannaagcccncngaattccnaggnaaaaaaacggnacngggaangnaaagntcccctnttacccntttcngaanaaagaaaattttccccntgnagaaannnaaattccggnttncnaaaattccaanggggggtnnggaaaccgccntcccagggttngaaaattttn

SEQ ID NO: 598 - DNA, 1397 bp, Homo Sapiens
  misc_feature (858)..(858): n is a, c, g, or t
  misc_feature (924)..(924): n is a, c, g, or t
  misc_feature (939)..(939): n is a, c, g, or t
  misc_feature (964)..(964): n is a, c, g, or t
  misc_feature (991)..(991): n is a, c, g, or t
  misc_feature (1015)..(1015): n is a, c, g, or t
  misc_feature (1017)..(1017): n is a, c, g, or t
  misc_feature (1025)..(1025): n is a, c, g, or t
  misc_feature (1032)..(1032): n is a, c, g, or t
  misc_feature (1044)..(1044): n is a, c, g, or t
  misc_feature (1047)..(1047): n is a, c, g, or t
  misc_feature (1055)..(1055): n is a, c, g, or t
  misc_feature (1062)..(1062): n is a, c, g, or t
  misc_feature (1066)..(1067): n is a, c, g, or t
  misc_feature (1070)..(1070): n is a, c, g, or t
  misc_feature (1072)..(1072): n is a, c, g, or t
  misc_feature (1075)..(1077): n is a, c, g, or t
  misc_feature (1085)..(1085): n is a, c, g, or t
  misc_feature (1096)..(1096): n is a, c, g, or t
  misc_feature (1114)..(1114): n is a, c, g, or t
  misc_feature (1120)..(1120): n is a, c, g, or t
  misc_feature (1124)..(1124): n is a, c, g, or t
  misc_feature (1126)..(1126): n is a, c, g, or t
  misc_feature (1140)..(1140): n is a, c, g, or t
  misc_feature (1143)..(1143): n is a, c, g, or t
  misc_feature (1151)..(1152): n is a, c, g, or t
  misc_feature (1157)..(1157): n is a, c, g, or t
  misc_feature (1163)..(1164): n is a, c, g, or t
  misc_feature (1168)..(1168): n is a, c, g, or t
  misc_feature (1174)..(1174): n is a, c, g, or t
  misc_feature (1176)..(1176): n is a, c, g, or t
  misc_feature (1183)..(1183): n is a, c, g, or t
  misc_feature (1185)..(1185): n is a, c, g, or t
  misc_feature (1187)..(1187): n is a, c, g, or t
  misc_feature (1189)..(1189): n is a, c, g, or t
  misc_feature (1194)..(1194): n is a, c, g, or t
  misc_feature (1196)..(1197): n is a, c, g, or t
  misc_feature (1210)..(1210): n is a, c, g, or t
  misc_feature (1213)..(1213): n is a, c, g, or t
  misc_feature (1220)..(1220): n is a, c, g, or t
  misc_feature (1223)..(1223): n is a, c, g, or t
  misc_feature (1226)..(1226): n is a, c, g, or t
  misc_feature (1233)..(1233): n is a, c, g, or t
  misc_feature (1236)..(1236): n is a, c, g, or t
  misc_feature (1238)..(1240): n is a, c, g, or t
  misc_feature (1246)..(1246): n is a, c, g, or t
  misc_feature (1250)..(1251): n is a, c, g, or t
  misc_feature (1255)..(1255): n is a, c, g, or t
  misc_feature (1261)..(1261): n is a, c, g, or t
  misc_feature (1265)..(1267): n is a, c, g, or t
  misc_feature (1271)..(1271): n is a, c, g, or t
  misc_feature (1273)..(1275): n is a, c, g, or t
  misc_feature (1277)..(1277): n is a, c, g, or t
  misc_feature (1279)..(1279): n is a, c, g, or t
  misc_feature (1282)..(1284): n is a, c, g, or t
  misc_feature (1286)..(1291): n is a, c, g, or t
  misc_feature (1298)..(1298): n is a, c, g, or t
  misc_feature (1305)..(1305): n is a, c, g, or t
  misc_feature (1307)..(1310): n is a, c, g, or t
  misc_feature (1314)..(1314): n is a, c, g, or t
  misc_feature (1316)..(1316): n is a, c, g, or t
  misc_feature (1318)..(1318): n is a, c, g, or t
  misc_feature (1321)..(1323): n is a, c, g, or t
  misc_feature (1326)..(1326): n is a, c, g, or t
  misc_feature (1330)..(1330): n is a, c, g, or t
  misc_feature (1332)..(1332): n is a, c, g, or t
  misc_feature (1336)..(1337): n is a, c, g, or t
  misc_feature (1351)..(1354): n is a, c, g, or t
  misc_feature (1359)..(1359): n is a, c, g, or t
  misc_feature (1363)..(1365): n is a, c, g, or t
  misc_feature (1368)..(1368): n is a, c, g, or t
  misc_feature (1382)..(1384): n is a, c, g, or t
  misc_feature (1388)..(1394): n is a, c, g, or t
tagagaaaattactatgagaggatcgcatcaccatcaccatcacggatcctatttaggtgacactatagaatcgtcgacccacgcgtccgggaacgccccccaggttcagtaccgcgtgcagtggcgccctcaggggacacgagggccctggcaggagcagattgtcagcgaccccttcctggtggtgtccaacacgtccaccttcgtgccctatgagatcaaagtccaggccgtcaacagccagggcaagggaccagagccccaggtcactatcggctactctggagaggactacccccaggcaatccctgagctggaaggcattgaaatcctcaactcaagtgccgtgctggtcaagtggcggccggtggacctggcccaggtcaagggccacctccgcggatacaatgtgacgtactggagggagggcagtcagaggaagcacagcaagagacatatccacaaagaccatgtggtggtgcccgccaacaccaccagtgtcatcctcagtggcttgcggccctatagctcctaccacctggaggtgcaggcctttaacgggcgaggatcggggcccgccagcgagttcaccttcagcaccccagagggagtgcctggccaccccgaggcgttgcacctggagtgccagtcgaacaccagcctgctgctgcgctggcagcccccactcagccacaacggcgtgctcaccggctacgtgctctcctaccaccccctggatgaggggggcaaggggcaactgtccttcaaccttcgggaccccgaacttcggacacacaacctgaccgatctcagcccccacctgcggtaccgcttccagcttcaggccaccaccaaanagggccctggtgaaaccatcgtacgggaaggaggcactatggccttgtctgggatctcaaattttnggcaacatctcaccncagcggggtgaaaactacagtgtcnttctcctgggtccccaaggagggccantgcaaatttcaggtttccatattntngttcaaanccttggnaaaaaaaaaaanggnggggcttnccttttncccnnaantnttnnncctaaaancaaaacttctnaacccaattggaacttgnacctgnaacntnaataaaaaaatccnttntttaaagnnaagantttccnncccnaatggntntaaaaanantngncaagncnngggaggttccctnttngggtttnccntgnagggggnttncnnnttttgnaggnnaaanccctgntccnnngggnannntngnttnnnannnnnnagggggnaaatttntnnnnaaanananccnnngtntttnancccnnaaaaaaaaaacttnnnnaaaancctnnnaanaaaaaaaaattttnnncccnnnnnnngga

SEQ ID NO: 599 - DNA, 1371 bp, Homo Sapiens
  misc_feature (2)..(4): n is a, c, g, or t
  misc_feature (6)..(9): n is a, c, g, or t
  misc_feature (774)..(774): n is a, c, g, or t
  misc_feature (913)..(913): n is a, c, g, or t
  misc_feature (927)..(927): n is a, c, g, or t
  misc_feature (965)..(965): n is a, c, g, or t
  misc_feature (969)..(969): n is a, c, g, or t
  misc_feature (983)..(983): n is a, c, g, or t
  misc_feature (986)..(986): n is a, c, g, or t
  misc_feature (993)..(993): n is a, c, g, or t
  misc_feature (997)..(997): n is a, c, g, or t
  misc_feature (1002)..(1002): n is a, c, g, or t
  misc_feature (1015)..(1015): n is a, c, g, or t
  misc_feature (1017)..(1017): n is a, c, g, or t
  misc_feature (1078)..(1078): n is a, c, g, or t
  misc_feature (1083)..(1084): n is a, c, g, or t
  misc_feature (1093)..(1093): n is a, c, g, or t
  misc_feature (1097)..(1097): n is a, c, g, or t
  misc_feature (1100)..(1100): n is a, c, g, or t
  misc_feature (1118)..(1118): n is a, c, g, or t
  misc_feature (1120)..(1120): n is a, c, g, or t
  misc_feature (1140)..(1140): n is a, c, g, or t
  misc_feature (1156)..(1156): n is a, c, g, or t
  misc_feature (1172)..(1173): n is a, c, g, or t
  misc_feature (1179)..(1179): n is a, c, g, or t
  misc_feature (1188)..(1189): n is a, c, g, or t
  misc_feature (1204)..(1205): n is a, c, g, or t
  misc_feature (1210)..(1210): n is a, c, g, or t
  misc_feature (1213)..(1213): n is a, c, g, or t
  misc_feature (1216)..(1216): n is a, c, g, or t
  misc_feature (1221)..(1221): n is a, c, g, or t
  misc_feature (1224)..(1224): n is a, c, g, or t
  misc_feature (1228)..(1228): n is a, c, g, or t
  misc_feature (1232)..(1232): n is a, c, g, or t
  misc_feature (1238)..(1239): n is a, c, g, or t
  misc_feature (1241)..(1241): n is a, c, g, or t
  misc_feature (1243)..(1243): n is a, c, g, or t
  misc_feature (1247)..(1247): n is a, c, g, or t
  misc_feature (1254)..(1254): n is a, c, g, or t
  misc_feature (1256)..(1256): n is a, c, g, or t
  misc_feature (1273)..(1273): n is a, c, g, or t
  misc_feature (1275)..(1275): n is a, c, g, or t
  misc_feature (1286)..(1286): n is a, c, g, or t
  misc_feature (1294)..(1295): n is a, c, g, or t
  misc_feature (1305)..(1305): n is a, c, g, or t
  misc_feature (1307)..(1308): n is a, c, g, or t
  misc_feature (1311)..(1312): n is a, c, g, or t
  misc_feature (1330)..(1330): n is a, c, g, or t
  misc_feature (1334)..(1334): n is a, c, g, or t
  misc_feature (1339)..(1340): n is a, c, g, or t
  misc_feature (1348)..(1348): n is a, c, g, or t
  misc_feature (1350)..(1350): n is a, c, g, or t
  misc_feature (1358)..(1359): n is a, c, g, or t
  misc_feature (1366)..(1366): n is a, c, g, or t
gnnncnnnncaatagagaaaattactatgagaggatcgcatcaccatcaccatcacggatcctatttaggtgacactatagaatcgtcgacccacgcgtccggtgttagtggcacccaggtccacatgaacaacgtgaccgtaacgctccatgatgccaccatccaggcgtacctttccaacagcagcttcagcaggggagagacacgctgtgaacaagacaggccttccccaaccacagcgccccctgcgccacccagcccctcgccctcacccgtgcccaagagcccctctgtggacaagtacaacgtgagcggcaccaacgggacctgcctgctggccagcatggggctgcagctgaacctcacctatgagaggaaggacaacacgacggtgacaaggcttctcaacatcaaccccaacaagacctcggccagcgggagctgcggcgcccacctggtgactctggagctgcacagcgagggcaccaccgtcctgctcttccagttcgggatgaatgcaagttctagccggtttttcctacaaggaatccagttgaatacaattcttcctgacgccagagaccctgcctttaaagctgccaacggctccctgcgagcgctgcaggccacagtcggcaattcctacaagtgcaacgcggaggagcacgtccgtgtcacgaaggcgttttcagtcaatatattcaaagtgtgggtccaggctttcaaggtggaaggtggccagtttggctctgtggaggagtgtctgctggacnagaacagcatgctgatccccatcgctgtgggtggtgccctggcgggggctggtcctcatcgtcctcatcgcctacctcgtcggcaggaagaggagtcacgcaggctaccaaaactaatctagcctggtgcacgcaggcnaaaccaacctgcanggggccctctgtttccttttctctgggccttaagggtncttntcgaaaggggaagncanaattttntggnaaaangttttctcaaatntngctttcatccaaatgtgaaaatttcatctttgccagccttttactatgccccaccaaaaanaactnntccgaaatngacnggngttaaatttttgctaaantnggtgttaaaaaatttttgcntaacttgggttaaaanatttaaaatttttacnnaaatangggaatttnnaaggggggggggggnncttcntcncanaaggnggngggngggntccccnntntntctntaaaagngngggggggtccccccttncntctaaaggggngggggggnncctcttttcncnnagnnggggggggggcccccctntctnaaagnngggggggngnttcttctnntcccaanggggg

SEQ ID NO: 600 - DNA, 1200 bp, Homo Sapiens
  misc_feature (5)..(5): n is a, c, g, or t
  misc_feature (867)..(883): n is a, c, g, or t
  misc_feature (913)..(913): n is a, c, g, or t
  misc_feature (916)..(916): n is a, c, g, or t
  misc_feature (928)..(928): n is a, c, g, or t
  misc_feature (933)..(933): n is a, c, g, or t
  misc_feature (950)..(950): n is a, c, g, or t
  misc_feature (952)..(952): n is a, c, g, or t
  misc_feature (956)..(956): n is a, c, g, or t
  misc_feature (984)..(984): n is a, c, g, or t
  misc_feature (987)..(987): n is a, c, g, or t
  misc_feature (996)..(996): n is a, c, g, or t
  misc_feature (1008)..(1008): n is a, c, g, or t
  misc_feature (1025)..(1025): n is a, c, g, or t
  misc_feature (1028)..(1028): n is a, c, g, or t
  misc_feature (1033)..(1033): n is a, c, g, or t
  misc_feature (1036)..(1036): n is a, c, g, or t
  misc_feature (1038)..(1038): n is a, c, g, or t
  misc_feature (1051)..(1051): n is a, c, g, or t
  misc_feature (1056)..(1056): n is a, c, g, or t
  misc_feature (1058)..(1058): n is a, c, g, or t
  misc_feature (1077)..(1077): n is a, c, g, or t
  misc_feature (1089)..(1089): n is a, c, g, or t
  misc_feature (1094)..(1094): n is a, c, g, or t
  misc_feature (1096)..(1096): n is a, c, g, or t
  misc_feature (1098)..(1098): n is a, c, g, or t
  misc_feature (1103)..(1103): n is a, c, g, or t
  misc_feature (1114)..(1114): n is a, c, g, or t
  misc_feature (1116)..(1116): n is a, c, g, or t
  misc_feature (1119)..(1119): n is a, c, g, or t
  misc_feature (1122)..(1122): n is a, c, g, or t
  misc_feature (1125)..(1125): n is a, c, g, or t
  misc_feature (1130)..(1130): n is a, c, g, or t
  misc_feature (1138)..(1138): n is a, c, g, or t
  misc_feature (1147)..(1147): n is a, c, g, or t
  misc_feature (1154)..(1154): n is a, c, g, or t
  misc_feature (1157)..(1158): n is a, c, g, or t
  misc_feature (1167)..(1167): n is a, c, g, or t
  misc_feature (1173)..(1173): n is a, c, g, or t
  misc_feature (1180)..(1180): n is a, c, g, or t
  misc_feature (1188)..(1188): n is a, c, g, or t
  misc_feature (1191)..(1191): n is a, c, g, or t
  misc_feature (1193)..(1193): n is a, c, g, or t
gaganattactatgagaggatcgcatcaccatcaccatcacggatcctatttaggtgacactatagaatcgtcgacccacgcgtccgctcgtgcaattgttgccattgaaaaccctgctgatgtcagtgttatatcctccaggaatactggccagagggctgtgctgaagtttgctgctgccactggagccactccaattgctggccgcttcactcctggaaccttcactaaccagatccaggcagccttccgggagccacggcttcttgtggttactgaccccagggctgaccaccagcctctcacggaggcatcttatgttaacctacctaccattgcgctgtgtaacacagattctcctctgcgctatgtggacattgccatcccatgcaacaacaagggagctcactcagtgggtttgatgtggtggatgctggctcgggaagttctgcgcatgcgtggcaccatttcccgtgaacacccatgggaggtcatgcctgatctgtacttctacagagatcctgaagagattgaaaaagaagagcaggctgctgctgagaaggcagtgaccaaggaggaatttcagggtgaatggactgctcccgctcctgagttcactgctactcagcctgaggttgcagactggtctgaaggtgtacaggtgccctctgtgcctattcagcaattccctactgaagactggagcgctcagcctgccacggaagactggtctgcagctcccactgctcaggccactgaatgggtaggagcaaccactgactggtcttaagctgttcttgcataggctcttaagcagcatggaaaaatggttgatggaaaataaacatcagtttctaaaaaaaaannnnnnnnnnnnnnnnnaaagggcggccgctccctatagtgagtcgnatnaagcttaattanctgancttggactcctgttgananatcnagtaatgaccccaaaactccatctgganttngttcaaaangctcggttgccnccgggggtttttttatnggngaaanccnanctagcttggcganatttncngaacctaaggaacctaaantggaaaaaaaanccccngnanaaccnccgttgaaaantnccnaanggnctccnaaaaaaanttttgaggnatttcanccnntggcccaanggaccnaaaaacnaaaccgtnccncnggaatta

SEQ ID NO: 601 - DNA, 1412 bp, Homo Sapiens
  misc_feature (585)..(585): n is a, c, g, or t
  misc_feature (800)..(800): n is a, c, g, or t
  misc_feature (802)..(802): n is a, c, g, or t
  misc_feature (805)..(805): n is a, c, g, or t
  misc_feature (820)..(820): n is a, c, g, or t
  misc_feature (828)..(828): n is a, c, g, or t
  misc_feature (836)..(836): n is a, c, g, or t
  misc_feature (859)..(859): n is a, c, g, or t
  misc_feature (868)..(868): n is a, c, g, or t
  misc_feature (904)..(904): n is a, c, g, or t
  misc_feature (930)..(930): n is a, c, g, or t
  misc_feature (937)..(937): n is a, c, g, or t
  misc_feature (977)..(977): n is a, c, g, or t
  misc_feature (997)..(997): n is a, c, g, or t
  misc_feature (999)..(999): n is a, c, g, or t
  misc_feature (1006)..(1006): n is a, c, g, or t
  misc_feature (1009)..(1009): n is a, c, g, or t
  misc_feature (1016)..(1016): n is a, c, g, or t
  misc_feature (1039)..(1039): n is a, c, g, or t
  misc_feature (1044)..(1044): n is a, c, g, or t
  misc_feature (1050)..(1051): n is a, c, g, or t
  misc_feature (1059)..(1060): n is a, c, g, or t
  misc_feature (1063)..(1063): n is a, c, g, or t
  misc_feature (1081)..(1081): n is a, c, g, or t
  misc_feature (1083)..(1083): n is a, c, g, or t
  misc_feature (1087)..(1087): n is a, c, g, or t
  misc_feature (1096)..(1097): n is a, c, g, or t
  misc_feature (1114)..(1114): n is a, c, g, or t
  misc_feature (1132)..(1132): n is a, c, g, or t
  misc_feature (1139)..(1139): n is a, c, g, or t
  misc_feature (1144)..(1145): n is a, c, g, or t
  misc_feature (1163)..(1164): n is a, c, g, or t
  misc_feature (1169)..(1169): n is a, c, g, or t
  misc_feature (1175)..(1176): n is a, c, g, or t
  misc_feature (1187)..(1187): n is a, c, g, or t
  misc_feature (1195)..(1196): n is a, c, g, or t
  misc_feature (1199)..(1199): n is a, c, g, or t
  misc_feature (1203)..(1203): n is a, c, g, or t
  misc_feature (1216)..(1218): n is a, c, g, or t
  misc_feature (1221)..(1221): n is a, c, g, or t
  misc_feature (1236)..(1236): n is a, c, g, or t
  misc_feature (1243)..(1243): n is a, c, g, or t
  misc_feature (1265)..(1265): n is a, c, g, or t
  misc_feature (1268)..(1268): n is a, c, g, or t
  misc_feature (1280)..(1280): n is a, c, g, or t
  misc_feature (1285)..(1285): n is a, c, g, or t
  misc_feature (1295)..(1295): n is a, c, g, or t
  misc_feature (1299)..(1301): n is a, c, g, or t
  misc_feature (1303)..(1303): n is a, c, g, or t
  misc_feature (1311)..(1311): n is a, c, g, or t
  misc_feature (1314)..(1314): n is a, c, g, or t
  misc_feature (1319)..(1321): n is a, c, g, or t
  misc_feature (1332)..(1332): n is a, c, g, or t
  misc_feature (1339)..(1340): n is a, c, g, or t
  misc_feature (1351)..(1351): n is a, c, g, or t
  misc_feature (1353)..(1353): n is a, c, g, or t
  misc_feature (1360)..(1360): n is a, c, g, or t
  misc_feature (1362)..(1362): n is a, c, g, or t
  misc_feature (1364)..(1364): n is a, c, g, or t
  misc_feature (1373)..(1373): n is a, c, g, or t
  misc_feature (1377)..(1377): n is a, c, g, or t
  misc_feature (1385)..(1385): n is a, c, g, or t
  misc_feature (1405)..(1406): n is a, c, g, or t
  misc_feature (1408)..(1409): n is a, c, g, or t
tagagagattactatgagaggatcgcatcaccatcaccatcacggatcctatttaggtgacactatagaatcgtcgacccacgcgtccgcccacgcgtccgcccacgcgatccgcccacgcgtccgcccacgcgtccgcccacgcgtccgccaagatcgcggcacgcatgctctggcgcatcctcaacggccacagcctgacccgccgggagcgcaggcagtttctccggatctgcgctgacctcttccgcctggtgccgttccttgtgttcgtggtggtgccgttcatggagtttctgctgcctgttgctgtgaagctcttccccaacatgttgccatccacatttgagactcagtcactcaaggaggagaggctgaagaaggagcttcgggtcaagctggagctggccaagttcctccaggacaccatcgaggagatggccttgaagaacaaggcagccaagggcagcgccaccaaagacttctctgtgtttttccagaaggtgctgtgatacgtctgagtccctgtgacctcaccagggagccttccctgattttctgtttccctttcgctgtgctcagcanagtggagctccccccttcagaattatgggcgtctgtgtctcatcaccctgcagctgtccaggagcagtagaatctgacccatgaggagcctgagaccctgatggtgtgaggtgtgggtggcttggccgggctcctctgctgggcattgccctctggctggagtcagtcaagaaaatcccaggtcccaagggctggtcagaggcctggactgtggnancantgggggctggaaagnagaacggncccttgangttttcctgcgtcatgtggtgantgaagtgangatggggaaaacggcagctgcccacggaccgaaatncctgaggaactaaatggggggttcancaagccnggtgttgtttggctttgaagggaatttgtgccacttttgnaatgaaaaaaagatttgttntnaaattgnaanaaaaaanttaaaaccaggggcctaaaaaantccancccatnnctggtgcnnttntctggggggttttccccntngcancacaaaagnnaaagggtttcccatggntggaaaacccaaaaaaanttttgtntttgnnccttgaaaaaaaaaaatnncacgncttaanncttaaccccgnaaaacctnntgngaanaagaaaaaaaccnnnggntttttaaccccaagnagggggnggggttccccaaaaattttaanggnaaccttttttgnaactncccaaaaaancttnnntntaaaaaanggncctcnnntttttttgggnccccctnncaaaaaaaaantntttccancncnggggggttnaaanccccccanaaaacaaatttttaaaaganntnnttt

SEQ ID NO: 602 - DNA, 1200 bp, Homo Sapiens
  misc_feature (1)..(2): n is a, c, g, or t
  misc_feature (891)..(891): n is a, c, g, or t
  misc_feature (903)..(903): n is a, c, g, or t
  misc_feature (923)..(923): n is a, c, g, or t
  misc_feature (935)..(935): n is a, c, g, or t
  misc_feature (977)..(977): n is a, c, g, or t
  misc_feature (984)..(984): n is a, c, g, or t
  misc_feature (1038)..(1038): n is a, c, g, or t
  misc_feature (1045)..(1045): n is a, c, g, or t
  misc_feature (1064)..(1064): n is a, c, g, or t
  misc_feature (1066)..(1066): n is a, c, g, or t
  misc_feature (1077)..(1077): n is a, c, g, or t
  misc_feature (1080)..(1080): n is a, c, g, or t
  misc_feature (1089)..(1089): n is a, c, g, or t
  misc_feature (1095)..(1095): n is a, c, g, or t
  misc_feature (1097)..(1097): n is a, c, g, or t
  misc_feature (1100)..(1100): n is a, c, g, or t
  misc_feature (1105)..(1105): n is a, c, g, or t
  misc_feature (1108)..(1108): n is a, c, g, or t
  misc_feature (1118)..(1118): n is a, c, g, or t
  misc_feature (1122)..(1122): n is a, c, g, or t
  misc_feature (1124)..(1125): n is a, c, g, or t
  misc_feature (1130)..(1131): n is a, c, g, or t
  misc_feature (1138)..(1138): n is a, c, g, or t
  misc_feature (1146)..(1146): n is a, c, g, or t
  misc_feature (1155)..(1155): n is a, c, g, or t
  misc_feature (1169)..(1169): n is a, c, g, or t
  misc_feature (1172)..(1172): n is a, c, g, or t
  misc_feature (1174)..(1174): n is a, c, g, or t
  misc_feature (1193)..(1193): n is a, c, g, or t
  misc_feature (1199)..(1200): n is a, c, g, or t
nnattagagaaattactatgagaggatcgcatcaccatcaccatcacggatcctatttaggtgacactatagaatcgtcgacccacgcgtccgagcttttcagtcgcatttttaactgcaacccagatgatatggcacgggacctagagcagggtgacgtgtcagagacaatcagagtcttctttgagcagagcaagtctttccccccagctgccaagagcctccttaccatccaggaagtggatgagttccttctgcggctgtccaagctcaccaaggaggatgagcagcaacaggccctacaggacattgcctccaggtgtacagccaatgaccttaaatgcatcatcaggttgatcaaacatgatctgaagatgaactcaggtgcaaaacatgtgttagacgcccttgaccccaatgcctatgaagccttcaaagcctcgcgcaacctgcaggatgtggtggagcgggtccttcacaacgcgcaggaggtggagaaggagccgggccagagacgagctctgagcgtccaggcctcgctgatgacacctgtgcagcccatgttggcggaggcctgcaagtccgttgagtatgcaatgaagaaatgtcccaatggcatgttctctgagatcaagtacgatggagagcgagtccaggtgcataagaatggagaccacttcagctacttcagccgcagtctcaagcccgtccttcctcacaaggtggcccactttaaggactacattccccaggcttttcctgggggccacagcatgatcttggattctgaagtgcttctgattgacaacaagacaggcaaaccactgccctttgggactctgggagtacacaagaaagcagccttccaggatgctaatgtctgcctggttngtttttgattgnatctactttaatgatgtcancttgatggacanacctctgtgtgagcggcggaagtttcttcatgacaacatggnttgaaanttccaaccggatcatgttctcaaaatgaaagcgagtcacaaaagctttggactnggctganatgataacccgggtgatcnanaaggattgaanggnctggtgctnaagaantnaanggtanatntgaacctggnaacngnnctggnntaaaatnaaaaaaanattttaaanaaggggcctggccnaananctaactgggggccttggancctttnn

SEQ ID NO: 603 - DNA, 1200 bp, Homo Sapiens
  misc_feature (3)..(3): n is a, c, g, or t
  misc_feature (6)..(6): n is a, c, g, or t
  misc_feature (828)..(828): n is a, c, g, or t
  misc_feature (881)..(881): n is a, c, g, or t
  misc_feature (898)..(899): n is a, c, g, or t
  misc_feature (910)..(910): n is a, c, g, or t
  misc_feature (916)..(916): n is a, c, g, or t
  misc_feature (921)..(921): n is a, c, g, or t
  misc_feature (928)..(928): n is a, c, g, or t
  misc_feature (932)..(932): n is a, c, g, or t
  misc_feature (939)..(939): n is a, c, g, or t
  misc_feature (941)..(941): n is a, c, g, or t
  misc_feature (948)..(948): n is a, c, g, or t
  misc_feature (953)..(953): n is a, c, g, or t
  misc_feature (956)..(956): n is a, c, g, or t
  misc_feature (959)..(959): n is a, c, g, or t
  misc_feature (990)..(990): n is a, c, g, or t
  misc_feature (1015)..(1015): n is a, c, g, or t
  misc_feature (1025)..(1025): n is a, c, g, or t
  misc_feature (1041)..(1041): n is a, c, g, or t
  misc_feature (1043)..(1043): n is a, c, g, or t
  misc_feature (1045)..(1045): n is a, c, g, or t
  misc_feature (1052)..(1054): n is a, c, g, or t
  misc_feature (1065)..(1065): n is a, c, g, or t
  misc_feature (1069)..(1069): n is a, c, g, or t
  misc_feature (1073)..(1074): n is a, c, g, or t
  misc_feature (1079)..(1080): n is a, c, g, or t
  misc_feature (1095)..(1096): n is a, c, g, or t
  misc_feature (1106)..(1109): n is a, c, g, or t
  misc_feature (1125)..(1125): n is a, c, g, or t
  misc_feature (1128)..(1129): n is a, c, g, or t
  misc_feature (1131)..(1132): n is a, c, g, or t
  misc_feature (1152)..(1153): n is a, c, g, or t
  misc_feature (1163)..(1163): n is a, c, g, or t
  misc_feature (1165)..(1165): n is a, c, g, or t
  misc_feature (1172)..(1172): n is a, c, g, or t
  misc_feature (1176)..(1176): n is a, c, g, or t
  misc_feature (1188)..(1188): n is a, c, g, or t
  misc_feature (1193)..(1193): n is a, c, g, or t
  misc_feature (1197)..(1197): n is a, c, g, or t
aanaantagagaaaattactatgagaggatcgcatcaccatcaccatcacggatcctatttaggtgacactatagaatcgtcgacccacgcgtccgccagtgccctcccttacgtcaacaatgtcccccaccttgggaacatcattggttgtgtgctcagtgccgatgtctttgccaggtactctcgcctccgccagtggaacaccctctatctgtgtgggacagatgagtatggtacagcaacagagaccaaggctctggaggagggactaaccccccaggagatctgcgacaagtaccacatcatccatgctgacatctaccgctggtttaacatttcgtttgatatttttggtcgcaccaccactccacagcagaccaaaatcacccaggacattttccagcagttgctgaaacgaggttttgtgctgcaagatactgtggagcaactgcgatgtgagcactgtgctcgcttcctggctgaccgcttcgtggagggcgtgtgtcccttctgtggctatgaggaggctcggggtgaccagtgtgacaagtgtggcaagctcatcaatgctgtcgagcttaagaagcctcagtgtaaagtctgccgatcatgccctgtggtgcagtcgagccagcacctgtttctggacctgcctaagctggagaagcgactggaggagtggttggggaggacattgcctggcagtgactggacacccaatgcccagtttatcacccgttcttggcttcgggatggcctcaagccacgctgcataacccgagacctcaaatgggggaaccccctgtacccttaaaagggttttgaanaacaaggtattctatgtctggtttgatgccactattggctatctgtccatcanagccaactacacagaannagtggggaganatgggnggaanaacccanaacnaaggtgnancctggtntcaanttncangggccaaaaaaaaaaggttccctttccaaangcttaaatcttttcccttggctcancccctaggancctgaagaaaaaactnananctttggnnnacccccctccntggntacnnaaatnncctgaactatgaggnngggaaaattnnnnaaaaaaccccgggggnggnnannttttggggaaaatggccccnnaaaacggggnancccttgngtgnaaaatttggggnctttntatntgg

SEQ ID NO: 604 - DNA, 1197 bp, Homo Sapiens
  misc_feature (22)..(22): n is a, c, g, or t
  misc_feature (79)..(79): n is a, c, g, or t
  misc_feature (135)..(135): n is a, c, g, or t
  misc_feature (831)..(831): n is a, c, g, or t
  misc_feature (840)..(840): n is a, c, g, or t
  misc_feature (854)..(854): n is a, c, g, or t
  misc_feature (872)..(872): n is a, c, g, or t
  misc_feature (883)..(883): n is a, c, g, or t
  misc_feature (886)..(886): n is a, c, g, or t
  misc_feature (905)..(905): n is a, c, g, or t
  misc_feature (972)..(972): n is a, c, g, or t
  misc_feature (976)..(976): n is a, c, g, or t
  misc_feature (1002)..(1002): n is a, c, g, or t
  misc_feature (1012)..(1012): n is a, c, g, or t
  misc_feature (1022)..(1022): n is a, c, g, or t
  misc_feature (1031)..(1031): n is a, c, g, or t
  misc_feature (1036)..(1036): n is a, c, g, or t
  misc_feature (1038)..(1038): n is a, c, g, or t
  misc_feature (1044)..(1044): n is a, c, g, or t
  misc_feature (1051)..(1051): n is a, c, g, or t
  misc_feature (1055)..(1055): n is a, c, g, or t
  misc_feature (1058)..(1058): n is a, c, g, or t
  misc_feature (1071)..(1071): n is a, c, g, or t
  misc_feature (1075)..(1075): n is a, c, g, or t
  misc_feature (1078)..(1078): n is a, c, g, or t
  misc_feature (1091)..(1091): n is a, c, g, or t
  misc_feature (1098)..(1098): n is a, c, g, or t
  misc_feature (1105)..(1105): n is a, c, g, or t
  misc_feature (1107)..(1107): n is a, c, g, or t
  misc_feature (1109)..(1109): n is a, c, g, or t
  misc_feature (1111)..(1111): n is a, c, g, or t
  misc_feature (1115)..(1117): n is a, c, g, or t
  misc_feature (1122)..(1122): n is a, c, g, or t
  misc_feature (1124)..(1124): n is a, c, g, or t
  misc_feature (1132)..(1133): n is a, c, g, or t
  misc_feature (1136)..(1136): n is a, c, g, or t
  misc_feature (1152)..(1152): n is a, c, g, or t
  misc_feature (1154)..(1154): n is a, c, g, or t
  misc_feature (1163)..(1163): n is a, c, g, or t
  misc_feature (1166)..(1166): n is a, c, g, or t
  misc_feature (1169)..(1169): n is a, c, g, or t
  misc_feature (1176)..(1177): n is a, c, g, or t
  misc_feature (1180)..(1180): n is a, c, g, or t
  misc_feature (1184)..(1184): n is a, c, g, or t
  misc_feature (1193)..(1193): n is a, c, g, or t
  misc_feature (1196)..(1197): n is a, c, g, or t
attagagaaattactatgagangatcgcatcaccatcatccatcacggatcctatttaggtgacactatataatcgtcnacccacgcgtccggcaggaagaaggggccccagcagaggaagaaaatgcccagcangatggtgagggtgacagcgcctttaaggccaaagccctggtggaccgggcgctgcctcttgtggagccgggcgatgccctgggcgtgctggcaggcccgggccagcatgtggacgtacagcacggccatgagcaccagcatagccaggaagaagaccacgaggcacagcaggacggccacgtggtcgtagtaggcgatgaagagcgtgctgaagacgacactggccacccagatggccgcaacggctcgccgcgcccgcggcagggtcacgatgctgtggtagcgcagtgcgtagaagatggagatgtagcggtccacggcgatggcgcccaggaagcagaggctggacagcatggagctgcaggtgatcacgtcaatgacattgtccagctgctgcagcaccgcagcccgggccaccagtgcaccggcctccagcaggaggatgacggccgtctccagcacgttgctcccgctcaccagcaggtccgacaaggccaggcagcagatgaagcagtacatgggtgagtgcaggttccggttcttggcgatggtggccaccaccagcgcgttctccaccaagctcaccagccccaggctgaggaagagcccgtcagagatggacacctccaggcaccgggctcctgtctggttggcagccagccccagctgggggatggctgtgggggtggagttganggagcccanaagtcttctctggnatccctgcacagccatantcctgtccagnaancaggaagaagtcgttggangcctccaggtccccacagttcttccccctccaggtgtcctgcttaattcatggtgctgccagggggncctngggtgtcccccatgcctgcctccttncatctgggcncccccaaatntgccctcanacctntncctggntgaaagntcanccnaggcatggcccanccantcnaaaacctcttggnatttacncctgggntncngnattnnnaaacnanccgggtcnnaantccctcctggcttttncnggggggtgntgntcngtccccnnaantttnaacctttgnacnn

SEQ ID NO: 605 - DNA, 1200 bp, Homo Sapiens
  misc_feature (756)..(756): n is a, c, g, or t
  misc_feature (827)..(827): n is a, c, g, or t
  misc_feature (835)..(835): n is a, c, g, or t
  misc_feature (880)..(880): n is a, c, g, or t
  misc_feature (916)..(916): n is a, c, g, or t
  misc_feature (930)..(930): n is a, c, g, or t
  misc_feature (934)..(934): n is a, c, g, or t
  misc_feature (946)..(946): n is a, c, g, or t
  misc_feature (962)..(962): n is a, c, g, or t
  misc_feature (967)..(967): n is a, c, g, or t
  misc_feature (977)..(977): n is a, c, g, or t
  misc_feature (979)..(979): n is a, c, g, or t
  misc_feature (1001)..(1001): n is a, c, g, or t
  misc_feature (1004)..(1004): n is a, c, g, or t
  misc_feature (1014)..(1014): n is a, c, g, or t
  misc_feature (1016)..(1016): n is a, c, g, or t
  misc_feature (1033)..(1033): n is a, c, g, or t
  misc_feature (1043)..(1043): n is a, c, g, or t
  misc_feature (1045)..(1045): n is a, c, g, or t
  misc_feature (1050)..(1050): n is a, c, g, or t
  misc_feature (1057)..(1057): n is a, c, g, or t
  misc_feature (1059)..(1059): n is a, c, g, or t
  misc_feature (1066)..(1066): n is a, c, g, or t
  misc_feature (1071)..(1072): n is a, c, g, or t
  misc_feature (1084)..(1084): n is a, c, g, or t
  misc_feature (1086)..(1087): n is a, c, g, or t
  misc_feature (1094)..(1094): n is a, c, g, or t
  misc_feature (1098)..(1098): n is a, c, g, or t
  misc_feature (1103)..(1104): n is a, c, g, or t
  misc_feature (1108)..(1108): n is a, c, g, or t
  misc_feature (1112)..(1113): n is a, c, g, or t
  misc_feature (1124)..(1125): n is a, c, g, or t
  misc_feature (1141)..(1141): n is a, c, g, or t
  misc_feature (1147)..(1147): n is a, c, g, or t
  misc_feature (1151)..(1152): n is a, c, g, or t
  misc_feature (1159)..(1159): n is a, c, g, or t
  misc_feature (1165)..(1165): n is a, c, g, or t
  misc_feature (1174)..(1174): n is a, c, g, or t
  misc_feature (1183)..(1185): n is a, c, g, or t
  misc_feature (1187)..(1187): n is a, c, g, or t
  misc_feature (1192)..(1192): n is a, c, g, or t
  misc_feature (1200)..(1200): n is a, c, g, or t
tagagaaaattactatgagaggatcgcatcaccatcaccatcacggatcctatttaggtgacactatagaatcgtcgacccacgcgtccgatccccttgagacagaatatggcctttctgtctacaaggatcaccagaccatcaccatccaggagatgccggagaaggccccagccggccagctcccccgctctgtggacgtcattctggatgatgacttggtggataaagcgaagcctggtgaccgggttcaggtggtgggaacctaccgttgccttcctggaaagaagggaggctacacctctgggaccttcaggactgtcctgattgcctgtaatgttaagcagatgagcaaggatgctcagccctctttctctgctgaggatatagccaagatcaagaagttcagtaaaacccgatccaaggatatctttgaccagctggccaagtcattggccccaagtatccatgggcatgactatgtcaagaaagcaatcctctgcttgctcttgggaggggtggaacgagacctagaaaatggcagccacatccgtggggacatcaatattcttctaataggagacccatccgttgccaagtctcagcttctgcggtatgtgctttgcactgcaccccgagctatccccaccactggccggggctcctctggagtgggtctgacggctgctgtcaccacagaccaggaaacaggagagcgccgtctggaagcaggggccatggtcctggctgaccgangcgtggtttgcattgatgaatttgacaaaatgtctgacatggatcgcacagccatccatgaagtgatggancagggtcnagtgaccattgccaaggctggcatccatgctcggctgaatgcccnctgcatgttttggcagctgccaaccctgtctacggnaggtatgaccagtntaanactccaatgganaaaattgggctacagnactcnctgctggtcncnatttgacttgctcttcctccangcnggaatcaaangnatcctgaaccagggatnggggaaaatncnaaacnatgtccntncggaagnccccnntttaaaaaaacncnnggggaanaagnaaggnnaaanccannccccttggggnnaggggggggggaaatnccgggncccnnaaaaatncccccntttttcccnggaaaaaannncnggggnccccccan

SEQ ID NO: 606 - DNA, 1327 bp, Homo Sapiens
  misc_feature (727)..(727): n is a, c, g, or t
  misc_feature (730)..(730): n is a, c, g, or t
  misc_feature (749)..(749): n is a, c, g, or t
  misc_feature (773)..(773): n is a, c, g, or t
  misc_feature (813)..(813): n is a, c, g, or t
  misc_feature (837)..(837): n is a, c, g, or t
  misc_feature (847)..(847): n is a, c, g, or t
  misc_feature (849)..(849): n is a, c, g, or t
  misc_feature (858)..(858): n is a, c, g, or t
  misc_feature (871)..(871): n is a, c, g, or t
  misc_feature (875)..(875): n is a, c, g, or t
  misc_feature (923)..(923): n is a, c, g, or t
  misc_feature (933)..(933): n is a, c, g, or t
  misc_feature (940)..(940): n is a, c, g, or t
  misc_feature (943)..(943): n is a, c, g, or t
  misc_feature (949)..(949): n is a, c, g, or t
  misc_feature (952)..(952): n is a, c, g, or t
  misc_feature (957)..(957): n is a, c, g, or t
  misc_feature (963)..(963): n is a, c, g, or t
  misc_feature (972)..(972): n is a, c, g, or t
  misc_feature (974)..(974): n is a, c, g, or t
  misc_feature (995)..(995): n is a, c, g, or t
  misc_feature (999)..(999): n is a, c, g, or t
  misc_feature (1001)..(1001): n is a, c, g, or t
  misc_feature (1003)..(1003): n is a, c, g, or t
  misc_feature (1009)..(1009): n is a, c, g, or t
  misc_feature (1021)..(1021): n is a, c, g, or t
  misc_feature (1027)..(1027): n is a, c, g, or t
  misc_feature (1030)..(1030): n is a, c, g, or t
  misc_feature (1042)..(1042): n is a, c, g, or t
  misc_feature (1045)..(1045): n is a, c, g, or t
  misc_feature (1048)..(1048): n is a, c, g, or t
  misc_feature (1065)..(1065): n is a, c, g, or t
  misc_feature (1077)..(1078): n is a, c, g, or t
  misc_feature (1087)..(1087): n is a, c, g, or t
  misc_feature (1106)..(1106): n is a, c, g, or t
  misc_feature (1108)..(1108): n is a, c, g, or t
  misc_feature (1119)..(1119): n is a, c, g, or t
  misc_feature (1127)..(1128): n is a, c, g, or t
  misc_feature (1135)..(1136): n is a, c, g, or t
  misc_feature (1150)..(1150): n is a, c, g, or t
  misc_feature (1152)..(1152): n is a, c, g, or t
  misc_feature (1164)..(1164): n is a, c, g, or t
  misc_feature (1168)..(1169): n is a, c, g, or t
  misc_feature (1171)..(1171): n is a, c, g, or t
  misc_feature (1174)..(1174): n is a, c, g, or t
  misc_feature (1178)..(1178): n is a, c, g, or t
  misc_feature (1191)..(1191): n is a, c, g, or t
  misc_feature (1196)..(1196): n is a, c, g, or t
  misc_feature (1203)..(1203): n is a, c, g, or t
  misc_feature (1210)..(1211): n is a, c, g, or t
  misc_feature (1213)..(1213): n is a, c, g, or t
  misc_feature (1217)..(1218): n is a, c, g, or t
  misc_feature (1221)..(1221): n is a, c, g, or t
  misc_feature (1244)..(1244): n is a, c, g, or t
  misc_feature (1248)..(1248): n is a, c, g, or t
  misc_feature (1251)..(1253): n is a, c, g, or t
  misc_feature (1266)..(1266): n is a, c, g, or t
  misc_feature (1272)..(1272): n is a, c, g, or t
  misc_feature (1276)..(1277): n is a, c, g, or t
  misc_feature (1280)..(1280): n is a, c, g, or t
  misc_feature (1285)..(1285): n is a, c, g, or t
  misc_feature (1291)..(1291): n is a, c, g, or t
  misc_feature (1305)..(1305): n is a, c, g, or t
  misc_feature (1315)..(1315): n is a, c, g, or t
  misc_feature (1317)..(1317): n is a, c, g, or t
  misc_feature (1319)..(1321): n is a, c, g, or t
tagagaaattactatgagaggatcgcatcaccatcaccatcacggatcctatttaggtgacactatagaatcgtcgacccacgcgtccggcgcagtcatgtcgggattcgacgatcctggcattttctacagcgacagcttcgggggcgacgcccaggccgacgaggggcaggcccgcaaatcgcagctgcagaggcgcttcaaggagttcctgcggcagtaccgagtgggcaccgaccgcacgggcttcaccttcaaatacagggatgaactcaagcggcattacaacctgggggagtactggattgaggtggagatggaggatctggccagctttgatgaggacctggccgactacttgtacaagcagccagccgagcacctgcagctgctggaggaagctgccaaggaggtagctgatgaggtgacccggccccggccttctggggaggaggtgctccaggacatccaggtcatgctcaagtcggacgccagcccttccagcattcgtagcctgaagtcggacatgatgtcacacctggtgaagatccctggcatcatcatcgcggcctctgcggtccgtgccaaggccacccgcatctctatccagtgccgcagctgccgcaacaccctcaccaacattgccatgcgccctggcctcgagggctatgccctgcccaggaagtgcaacacagatcaggctgggcgccccaaatgcccattgganccngtacttcatcatgcccganaaatgcaaatgcgtggacttccanaccctgaagctgcaggagctgcctgatgcaatcccccccngggaaaatgcccaaaaacatgcanctttactgcnanaggtacctntttgaaaaggtcntccntgggaaaaggttaccatcatgggcatctactccttcaaaaatttggcntgactaccancaagggnccntaaaanggnggggngtgggnatccaaacncntaaattcctttttcttggggnatcnangnggaaanaaaatggttttngccccnaantttttttggggnccntgnacccccccaaaaaaaanaaaaaattcccnncccctgggnttcccccccaaattttttnanggttttttccnaaaaaatnnccccccnnccctttttgggggncnaaaaaaaaaaangccnntnccncccnccctttttggggnccccnaaaaaanccccctnnanaaannttntcccaaaaaaaaaaccttttttntttnggnnnctggaaaaccaancccccntttnnaantttgnaaaaantttccccctggggnaaacccgggnanannncccccc

SEQ ID NO: 607 - DNA, 1422 bp, Homo Sapiens
  misc_feature (1)..(2): n is a, c, g, or t
  misc_feature (884)..(884): n is a, c, g, or t
  misc_feature (901)..(901): n is a, c, g, or t
  misc_feature (921)..(921): n is a, c, g, or t
  misc_feature (961)..(961): n is a, c, g, or t
  misc_feature (972)..(972): n is a, c, g, or t
  misc_feature (981)..(981): n is a, c, g, or t
  misc_feature (1019)..(1019): n is a, c, g, or t
  misc_feature (1061)..(1061): n is a, c, g, or t
  misc_feature (1063)..(1065): n is a, c, g, or t
  misc_feature (1070)..(1070): n is a, c, g, or t
  misc_feature (1081)..(1081): n is a, c, g, or t
  misc_feature (1094)..(1094): n is a, c, g, or t
  misc_feature (1097)..(1097): n is a, c, g, or t
  misc_feature (1106)..(1107): n is a, c, g, or t
  misc_feature (1110)..(1110): n is a, c, g, or t
  misc_feature (1113)..(1113): n is a, c, g, or t
  misc_feature (1130)..(1130): n is a, c, g, or t
  misc_feature (1144)..(1144): n is a, c, g, or t
  misc_feature (1173)..(1173): n is a, c, g, or t
  misc_feature (1181)..(1181): n is a, c, g, or t
  misc_feature (1197)..(1197): n is a, c, g, or t
  misc_feature (1201)..(1201): n is a, c, g, or t
  misc_feature (1205)..(1205): n is a, c, g, or t
  misc_feature (1218)..(1218): n is a, c, g, or t
  misc_feature (1221)..(1221): n is a, c, g, or t
  misc_feature (1233)..(1233): n is a, c, g, or t
  misc_feature (1263)..(1263): n is a, c, g, or t
  misc_feature (1267)..(1267): n is a, c, g, or t
  misc_feature (1271)..(1271): n is a, c, g, or t
  misc_feature (1285)..(1285): n is a, c, g, or t
  misc_feature (1291)..(1291): n is a, c, g, or t
  misc_feature (1295)..(1295): n is a, c, g, or t
  misc_feature (1302)..(1302): n is a, c, g, or t
  misc_feature (1304)..(1304): n is a, c, g, or t
  misc_feature (1313)..(1313): n is a, c, g, or t
  misc_feature (1316)..(1316): n is a, c, g, or t
  misc_feature (1322)..(1323): n is a, c, g, or t
  misc_feature (1352)..(1352): n is a, c, g, or t
  misc_feature (1372)..(1372): n is a, c, g, or t
  misc_feature (1379)..(1379): n is a, c, g, or t
  misc_feature (1386)..(1386): n is a, c, g, or t
  misc_feature (1389)..(1392): n is a, c, g, or t
  misc_feature (1395)..(1395): n is a, c, g, or t
  misc_feature (1402)..(1402): n is a, c, g, or t
  misc_feature (1406)..(1406): n is a, c, g, or t
  misc_feature (1413)..(1413): n is a, c, g, or t
nntagagaaattactatgagaggatcgcatcaccatcaccatcacggatcctatttaggtgacactatagaatcgtcgacccacgcgtccgggaggcgagcgcgaccggaagtccggtcactctcgcgaggccccagagagcaggcgctgggcagtgtggaggtcgttggagtcacttccgcgtcaccagctcctgtgcctgccagtcggtgcccctcccgctccagccatgctctccgccctcgcccggcctgccagcgctgctctccgccgcagcttcagcacctcggcccagaacaatgctaaagtagctgtgctaggggcctctggaggcatcgggcagccactttcacttctcctgaagaacagccccttggtgagccgcctgaccctctatgatatcgcgcacacacccggagtggccgcagatctgagccacatcgagaccaaagccgctgtgaaaggctacctcggacctgaacagctgcctgactgcctgaaaggttgtgatgtggtagttattccggctggagtccccagaaagccaggcatgacccgggacgacctgttcaacaccaatgccacgattgtggccaccctgaccgctgcctgtgcccagcactgcccggaagccatgatctgcgtcattgccaatccggttaattccaccatccccatcacagcagaagttttcaagaagcatggagtgtacaaccccaacaaaatcttcggcgtgacgaccctggacatcgtcagagccaacacctttgttgcagagctgaagggtttggatccagctcgagtcaacgtccctgtcattggtggccatgctgggaagaccatcatccccctgatctctcagtgcacccccaaggtggactttnccccaggaccagctganagcactcactgggcggaatncaggaagccggcacggaagtggtcaaggctaaagccggancaggctctgcnaccctctcnatggcgttatgccggcgcccgcttttttcttctccctnggggatgcaatgaatggaaagaaagtgttggggaaatgttcntnnnttaantcacaggaaanggaatgtacttanttntccacaccnntgntgnttgggaaaaaggcatcnaaaaaaactgggcntcgcaaaatttccttttttgagaaaaaanaaattcgnagcctccccaactaangccncctnaaaagggaaaatnttngaaaccttaaanaaccccttgaagggggccattttttatttnaagnattnttccttaaaacttnaaaaantttntttattntngggaaaaangantaacanngcccaaatggggggcggggggcaaaaacnctttttaaaaaaaaaagggncccaagnaaaaaanaannnnctnaaaaaanaacntttaaanggcgggttg

SEQ ID NO: 608 - DNA, 1200 bp, Homo Sapiens
  misc_feature (358)..(358): n is a, c, g, or t
  misc_feature (367)..(367): n is a, c, g, or t
  misc_feature (372)..(372): n is a, c, g, or t
  misc_feature (391)..(391): n is a, c, g, or t
  misc_feature (416)..(416): n is a, c, g, or t
  misc_feature (435)..(435): n is a, c, g, or t
  misc_feature (442)..(442): n is a, c, g, or t
  misc_feature (445)..(445): n is a, c, g, or t
  misc_feature (476)..(476): n is a, c, g, or t
  misc_feature (480)..(482): n is a, c, g, or t
  misc_feature (486)..(487): n is a, c, g, or t
  misc_feature (489)..(489): n is a, c, g, or t
  misc_feature (492)..(493): n is a, c, g, or t
  misc_feature (495)..(496): n is a, c, g, or t
  misc_feature (498)..(498): n is a, c, g, or t
  misc_feature (504)..(504): n is a, c, g, or t
  misc_feature (506)..(506): n is a, c, g, or t
  misc_feature (513)..(513): n is a, c, g, or t
  misc_feature (518)..(518): n is a, c, g, or t
  misc_feature (522)..(522): n is a, c, g, or t
  misc_feature (533)..(533): n is a, c, g, or t
  misc_feature (535)..(537): n is a, c, g, or t
  misc_feature (545)..(545): n is a, c, g, or t
  misc_feature (547)..(547): n is a, c, g, or t
  misc_feature (555)..(555): n is a, c, g, or t
  misc_feature (560)..(560): n is a, c, g, or t
  misc_feature (563)..(563): n is a, c, g, or t
  misc_feature (566)..(566): n is a, c, g, or t
  misc_feature (568)..(569): n is a, c, g, or t
  misc_feature (571)..(572): n is a, c, g, or t
  misc_feature (575)..(575): n is a, c, g, or t
  misc_feature (577)..(577): n is a, c, g, or t
  misc_feature (587)..(588): n is a, c, g, or t
  misc_feature (592)..(592): n is a, c, g, or t
  misc_feature (601)..(602): n is a, c, g, or t
  misc_feature (611)..(611): n is a, c, g, or t
  misc_feature (616)..(616): n is a, c, g, or t
  misc_feature (618)..(618): n is a, c, g, or t
  misc_feature (621)..(621): n is a, c, g, or t
  misc_feature (625)..(625): n is a, c, g, or t
  misc_feature (630)..(630): n is a, c, g, or t
  misc_feature (639)..(639): n is a, c, g, or t
  misc_feature (654)..(654): n is a, c, g, or t
  misc_feature (656)..(657): n is a, c, g, or t
  misc_feature (660)..(660): n is a, c, g, or t
  misc_feature (662)..(662): n is a, c, g, or t
  misc_feature (664)..(664): n is a, c, g, or t
  misc_feature (667)..(667): n is a, c, g, or t
  misc_feature (670)..(670): n is a, c, g, or t
  misc_feature (672)..(672): n is a, c, g, or t
  misc_feature (677)..(678): n is a, c, g, or t
  misc_feature (685)..(685): n is a, c, g, or t
  misc_feature (690)..(690): n is a, c, g, or t
  misc_feature (700)..(701): n is a, c, g, or t
  misc_feature (711)..(711): n is a, c, g, or t
  misc_feature (715)..(715): n is a, c, g, or t
  misc_feature (718)..(718): n is a, c, g, or t
  misc_feature (721)..(721): n is a, c, g, or t
  misc_feature (727)..(727): n is a, c, g, or t
  misc_feature (733)..(733): n is a, c, g, or t
  misc_feature (736)..(736): n is a, c, g, or t
  misc_feature (747)..(748): n is a, c, g, or t
  misc_feature (751)..(751): n is a, c, g, or t
  misc_feature (755)..(756): n is a, c, g, or t
  misc_feature (759)..(759): n is a, c, g, or t
  misc_feature (761)..(761): n is a, c, g, or t
  misc_feature (764)..(764): n is a, c, g, or t
  misc_feature (770)..(770): n is a, c, g, or t
  misc_feature (773)..(773): n is a, c, g, or t
  misc_feature (781)..(782): n is a, c, g, or t
  misc_feature (785)..(785): n is a, c, g, or t
  misc_feature (789)..(792): n is a, c, g, or t
  misc_feature (798)..(798): n is a, c, g, or t
  misc_feature (802)..(802): n is a, c, g, or t
  misc_feature (804)..(804): n is a, c, g, or t
  misc_feature (807)..(809): n is a, c, g, or t
  misc_feature (812)..(812): n is a, c, g, or t
  misc_feature (817)..(817): n is a, c, g, or t
  misc_feature (820)..(820): n is a, c, g, or t
  misc_feature (827)..(827): n is a, c, g, or t
  misc_feature (829)..(830): n is a, c, g, or t
  misc_feature (832)..(832): n is a, c, g, or t
  misc_feature (840)..(841): n is a, c, g, or t
  misc_feature (843)..(843): n is a, c, g, or t
  misc_feature (846)..(846): n is a, c, g, or t
  misc_feature (850)..(850): n is a, c, g, or t
  misc_feature (853)..(853): n is a, c, g, or t
  misc_feature (855)..(855): n is a, c, g, or t
  misc_feature (857)..(858): n is a, c, g, or t
  misc_feature (860)..(860): n is a, c, g, or t
  misc_feature (863)..(865): n is a, c, g, or t
  misc_feature (869)..(870): n is a, c, g, or t
  misc_feature (872)..(872): n is a, c, g, or t
  misc_feature (874)..(876): n is a, c, g, or t
  misc_feature (879)..(881): n is a, c, g, or t
  misc_feature (886)..(888): n is a, c, g, or t
  misc_feature (890)..(890): n is a, c, g, or t
  misc_feature (892)..(892): n is a, c, g, or t
  misc_feature (896)..(898): n is a, c, g, or t
  misc_feature (901)..(901): n is a, c, g, or t
  misc_feature (904)..(905): n is a, c, g, or t
  misc_feature (908)..(908): n is a, c, g, or t
  misc_feature (911)..(912): n is a, c, g, or t
  misc_feature (917)..(917): n is a, c, g, or t
  misc_feature (920)..(920): n is a, c, g, or t
  misc_feature (922)..(922): n is a, c, g, or t
  misc_feature (924)..(925): n is a, c, g, or t
  misc_feature (932)..(932): n is a, c, g, or t
  misc_feature (937)..(937): n is a, c, g, or t
  misc_feature (939)..(940): n is a, c, g, or t
  misc_feature (944)..(947): n is a, c, g, or t
  misc_feature (952)..(952): n is a, c, g, or t
  misc_feature (958)..(959): n is a, c, g, or t
  misc_feature (964)..(964): n is a, c, g, or t
  misc_feature (967)..(968): n is a, c, g, or t
  misc_feature (970)..(970): n is a, c, g, or t
  misc_feature (973)..(973): n is a, c, g, or t
  misc_feature (977)..(977): n is a, c, g, or t
  misc_feature (979)..(979): n is a, c, g, or t
  misc_feature (984)..(984): n is a, c, g, or t
  misc_feature (989)..(989): n is a, c, g, or t
  misc_feature (992)..(992): n is a, c, g, or t
  misc_feature (998)..(998): n is a, c, g, or t
  misc_feature (1003)..(1004): n is a, c, g, or t
  misc_feature (1007)..(1007): n is a, c, g, or t
  misc_feature (1011)..(1011): n is a, c, g, or t
  misc_feature (1016)..(1016): n is a, c, g, or t
  misc_feature (1020)..(1021): n is a, c, g, or t
  misc_feature (1024)..(1024): n is a, c, g, or t
  misc_feature (1026)..(1026): n is a, c, g, or t
  misc_feature (1028)..(1028): n is a, c, g, or t
  misc_feature (1032)..(1032): n is a, c, g, or t
  misc_feature (1034)..(1034): n is a, c, g, or t
  misc_feature (1036)..(1037): n is a, c, g, or t
  misc_feature (1040)..(1040): n is a, c, g, or t
  misc_feature (1045)..(1045): n is a, c, g, or t
  misc_feature (1047)..(1047): n is a, c, g, or t
  misc_feature (1052)..(1052): n is a, c, g, or t
  misc_feature (1054)..(1054): n is a, c, g, or t
  misc_feature (1060)..(1060): n is a, c, g, or t
  misc_feature (1064)..(1064): n is a, c, g, or t
  misc_feature (1072)..(1072): n is a, c, g, or t
  misc_feature (1074)..(1074): n is a, c, g, or t
  misc_feature (1078)..(1078): n is a, c, g, or t
  misc_feature (1081)..(1081): n is a, c, g, or t
  misc_feature (1086)..(1086): n is a, c, g, or t
  misc_feature (1093)..(1093): n is a, c, g, or t
  misc_feature (1099)..(1100): n is a, c, g, or t
  misc_feature (1106)..(1106): n is a, c, g, or t
  misc_feature (1114)..(1114): n is a, c, g, or t
  misc_feature (1116)..(1116): n is a, c, g, or t
  misc_feature (1118)..(1118): n is a, c, g, or t
  misc_feature (1121)..(1122): n is a, c, g, or t
  misc_feature (1124)..(1124): n is a, c, g, or t
  misc_feature (1128)..(1128): n is a, c, g, or t
  misc_feature (1131)..(1134): n is a, c, g, or t
  misc_feature (1136)..(1136): n is a, c, g, or t
  misc_feature (1144)..(1144): n is a, c, g, or t
  misc_feature (1147)..(1148): n is a, c, g, or t
  misc_feature (1153)..(1153): n is a, c, g, or t
  misc_feature (1157)..(1157): n is a, c, g, or t
  misc_feature (1160)..(1161): n is a, c, g, or t
  misc_feature (1169)..(1169): n is a, c, g, or t
  misc_feature (1172)..(1172): n is a, c, g, or t
  misc_feature (1177)..(1178): n is a, c, g, or t
  misc_feature (1180)..(1180): n is a, c, g, or t
  misc_feature (1184)..(1184): n is a, c, g, or t
  misc_feature (1186)..(1186): n is a, c, g, or t
  misc_feature (1189)..(1189): n is a, c, g, or t
  misc_feature (1195)..(1196): n is a, c, g, or t
  misc_feature (1198)..(1199): n is a, c, g, or t
tagagagattactatgagaggatcgcatcaccatcaccatcacggatcctatttaggtgacactatagaatcgtcgacccacgcgtccgcaaacagtggtcatcaagtgcccccaacctgggcaagtcccccaaacacacacccatcgcccctggcttcgccagcctcaatgagatggaggagttcgcggaggcagaggatggaggcagcagcgtgcccccttccccctactcgaccccgtcctacctctcagtgccactgcctgccgagccctccccgggggcgcgggcgccgtgggagccgacgccgtccgcgccccccgctcggtggggacacggcgcccggcggcgctgcgacntggcgctgntaggntgcgccacgctgctggggnctgtgggcctgggcgccgacgtgancgaggcgcgcgcggccganggtgagnagnatcggcgctggctcgacggcctcttctttcnccgnnncggnngnttnncnngnggcctnancccaccngcgcntccncaacgaaccgncnnnaaaacatngnctccggcntgggnttngananntnngcnanactaagtgtnnctgnacatccgtnnttaaaatgnaactncncgnattnactgnatgcacttntaaaaataaattaananntcntnantanaantnatccnncaaatantttanaaagattcgnntacaaaaatntaancanttntacaantttatnaantttttttggtnntancaanntantnaanaaagtnttnaaaaaaannatnaccnnnntaattnattnanaannnaanaaatnttnaaaagantnntnttattctnngnaancatnggnananntnaannnaaanncntnnntannntcaannntngnaaannnaanatnnttntcnnaaaanaanangnnaatattnttttnannaaannnnttaancaaatnnaattntannantantatnanaaatnaatanatnattttnataanntanaaanataantttnnttnantnatangnannaanatatnanttatnantttttnttanaaaattantnacanaanttaanatttctntaattnnttattncagtaaantnanatnnantttnatnnnnanataataangtnntcttnaaantannatttatanttnaaganntnaaantngtnattgtnnannt

SEQ ID NO: 609 - DNA, 1408 bp, Homo Sapiens
  misc_feature (2)..(2): n is a, c, g, or t
  misc_feature (816)..(816): n is a, c, g, or t
  misc_feature (867)..(867): n is a, c, g, or t
  misc_feature (876)..(876): n is a, c, g, or t
  misc_feature (891)..(891): n is a, c, g, or t
  misc_feature (945)..(945): n is a, c, g, or t
  misc_feature (959)..(959): n is a, c, g, or t
  misc_feature (966)..(966): n is a, c, g, or t
  misc_feature (969)..(969): n is a, c, g, or t
  misc_feature (971)..(971): n is a, c, g, or t
  misc_feature (982)..(982): n is a, c, g, or t
  misc_feature (989)..(989): n is a, c, g, or t
  misc_feature (991)..(991): n is a, c, g, or t
  misc_feature (1000)..(1000): n is a, c, g, or t
  misc_feature (1004)..(1004): n is a, c, g, or t
  misc_feature (1023)..(1023): n is a, c, g, or t
  misc_feature (1033)..(1033): n is a, c, g, or t
  misc_feature (1037)..(1037): n is a, c, g, or t
  misc_feature (1039)..(1039): n is a, c, g, or t
  misc_feature (1041)..(1041): n is a, c, g, or t
  misc_feature (1047)..(1047): n is a, c, g, or t
  misc_feature (1052)..(1052): n is a, c, g, or t
  misc_feature (1056)..(1056): n is a, c, g, or t
  misc_feature (1067)..(1067): n is a, c, g, or t
  misc_feature (1074)..(1074): n is a, c, g, or t
  misc_feature (1078)..(1078): n is a, c, g, or t
  misc_feature (1086)..(1087): n is a, c, g, or t
  misc_feature (1090)..(1091): n is a, c, g, or t
  misc_feature (1099)..(1099): n is a, c, g, or t
  misc_feature (1105)..(1107): n is a, c, g, or t
  misc_feature (1116)..(1116): n is a, c, g, or t
  misc_feature (1118)..(1118): n is a, c, g, or t
  misc_feature (1127)..(1128): n is a, c, g, or t
  misc_feature (1132)..(1132): n is a, c, g, or t
  misc_feature (1144)..(1144): n is a, c, g, or t
  misc_feature (1157)..(1157): n is a, c, g, or t
  misc_feature (1172)..(1173): n is a, c, g, or t
  misc_feature (1175)..(1175): n is a, c, g, or t
  misc_feature (1178)..(1178): n is a, c, g, or t
  misc_feature (1182)..(1182): n is a, c, g, or t
  misc_feature (1185)..(1185): n is a, c, g, or t
  misc_feature (1189)..(1189): n is a, c, g, or t
  misc_feature (1191)..(1192): n is a, c, g, or t
  misc_feature (1205)..(1205): n is a, c, g, or t
  misc_feature (1207)..(1207): n is a, c, g, or t
  misc_feature (1220)..(1220): n is a, c, g, or t
  misc_feature (1226)..(1227): n is a, c, g, or t
  misc_feature (1229)..(1230): n is a, c, g, or t
  misc_feature (1234)..(1234): n is a, c, g, or t
  misc_feature (1238)..(1241): n is a, c, g, or t
  misc_feature (1247)..(1254): n is a, c, g, or t
  misc_feature (1256)..(1256): n is a, c, g, or t
  misc_feature (1258)..(1264): n is a, c, g, or t
  misc_feature (1266)..(1267): n is a, c, g, or t
  misc_feature (1269)..(1273): n is a, c, g, or t
  misc_feature (1276)..(1278): n is a, c, g, or t
  misc_feature (1282)..(1282): n is a, c, g, or t
  misc_feature (1284)..(1285): n is a, c, g, or t
  misc_feature (1287)..(1287): n is a, c, g, or t
  misc_feature (1293)..(1293): n is a, c, g, or t
  misc_feature (1298)..(1298): n is a, c, g, or t
  misc_feature (1308)..(1310): n is a, c, g, or t
  misc_feature (1312)..(1313): n is a, c, g, or t
  misc_feature (1322)..(1322): n is a, c, g, or t
  misc_feature (1324)..(1324): n is a, c, g, or t
  misc_feature (1335)..(1335): n is a, c, g, or t
  misc_feature (1340)..(1340): n is a, c, g, or t
  misc_feature (1345)..(1345): n is a, c, g, or t
  misc_feature (1352)..(1352): n is a, c, g, or t
  misc_feature (1354)..(1355): n is a, c, g, or t
  misc_feature (1357)..(1358): n is a, c, g, or t
  misc_feature (1360)..(1360): n is a, c, g, or t
  misc_feature (1364)..(1365): n is a, c, g, or t
  misc_feature (1371)..(1371): n is a, c, g, or t
  misc_feature (1373)..(1373): n is a, c, g, or t
  misc_feature (1378)..(1378): n is a, c, g, or t
  misc_feature (1388)..(1388): n is a, c, g, or t
  misc_feature (1399)..(1400): n is a, c, g, or t
  misc_feature (1403)..(1403): n is a, c, g, or t
anaatagagaaattactatgagaggatcgcatcaccatcaccatcacggatcctatttaggtgacactatagaatcgtcgacccacgcgttccgcccacgcgtccgctcctgcctgggccgcagccgccgccgcgatgcccagtaagttcagctgccggcagctccgggaggcgggccagtgtttcgagagtttcctggtcgttcggggactggacatggagacagatcgcgagcggctgcggaccatttataaccgcgacttcaagatcagctttgggacccccgcccctggcttctcctccatgctgtatggaatgaagattgcaaatctggcctacgtcaccaagactcgggtcaggttcttcagactcgaccgctgggccgacgtgcggttcccagaaaagaggagaatgaagctggggtcagatatcagcaaacaccacaagtcactgctagccaagatcttttatgacagggctgagtatcttcatgggaaacatggtgtggatgtggaagtccaggggccccatgaagcccgagatgggcagctccttatccgcctggatttgaaccgcaaagaggtgctgaccctgaggcttcggaatggcggaacccagtctgttaccctcactcacctcttcccactctgccggacaccccagtttgctttctacaatgaagaccaggagttgccctgtccactgggccccggtgaatgctatgaactccatgtccattgtaagaccagctttgtgggctacttcccagccacagtgctctgggagctgctgggacctgggggagtcgggtttcanaaggagccggcacattctacatttgcccgcttcttggctgccgtcgcccanagccccccntgggctgcacagctnaagccccatgactccctttcaaagcggaacccggaatcaccggaaaaccctgtngtgacccaatcggnataaagnaangnaaaaaagaccntgacccncnccttaaggnctangaacctgggaatttaaatnatggcccctngggnanantactancccancctncccccccctcnaggaaantttntccccatnnttnnttcagggnaaaaannntttttcctngncccctaagnnaatnccaaaaaattanggccccccttggnaaaaaaccccttaanngnaanaaanttntaangnnaaacttccgcctncntgcttccccctgnaaaaanntnnaaangaannnnaaattnnnnnnnntnannnnnnnanntnnnnnccnnnaccngnnancctgtngaaanaaaaaccccnnntnntccccctgnantttctggaaanaacanaaaanccccctnanntnntngggnnaacacntnttttncttttttccnaaaaaaccccnnggnacccc

SEQ ID NO: 610 - DNA, 1395 bp, Homo Sapiens
  misc_feature (932)..(932): n is a, c, g, or t
  misc_feature (942)..(943): n is a, c, g, or t
  misc_feature (946)..(946): n is a, c, g, or t
  misc_feature (959)..(959): n is a, c, g, or t
  misc_feature (962)..(962): n is a, c, g, or t
  misc_feature (964)..(965): n is a, c, g, or t
  misc_feature (983)..(983): n is a, c, g, or t
  misc_feature (992)..(992): n is a, c, g, or t
  misc_feature (1007)..(1007): n is a, c, g, or t
  misc_feature (1016)..(1016): n is a, c, g, or t
  misc_feature (1022)..(1022): n is a, c, g, or t
  misc_feature (1033)..(1033): n is a, c, g, or t
  misc_feature (1037)..(1037): n is a, c, g, or t
  misc_feature (1040)..(1041): n is a, c, g, or t
  misc_feature (1049)..(1049): n is a, c, g, or t
  misc_feature (1065)..(1067): n is a, c, g, or t
  misc_feature (1070)..(1070): n is a, c, g, or t
  misc_feature (1090)..(1090): n is a, c, g, or t
  misc_feature (1094)..(1094): n is a, c, g, or t
  misc_feature (1099)..(1110): n is a, c, g, or t
  misc_feature (1112)..(1112): n is a, c, g, or t
  misc_feature (1114)..(1115): n is a, c, g, or t
  misc_feature (1117)..(1117): n is a, c, g, or t
  misc_feature (1120)..(1121): n is a, c, g, or t
  misc_feature (1123)..(1125): n is a, c, g, or t
  misc_feature (1127)..(1127): n is a, c, g, or t
  misc_feature (1129)..(1129): n is a, c, g, or t
  misc_feature (1132)..(1138): n is a, c, g, or t
  misc_feature (1144)..(1144): n is a, c, g, or t
  misc_feature (1148)..(1149): n is a, c, g, or t
  misc_feature (1158)..(1159): n is a, c, g, or t
  misc_feature (1162)..(1162): n is a, c, g, or t
  misc_feature (1172)..(1172): n is a, c, g, or t
  misc_feature (1181)..(1181): n is a, c, g, or t
  misc_feature (1183)..(1183): n is a, c, g, or t
  misc_feature (1186)..(1186): n is a, c, g, or t
  misc_feature (1199)..(1199): n is a, c, g, or t
  misc_feature (1204)..(1204): n is a, c, g, or t
  misc_feature (1209)..(1209): n is a, c, g, or t
  misc_feature (1212)..(1213): n is a, c, g, or t
  misc_feature (1217)..(1218): n is a, c, g, or t
  misc_feature (1221)..(1221): n is a, c, g, or t
  misc_feature (1223)..(1223): n is a, c, g, or t
  misc_feature (1227)..(1227): n is a, c, g, or t
  misc_feature (1236)..(1236): n is a, c, g, or t
  misc_feature (1242)..(1243): n is a, c, g, or t
  misc_feature (1246)..(1246): n is a, c, g, or t
  misc_feature (1252)..(1252): n is a, c, g, or t
  misc_feature (1258)..(1258): n is a, c, g, or t
  misc_feature (1273)..(1273): n is a, c, g, or t
  misc_feature (1283)..(1283): n is a, c, g, or t
  misc_feature (1287)..(1288): n is a, c, g, or t
  misc_feature (1297)..(1297): n is a, c, g, or t
  misc_feature (1299)..(1300): n is a, c, g, or t
  misc_feature (1302)..(1303): n is a, c, g, or t
  misc_feature (1307)..(1307): n is a, c, g, or t
  misc_feature (1315)..(1315): n is a, c, g, or t
  misc_feature (1323)..(1323): n is a, c, g, or t
  misc_feature (1325)..(1325): n is a, c, g, or t
  misc_feature (1329)..(1329): n is a, c, g, or t
  misc_feature (1332)..(1332): n is a, c, g, or t
  misc_feature (1337)..(1337): n is a, c, g, or t
  misc_feature (1347)..(1347): n is a, c, g, or t
  misc_feature (1361)..(1362): n is a, c, g, or t
  misc_feature (1365)..(1365): n is a, c, g, or t
  misc_feature (1368)..(1369): n is a, c, g, or t
  misc_feature (1371)..(1371): n is a, c, g, or t
  misc_feature (1384)..(1384): n is a, c, g, or t
  misc_feature (1393)..(1393): n is a, c, g, or t
  misc_feature (1395)..(1395): n is a, c, g, or t
tagagaaattactatgagaggatcgcatcaccatcaccatcacggatcctatttaggtgacactatagaatcgtcgacccacgcgtccgcggaggagcttccggctgggctgtagggagagactgggtggctcgcaggaaggaaagatgtcctccggagctgagtctccggagctgctgacttacgaagaggtggccaggtaccaacaccagcccggagagcggccccgcctggtggttctgatcgggtctctgggagcccgactgcacgagctgaagcaaaaggtggtggctgagaacccacagcactttggcgtcgctgttccacataccaccaggccccgaaagagccatgagaaggaaggagtggaatatcactttgtgtctaagcaagcatttgaggccgacttacatcacaacaagttcctggaacatggtgaatataaggaaaatctgtatggaaccagcctggaggccattcaggctgttatggccaaaaacaaagtttgtttggtggatgtggagccagaagcactgaaacaactgaggacctcagaatttaaaccctatattatatttgtaaagcctgcaattcaggaaaaaagaaaaacgccacctatgtccccagcttgtgaggacacagcagccccatttgatgagcagcagcaagagatggccgcttctgccgccttcatagaccggcattacgggcacctggtagacgccgtgctggtgaaggaggatctccagggtgcctacagcccagctcaaagtggtcttagagaagctgagcaaggacactcactgggtacctgttagttgggtcaggtaactttatcccagaacatccaagctggacgggaccttgaaaatcatctagtccagactcccctcattttaccatcaaggaatctcaagcgcagagagggaganaaattctccnnaanttccttcctccanaanannataagtgggaaatcttgnttggtggtnggtttttgccggtgnttttccccngccccnctttggaatcntganttnnaaggggcnatttcaaaaaacaacnnnttnctttttttaaagtttccccnggcnaaaannnnnnnnnnnnanannanaannannnananaannnnnnnaaaaangggnngcccccccnnaanggggcccaanaaacctttntnccngaaccttggcccncgttnaaaanccnnaagnnccncnaacncccctgggntttttnnaanccccgntgcccnggggtttttttgggnaaaccccccncttnnggaattttngnncnngggncttaaggnaaaaaccngnttanccnttaancccgggcccnaaaattggggtttnnggngcnnanaaaacacctctgntttcctttnan

SEQ ID NO: 611 - DNA, 1395 bp, Homo Sapiens; identical to SEQ ID NO: 610
  misc_feature (932)..(932): n is a, c, g, or t
  misc_feature (942)..(943): n is a, c, g, or t
  misc_feature (946)..(946): n is a, c, g, or t
  misc_feature (959)..(959): n is a, c, g, or t
  misc_feature (962)..(962): n is a, c, g, or t
  misc_feature (964)..(965): n is a, c, g, or t
  misc_feature (983)..(983): n is a, c, g, or t
  misc_feature (992)..(992): n is a, c, g, or t
  misc_feature (1007)..(1007): n is a, c, g, or t
  misc_feature (1016)..(1016): n is a, c, g, or t
  misc_feature (1022)..(1022): n is a, c, g, or t
  misc_feature (1033)..(1033): n is a, c, g, or t
  misc_feature (1037)..(1037): n is a, c, g, or t
  misc_feature (1040)..(1041): n is a, c, g, or t
  misc_feature (1049)..(1049): n is a, c, g, or t
  misc_feature (1065)..(1067): n is a, c, g, or t
  misc_feature (1070)..(1070): n is a, c, g, or t
  misc_feature (1090)..(1090): n is a, c, g, or t
  misc_feature (1094)..(1094): n is a, c, g, or t
  misc_feature (1099)..(1110): n is a, c, g, or t
  misc_feature (1112)..(1112): n is a, c, g, or t
  misc_feature (1114)..(1115): n is a, c, g, or t
  misc_feature (1117)..(1117): n is a, c, g, or t
  misc_feature (1120)..(1121): n is a, c, g, or t
  misc_feature (1123)..(1125): n is a, c, g, or t
  misc_feature (1127)..(1127): n is a, c, g, or t
  misc_feature (1129)..(1129): n is a, c, g, or t
  misc_feature (1132)..(1138): n is a, c, g, or t
  misc_feature (1144)..(1144): n is a, c, g, or t
  misc_feature (1148)..(1149): n is a, c, g, or t
  misc_feature (1158)..(1159): n is a, c, g, or t
  misc_feature (1162)..(1162): n is a, c, g, or t
  misc_feature (1172)..(1172): n is a, c, g, or t
  misc_feature (1181)..(1181): n is a, c, g, or t
  misc_feature (1183)..(1183): n is a, c, g, or t
  misc_feature (1186)..(1186): n is a, c, g, or t
  misc_feature (1199)..(1199): n is a, c, g, or t
  misc_feature (1204)..(1204): n is a, c, g, or t
  misc_feature (1209)..(1209): n is a, c, g, or t
  misc_feature (1212)..(1213): n is a, c, g, or t
  misc_feature (1217)..(1218): n is a, c, g, or t
  misc_feature (1221)..(1221): n is a, c, g, or t
  misc_feature (1223)..(1223): n is a, c, g, or t
  misc_feature (1227)..(1227): n is a, c, g, or t
  misc_feature (1236)..(1236): n is a, c, g, or t
  misc_feature (1242)..(1243): n is a, c, g, or t
  misc_feature (1246)..(1246): n is a, c, g, or t
  misc_feature (1252)..(1252): n is a, c, g, or t
  misc_feature (1258)..(1258): n is a, c, g, or t
  misc_feature (1273)..(1273): n is a, c, g, or t
  misc_feature (1283)..(1283): n is a, c, g, or t
  misc_feature (1287)..(1288): n is a, c, g, or t
  misc_feature (1297)..(1297): n is a, c, g, or t
  misc_feature (1299)..(1300): n is a, c, g, or t
  misc_feature (1302)..(1303): n is a, c, g, or t
  misc_feature (1307)..(1307): n is a, c, g, or t
  misc_feature (1315)..(1315): n is a, c, g, or t
  misc_feature (1323)..(1323): n is a, c, g, or t
  misc_feature (1325)..(1325): n is a, c, g, or t
  misc_feature (1329)..(1329): n is a, c, g, or t
  misc_feature (1332)..(1332): n is a, c, g, or t
  misc_feature (1337)..(1337): n is a, c, g, or t
  misc_feature (1347)..(1347): n is a, c, g, or t
  misc_feature (1361)..(1362): n is a, c, g, or t
  misc_feature (1365)..(1365): n is a, c, g, or t
  misc_feature (1368)..(1369): n is a, c, g, or t
  misc_feature (1371)..(1371): n is a, c, g, or t
  misc_feature (1384)..(1384): n is a, c, g, or t
  misc_feature (1393)..(1393): n is a, c, g, or t
  misc_feature (1395)..(1395): n is a, c, g, or t

SEQ ID NO: 612 - DNA, 1422 bp, Homo Sapiens
  misc_feature (903)..(904): n is a, c, g, or t
  misc_feature (920)..(920): n is a, c, g, or t
  misc_feature (953)..(953): n is a, c, g, or t
  misc_feature (970)..(970): n is a, c, g, or t
  misc_feature (991)..(991): n is a, c, g, or t
  misc_feature (1000)..(1000): n is a, c, g, or t
  misc_feature (1011)..(1011): n is a, c, g, or t
  misc_feature (1023)..(1023): n is a, c, g, or t
  misc_feature (1034)..(1034): n is a, c, g, or t
  misc_feature (1048)..(1048): n is a, c, g, or t
  misc_feature (1072)..(1072): n is a, c, g, or t
  misc_feature (1078)..(1078): n is a, c, g, or t
  misc_feature (1095)..(1095): n is a, c, g, or t
  misc_feature (1097)..(1098): n is a, c, g, or t
  misc_feature (1100)..(1100): n is a, c, g, or t
  misc_feature (1102)..(1102): n is a, c, g, or t
  misc_feature (1104)..(1104): n is a, c, g, or t
  misc_feature (1107)..(1107): n is a, c, g, or t
  misc_feature (1123)..(1123): n is a, c, g, or t
  misc_feature (1128)..(1128): n is a, c, g, or t
  misc_feature (1134)..(1134): n is a, c, g, or t
  misc_feature (1137)..(1137): n is a, c, g, or t
  misc_feature (1149)..(1149): n is a, c, g, or t
  misc_feature (1152)..(1152): n is a, c, g, or t
  misc_feature (1166)..(1167): n is a, c, g, or t
  misc_feature (1170)..(1171): n is a, c, g, or t
  misc_feature (1179)..(1179): n is a, c, g, or t
  misc_feature (1181)..(1181): n is a, c, g, or t
  misc_feature (1184)..(1184): n is a, c, g, or t
  misc_feature (1187)..(1187): n is a, c, g, or t
  misc_feature (1198)..(1199): n is a, c, g, or t
  misc_feature (1202)..(1203): n is a, c, g, or t
  misc_feature (1208)..(1208): n is a, c, g, or t
  misc_feature (1216)..(1216): n is a, c, g, or t
  misc_feature (1218)..(1218): n is a, c, g, or t
  misc_feature (1221)..(1221): n is a, c, g, or t
  misc_feature (1227)..(1227): n is a, c, g, or t
  misc_feature (1233)..(1233): n is a, c, g, or t
  misc_feature (1240)..(1240): n is a, c, g, or t
  misc_feature (1259)..(1259): n is a, c, g, or t
  misc_feature (1265)..(1265): n is a, c, g, or t
  misc_feature (1268)..(1268): n is a, c, g, or t
  misc_feature (1270)..(1270): n is a, c, g, or t
  misc_feature (1275)..(1275): n is a, c, g, or t
  misc_feature (1279)..(1279): n is a, c, g, or t
  misc_feature (1292)..(1292): n is a, c, g, or t
  misc_feature (1305)..(1305): n is a, c, g, or t
  misc_feature (1308)..(1308): n is a, c, g, or t
  misc_feature (1315)..(1315): n is a, c, g, or t
  misc_feature (1334)..(1334): n is a, c, g, or t
  misc_feature (1337)..(1337): n is a, c, g, or t
  misc_feature (1340)..(1340): n is a, c, g, or t
  misc_feature (1345)..(1345): n is a, c, g, or t
  misc_feature (1353)..(1354): n is a, c, g, or t
  misc_feature (1356)..(1357): n is a, c, g, or t
  misc_feature (1364)..(1365): n is a, c, g, or t
  misc_feature (1393)..(1393): n is a, c, g, or t
tagagagattactatgagaggatcgcatcaccatcaccatcacggatcctatttaggtgacactatagaatcgtcgacccacgcgtccggcagtgtgcagtgcaaactgcgctatggaatgtggcatttcctacttggggataaagcaagcaaaagactgacagaacgcagcagagtgataactgtagatggcaatatatgtactggaaaaggcaaacttgcaaaagaaatagcagagaaactaggcttcaagcactttcctgaagcggggattcattatccagacagtaccacaggagatgggaagcccctcgccaccgactataatggcaactgtagtttggagaaattttacgatgatccgagaagcaatgatggcaacagttaccgcctgcagtcctggttgtacagcagtcgcctgctgcagtactcagatgccttggagcacttgctgaccacaggacaaggtgttgtgttggagcgctccatcttcagtgactttgtgttcctggaggcgatgtacaaccagggattcatccgaaagcagtgtgtggaccactacaacgaggtgaagagcgtcaccatctgcgattacctgcccccccacctggtgatttacatcgatgtgcccgttccagaggtccagaggcggattcagaagaaaggagatccacatgaaatgaagatcacctctgcctatctacaggacattgagaatgcctataagaaaacctttctccctgagatgagtgaaaaatgtgaggttttacagtattctgcaagggaagctcaagattcaaaaaaggtggtagaggacattgaatacctgaagttcgataaagggccgtggctcaagcaggacaatcgcactttataccacctgcgattactggttcaggatanntttgaggtgctgaatnacacaagcattcctatctttctcccggaagtcnccattggagctcatcanactgaccgtgtcttacatcanttcaaaaanctgccgggccncaagtacagccntgggtacaacnccgaggtgggaaanaagtggatctgggctgaaatgaangggccnccttttgctccagctgnanncnangnganggccaagctgcatcanccccnctcccnggnaccccaaaaacnttnaaatcgggggaggnnaannatgcaaantnccnagnggaaaaagggnnccnnaaaancatccccngnaanaaaggnaagggnttggggnaaccccctcccttcggggnttgganccntntcttntttngaaggcccccctnccccggaaaaaanggncctgggnaagcccccccccccccccnggnttnccccncccccggnntnngggggcnnttttttttcccccaaaaaaagttccggnaaaaaaaaaaaaaaaaaaggccccccttg

SEQ ID NO: 613 - DNA, 1348 bp, Homo Sapiens
  misc_feature (9)..(9): n is a, c, g, or t
  misc_feature (13)..(13): n is a, c, g, or t
  misc_feature (891)..(892): n is a, c, g, or t
  misc_feature (901)..(901): n is a, c, g, or t
  misc_feature (907)..(907): n is a, c, g, or t
  misc_feature (912)..(912): n is a, c, g, or t
  misc_feature (926)..(926): n is a, c, g, or t
  misc_feature (931)..(931): n is a, c, g, or t
  misc_feature (934)..(934): n is a, c, g, or t
  misc_feature (948)..(949): n is a, c, g, or t
  misc_feature (960)..(960): n is a, c, g, or t
  misc_feature (972)..(972): n is a, c, g, or t
  misc_feature (975)..(975): n is a, c, g, or t
  misc_feature (1009)..(1009): n is a, c, g, or t
  misc_feature (1018)..(1018): n is a, c, g, or t
  misc_feature (1025)..(1025): n is a, c, g, or t
  misc_feature (1032)..(1032): n is a, c, g, or t
  misc_feature (1034)..(1034): n is a, c, g, or t
  misc_feature (1036)..(1036): n is a, c, g, or t
  misc_feature (1040)..(1040): n is a, c, g, or t
  misc_feature (1062)..(1063): n is a, c, g, or t
  misc_feature (1065)..(1065): n is a, c, g, or t
  misc_feature (1073)..(1074): n is a, c, g, or t
  misc_feature (1086)..(1086): n is a, c, g, or t
  misc_feature (1089)..(1090): n is a, c, g, or t
  misc_feature (1093)..(1093): n is a, c, g, or t
  misc_feature (1097)..(1098): n is a, c, g, or t
  misc_feature (1109)..(1109): n is a, c, g, or t
  misc_feature (1116)..(1116): n is a, c, g, or t
  misc_feature (1125)..(1126): n is a, c, g, or t
  misc_feature (1129)..(1129): n is a, c, g, or t
  misc_feature (1134)..(1134): n is a, c, g, or t
  misc_feature (1142)..(1142): n is a, c, g, or t
  misc_feature (1153)..(1153): n is a, c, g, or t
  misc_feature (1155)..(1156): n is a, c, g, or t
  misc_feature (1160)..(1160): n is a, c, g, or t
  misc_feature (1168)..(1168): n is a, c, g, or t
  misc_feature (1170)..(1170): n is a, c, g, or t
  misc_feature (1177)..(1179): n is a, c, g, or t
  misc_feature (1181)..(1181): n is a, c, g, or t
  misc_feature (1186)..(1188): n is a, c, g, or t
  misc_feature (1191)..(1191): n is a, c, g, or t
  misc_feature (1195)..(1195): n is a, c, g, or t
  misc_feature (1204)..(1204): n is a, c, g, or t
  misc_feature (1206)..(1206): n is a, c, g, or t
  misc_feature (1211)..(1211): n is a, c, g, or t
  misc_feature (1219)..(1219): n is a, c, g, or t
  misc_feature (1221)..(1221): n is a, c, g, or t
  misc_feature (1223)..(1223): n is a, c, g, or t
  misc_feature (1225)..(1226): n is a, c, g, or t
  misc_feature (1229)..(1232): n is a, c, g, or t
  misc_feature (1242)..(1244): n is a, c, g, or t
  misc_feature (1247)..(1248): n is a, c, g, or t
  misc_feature (1251)..(1252): n is a, c, g, or t
  misc_feature (1256)..(1256): n is a, c, g, or t
  misc_feature (1261)..(1261): n is a, c, g, or t
  misc_feature (1270)..(1271): n is a, c, g, or t
  misc_feature (1273)..(1274): n is a, c, g, or t
  misc_feature (1276)..(1276): n is a, c, g, or t
  misc_feature (1281)..(1282): n is a, c, g, or t
  misc_feature (1286)..(1286): n is a, c, g, or t
  misc_feature (1288)..(1289): n is a, c, g, or t
  misc_feature (1292)..(1297): n is a, c, g, or t
  misc_feature (1299)..(1301): n is a, c, g, or t
  misc_feature (1309)..(1309): n is a, c, g, or t
  misc_feature (1317)..(1320): n is a, c, g, or t
  misc_feature (1327)..(1328): n is a, c, g, or t
  misc_feature (1330)..(1330): n is a, c, g, or t
  misc_feature (1332)..(1332): n is a, c, g, or t
  misc_feature (1335)..(1335): n is a, c, g, or t
  misc_feature (1340)..(1341): n is a, c, g, or t
  misc_feature (1345)..(1347): n is a, c, g, or t
tagagaaanttanctatgagaggatcgcatcaccatcaccatcacggatcctatttaggtgacactatagaatcgtcgacccacgcgtccgaccgccctcacacagaagtgtttccttacattttggctgatgacaagtggcacaagctctccttagccatcagtgcttcccatttgattttacacattgactgcaataaaatttatgaaagggtagtagaaaagccctccacagacttgcctctaggcacaacattttggctaggacagagaaataatgcgcatggatattttaagggtataatgcaagatgtccaattacttgtcatgccccagggatttattgctcagtgcccagatcttaatcgcacctgtccaacttgcaatgacttccatggacttgtgcagaaaatcatggagctacaggatattttagccaaaacatcagccaagctgtctcgagctgaacagcgaatgaatagattggatcagtgctattgtgaaaggacttgcaccatgaagggaaccacctaccgagaatttgagtcctggatagacggctgtaagaactgcacatgcctgaatggaaccatccagtgtgaaactctaatctgcccaaatcctgactgcccacttaagtcggctcttgcgtatgtggatggcaaatgctgtaaggaatgcaaatcgatatgccaatttcaaggacgaacctactttgaaggagaaagaaatacagtctattcctcttctggagtatgtgttctctatgagtgcaaggaccagaccatgaaacttgttgagagttcaggctgtcccagcttttggattgtccagagtctcatcaaataacccttgtctcacagctgttgcaaagtttgtaaaggttatgannttttgttcntgaaanggcanaactggcatggaanaattnccntctgcaaaaatctnnaaggacagggnctgttttgaacntgnccaaaatggttttaaggggcccttccaaaagaanaaaggcccnacggggnaaaaacntncnatgnatgggcctgaaaggggcccccnntnacgggccnngaaaaaaaaaanggnnggnccannccccggggttnttttttnggggcctcnngcnaaacngggaaaanccccaaaattnannattnttccgggncnaaaaatnnngnggggnnnccnaaanccccccccncnggggnagaaaagncntntnnttnnnnccggtggggnnnaannacnnttgnttttncacccgggnntnnanggggnnaggnannccnnnnnnannntttttttnaaaaaggnnnnaaaaagnnananccnttttnncccnnnt

SEQ ID NO: 614 - DNA, 1405 bp, Homo Sapiens
  misc_feature (691)..(691): n is a, c, g, or t
  misc_feature (754)..(754): n is a, c, g, or t
  misc_feature (780)..(780): n is a, c, g, or t
  misc_feature (802)..(802): n is a, c, g, or t
  misc_feature (839)..(839): n is a, c, g, or t
  misc_feature (854)..(854): n is a, c, g, or t
  misc_feature (923)..(923): n is a, c, g, or t
  misc_feature (943)..(943): n is a, c, g, or t
  misc_feature (948)..(948): n is a, c, g, or t
  misc_feature (950)..(950): n is a, c, g, or t
  misc_feature (958)..(958): n is a, c, g, or t
  misc_feature (963)..(963): n is a, c, g, or t
  misc_feature (975)..(975): n is a, c, g, or t
  misc_feature (978)..(978): n is a, c, g, or t
  misc_feature (982)..(982): n is a, c, g, or t
  misc_feature (984)..(984): n is a, c, g, or t
  misc_feature (992)..(992): n is a, c, g, or t
  misc_feature (994)..(994): n is a, c, g, or t
  misc_feature (1002)..(1002): n is a, c, g, or t
  misc_feature (1010)..(1010): n is a, c, g, or t
  misc_feature (1023)..(1024): n is a, c, g, or t
  misc_feature (1032)..(1032): n is a, c, g, or t
  misc_feature (1041)..(1041): n is a, c, g, or t
  misc_feature (1045)..(1045): n is a, c, g, or t
  misc_feature (1066)..(1066): n is a, c, g, or t
  misc_feature (1069)..(1070): n is a, c, g, or t
  misc_feature (1079)..(1079): n is a, c, g, or t
  misc_feature (1088)..(1088): n is a, c, g, or t
  misc_feature (1090)..(1090): n is a, c, g, or t
  misc_feature (1092)..(1092): n is a, c, g, or t
  misc_feature (1095)..(1095): n is a, c, g, or t
  misc_feature (1097)..(1097): n is a, c, g, or t
  misc_feature (1102)..(1102): n is a, c, g, or t
  misc_feature (1107)..(1107): n is a, c, g, or t
  misc_feature (1117)..(1117): n is a, c, g, or t
  misc_feature (1120)..(1121): n is a, c, g, or t
  misc_feature (1125)..(1125): n is a, c, g, or t
  misc_feature (1128)..(1128): n is a, c, g, or t
  misc_feature (1152)..(1152): n is a, c, g, or t
  misc_feature (1155)..(1156): n is a, c, g, or t
  misc_feature (1158)..(1158): n is a, c, g, or t
  misc_feature (1162)..(1162): n is a, c, g, or t
  misc_feature (1170)..(1170): n is a, c, g, or t
  misc_feature (1175)..(1175): n is a, c, g, or t
  misc_feature (1178)..(1178): n is a, c, g, or t
  misc_feature (1182)..(1183): n is a, c, g, or t
  misc_feature (1185)..(1185): n is a, c, g, or t
  misc_feature (1189)..(1189): n is a, c, g, or t
  misc_feature (1198)..(1198): n is a, c, g, or t
  misc_feature (1202)..(1202): n is a, c, g, or t
  misc_feature (1210)..(1212): n is a, c, g, or t
  misc_feature (1226)..(1226): n is a, c, g, or t
  misc_feature (1228)..(1228): n is a, c, g, or t
  misc_feature (1233)..(1233): n is a, c, g, or t
  misc_feature (1236)..(1236): n is a, c, g, or t
  misc_feature (1238)..(1238): n is a, c, g, or t
  misc_feature (1240)..(1240): n is a, c, g, or t
  misc_feature (1244)..(1244): n is a, c, g, or t
  misc_feature (1250)..(1250): n is a, c, g, or t
  misc_feature (1252)..(1252): n is a, c, g, or t
  misc_feature (1255)..(1255): n is a, c, g, or t
  misc_feature (1264)..(1264): n is a, c, g, or t
  misc_feature (1266)..(1266): n is a, c, g, or t
  misc_feature (1277)..(1277): n is a, c, g, or t
  misc_feature (1281)..(1281): n is a, c, g, or t
  misc_feature (1283)..(1284): n is a, c, g, or t
  misc_feature (1286)..(1287): n is a, c, g, or t
  misc_feature (1297)..(1298): n is a, c, g, or t
  misc_feature (1301)..(1304): n is a, c, g, or t
  misc_feature (1308)..(1308): n is a, c, g, or t
  misc_feature (1310)..(1312): n is a, c, g, or t
  misc_feature (1317)..(1317): n is a, c, g, or t
  misc_feature (1319)..(1319): n is a, c, g, or t
  misc_feature (1323)..(1323): n is a, c, g, or t
  misc_feature (1326)..(1326): n is a, c, g, or t
  misc_feature (1331)..(1334): n is a, c, g, or t
  misc_feature (1343)..(1343): n is a, c, g, or t
  misc_feature (1345)..(1346): n is a, c, g, or t
  misc_feature (1350)..(1351): n is a, c, g, or t
  misc_feature (1354)..(1354): n is a, c, g, or t
  misc_feature (1356)..(1357): n is a, c, g, or t
  misc_feature (1360)..(1360): n is a, c, g, or t
  misc_feature (1365)..(1366): n is a, c, g, or t
  misc_feature (1372)..(1376): n is a, c, g, or t
  misc_feature (1384)..(1384): n is a, c, g, or t
  misc_feature (1386)..(1388): n is a, c, g, or t
  misc_feature (1391)..(1395): n is a, c, g, or t
  misc_feature (1397)..(1399): n is a, c, g, or t
tagaggaaaattactatgagaggatcgcatcaccatcaccatcacgggatcctatttaggtgacactatagaatcgtcgacccacgcggtccgggaagaccagccctgacccctcgccggtgtctgccgccccatccaaggccggcctgcctcgccacatctacccggccgtggagttcctggggccctgcgagcagggcgagaggagaaactcggctccagaatccatcctgctggttccgcccacttggcccaagccgctggtgcctgccattcccatctgcagcatcccagtgactgcatccctccctccacttgagtggccgctgtccagtcagtcaggctcttacgagctgcggatcgaggtgcagcccaagccacatcaccgggcccactatgagacagaaggcagccgaggggctgtcaaagctccaactggaggccaccctgtggttcagctccatggctacatggaaaacaagcctctgggacttcagatcttcattgggacagctgatgagcggatccttaagccgcacgccttctaccaggtgcaccgaatcacggggaaaactgtcaccaccaccagctatgagaagatagtgggcaacaccaaagtcctggagatacccttggagcccaaaaacaacatgagggcaaccatcgactgtgcggggatcttgaagcttanaaacgccgacattgagctgcggaaaggcgagacggacattggaagaaagaacacgcgggtganactggttttccgagttcacatcccanagtccagtggcagaatcgtctntttaaagactgcatctaaccccatcgagtgctcccancgatctgctcacgancttgcccatggttgaaaaacaagaaacagacagctgcctggtctatggcggccaagcaaatgatcctcnacgggggcaaaaattttacnttccnanttcaaagnttgtnttttactgaaanaancacnanattggaanancaaatttngggaaaanggaaacccacggnnggaatagngacaaaaanccancccaaaaatgcttttttgtgnaanncctgaaaangggaaaaangnanatncnccaancctgnaaaagggaanttnntacnttntcaatgggaaaaaaaaaaaaaaantcnncnttanattttaantaaanccnttcnngnccanaaaaagaancccnggaaaaannnaaccccttttattnanccccnccngnangctnggaacntnttnttacccaancnaatggggaaancccntnncnngggaacaagnnccnnnnaatntnnnggggntntttnctnacctnnnnaaaaaaaananngggnnttnannggnaaaannaacccnnnnnggattaanannnttnnnnncnnntttttt

SEQ ID NO: 615 - DNA, 1350 bp, Homo Sapiens
  misc_feature (1)..(1): n is a, c, g, or t
  misc_feature (818)..(818): n is a, c, g, or t
  misc_feature (833)..(833): n is a, c, g, or t
  misc_feature (888)..(888): n is a, c, g, or t
  misc_feature (918)..(918): n is a, c, g, or t
  misc_feature (953)..(953): n is a, c, g, or t
  misc_feature (958)..(958): n is a, c, g, or t
  misc_feature (961)..(961): n is a, c, g, or t
  misc_feature (1063)..(1063): n is a, c, g, or t
  misc_feature (1080)..(1080): n is a, c, g, or t
  misc_feature (1087)..(1087): n is a, c, g, or t
  misc_feature (1094)..(1094): n is a, c, g, or t
  misc_feature (1098)..(1098): n is a, c, g, or t
  misc_feature (1103)..(1103): n is a, c, g, or t
  misc_feature (1114)..(1114): n is a, c, g, or t
  misc_feature (1117)..(1117): n is a, c, g, or t
  misc_feature (1124)..(1124): n is a, c, g, or t
  misc_feature (1126)..(1126): n is a, c, g, or t
  misc_feature (1134)..(1134): n is a, c, g, or t
  misc_feature (1141)..(1141): n is a, c, g, or t
  misc_feature (1144)..(1144): n is a, c, g, or t
  misc_feature (1147)..(1147): n is a, c, g, or t
  misc_feature (1150)..(1150): n is a, c, g, or t
  misc_feature (1155)..(1155): n is a, c, g, or t
  misc_feature (1157)..(1160): n is a, c, g, or t
  misc_feature (1166)..(1167): n is a, c, g, or t
  misc_feature (1172)..(1172): n is a, c, g, or t
  misc_feature (1176)..(1176): n is a, c, g, or t
  misc_feature (1196)..(1196): n is a, c, g, or t
  misc_feature (1200)..(1200): n is a, c, g, or t
  misc_feature (1203)..(1203): n is a, c, g, or t
  misc_feature (1206)..(1207): n is a, c, g, or t
  misc_feature (1225)..(1225): n is a, c, g, or t
  misc_feature (1239)..(1239): n is a, c, g, or t
  misc_feature (1242)..(1242): n is a, c, g, or t
  misc_feature (1244)..(1244): n is a, c, g, or t
  misc_feature (1248)..(1248): n is a, c, g, or t
  misc_feature (1261)..(1261): n is a, c, g, or t
  misc_feature (1269)..(1269): n is a, c, g, or t
  misc_feature (1289)..(1291): n is a, c, g, or t
  misc_feature (1299)..(1301): n is a, c, g, or t
  misc_feature (1304)..(1304): n is a, c, g, or t
  misc_feature (1307)..(1309): n is a, c, g, or t
  misc_feature (1314)..(1314): n is a, c, g, or t
  misc_feature (1319)..(1320): n is a, c, g, or t
  misc_feature (1322)..(1324): n is a, c, g, or t
  misc_feature (1329)..(1331): n is a, c, g, or t
  misc_feature (1334)..(1334): n is a, c, g, or t
  misc_feature (1342)..(1342): n is a, c, g, or t
  misc_feature (1344)..(1344): n is a, c, g, or t
nttagagagattactatgagaggatcgcatcaccatcaccatcacggatcctatttaggtgacactatagaatcgtcgacccacgcgtccgattctgtggcgagtgccggccgaaagctaggtccggattgcacgtggagggccgcccgaagggcactctcggacattaacccgcattctgtaccatggggcgcaagttggaccctacgaaggagaagcgggggccaggccgaaaggcccggaagcagaagggtgccgagacagaactcgtcagattcttgcctgcagtaagtgacgaaaattccaagaggctgtctagtcgtgctcgaaagagggcagccaagaggagattgggctctgttgaagcccctaagacaaataagtctcctgaggccaaaccattgcctggaaagctaccaaaagggatctctgcaggagctgtccagacagctggtaagaagggaccccagtccctatttaatgctcctcgaggcaagaagcgcccagcacctggcagtgatgaggaagaggaggaggaagactctgaagaagatggtatggtgaaccacggggacctctggggctccgaggacgatgctgatacggtagatgactatggagctgactccaactctgaggatgaggaggaaggtgaagcgttgctgcccattgaaagagctgctcggaagcagaaggcccgggaagctgctgctgggatccagtggagtgaagaggagaccgaggacgaggaggaagagaaagaagtgacccctgagtcaggccccccaaaggtggaagaggcagatgggggcctgcanatcaatgtggatgangaaccatttgtgctgccccctgctggggagatggagcaggatgcccaggctccanacctgcaacgagttcacaagcggatccagnatattgtgggaattctgcgtgattttggggctcancgggnagnaagggcggtctcgttctgaatacctgaaccggctcaaaaaggatctgggccatttactactcctatggaaacttcctgcttggcaagctcatggacctcttncctctgtctgaactggnggaattnttaaaanctanggagngcctcggcccntcncccttcngnacaatacnttgaaanccnaanccnaaacntnnnnaaggcnntaatnaacngggggttaacctggatcccngggnaanggnncaaaaatggaaaaggggnaaaaattttttggnccntngggncccccccaaaacngggggggncaattgtggagggacccccnnnttttcccnnnggnttnnnccccnaaaannannnttttnnnttntttttccntnaaaaaa

SEQ ID NO: 616 - DNA, 1200 bp, Homo Sapiens
  misc_feature (8)..(8): n is a, c, g, or t
  misc_feature (20)..(20): n is a, c, g, or t
  misc_feature (25)..(25): n is a, c, g, or t
  misc_feature (37)..(37): n is a, c, g, or t
  misc_feature (48)..(48): n is a, c, g, or t
  misc_feature (57)..(58): n is a, c, g, or t
  misc_feature (60)..(60): n is a, c, g, or t
  misc_feature (104)..(104): n is a, c, g, or t
  misc_feature (110)..(110): n is a, c, g, or t
  misc_feature (120)..(120): n is a, c, g, or t
  misc_feature (127)..(127): n is a, c, g, or t
  misc_feature (134)..(135): n is a, c, g, or t
  misc_feature (140)..(140): n is a, c, g, or t
  misc_feature (145)..(145): n is a, c, g, or t
  misc_feature (151)..(152): n is a, c, g, or t
  misc_feature (154)..(155): n is a, c, g, or t
  misc_feature (159)..(161): n is a, c, g, or t
  misc_feature (168)..(168): n is a, c, g, or t
  misc_feature (172)..(172): n is a, c, g, or t
  misc_feature (178)..(178): n is a, c, g, or t
  misc_feature (181)..(181): n is a, c, g, or t
  misc_feature (184)..(185): n is a, c, g, or t
  misc_feature (189)..(189): n is a, c, g, or t
  misc_feature (191)..(192): n is a, c, g, or t
  misc_feature (195)..(195): n is a, c, g, or t
  misc_feature (204)..(204): n is a, c, g, or t
  misc_feature (218)..(218): n is a, c, g, or t
  misc_feature (222)..(223): n is a, c, g, or t
  misc_feature (225)..(225): n is a, c, g, or t
  misc_feature (231)..(231): n is a, c, g, or t
  misc_feature (235)..(236): n is a, c, g, or t
  misc_feature (239)..(242): n is a, c, g, or t
  misc_feature (244)..(244): n is a, c, g, or t
  misc_feature (247)..(247): n is a, c, g, or t
  misc_feature (249)..(249): n is a, c, g, or t
  misc_feature (252)..(252): n is a, c, g, or t
  misc_feature (254)..(255): n is a, c, g, or t
  misc_feature (258)..(260): n is a, c, g, or t
  misc_feature (267)..(267): n is a, c, g, or t
  misc_feature (275)..(275): n is a, c, g, or t
  misc_feature (278)..(278): n is a, c, g, or t
  misc_feature (280)..(282): n is a, c, g, or t
  misc_feature (284)..(285): n is a, c, g, or t
  misc_feature (288)..(288): n is a, c, g, or t
  misc_feature (293)..(294): n is a, c, g, or t
  misc_feature (308)..(309): n is a, c, g, or t
  misc_feature (313)..(314): n is a, c, g, or t
  misc_feature (317)..(318): n is a, c, g, or t
  misc_feature (322)..(323): n is a, c, g, or t
  misc_feature (334)..(334): n is a, c, g, or t
  misc_feature (336)..(336): n is a, c, g, or t
  misc_feature (340)..(340): n is a, c, g, or t
  misc_feature (344)..(344): n is a, c, g, or t
  misc_feature (348)..(348): n is a, c, g, or t
  misc_feature (350)..(350): n is a, c, g, or t
  misc_feature (352)..(352): n is a, c, g, or t
  misc_feature (365)..(365): n is a, c, g, or t
  misc_feature (373)..(373): n is a, c, g, or t
  misc_feature (375)..(375): n is a, c, g, or t
  misc_feature (384)..(384): n is a, c, g, or t
  misc_feature (386)..(386): n is a, c, g, or t
  misc_feature (397)..(397): n is a, c, g, or t
  misc_feature (400)..(401): n is a, c, g, or t
  misc_feature (405)..(405): n is a, c, g, or t
  misc_feature (418)..(419): n is a, c, g, or t
  misc_feature (425)..(425): n is a, c, g, or t
  misc_feature (431)..(431): n is a, c, g, or t
  misc_feature (435)..(435): n is a, c, g, or t
  misc_feature (437)..(437): n is a, c, g, or t
  misc_feature (440)..(442): n is a, c, g, or t
  misc_feature (448)..(449): n is a, c, g, or t
  misc_feature (453)..(454): n is a, c, g, or t
  misc_feature (459)..(460): n is a, c, g, or t
  misc_feature (462)..(462): n is a, c, g, or t
  misc_feature (464)..(464): n is a, c, g, or t
  misc_feature (469)..(469): n is a, c, g, or t
  misc_feature (471)..(471): n is a, c, g, or t
  misc_feature (473)..(474): n is a, c, g, or t
  misc_feature (480)..(481): n is a, c, g, or t
  misc_feature (483)..(483): n is a, c, g, or t
  misc_feature (486)..(486): n is a, c, g, or t
  misc_feature (489)..(489): n is a, c, g, or t
  misc_feature (493)..(493): n is a, c, g, or t
  misc_feature (497)..(497): n is a, c, g, or t
  misc_feature (499)..(499): n is a, c, g, or t
  misc_feature (501)..(501): n is a, c, g, or t
  misc_feature (505)..(505): n is a, c, g, or t
  misc_feature (507)..(508): n is a, c, g, or t
  misc_feature (512)..(512): n is a, c, g, or t
  misc_feature (514)..(515): n is a, c, g, or t
  misc_feature (519)..(519): n is a, c, g, or t
  misc_feature (521)..(522): n is a, c, g, or t
  misc_feature (527)..(528): n is a, c, g, or t
  misc_feature (533)..(533): n is a, c, g, or t
  misc_feature (538)..(538): n is a, c, g, or t
  misc_feature (542)..(542): n is a, c, g, or t
  misc_feature (545)..(546): n is a, c, g, or t
  misc_feature (549)..(549): n is a, c, g, or t
  misc_feature (554)..(554): n is a, c, g, or t
  misc_feature (561)..(561): n is a, c, g, or t
  misc_feature (564)..(564): n is a, c, g, or t
  misc_feature (568)..(569): n is a, c, g, or t
  misc_feature (573)..(573): n is a, c, g, or t
  misc_feature (575)..(576): n is a, c, g, or t
  misc_feature (578)..(578): n is a, c, g, or t
  misc_feature (584)..(584): n is a, c, g, or t
  misc_feature (586)..(586): n is a, c, g, or t
  misc_feature (592)..(592): n is a, c, g, or t
  misc_feature (598)..(600): n is a, c, g, or t
  misc_feature (603)..(603): n is a, c, g, or t
  misc_feature (606)..(606): n is a, c, g, or t
  misc_feature (609)..(610): n is a, c, g, or t
  misc_feature (617)..(617): n is a, c, g, or t
  misc_feature (621)..(621): n is a, c, g, or t
  misc_feature (626)..(627): n is a, c, g, or t
  misc_feature (629)..(629): n is a, c, g, or t
  misc_feature (633)..(634): n is a, c, g, or t
  misc_feature (639)..(639): n is a, c, g, or t
  misc_feature (643)..(643): n is a, c, g, or t
  misc_feature (645)..(645): n is a, c, g, or t
  misc_feature (648)..(648): n is a, c, g, or t
  misc_feature (660)..(660): n is a, c, g, or t
  misc_feature (662)..(662): n is a, c, g, or t
  misc_feature (665)..(666): n is a, c, g, or t
  misc_feature (672)..(672): n is a, c, g, or t
  misc_feature (674)..(674): n is a, c, g, or t
  misc_feature (678)..(678): n is a, c, g, or t
  misc_feature (682)..(682): n is a, c, g, or t
  misc_feature (685)..(685): n is a, c, g, or t
  misc_feature (694)..(694): n is a, c, g, or t
  misc_feature (698)..(700): n is a, c, g, or t
  misc_feature (715)..(715): n is a, c, g, or t
  misc_feature (717)..(717): n is a, c, g, or t
  misc_feature (727)..(727): n is a, c, g, or t
  misc_feature (729)..(729): n is a, c, g, or t
  misc_feature (731)..(731): n is a, c, g, or t
  misc_feature (734)..(734): n is a, c, g, or t
  misc_feature (743)..(745): n is a, c, g, or t
  misc_feature (752)..(752): n is a, c, g, or t
  misc_feature (754)..(754): n is a, c, g, or t
  misc_feature (764)..(764): n is a, c, g, or t
  misc_feature (769)..(769): n is a, c, g, or t
  misc_feature (771)..(771): n is a, c, g, or t
  misc_feature (783)..(783): n is a, c, g, or t
  misc_feature (786)..(786): n is a, c, g, or t
  misc_feature (799)..(799): n is a, c, g, or t
  misc_feature (806)..(807): n is a, c, g, or t
  misc_feature (809)..(809): n is a, c, g, or t
  misc_feature (811)..(811): n is a, c, g, or t
  misc_feature (817)..(817): n is a, c, g, or t
  misc_feature (821)..(821): n is a, c, g, or t
  misc_feature (823)..(823): n is a, c, g, or t
  misc_feature (834)..(834): n is a, c, g, or t
  misc_feature (846)..(846): n is a, c, g, or t
  misc_feature (848)..(848): n is a, c, g, or t
  misc_feature (851)..(851): n is a, c, g, or t
  misc_feature (854)..(854): n is a, c, g, or t
  misc_feature (856)..(856): n is a, c, g, or t
  misc_feature (862)..(862): n is a, c, g, or t
  misc_feature (867)..(868): n is a, c, g, or t
  misc_feature (871)..(871): n is a, c, g, or t
  misc_feature (874)..(874): n is a, c, g, or t
  misc_feature (877)..(880): n is a, c, g, or t
  misc_feature (886)..(886): n is a, c, g, or t
  misc_feature (889)..(890): n is a, c, g, or t
  misc_feature (899)..(899): n is a, c, g, or t
  misc_feature (911)..(911): n is a, c, g, or t
  misc_feature (913)..(913): n is a, c, g, or t
  misc_feature (915)..(915): n is a, c, g, or t
  misc_feature (920)..(921): n is a, c, g, or t
  misc_feature (928)..(929): n is a, c, g, or t
  misc_feature (934)..(934): n is a, c, g, or t
  misc_feature (936)..(936): n is a, c, g, or t
  misc_feature (943)..(943): n is a, c, g, or t
  misc_feature (947)..(948): n is a, c, g, or t
  misc_feature (951)..(951): n is a, c, g, or t
  misc_feature (953)..(953): n is a, c, g, or t
  misc_feature (956)..(957): n is a, c, g, or t
  misc_feature (960)..(961): n is a, c, g, or t
  misc_feature (968)..(968): n is a, c, g, or t
  misc_feature (979)..(979): n is a, c, g, or t
  misc_feature (984)..(984): n is a, c, g, or t
  misc_feature (989)..(990): n is a, c, g, or t
  misc_feature (999)..(999): n is a, c, g, or t
  misc_feature (1001)..(1001): n is a, c, g, or t
  misc_feature (1005)..(1006): n is a, c, g, or t
  misc_feature (1012)..(1012): n is a, c, g, or t
  misc_feature (1023)..(1023): n is a, c, g, or t
  misc_feature (1026)..(1027): n is a, c, g, or t
  misc_feature (1029)..(1029): n is a, c, g, or t
  misc_feature (1034)..(1035): n is a, c, g, or t
  misc_feature (1041)..(1041): n is a, c, g, or t
  misc_feature (1049)..(1049): n is a, c, g, or t
  misc_feature (1052)..(1052): n is a, c, g, or t
  misc_feature (1054)..(1054): n is a, c, g, or t
  misc_feature (1064)..(1064): n is a, c, g, or t
  misc_feature (1071)..(1072): n is a, c, g, or t
  misc_feature (1074)..(1075): n is a, c, g, or t
  misc_feature (1079)..(1079): n is a, c, g, or t
  misc_feature (1089)..(1093): n is a, c, g, or t
  misc_feature (1097)..(1100): n is a, c, g, or t
  misc_feature (1102)..(1102): n is a, c, g, or t
  misc_feature (1111)..(1111): n is a, c, g, or t
  misc_feature (1113)..(1113): n is a, c, g, or t
  misc_feature (1115)..(1115): n is a, c, g, or t
  misc_feature (1117)..(1120): n is a, c, g, or t
  misc_feature (1122)..(1124): n is a, c, g, or t
  misc_feature (1132)..(1132): n is a, c, g, or t
  misc_feature (1138)..(1138): n is a, c, g, or t
  misc_feature (1140)..(1140): n is a, c, g, or t
  misc_feature (1148)..(1148): n is a, c, g, or t
  misc_feature (1152)..(1152): n is a, c, g, or t
  misc_feature (1158)..(1158): n is a, c, g, or t
  misc_feature (1161)..(1161): n is a, c, g, or t
  misc_feature (1164)..(1166): n is a, c, g, or t
  misc_feature (1168)..(1168): n is a, c, g, or t
  misc_feature (1172)..(1172): n is a, c, g, or t
  misc_feature (1177)..(1178): n is a, c, g, or t
  misc_feature (1180)..(1180): n is a, c, g, or t
  misc_feature (1187)..(1191): n is a, c, g, or t
  misc_feature (1193)..(1193): n is a, c, g, or t
  misc_feature (1196)..(1196): n is a, c, g, or t
aaaattgnggagaaaatttntttgnggggggggtctncctctcccccnccccccctnngngggggtctcttatatttgtgggggagcacatataaaaaatctcnaacacnccacgcttcngcacganactttcnntgtcnaccgngtagcnngnnactnnnaggctcncgtntgatcnctngannagcntnnccngcgcatgtntcactgcggtacancacnnantagggnattnnttnnnntngtnanccnannggnnngtggcanttacatgnagngnnngnnatngaganncatgaagttgcacnncccnntgnngtannatgcccatgcntntatntatnagantntnatacagaaaagcntgcgatcngntggagcatnanatgcgtgtccnttnncggnatccgccttgccnnttgacngccggngatnanctnnnagctgnnaaannggggnntngnatgcngntnnatcgtnnanttnacnttanggcnangnttananngaancnntacncnntccgnnagtcncaaancaanagnncgngggangtcccgnccncttnnctgnanngngacatnancagcanggtctnnnatncanggnnattggcntaanaaaanntngttnnaatcngaancnccnttgagcactatntnaanncttgtnangaangatnttngaatgttcntcannnaatcagactacgaananccttaaatcnananaanactctccannngcccgcncncggggtaaanccccnancttactatccanatnatcactggatacntaaaccnngncnggtggngaancngcgaacccttnagagttccttanancanctnantccaangaggnnggnccntgnnnnaattcnacnnttgaactcnttggaagccagnancngagtnnaaaaagnnccttnanaatcccntgtnnatnantcnnccnnaaccctnaaaaatgtgtnccctncaaanntcccgatcntntatnnaggcantataaaaaaantcnnangaaannattganatcttttnaanantcttcctaantaatggnnanntgcnaaatatctgnnnnnattnnnntnaccttaatntnangnnnnannngaaatttncccccngnttaaagtntccnaagttncanatnnngncttncgaannanccaaaannnnncnttnacca

SEQ ID NO: 617 - DNA, 1389 bp, Homo Sapiens
  misc_feature (2)..(2): n is a, c, g, or t
  misc_feature (6)..(12): n is a, c, g, or t
  misc_feature (15)..(15): n is a, c, g, or t
  misc_feature (344)..(344): n is a, c, g, or t
  misc_feature (650)..(650): n is a, c, g, or t
  misc_feature (747)..(747): n is a, c, g, or t
  misc_feature (752)..(753): n is a, c, g, or t
  misc_feature (779)..(779): n is a, c, g, or t
  misc_feature (833)..(833): n is a, c, g, or t
  misc_feature (841)..(842): n is a, c, g, or t
  misc_feature (846)..(847): n is a, c, g, or t
  misc_feature (852)..(852): n is a, c, g, or t
  misc_feature (859)..(859): n is a, c, g, or t
  misc_feature (870)..(871): n is a, c, g, or t
  misc_feature (876)..(876): n is a, c, g, or t
  misc_feature (878)..(878): n is a, c, g, or t
  misc_feature (881)..(881): n is a, c, g, or t
  misc_feature (892)..(892): n is a, c, g, or t
  misc_feature (896)..(896): n is a, c, g, or t
  misc_feature (901)..(901): n is a, c, g, or t
  misc_feature (911)..(911): n is a, c, g, or t
  misc_feature (916)..(916): n is a, c, g, or t
  misc_feature (946)..(946): n is a, c, g, or t
  misc_feature (948)..(948): n is a, c, g, or t
  misc_feature (954)..(954): n is a, c, g, or t
  misc_feature (960)..(961): n is a, c, g, or t
  misc_feature (966)..(966): n is a, c, g, or t
  misc_feature (970)..(971): n is a, c, g, or t
  misc_feature (978)..(978): n is a, c, g, or t
  misc_feature (981)..(981): n is a, c, g, or t
  misc_feature (983)..(983): n is a, c, g, or t
  misc_feature (988)..(988): n is a, c, g, or t
  misc_feature (993)..(993): n is a, c, g, or t
  misc_feature (995)..(995): n is a, c, g, or t
  misc_feature (1007)..(1008): n is a, c, g, or t
  misc_feature (1021)..(1021): n is a, c, g, or t
  misc_feature (1026)..(1027): n is a, c, g, or t
  misc_feature (1029)..(1029): n is a, c, g, or t
  misc_feature (1032)..(1032): n is a, c, g, or t
  misc_feature (1043)..(1043): n is a, c, g, or t
  misc_feature (1065)..(1065): n is a, c, g, or t
  misc_feature (1070)..(1070): n is a, c, g, or t
  misc_feature (1074)..(1074): n is a, c, g, or t
  misc_feature (1078)..(1080): n is a, c, g, or t
  misc_feature (1092)..(1092): n is a, c, g, or t
  misc_feature (1099)..(1099): n is a, c, g, or t
  misc_feature (1107)..(1108): n is a, c, g, or t
  misc_feature (1122)..(1122): n is a, c, g, or t
  misc_feature (1126)..(1127): n is a, c, g, or t
  misc_feature (1129)..(1129): n is a, c, g, or t
  misc_feature (1132)..(1132): n is a, c, g, or t
  misc_feature (1136)..(1138): n is a, c, g, or t
  misc_feature (1145)..(1146): n is a, c, g, or t
  misc_feature (1158)..(1158): n is a, c, g, or t
  misc_feature (1160)..(1160): n is a, c, g, or t
  misc_feature (1163)..(1163): n is a, c, g, or t
  misc_feature (1169)..(1169): n is a, c, g, or t
  misc_feature (1178)..(1178): n is a, c, g, or t
  misc_feature (1193)..(1193): n is a, c, g, or t
  misc_feature (1195)..(1195): n is a, c, g, or t
  misc_feature (1197)..(1199): n is a, c, g, or t
  misc_feature (1206)..(1206): n is a, c, g, or t
  misc_feature (1228)..(1228): n is a, c, g, or t
  misc_feature (1234)..(1235): n is a, c, g, or t
  misc_feature (1239)..(1240): n is a, c, g, or t
  misc_feature (1243)..(1243): n is a, c, g, or t
  misc_feature (1259)..(1259): n is a, c, g, or t
  misc_feature (1267)..(1267): n is a, c, g, or t
  misc_feature (1269)..(1271): n is a, c, g, or t
  misc_feature (1276)..(1276): n is a, c, g, or t
  misc_feature (1284)..(1284): n is a, c, g, or t
  misc_feature (1286)..(1287): n is a, c, g, or t
  misc_feature (1289)..(1290): n is a, c, g, or t
  misc_feature (1297)..(1299): n is a, c, g, or t
  misc_feature (1302)..(1302): n is a, c, g, or t
  misc_feature (1307)..(1307): n is a, c, g, or t
  misc_feature (1323)..(1323): n is a, c, g, or t
  misc_feature (1325)..(1327): n is a, c, g, or t
  misc_feature (1337)..(1338): n is a, c, g, or t
  misc_feature (1343)..(1343): n is a, c, g, or t
  misc_feature (1350)..(1350): n is a, c, g, or t
  misc_feature (1352)..(1352): n is a, c, g, or t
  misc_feature (1355)..(1357): n is a, c, g, or t
  misc_feature (1359)..(1359): n is a, c, g, or t
  misc_feature (1364)..(1364): n is a, c, g, or t
  misc_feature (1373)..(1373): n is a, c, g, or t
  misc_feature (1376)..(1376): n is a, c, g, or t
  misc_feature (1378)..(1378): n is a, c, g, or t
  misc_feature (1380)..(1380): n is a, c, g, or t
  misc_feature (1382)..(1382): n is a, c, g, or t
  misc_feature (1384)..(1384): n is a, c, g, or t
  misc_feature (1387)..(1387): n is a, c, g, or t
cngctnnnnnnncantagagaaattactatgagaggatcgcatcaccatcaccatcacggatcctatttaggtgacactatagaatcgtcgacccacgcgtccgcgccgcgtgtacccggttgtcctcaggcgctgtcagatctgtggtttttctacttgaaggacacaatgttttccaaactagcacatttgcagaggtttgctgtacttagtcgcggagttcattcttcagtggcttctgctacatctgttgcaactaaaaaaacagtccaaggccctccaacctctgatgacatttttgaaagggaatataagtatggtgcacacaactaccatcctttanctgtagccctggagagaggaaaaggtatttacttatgggatgtagaaggcagaaaatattttgacttcctgagttcttacagtgctgtcaaccaagggcattgtcaccccaagattgtgaatgctctgaagagtcaagtggacaaattgaccttaacatctagagctttctataataacgtacttggtgaatatgaggagtatattactaaacttttcaactaccacaaagttcttcctatgaatacaggagtggaggctggagagactgcctgtaaactagctcgtaagtggggctataccgtgnaagggcattcagaaaatacaaagcaaaagattgtttttgcagctgggaacttctgggggtaggacgttgtctgctatctccatttccacagaccccnacccnnttacgaaggtttttggaccatttaangcccggggattccaacatccttcccctaaaaaggaatctggcccgccccgggancgtggctnnttcnngaatnccaaaangggggcttgcnntttcnanggnaaaaaaccaanttcnggggngaaacaaggncgttntttggtttcccggaatccaggtttacccanantggggngagggnnaaaanctcnngcccccnagncncccanggttncncctttatttggnnggaaggaaaaaanaaaanncnggnatttgggcccnaaaccggggaaaaaaaggcctnggctngttnaatnnnaaaaaaaggccnaaacccngaaataanncccccccctttggnaaanncnccntttnnnggggggnnctaaacccctgngntcncccaanggcttttgngaaaaaaaaaacccntngnnnagaccanattaaacccccgggggggacangggggnncccnnaancagggggggaaacccnccaaaggngnnncgaangggggccnannannccccctnnnggnttttnaaaaaaaaaaaaaccntnnntaaaaaaatnnacaanaaaaggngnatnnnanttttnaaaaaaaanacntnanancnccntt

SEQ ID NO: 618 - DNA, 742 bp, Homo Sapiens
  misc_feature (654)..(657): n is a, c, g, or t
  misc_feature (671)..(671): n is a, c, g, or t
  misc_feature (674)..(674): n is a, c, g, or t
  misc_feature (676)..(693): n is a, c, g, or t
  misc_feature (697)..(699): n is a, c, g, or t
  misc_feature (701)..(705): n is a, c, g, or t
  misc_feature (707)..(708): n is a, c, g, or t
  misc_feature (710)..(714): n is a, c, g, or t
  misc_feature (716)..(718): n is a, c, g, or t
  misc_feature (720)..(723): n is a, c, g, or t
  misc_feature (725)..(742): n is a, c, g, or t
agaaattactatgagaggatcgcatcaccatcaccatcacggatcctatttaggtgacactatagaatcgtcgacccacgcgtccgggacttgctgggaggctgagagaggctttgggcacagcctgctgtcttttccatttcctaaagtttacttcattgtcttgaggcttccaggttttgtttttgtttttgccaaagtagaaaaggcaggtggtgggcggctggcagggagtgcgggtccccgcccctcttcagtcctgccctcccctcctcagtcctgcccaccccgtgcagcccatgctgaggctgcagtggtgtcgtgggtgttacgtgcaggaacgtggagaccctgacgtgggctcactgcgtttggttttcttttcagaacttgggagcccccagggaggggctagtgttggtaggtcctagacgtggttccctccagcctccccaaaatcaaccctggtgttgagagaacgtccttctgtccatcgtgggtaacagccttggggagggtgcagagctctgcagagccatgggccaggtggggctgcctcagtcctgtccccttgggcactgaggagaggggcccattcacctttctcctagaatgctgttgtaaataaacaaatggatccctggaaaaaaaaannnnaaaaaaaaaaaaanaanannnnnnnnnnnnnnnnnnaaannnannnnnannannnnnannnannnnannnnnnnnnnnnnnnnnn

SEQ ID NO: 619 - DNA, 1200 bp, Homo Sapiens
  misc_feature (1)..(1): n is a, c, g, or t
  misc_feature (851)..(851): n is a, c, g, or t
  misc_feature (879)..(879): n is a, c, g, or t
  misc_feature (910)..(910): n is a, c, g, or t
  misc_feature (951)..(951): n is a, c, g, or t
  misc_feature (963)..(963): n is a, c, g, or t
  misc_feature (966)..(966): n is a, c, g, or t
  misc_feature (980)..(980): n is a, c, g, or t
  misc_feature (985)..(985): n is a, c, g, or t
  misc_feature (1039)..(1039): n is a, c, g, or t
  misc_feature (1047)..(1047): n is a, c, g, or t
  misc_feature (1053)..(1053): n is a, c, g, or t
  misc_feature (1064)..(1064): n is a, c, g, or t
  misc_feature (1066)..(1066): n is a, c, g, or t
  misc_feature (1077)..(1077): n is a, c, g, or t
  misc_feature (1093)..(1094): n is a, c, g, or t
  misc_feature (1103)..(1103): n is a, c, g, or t
  misc_feature (1110)..(1110): n is a, c, g, or t
  misc_feature (1127)..(1127): n is a, c, g, or t
  misc_feature (1129)..(1129): n is a, c, g, or t
  misc_feature (1131)..(1131): n is a, c, g, or t
  misc_feature (1133)..(1133): n is a, c, g, or t
  misc_feature (1135)..(1135): n is a, c, g, or t
  misc_feature (1137)..(1137): n is a, c, g, or t
  misc_feature (1139)..(1140): n is a, c, g, or t
  misc_feature (1148)..(1148): n is a, c, g, or t
  misc_feature (1152)..(1152): n is a, c, g, or t
  misc_feature (1158)..(1158): n is a, c, g, or t
  misc_feature (1160)..(1160): n is a, c, g, or t
  misc_feature (1163)..(1163): n is a, c, g, or t
  misc_feature (1166)..(1166): n is a, c, g, or t
  misc_feature (1173)..(1173): n is a, c, g, or t
  misc_feature (1175)..(1175): n is a, c, g, or t
  misc_feature (1179)..(1179): n is a, c, g, or t
  misc_feature (1181)..(1181): n is a, c, g, or t
  misc_feature (1193)..(1193): n is a, c, g, or t
  misc_feature (1200)..(1200): n is a, c, g, or t
naatagagaaaattactatgagaggatcgcatcaccatcaccatcacggatcctatttaggtgacactatagaatcgtcgacccacgcgtccgagcacggcatcaccaacctgtgcgtcatcggcggggatggcagcctcacaggtgccaacatcttccgcagcgagtggggcagcctgctggaggagctggtggcggaaggtaagatctcagagactacagcccggacctactcgcacctgaacatcgcgggcctagtgggctccatcgataacgacttctgcggcaccgacatgaccatcggcacggactcggccctccaccgcatcatggaggtcatcgatgccatcaccaccactgcccagagccaccagaggaccttcgtgctggaagtgatgggccggcactgcgggtacctggcgctggtatctgcactggcctcaggggccgactggctgttcatccccgaggctccacccgaggacggctgggagaacttcatgtgtgagaggctgggtgagactcggagccgtgggtcccgactgaacatcatcatcatcgctgagggtgccattgaccgcaacgggaagcccatctcgtccagctacgtgaaggacctggtggttcagaggctgggcttcgacacccgtgtaactgtgctgggccacgtgcagcggggagggacgccctctgccttcgaccggatcctgagcagcaagatgggcatggaggcggtgatggcgctgctggaagccacgcctgacacgccggcctgcgtggtcaccctctcggggaaccagtcagtgcggctgcccctcatggagtgcgtgcagatgaccaaggaagtgcanaaagccatggatgacaagaggtttgacnaggccacccagcttccgtggtgggagcttcnagaacaactggaacatttacaagctcctcgcccaccaaaanccccccaagganaantctaacttctcccntggcnatcctgaatgtgggggcccccggcggctggcatgaatgcggccgtgccctcggnggttgcgnaacggnatctcccatgnanacaaattaacntggtgcccaatggctnnaaagcctanccaaggntcaggtgcaaaaaatangntngncncnannttgccccncttntttggncntgntgnctccttntngggnanaaaaaaaaaccntgcccan

SEQ ID NO: 620 - DNA, 1200 bp, Homo Sapiens
  misc_feature (838)..(838): n is a, c, g, or t
  misc_feature (908)..(908): n is a, c, g, or t
  misc_feature (924)..(924): n is a, c, g, or t
  misc_feature (939)..(939): n is a, c, g, or t
  misc_feature (954)..(954): n is a, c, g, or t
  misc_feature (966)..(966): n is a, c, g, or t
  misc_feature (972)..(972): n is a, c, g, or t
  misc_feature (986)..(986): n is a, c, g, or t
  misc_feature (999)..(1000): n is a, c, g, or t
  misc_feature (1014)..(1014): n is a, c, g, or t
  misc_feature (1018)..(1018): n is a, c, g, or t
  misc_feature (1029)..(1029): n is a, c, g, or t
  misc_feature (1038)..(1038): n is a, c, g, or t
  misc_feature (1094)..(1094): n is a, c, g, or t
  misc_feature (1097)..(1097): n is a, c, g, or t
  misc_feature (1104)..(1104): n is a, c, g, or t
  misc_feature (1106)..(1106): n is a, c, g, or t
  misc_feature (1111)..(1111): n is a, c, g, or t
  misc_feature (1133)..(1133): n is a, c, g, or t
  misc_feature (1138)..(1138): n is a, c, g, or t
  misc_feature (1142)..(1142): n is a, c, g, or t
  misc_feature (1146)..(1146): n is a, c, g, or t
  misc_feature (1156)..(1156): n is a, c, g, or t
  misc_feature (1163)..(1163): n is a, c, g, or t
  misc_feature (1169)..(1169): n is a, c, g, or t
  misc_feature (1172)..(1172): n is a, c, g, or t
  misc_feature (1174)..(1174): n is a, c, g, or t
  misc_feature (1182)..(1182): n is a, c, g, or t
  misc_feature (1189)..(1189): n is a, c, g, or t
  misc_feature (1197)..(1197): n is a, c, g, or t
  misc_feature (1199)..(1199): n is a, c, g, or t
agaaattactatgagaggatcgcatcaccatcaccatcacggatcctatttaggtgacactatagaatcgtcgacccacgcgtccgcccacgcgtccgtcatgacccatgaagagcaccatgcagccaaaaccctggggattggcaaagccattgctgtcttaacctctggtggagatgcccaaggtatgaatgctgctgtcagggctgtggttcgagttggtatcttcaccggtgcccgtgtcttctttgtccatgagggttatcaaggcctggtggatggtggagatcacatcaaggaagccacctgggagagcgtttcgatgatgcttcagctgggaggcacggtgattggaagtgcccggtgcaaggactttcgggaacgagaaggacgactccaagctgcctacaacctggtgaagcgtgggatcaccaatctctgtgtcattgggggtgatggcagcctcactggggctgacaccttccgttctgagtggagtgacttgttgagtgacctccagaaagcaggtaagatcacagatgaggaggctacgaagtccagctacctgaacattgtgggcctggttgggtcaattgacaatgacttctgtggcaccgatatgaccattggcactgactctgccctgcatcggatcatggaaattgtagatgccatcactaccactgcccagagccaccagaggacatttgtgttagaagtaatgggccgccactgtggatacctggcccttgtcacctctctgtcctgtggggccgactgggtttttattcctgaatgtccaccagatgacgactgggaaggaacacctttgtcgccnaactcagcgagacaaggacccgtggttctcgtctcaacatcatcattgtggctgagggtgcaattgacanaatggaaaaccaatcncctcaaaacatcaanaatctggtggttaancgtctgggaaantgaacncccgggttactgtnttggggcatgtgnnaaaaggggtgggancccnttcaccctttnaaaaaaatnctgggcaaacaaggaatgggggggggaaaccaatgatgggccctttttggaagggnaancccaaananccccncccctgggtaagggaacccttntgggnaacnaagnttgggccccngcccccncatggnaangntttccccnggtaaanaaaaaatntna

SEQ ID NO: 621 - DNA, 1200 bp, Homo Sapiens
  misc_feature (2)..(2): n is a, c, g, or t
  misc_feature (920)..(920): n is a, c, g, or t
  misc_feature (937)..(937): n is a, c, g, or t
  misc_feature (963)..(963): n is a, c, g, or t
  misc_feature (965)..(965): n is a, c, g, or t
  misc_feature (992)..(992): n is a, c, g, or t
  misc_feature (1033)..(1033): n is a, c, g, or t
  misc_feature (1035)..(1035): n is a, c, g, or t
  misc_feature (1053)..(1053): n is a, c, g, or t
  misc_feature (1095)..(1095): n is a, c, g, or t
  misc_feature (1098)..(1098): n is a, c, g, or t
  misc_feature (1102)..(1102): n is a, c, g, or t
  misc_feature (1110)..(1110): n is a, c, g, or t
  misc_feature (1114)..(1114): n is a, c, g, or t
  misc_feature (1118)..(1118): n is a, c, g, or t
  misc_feature (1120)..(1120): n is a, c, g, or t
  misc_feature (1122)..(1122): n is a, c, g, or t
  misc_feature (1153)..(1153): n is a, c, g, or t
  misc_feature (1161)..(1161): n is a, c, g, or t
  misc_feature (1166)..(1166): n is a, c, g, or t
  misc_feature (1169)..(1169): n is a, c, g, or t
  misc_feature (1174)..(1174): n is a, c, g, or t
  misc_feature (1179)..(1179): n is a, c, g, or t
  misc_feature (1182)..(1182): n is a, c, g, or t
  misc_feature (1197)..(1197): n is a, c, g, or t
  misc_feature (1199)..(1199): n is a, c, g, or t
antagagaaattactatgagaggatcgcatcaccatcaccatcacggatcctatttaggtgacactatagaatcgtcgacccacgcgtccggctcgaagatggccggttggcagagctacgtggataacctgatgtgcgatggctgctgccaggaggccgccattgtcggctactgcgacgccaaatacgtctgggcagccacggccgggggcgtctttcagagcattacgccaatagaaatagatatgattgtaggaaaagaccgggaaggtttctttaccaacggtttgactcttggcgcgaagaaatgctcagtgatcagagatagtctatacgtcgatggtgactgcacaatggacatccggacaaagagtcaaggtggggagccaacatacaatgtggctgtcggcagagctggtagagtcttggtctttgtaatgggaaaagaaggggtccatggaggcggattgaataagaaggcatactcaatggcaaaatacttgagagactctgggttctagctgctaggcagactgttaagtattaggggaaaattgctcttaaactttcctagctataagcttaagtcttaattctggaaattttattagcaatgcagggtgatggggtatgaacctgtgtctcctttgtatccctctgttggtggggaaaggtgtctttctttctgccctccccccccaaaataattctgttcacttttgttttgtttccttgtgtactccagcattggttatagtcatgggaaaggaaggtgtccacggaggcacacttaacaagaaagcatatgaactcgctttatacctgaggaggtctgatgtgtaagcagcctctccccatctacctagcaactgtcttcatcaacaaccctaattatggtcacaatgctaccaaactgtanatggtagctaattttcnttacctattttctatgtcatgattcngnttgcccaatggatcatttgtatgttanccctgtatgtaaccaacccttatctggcaacataattgcancncaaaatgatttgcatganaccttgaaattggggggaggggcatgccaagttgggcatccnttntctnaccattangggnattngntnctaaaaaattaaattaaccaggggcgggtgnaaatcccngatcnggnctttnccccnttnaaaattacttggccntna

SEQ ID NO: 622 - DNA, 1364 bp, Homo Sapiens
  misc_feature (2)..(2): n is a, c, g, or t
  misc_feature (4)..(4): n is a, c, g, or t
  misc_feature (11)..(11): n is a, c, g, or t
  misc_feature (918)..(918): n is a, c, g, or t
  misc_feature (939)..(940): n is a, c, g, or t
  misc_feature (943)..(943): n is a, c, g, or t
  misc_feature (949)..(949): n is a, c, g, or t
  misc_feature (960)..(960): n is a, c, g, or t
  misc_feature (967)..(967): n is a, c, g, or t
  misc_feature (973)..(973): n is a, c, g, or t
  misc_feature (978)..(978): n is a, c, g, or t
  misc_feature (990)..(990): n is a, c, g, or t
  misc_feature (1015)..(1015): n is a, c, g, or t
  misc_feature (1019)..(1019): n is a, c, g, or t
  misc_feature (1021)..(1021): n is a, c, g, or t
  misc_feature (1035)..(1035): n is a, c, g, or t
  misc_feature (1041)..(1041): n is a, c, g, or t
  misc_feature (1062)..(1062): n is a, c, g, or t
  misc_feature (1065)..(1065): n is a, c, g, or t
  misc_feature (1071)..(1071): n is a, c, g, or t
  misc_feature (1077)..(1077): n is a, c, g, or t
  misc_feature (1083)..(1083): n is a, c, g, or t
  misc_feature (1086)..(1086): n is a, c, g, or t
  misc_feature (1090)..(1090): n is a, c, g, or t
  misc_feature (1092)..(1092): n is a, c, g, or t
  misc_feature (1094)..(1095): n is a, c, g, or t
  misc_feature (1098)..(1098): n is a, c, g, or t
  misc_feature (1102)..(1102): n is a, c, g, or t
  misc_feature (1106)..(1106): n is a, c, g, or t
  misc_feature (1130)..(1130): n is a, c, g, or t
  misc_feature (1132)..(1132): n is a, c, g, or t
  misc_feature (1139)..(1139): n is a, c, g, or t
  misc_feature (1147)..(1148): n is a, c, g, or t
  misc_feature (1155)..(1155): n is a, c, g, or t
  misc_feature (1167)..(1168): n is a, c, g, or t
  misc_feature (1182)..(1182): n is a, c, g, or t
  misc_feature (1199)..(1199): n is a, c, g, or t
  misc_feature (1203)..(1203): n is a, c, g, or t
  misc_feature (1205)..(1205): n is a, c, g, or t
  misc_feature (1207)..(1208): n is a, c, g, or t
  misc_feature (1212)..(1212): n is a, c, g, or t
  misc_feature (1239)..(1239): n is a, c, g, or t
  misc_feature (1260)..(1260): n is a, c, g, or t
  misc_feature (1265)..(1266): n is a, c, g, or t
  misc_feature (1280)..(1280): n is a, c, g, or t
  misc_feature (1284)..(1284): n is a, c, g, or t
  misc_feature (1292)..(1292): n is a, c, g, or t
  misc_feature (1298)..(1298): n is a, c, g, or t
  misc_feature (1300)..(1300): n is a, c, g, or t
  misc_feature (1314)..(1314): n is a, c, g, or t
  misc_feature (1319)..(1319): n is a, c, g, or t
  misc_feature (1322)..(1322): n is a, c, g, or t
  misc_feature (1333)..(1334): n is a, c, g, or t
  misc_feature (1337)..(1337): n is a, c, g, or t
  misc_feature (1339)..(1339): n is a, c, g, or t
  misc_feature (1341)..(1341): n is a, c, g, or t
  misc_feature (1355)..(1355): n is a, c, g, or t
  misc_feature (1357)..(1357): n is a, c, g, or t
  misc_feature (1359)..(1359): n is a, c, g, or t
anantagaganattactatgagaggatcgcatcaccatcaccatcacggatcctatttaggtgacactatagaatcgtcgacccacgcgtccgcccacgcgtccggcctccggagcgcacgtcggcagtcggctccctcgttgaccgaatcaccgacctctctccccagctgtatttccaaaatgtcgctttctaacaagctgacgctggacaagctggacgttaaagggaagcgggtcgttatgagagtcgacttcaatgttcctatgaagaacaaccagataacaaacaaccagaggattaaggctgctgtcccaagcatcaaattctgcttggacaatggagccaagtcggtagtccttatgagccacctaggccggcctgatggtgtgcccatgcctgacaagtactccttagagccagttgctgtagaactcaaatctctgctgggcaaggatgttctgttcttgaaggactgtgtaggcccagaagtggagaaagcctgtgccaacccagctgctgggtctgtcatcctgctggagaacctccgctttcatgtggaggaagaagggaagggaaaagatgcttctgggaacaaggttaaagccgagccagccaaaatagaagctttccgagcttcactttccaagctaggggatgtctatgtcaatgatgcttttggcactgctcacagagcccacagctccatggtaggagtcaatctgccacagaaggctggtgggtttttgatgaagaaggagctgaactactttgcaaaggccttggagagcccagagcgacccttcctggccatcctgggcggagctaaagttgcagacaagatccagctcatcaataatatgctggacaaagtcaatgagatgattattggtggtggaatggcttttacccttcctnaaggtgctcaacaacatggannatnggcacnttctctgtttngatgaanaggganccaanattgtcaaaaancttaatgtccaaagctgaaaaaaangggngngaaaaataaccttngcctgnttgacttttttcctgcctganaantttgangaaaangccaanaantggncnannccnctgngggnttctggcaaaactgcctgggctgnanggcttgnactggggnnccgaaanaacaaaaaatanncttaggttgtcccncgggctaaacaaatttngggnangnncctnggggggtttttaaagggaaactttttncccgggaaacaaaaccttttngggannggggggaaaccccntttngggcgccncccccnanagggggggaaaacngcccnttnttgggcaaagnnaancngnaaaaaacccccggnancnggggg

SEQ ID NO: 623 - DNA, 1351 bp, Homo Sapiens
  misc_feature (1)..(1): n is a, c, g, or t
  misc_feature (762)..(762): n is a, c, g, or t
  misc_feature (827)..(827): n is a, c, g, or t
  misc_feature (847)..(847): n is a, c, g, or t
  misc_feature (855)..(855): n is a, c, g, or t
  misc_feature (865)..(865): n is a, c, g, or t
  misc_feature (870)..(870): n is a, c, g, or t
  misc_feature (873)..(873): n is a, c, g, or t
  misc_feature (883)..(883): n is a, c, g, or t
  misc_feature (900)..(900): n is a, c, g, or t
  misc_feature (916)..(916): n is a, c, g, or t
  misc_feature (919)..(919): n is a, c, g, or t
  misc_feature (922)..(923): n is a, c, g, or t
  misc_feature (925)..(926): n is a, c, g, or t
  misc_feature (930)..(930): n is a, c, g, or t
  misc_feature (939)..(939): n is a, c, g, or t
  misc_feature (942)..(942): n is a, c, g, or t
  misc_feature (945)..(945): n is a, c, g, or t
  misc_feature (948)..(948): n is a, c, g, or t
  misc_feature (951)..(951): n is a, c, g, or t
  misc_feature (963)..(963): n is a, c, g, or t
  misc_feature (973)..(974): n is a, c, g, or t
  misc_feature (979)..(980): n is a, c, g, or t
  misc_feature (988)..(988): n is a, c, g, or t
  misc_feature (996)..(996): n is a, c, g, or t
  misc_feature (998)..(998): n is a, c, g, or t
  misc_feature (1004)..(1004): n is a, c, g, or t
  misc_feature (1008)..(1008): n is a, c, g, or t
  misc_feature (1012)..(1014): n is a, c, g, or t
  misc_feature (1019)..(1020): n is a, c, g, or t
  misc_feature (1022)..(1023): n is a, c, g, or t
  misc_feature (1029)..(1031): n is a, c, g, or t
  misc_feature (1033)..(1038): n is a, c, g, or t
  misc_feature (1041)..(1042): n is a, c, g, or t
  misc_feature (1044)..(1050): n is a, c, g, or t
  misc_feature (1055)..(1057): n is a, c, g, or t
  misc_feature (1062)..(1062): n is a, c, g, or t
  misc_feature (1064)..(1064): n is a, c, g, or t
  misc_feature (1066)..(1066): n is a, c, g, or t
  misc_feature (1069)..(1073): n is a, c, g, or t
  misc_feature (1075)..(1077): n is a, c, g, or t
  misc_feature (1079)..(1080): n is a, c, g, or t
  misc_feature (1082)..(1088): n is a, c, g, or t
  misc_feature (1092)..(1092): n is a, c, g, or t
  misc_feature (1097)..(1098): n is a, c, g, or t
  misc_feature (1100)..(1102): n is a, c, g, or t
  misc_feature (1105)..(1109): n is a, c, g, or t
  misc_feature (1112)..(1116): n is a, c, g, or t
  misc_feature (1119)..(1134): n is a, c, g, or t
  misc_feature (1141)..(1157): n is a, c, g, or t
  misc_feature (1160)..(1169): n is a, c, g, or t
  misc_feature (1174)..(1181): n is a, c, g, or t
  misc_feature (1183)..(1191): n is a, c, g, or t
  misc_feature (1195)..(1212): n is a, c, g, or t
  misc_feature (1216)..(1232): n is a, c, g, or t
  misc_feature (1236)..(1239): n is a, c, g, or t
  misc_feature (1242)..(1244): n is a, c, g, or t
  misc_feature (1246)..(1256): n is a, c, g, or t
  misc_feature (1258)..(1314): n is a, c, g, or t
  misc_feature (1316)..(1336): n is a, c, g, or t
  misc_feature (1338)..(1351): n is a, c, g, or t
naagagaaattactatgagaggatcgcatcaccatcaccatcacggatcctatttaggtgacactatagaatcgtcgacccacgcgtccgcgctgccccaggtgctgatccgcagtggccgggtgcccattgtgtccttggagtgtgtgtcctgcaaggcacaggccgtgtacgaagtgagccgcagctcctacgtgtacctggagggccgctgcctcaattgcagcagcggctccaagcgagggcggtgggctgcacgtacgttcagcaacaagacgctggtgctggatgagaccaccacatccacgggcagcgcaggcatgtgactggtgctgcggcggggcgtgctgcgggacggcgagggatacaccttcacgctgacggtgctgggccgctctggcaaggaggagggctgcgcctccatccccctgtcccccaaccgcccgccgctggggggctcttgccgcctcttcccactgggcgctgtgcacgctctcaccaccaaggtgcacttcgaatgcatgggctggcatgacgcggaggatgctggcgccccgctggtgtacgccctgctgctgcagcgctgtcgccagggccactgcgaggagttctgtgtctacaagggcagcctctccggctacggagccgtgctgcccccgggtttcaggccacacttcgaggtgggcctggccgtggtggtgcaggaccagctgggagccgctgtggtcgccctcaacaggtctctggccatcaccctcccanagcccaacggcagcgcaatggggctcacagtctggctgcacgggctcaccgctagtgtgctcccnggggctgctgcggcaggccnatccccancacgtcatcnagtantcnctggccctgntcactgtgctgaacaantacaaacgggccctgnacntgnngnnaaanccaagcacnaanggnacnccnaacccaaatacncaaaaaatcnngaaanntctggtgntcctgaangntccaanttgnggannnaaatnnannaaattnnntnnnnnntgnncnnnnnnnatggnnnccaanangnaannnnnannncnntnnnnnnnaaanaaaanntnnnaannnnnaannnnnaannnnnnnnnnnnnnnnaaaaaannnnnnnnnnnnnnnnnccnnnnnnnnnnaaaannnnnnnnannnnnnnnnaaannnnnnnnnnnnnnnnnnaaannnnnnnnnnnnnnnnnaaannnnaannnannnnnnnnnnnannnnnnnnnnnnnnnnnnnnnnnnnnnnnnnnnnnnnnnnnnnnnnnnnnnnnnnnnannnnnnnnnnnnnnnnnnnnnannnnnnnnnnnnnn

SEQ ID NO: 624 - DNA, 1200 bp, Homo Sapiens
  misc_feature (5)..(5): n is a, c, g, or t
  misc_feature (7)..(8): n is a, c, g, or t
  misc_feature (13)..(13): n is a, c, g, or t
  misc_feature (21)..(23): n is a, c, g, or t
  misc_feature (26)..(26): n is a, c, g, or t
  misc_feature (28)..(28): n is a, c, g, or t
  misc_feature (33)..(33): n is a, c, g, or t
  misc_feature (38)..(38): n is a, c, g, or t
  misc_feature (53)..(53): n is a, c, g, or t
  misc_feature (55)..(55): n is a, c, g, or t
  misc_feature (58)..(58): n is a, c, g, or t
  misc_feature (62)..(62): n is a, c, g, or t
  misc_feature (92)..(92): n is a, c, g, or t
  misc_feature (100)..(100): n is a, c, g, or t
  misc_feature (112)..(112): n is a, c, g, or t
  misc_feature (115)..(115): n is a, c, g, or t
  misc_feature (595)..(595): n is a, c, g, or t
  misc_feature (740)..(740): n is a, c, g, or t
  misc_feature (814)..(814): n is a, c, g, or t
  misc_feature (823)..(823): n is a, c, g, or t
  misc_feature (886)..(886): n is a, c, g, or t
  misc_feature (896)..(896): n is a, c, g, or t
  misc_feature (900)..(900): n is a, c, g, or t
  misc_feature (902)..(902): n is a, c, g, or t
  misc_feature (904)..(904): n is a, c, g, or t
  misc_feature (916)..(916): n is a, c, g, or t
  misc_feature (922)..(922): n is a, c, g, or t
  misc_feature (925)..(925): n is a, c, g, or t
  misc_feature (931)..(931): n is a, c, g, or t
  misc_feature (938)..(939): n is a, c, g, or t
  misc_feature (947)..(947): n is a, c, g, or t
  misc_feature (965)..(965): n is a, c, g, or t
  misc_feature (975)..(975): n is a, c, g, or t
  misc_feature (980)..(980): n is a, c, g, or t
  misc_feature (987)..(987): n is a, c, g, or t
  misc_feature (990)..(990): n is a, c, g, or t
  misc_feature (998)..(998): n is a, c, g, or t
  misc_feature (1004)..(1004): n is a, c, g, or t
  misc_feature (1011)..(1012): n is a, c, g, or t
  misc_feature (1014)..(1014): n is a, c, g, or t
  misc_feature (1027)..(1027): n is a, c, g, or t
  misc_feature (1034)..(1034): n is a, c, g, or t
  misc_feature (1036)..(1036): n is a, c, g, or t
  misc_feature (1038)..(1038): n is a, c, g, or t
  misc_feature (1053)..(1053): n is a, c, g, or t
  misc_feature (1056)..(1056): n is a, c, g, or t
  misc_feature (1068)..(1068): n is a, c, g, or t
  misc_feature (1074)..(1074): n is a, c, g, or t
  misc_feature (1077)..(1077): n is a, c, g, or t
  misc_feature (1080)..(1080): n is a, c, g, or t
  misc_feature (1085)..(1085): n is a, c, g, or t
  misc_feature (1087)..(1087): n is a, c, g, or t
  misc_feature (1090)..(1090): n is a, c, g, or t
  misc_feature (1095)..(1095): n is a, c, g, or t
  misc_feature (1100)..(1100): n is a, c, g, or t
  misc_feature (1103)..(1103): n is a, c, g, or t
  misc_feature (1115)..(1115): n is a, c, g, or t
  misc_feature (1120)..(1120): n is a, c, g, or t
  misc_feature (1124)..(1124): n is a, c, g, or t
  misc_feature (1128)..(1128): n is a, c, g, or t
  misc_feature (1133)..(1133): n is a, c, g, or t
  misc_feature (1136)..(1137): n is a, c, g, or t
  misc_feature (1140)..(1141): n is a, c, g, or t
  misc_feature (1147)..(1149): n is a, c, g, or t
  misc_feature (1161)..(1163): n is a, c, g, or t
  misc_feature (1165)..(1166): n is a, c, g, or t
  misc_feature (1173)..(1173): n is a, c, g, or t
  misc_feature (1180)..(1180): n is a, c, g, or t
  misc_feature (1183)..(1183): n is a, c, g, or t
  misc_feature (1189)..(1189): n is a, c, g, or t
  misc_feature (1194)..(1194): n is a, c, g, or t
  misc_feature (1198)..(1198): n is a, c, g, or t
aggantnnaacanaattagcnnngantnggatngcgancctcgtcatccactnangtnatcnctatttaggggtgacatgtaatattaatcnttaacccncgtcgctccggnagnaaggtagcccgcagtaggaacatggcgctgctctgggggctcctggtgctcagctggtcctgcctgcaaggcccctgctccgtgttctcccctgtgagcgccatggagcccttgggccggcagctaactagcgggccgaaccaggagcaggtgtccccacttaccctcctcaagttgggcaaccaggagcctggtggccagactgccctgaagagtcccccaggagtctgcagcagagaccccaccccagagcagacccacaggctggcccgggccatgatggccttcactgccgacctgttctccctggtggctcaaacgtccacctgccccaacctcatcctgtcacccctgagtgtggccctggcgctgtctcacctggcactaggtgctcagaaccacacgttgcagaggctgcaacaggtgctgcacgcaggctcagggccctgcctcccccatctgctgagccgcctctgccangacctgggccccggcgcgttccgactggctgccaggatgtacctgcagaaaggatttcccatcaaagaagatttcctggaacaatccgaacagctatttggggcaaagcccgtgagcctgacgggaaagcaggaagatgacctgncaaacatcaaccaatgggtgaaaggaggccacggaggggaaagattcaggaattcctctctgggctgccggaanacaccgtgnttgcttctcctcaacgccatccactttccagggttttctggaggaacaaagttttgacccgangccttacccnaganananttccttccaccntggaanaancatttncacggtnncccgtggnaaatgatgcaaggccccncacgtacccnctgcnctggttnttngctggaancaaccntgaaaanncnaaggtcccccttnggttgtncnancaaggcttggccctnaanttggaaggtggnaaaagnaanggnaaaangnttntgaancaagncanaaggaaatgggngggangctntttnccccnttnnttnncctccnnntccccctaaggnnngnnaaattcnaaaaggnccnctgganccccnatcnaa

SEQ ID NO: 625 - DNA, 1488 bp, Homo Sapiens
  misc_feature (2)..(7): n is a, c, g, or t
  misc_feature (9)..(9): n is a, c, g, or t
  misc_feature (694)..(694): n is a, c, g, or t
  misc_feature (718)..(718): n is a, c, g, or t
  misc_feature (744)..(745): n is a, c, g, or t
  misc_feature (761)..(761): n is a, c, g, or t
  misc_feature (764)..(764): n is a, c, g, or t
  misc_feature (767)..(767): n is a, c, g, or t
  misc_feature (769)..(769): n is a, c, g, or t
  misc_feature (774)..(774): n is a, c, g, or t
  misc_feature (781)..(781): n is a, c, g, or t
  misc_feature (802)..(804): n is a, c, g, or t
  misc_feature (811)..(811): n is a, c, g, or t
  misc_feature (816)..(816): n is a, c, g, or t
  misc_feature (825)..(826): n is a, c, g, or t
  misc_feature (839)..(839): n is a, c, g, or t
  misc_feature (847)..(847): n is a, c, g, or t
  misc_feature (849)..(849): n is a, c, g, or t
  misc_feature (851)..(851): n is a, c, g, or t
  misc_feature (856)..(856): n is a, c, g, or t
  misc_feature (872)..(872): n is a, c, g, or t
  misc_feature (878)..(878): n is a, c, g, or t
  misc_feature (881)..(882): n is a, c, g, or t
  misc_feature (888)..(888): n is a, c, g, or t
  misc_feature (891)..(891): n is a, c, g, or t
  misc_feature (900)..(900): n is a, c, g, or t
  misc_feature (910)..(911): n is a, c, g, or t
  misc_feature (913)..(913): n is a, c, g, or t
  misc_feature (929)..(929): n is a, c, g, or t
  misc_feature (939)..(941): n is a, c, g, or t
  misc_feature (944)..(944): n is a, c, g, or t
  misc_feature (960)..(963): n is a, c, g, or t
  misc_feature (965)..(966): n is a, c, g, or t
  misc_feature (972)..(972): n is a, c, g, or t
  misc_feature (974)..(975): n is a, c, g, or t
  misc_feature (979)..(979): n is a, c, g, or t
  misc_feature (981)..(981): n is a, c, g, or t
  misc_feature (984)..(987): n is a, c, g, or t
  misc_feature (991)..(993): n is a, c, g, or t
  misc_feature (997)..(998): n is a, c, g, or t
  misc_feature (1001)..(1002): n is a, c, g, or t
  misc_feature (1006)..(1007): n is a, c, g, or t
  misc_feature (1012)..(1012): n is a, c, g, or t
  misc_feature (1014)..(1015): n is a, c, g, or t
  misc_feature (1017)..(1017): n is a, c, g, or t
  misc_feature (1024)..(1025): n is a, c, g, or t
  misc_feature (1028)..(1028): n is a, c, g, or t
  misc_feature (1032)..(1032): n is a, c, g, or t
  misc_feature (1036)..(1036): n is a, c, g, or t
  misc_feature (1046)..(1046): n is a, c, g, or t
  misc_feature (1053)..(1053): n is a, c, g, or t
  misc_feature (1055)..(1055): n is a, c, g, or t
  misc_feature (1061)..(1061): n is a, c, g, or t
  misc_feature (1064)..(1064): n is a, c, g, or t
  misc_feature (1066)..(1066): n is a, c, g, or t
  misc_feature (1070)..(1071): n is a, c, g, or t
  misc_feature (1074)..(1074): n is a, c, g, or t
  misc_feature (1079)..(1080): n is a, c, g, or t
  misc_feature (1083)..(1085): n is a, c, g, or t
  misc_feature (1088)..(1090): n is a, c, g, or t
  misc_feature (1096)..(1096): n is a, c, g, or t
  misc_feature (1099)..(1099): n is a, c, g, or t
  misc_feature (1103)..(1103): n is a, c, g, or t
  misc_feature (1109)..(1110): n is a, c, g, or t
  misc_feature (1113)..(1117): n is a, c, g, or t
  misc_feature (1124)..(1125): n is a, c, g, or t
  misc_feature (1128)..(1128): n is a, c, g, or t
  misc_feature (1132)..(1133): n is a, c, g, or t
  misc_feature (1135)..(1135): n is a, c, g, or t
  misc_feature (1137)..(1138): n is a, c, g, or t
  misc_feature (1140)..(1140): n is a, c, g, or t
  misc_feature (1152)..(1152): n is a, c, g, or t
  misc_feature (1159)..(1159): n is a, c, g, or t
  misc_feature (1165)..(1166): n is a, c, g, or t
  misc_feature (1176)..(1180): n is a, c, g, or t
  misc_feature (1182)..(1182): n is a, c, g, or t
  misc_feature (1187)..(1189): n is a, c, g, or t
  misc_feature (1196)..(1197): n is a, c, g, or t
  misc_feature (1199)..(1199): n is a, c, g, or t
  misc_feature (1203)..(1204): n is a, c, g, or t
  misc_feature (1206)..(1206): n is a, c, g, or t
  misc_feature (1209)..(1211): n is a, c, g, or t
  misc_feature (1213)..(1214): n is a, c, g, or t
  misc_feature (1219)..(1219): n is a, c, g, or t
  misc_feature (1225)..(1225): n is a, c, g, or t
  misc_feature (1227)..(1227): n is a, c, g, or t
  misc_feature (1229)..(1230): n is a, c, g, or t
  misc_feature (1232)..(1232): n is a, c, g, or t
  misc_feature (1238)..(1239): n is a, c, g, or t
  misc_feature (1243)..(1243): n is a, c, g, or t
  misc_feature (1245)..(1247): n is a, c, g, or t
  misc_feature (1249)..(1249): n is a, c, g, or t
  misc_feature (1255)..(1255): n is a, c, g, or t
  misc_feature (1259)..(1260): n is a, c, g, or t
  misc_feature (1262)..(1265): n is a, c, g, or t
  misc_feature (1268)..(1269): n is a, c, g, or t
  misc_feature (1272)..(1272): n is a, c, g, or t
  misc_feature (1278)..(1279): n is a, c, g, or t
  misc_feature (1281)..(1282): n is a, c, g, or t
  misc_feature (1285)..(1285): n is a, c, g, or t
  misc_feature (1290)..(1290): n is a, c, g, or t
  misc_feature (1292)..(1293): n is a, c, g, or t
  misc_feature (1296)..(1296): n is a, c, g, or t
  misc_feature (1298)..(1299): n is a, c, g, or t
  misc_feature (1301)..(1301): n is a, c, g, or t
  misc_feature (1303)..(1303): n is a, c, g, or t
  misc_feature (1306)..(1306): n is a, c, g, or t
  misc_feature (1308)..(1309): n is a, c, g, or t
  misc_feature (1312)..(1312): n is a, c, g, or t
  misc_feature (1317)..(1318): n is a, c, g, or t
  misc_feature (1320)..(1320): n is a, c, g, or t
  misc_feature (1323)..(1324): n is a, c, g, or t
  misc_feature (1330)..(1333): n is a, c, g, or t
  misc_feature (1339)..(1339): n is a, c, g, or t
  misc_feature (1341)..(1341): n is a, c, g, or t
  misc_feature (1343)..(1344): n is a, c, g, or t
  misc_feature (1351)..(1352): n is a, c, g, or t
  misc_feature (1356)..(1356): n is a, c, g, or t
  misc_feature (1358)..(1361): n is a, c, g, or t
  misc_feature (1363)..(1365): n is a, c, g, or t
  misc_feature (1370)..(1370): n is a, c, g, or t
  misc_feature (1374)..(1375): n is a, c, g, or t
  misc_feature (1378)..(1379): n is a, c, g, or t
  misc_feature (1383)..(1383): n is a, c, g, or t
  misc_feature (1387)..(1387): n is a, c, g, or t
  misc_feature (1392)..(1393): n is a, c, g, or t
  misc_feature (1396)..(1396): n is a, c, g, or t
  misc_feature (1399)..(1399): n is a, c, g, or t
  misc_feature (1401)..(1401): n is a, c, g, or t
  misc_feature (1404)..(1404): n is a, c, g, or t
  misc_feature (1407)..(1407): n is a, c, g, or t
  misc_feature (1410)..(1411): n is a, c, g, or t
  misc_feature (1413)..(1413): n is a, c, g, or t
  misc_feature (1416)..(1418): n is a, c, g, or t
  misc_feature (1420)..(1420): n is a, c, g, or t
  misc_feature (1426)..(1427): n is a, c, g, or t
  misc_feature (1429)..(1429): n is a, c, g, or t
  misc_feature (1431)..(1431): n is a, c, g, or t
  misc_feature (1434)..(1434): n is a, c, g, or t
  misc_feature (1437)..(1437): n is a, c, g, or t
  misc_feature (1439)..(1439): n is a, c, g, or t
  misc_feature (1441)..(1441): n is a, c, g, or t
  misc_feature (1443)..(1446): n is a, c, g, or t
  misc_feature (1449)..(1449): n is a, c, g, or t
  misc_feature (1451)..(1451): n is a, c, g, or t
  misc_feature (1455)..(1458): n is a, c, g, or t
  misc_feature (1461)..(1461): n is a, c, g, or t
  misc_feature (1463)..(1463): n is a, c, g, or t
  misc_feature (1465)..(1466): n is a, c, g, or t
  misc_feature (1468)..(1468): n is a, c, g, or t
  misc_feature (1470)..(1470): n is a, c, g, or t
  misc_feature (1474)..(1475): n is a, c, g, or t
  misc_feature (1478)..(1478): n is a, c, g, or t
  misc_feature (1480)..(1482): n is a, c, g, or t
  misc_feature (1485)..(1485): n is a, c, g, or t
  misc_feature (1487)..(1487): n is a, c, g, or t
tnnnnnncnattagaggaaaattaacttatggagaggatcgcatcaccatcaccatcacgggatcctatttaggtgacactatagaatcgtcgacccacgcgtccgctaattacatagctcccgaggtgctgagcaagaaagggcacagtttcgaggtggatgtgtggtccattgggtgtatcatgtataccttgttagtgggcaaaccaccttttgagacttcttgcctaaaagagacctacctccggatcaagaagaatgaatacagtattcccaagcacatcaaccccgtggccgcctccctcatccagaagatgcttcagacagatcccactgcccgcccaaccattaacgagctgcttaatgacgagttctttacttctggctatatccctgcccgtctccccatcacctgcctgaccattccaccaaggttttcgattgctcccagcagcctggaccccagcaaccggaagcccctcacagtcctcaataaaggcttggagaaccccctgcctgagcgtccccgggaaaaagaagaaccagtggttcgagagacaggtgaggtggtcgactgccacctcagtgacatgctgcagcagctgcacagtgtcaatgcctccaagccctcggagcgtgggctggtcaggcaagaggaggctgaggatcctgcctgcatccccatcttctggntcagcaagtgggtggactatttcngacaagtacgggccttgggtaatcannctctgtgataaacagncgnggngnggtgntctttcnaatgaactcaacaacgccctnnnccctccnacaantgaagggtnnacagccctgcaanaaaaatanancngtganaacaactggaagtccnaccttnacnngtgaanttncccatcccnaatttccctnnanaaaagaagaaaacccntccctaaatnnnttncccaacttaccttgannnnannccttgnannaaananctnnnncccnnnaatnncannctcnncaaantnnangaaactnnatncganttgnaccaccttangaaaatngnttcttntancncagnnaanaaaannttnnnatnnnataaanganaagnaaccannaannnnnattcaannatnagannananntntctttatccccnaataatnaacgannctctaccttnnnnnanaaatnnntactaanntncacnncnaannngnnttcanacctananannanatattnnaatnannntnaaaaantcanncnnnnccnnatntataannannaanttaanannaanannananaantnncancaaanntnatnnatcttnnnnataatngnannaaaaaannatcntnnnncnnncatanaatnnaanngacncatnaaagnnttnagntncantanatnntntannnancaaatnntntnatnaancncnannnncananatannnnccntnanntncnctannatnannntanana

SEQ ID NO: 626 - DNA, 1200 bp, Homo Sapiens
  misc_feature (231)..(231): n is a, c, g, or t
  misc_feature (539)..(539): n is a, c, g, or t
  misc_feature (704)..(704): n is a, c, g, or t
  misc_feature (775)..(775): n is a, c, g, or t
  misc_feature (817)..(817): n is a, c, g, or t
  misc_feature (822)..(822): n is a, c, g, or t
  misc_feature (846)..(846): n is a, c, g, or t
  misc_feature (869)..(869): n is a, c, g, or t
  misc_feature (872)..(872): n is a, c, g, or t
  misc_feature (879)..(879): n is a, c, g, or t
  misc_feature (881)..(881): n is a, c, g, or t
  misc_feature (885)..(885): n is a, c, g, or t
  misc_feature (891)..(891): n is a, c, g, or t
  misc_feature (903)..(903): n is a, c, g, or t
  misc_feature (920)..(921): n is a, c, g, or t
  misc_feature (945)..(945): n is a, c, g, or t
  misc_feature (964)..(964): n is a, c, g, or t
  misc_feature (972)..(972): n is a, c, g, or t
  misc_feature (977)..(977): n is a, c, g, or t
  misc_feature (983)..(983): n is a, c, g, or t
  misc_feature (999)..(999): n is a, c, g, or t
  misc_feature (1003)..(1003): n is a, c, g, or t
  misc_feature (1022)..(1022): n is a, c, g, or t
  misc_feature (1025)..(1025): n is a, c, g, or t
  misc_feature (1029)..(1030): n is a, c, g, or t
  misc_feature (1033)..(1033): n is a, c, g, or t
  misc_feature (1057)..(1059): n is a, c, g, or t
  misc_feature (1062)..(1062): n is a, c, g, or t
  misc_feature (1072)..(1072): n is a, c, g, or t
  misc_feature (1075)..(1075): n is a, c, g, or t
  misc_feature (1079)..(1079): n is a, c, g, or t
  misc_feature (1089)..(1089): n is a, c, g, or t
  misc_feature (1092)..(1092): n is a, c, g, or t
  misc_feature (1094)..(1094): n is a, c, g, or t
  misc_feature (1098)..(1098): n is a, c, g, or t
  misc_feature (1129)..(1129): n is a, c, g, or t
  misc_feature (1137)..(1137): n is a, c, g, or t
  misc_feature (1139)..(1140): n is a, c, g, or t
  misc_feature (1142)..(1142): n is a, c, g, or t
  misc_feature (1150)..(1151): n is a, c, g, or t
  misc_feature (1161)..(1161): n is a, c, g, or t
  misc_feature (1165)..(1165): n is a, c, g, or t
  misc_feature (1167)..(1167): n is a, c, g, or t
  misc_feature (1169)..(1169): n is a, c, g, or t
  misc_feature (1171)..(1172): n is a, c, g, or t
  misc_feature (1175)..(1175): n is a, c, g, or t
  misc_feature (1177)..(1177): n is a, c, g, or t
  misc_feature (1186)..(1187): n is a, c, g, or t
  misc_feature (1196)..(1196): n is a, c, g, or t
  misc_feature (1198)..(1198): n is a, c, g, or t
tagagaaattactatgagaggatcgcatcaccatcaccatcacggatcctatttaggtgacactatagaatcgtcgacccacgcgtccgctgcagccatggcagtcaccgcccaggcagcccgcaggaaggagcgcgtcctctgcctgtttgacgtggacgggaccctcacgccggctcgccagaaaattgaccctgaggtggccgccttcctgcagaagctacgaagtanagtgcagatcggtgtggtgggcggctctgactactgtaagatcgctgagcagctgggtgacggggatgaagtcattgagaagtttgattatgtgtttgccgagaacgggacggtgcagtataagcacggacgactgctctccaagcagaccatccagaaccacctgggggaggagctgctgcaggacttgatcaacttctgcctcagctacatggccctgctcaggctgcccaagaagcgtggaaccttcatcgagttccggaatggcatgctgaacatctcgcccatcggccggagctgcaccctgnaggagaggatcgagttctccgaactggacaagaaagagaagatccgggagaagttcgtggaagccctgaaaacagagtttgctggcaaagggctgaggttctctcgaggaggcatgatcagctttgacgtcttccccgagggctgggacaagcgctactgcctgnatagcctggaccaaggacagcttcgacaccatccacttctttgggaaacgagactagccctggtgggaacnactttgagatctttgccgaccccccggaactgttggccacancgtgntgtctccctcaggacacggtgcancgatgccgggaaaaattttcttnccnaaaagananctcnatgaangcgtgacggggncccactctggtgtgccnngaactttctgaaaaatttggcccnaagccctaaaaagaaaggnccttgggngttgnaaaaangccaggggccccttcntttnggccccaagaacccttgcntgnaaannccnccccataatgggcccaaaattctnnntgnaaaaaccgtnccnaacnaatcttgctnccnangggnaatgggtttccccctctccaagggccaaaangtttcccntnntnccccctgnnggcccagccnaaantntntnnttntnttttcctannaaaaaagtntntt

SEQ ID NO: 627 - DNA, 1198 bp, Homo Sapiens
  misc_feature (2)..(2): n is a, c, g, or t
  misc_feature (5)..(5): n is a, c, g, or t
  misc_feature (775)..(775): n is a, c, g, or t
  misc_feature (872)..(872): n is a, c, g, or t
  misc_feature (899)..(899): n is a, c, g, or t
  misc_feature (913)..(913): n is a, c, g, or t
  misc_feature (938)..(938): n is a, c, g, or t
  misc_feature (949)..(949): n is a, c, g, or t
  misc_feature (954)..(954): n is a, c, g, or t
  misc_feature (957)..(957): n is a, c, g, or t
  misc_feature (963)..(963): n is a, c, g, or t
  misc_feature (989)..(989): n is a, c, g, or t
  misc_feature (991)..(991): n is a, c, g, or t
  misc_feature (1002)..(1002): n is a, c, g, or t
  misc_feature (1006)..(1006): n is a, c, g, or t
  misc_feature (1021)..(1021): n is a, c, g, or t
  misc_feature (1039)..(1039): n is a, c, g, or t
  misc_feature (1049)..(1049): n is a, c, g, or t
  misc_feature (1051)..(1051): n is a, c, g, or t
  misc_feature (1055)..(1055): n is a, c, g, or t
  misc_feature (1063)..(1063): n is a, c, g, or t
  misc_feature (1077)..(1077): n is a, c, g, or t
  misc_feature (1082)..(1083): n is a, c, g, or t
  misc_feature (1093)..(1093): n is a, c, g, or t
  misc_feature (1102)..(1102): n is a, c, g, or t
  misc_feature (1106)..(1106): n is a, c, g, or t
  misc_feature (1117)..(1117): n is a, c, g, or t
  misc_feature (1124)..(1124): n is a, c, g, or t
  misc_feature (1132)..(1133): n is a, c, g, or t
  misc_feature (1141)..(1142): n is a, c, g, or t
  misc_feature (1149)..(1149): n is a, c, g, or t
  misc_feature (1161)..(1161): n is a, c, g, or t
  misc_feature (1163)..(1163): n is a, c, g, or t
  misc_feature (1173)..(1173): n is a, c, g, or t
  misc_feature (1176)..(1176): n is a, c, g, or t
  misc_feature (1181)..(1181): n is a, c, g, or t
  misc_feature (1189)..(1189): n is a, c, g, or t
  misc_feature (1192)..(1192): n is a, c, g, or t
gnatnagagaaaattactatgagaggatcgcatcaccatcaccatcacggatcctatttaggtgacactatagaatcgtcgacccacgcgtccgcgcctgtgggagccgtggagggcactttcccagtccccgaggcggatccggtgttgcatccttggagagagctgagagctggagaacctgctaaggccatcaaacctattgatcggaagtcagtccatcagatttgctctgggccggtagtactgagtctaagcactgcggtgaagaagatggtagaaaacagtctggatgctggtgccactaatattgatctaaagcttaaggactatggaatggatctcattgaagtttcaggcaatggatgtggggtagaagaagaaaacttcgaaggcttaatgatgtcaccatttctacctgccacgtatcggcgaaggttgggactcgactggtgtttgatcacgatgggaaaatcatccagaaaaccccctacccccaccccagagggaccacagtcagcgtgaagcagttattttctacgctacctgtgcgccataaggaatttcaaaggaatattaagaaggtacagtaaattaatcctggttttcaagagtattggttaatgcacatgagcaaaagatttactaaagatgtttattcttcagttgattctcttcccataatttattgagaaatgctttatttgcatttctcattaaagacttaacttcaggatgatttacttttttctttttatcacataatgtttattangactgggaaacatggtgagactctgtctctatgaaaaattaaaaaaaaggattgactgggcatggtggcatgcacctgtagttccagctacttgggnaggctgaagtgggaaggatcgcctganctcaggaacttganactgcagtgagctatgattgcgtcnctacacttcanactgnganacaaantaaaaaccctgtctggaaaaaatatntntacctataaanaccnttttttttaattttnaattttaacccttttttngaaaagggantncccnctttggcncccctggctgcaangcaannggccccgatntccatttcnttgnaaccctccccntgccaanttcggggnnattccccnngctttcncccttttgaaananctggccattnaanggggnccggcccnccncccccg

SEQ ID NO: 628 - DNA, 1350 bp, Homo Sapiens
  misc_feature (15)..(15): n is a, c, g, or t
  misc_feature (826)..(826): n is a, c, g, or t
  misc_feature (922)..(923): n is a, c, g, or t
  misc_feature (934)..(934): n is a, c, g, or t
  misc_feature (962)..(962): n is a, c, g, or t
  misc_feature (976)..(976): n is a, c, g, or t
  misc_feature (988)..(988): n is a, c, g, or t
  misc_feature (1009)..(1009): n is a, c, g, or t
  misc_feature (1020)..(1021): n is a, c, g, or t
  misc_feature (1023)..(1023): n is a, c, g, or t
  misc_feature (1050)..(1050): n is a, c, g, or t
  misc_feature (1059)..(1059): n is a, c, g, or t
  misc_feature (1062)..(1062): n is a, c, g, or t
  misc_feature (1070)..(1070): n is a, c, g, or t
  misc_feature (1084)..(1084): n is a, c, g, or t
  misc_feature (1100)..(1100): n is a, c, g, or t
  misc_feature (1105)..(1105): n is a, c, g, or t
  misc_feature (1125)..(1126): n is a, c, g, or t
  misc_feature (1130)..(1130): n is a, c, g, or t
  misc_feature (1136)..(1136): n is a, c, g, or t
  misc_feature (1138)..(1138): n is a, c, g, or t
  misc_feature (1142)..(1142): n is a, c, g, or t
  misc_feature (1149)..(1150): n is a, c, g, or t
  misc_feature (1156)..(1156): n is a, c, g, or t
  misc_feature (1164)..(1164): n is a, c, g, or t
  misc_feature (1166)..(1167): n is a, c, g, or t
  misc_feature (1171)..(1171): n is a, c, g, or t
  misc_feature (1185)..(1185): n is a, c, g, or t
  misc_feature (1189)..(1189): n is a, c, g, or t
  misc_feature (1195)..(1195): n is a, c, g, or t
  misc_feature (1198)..(1198): n is a, c, g, or t
  misc_feature (1201)..(1202): n is a, c, g, or t
  misc_feature (1206)..(1206): n is a, c, g, or t
  misc_feature (1210)..(1210): n is a, c, g, or t
  misc_feature (1217)..(1217): n is a, c, g, or t
  misc_feature (1225)..(1225): n is a, c, g, or t
  misc_feature (1229)..(1229): n is a, c, g, or t
  misc_feature (1232)..(1232): n is a, c, g, or t
  misc_feature (1252)..(1252): n is a, c, g, or t
  misc_feature (1266)..(1266): n is a, c, g, or t
  misc_feature (1268)..(1268): n is a, c, g, or t
  misc_feature (1280)..(1280): n is a, c, g, or t
  misc_feature (1307)..(1308): n is a, c, g, or t
  misc_feature (1322)..(1323): n is a, c, g, or t
  misc_feature (1326)..(1326): n is a, c, g, or t
  misc_feature (1343)..(1343): n is a, c, g, or t
  misc_feature (1346)..(1346): n is a, c, g, or t
aatagagagaattanctatgagaggatcgcatcaccatcaccatcacggatcctatttaggtgacactatagaatcgtcgacccacgcgtccggcgagtgtgtggccagcaccccaggggacaggggctcgcaggaacatgtggactctcaggagaaagcgcctgaaactgacgactctttttcagatgtggactgccattcaaaccaggaagataccggatgtaaatttcaggttttgcctcagccaactaatctcacatccccaaacacaaaagtgttttaagaaagaagaaattctttccaattctgacattcgtcaaaagttagtaaatactcagaacgtgtcagcttctcaggttgatgtagctgtgaaaattaataagaaagttgtgcccctgaacttttctgagttctttagctaaacgaataaagcagttacatcatgaagcacagcaaagtgaaggggaacagaattacaggaagtttagggcaaggatttgtcctggagaaaatcaagcagccgaagatgaactaagaaaagagataagtaaaacgatgtttgcagaaatggaaatcattggtcagtttaacctgggatttataataaccaaactgaatgaggatatcttcatagtggaccagcatgccacggacgagaagtataacttcgagatgctgcagcagcacaccgtgctccaggggcagaggctcatagcacctcagactctcaacttaactgctgttaatgaagctgttctgatagaaaaatctggaaatattttagaaagaatggcttcgattttgttatcgatgaaaatgctccantcactgaaagggctaaactgatttcctgccaactagtaaaagctggaccttcggaccccaggacgtcgatgaactgatcttcatgctgagcgacannccctggggtcntgtgcccgcccttcccgagtcagcagangtttgcctccagancctgccggaaanccggtgatgattgggactgcnccttaacccanncnagatgaaaaaactgaatcccccccatngggggaaanggnaccccccngggaacctgtcccntggaaaggccaccctngaaancctcccccacccgggggggnntttnccaaantnaccnaaatccnngtaggnaaaaaatngnntttnccccaaattttttntttnaaaaanaanccnncccnaccntttttgntttaaaanaaanccnccccttaaaaaaaacccccnccccctttaaaggntntggaacttttcncccaaaaaaaaaaaggggccccccccnnaggggccaataacnnttntccgacccgcccccgtnaanccca

SEQ ID NO: 629 - DNA, 1200 bp, Homo Sapiens
  misc_feature (922)..(922): n is a, c, g, or t
  misc_feature (944)..(944): n is a, c, g, or t
  misc_feature (964)..(964): n is a, c, g, or t
  misc_feature (969)..(969): n is a, c, g, or t
  misc_feature (993)..(993): n is a, c, g, or t
  misc_feature (1002)..(1002): n is a, c, g, or t
  misc_feature (1007)..(1007): n is a, c, g, or t
  misc_feature (1015)..(1015): n is a, c, g, or t
  misc_feature (1025)..(1025): n is a, c, g, or t
  misc_feature (1032)..(1032): n is a, c, g, or t
  misc_feature (1065)..(1065): n is a, c, g, or t
  misc_feature (1076)..(1076): n is a, c, g, or t
  misc_feature (1089)..(1089): n is a, c, g, or t
  misc_feature (1094)..(1094): n is a, c, g, or t
  misc_feature (1101)..(1101): n is a, c, g, or t
  misc_feature (1113)..(1113): n is a, c, g, or t
  misc_feature (1115)..(1115): n is a, c, g, or t
  misc_feature (1117)..(1117): n is a, c, g, or t
  misc_feature (1126)..(1126): n is a, c, g, or t
  misc_feature (1128)..(1129): n is a, c, g, or t
  misc_feature (1136)..(1136): n is a, c, g, or t
  misc_feature (1161)..(1161): n is a, c, g, or t
  misc_feature (1163)..(1163): n is a, c, g, or t
  misc_feature (1176)..(1177): n is a, c, g, or t
  misc_feature (1180)..(1180): n is a, c, g, or t
  misc_feature (1182)..(1184): n is a, c, g, or t
  misc_feature (1188)..(1188): n is a, c, g, or t
  misc_feature (1194)..(1194): n is a, c, g, or t
  misc_feature (1199)..(1199): n is a, c, g, or t
agagaaattactatgagaggatcgcatcaccatcaccatcacggatcctatttaggtgacactatagaatcgtcgacccacgcgtccgctctttctcacctgcgtcgtttaaattctcctattggtagagacggcaagctagcaaaaccaagacagttgcataatacgttgtggggaatggtgtgtcctgccgagaccccagagggccatgctgtaggacttgtgaagaatttagccttgatggcatatatttcagttggatctcaaccatctccaattctggaatttttagaagaatggagtatggaaaatttagaagaaatttctcctgcagctattgctgatgcaaccaagatttttgttaatggctgctgggttggaatacataaagatcccgaacaacttatgaacaccctaaggaaattgagacgtcagatggacatcattgtgtctgaagtttctatgatcagagatattcgagagagggagattcggatctatacagatgcaggccgtatttgtagaccacttctgattgtggaaaaacaaaagctacttttgaagaagaggcatattgaccaattgaaagagagagaatataacaactatagttggcaggatcttgtggccagtggggtagtggagtatattgataccctggaagaagaaacagtgatgcttgcaatgactccagatgatttacaggagaaagaagtagcttattgttccacatatacacactgtgagattcatccctcaatgatccttggtgtctgtgcatctattattccctttcctgatcataaccagtcccctagaaacacataccagtctgctatgggtaagcaggctatgggagtttacatcaccaacttccatggttcgcatggacacattggccccatgttctctattatccccnaaaagcccacttggggactacncggtctatggaatatctacnatttnaaagagctgcccagcaggcatcanctcaattgnggccnttgcatcntaccctgganataatcnggaaaactctgttatcatgaatcgttcacctgnaaaccgcggcntcttcaggtctgnttttntaccccncaacaaaaaacngngntctaaaaangnnttgttcnaaaaaaatttttgaaaacccccccngnaaaatgcccgggnnggngnnngccnttttcnaaaanc

SEQ ID NO: 630 - DNA, 1200 bp, Homo Sapiens
  misc_feature (1)..(2): n is a, c, g, or t
  misc_feature (42)..(42): n is a, c, g, or t
  misc_feature (730)..(730): n is a, c, g, or t
  misc_feature (765)..(765): n is a, c, g, or t
  misc_feature (858)..(858): n is a, c, g, or t
  misc_feature (876)..(876): n is a, c, g, or t
  misc_feature (883)..(883): n is a, c, g, or t
  misc_feature (888)..(888): n is a, c, g, or t
  misc_feature (904)..(904): n is a, c, g, or t
  misc_feature (924)..(924): n is a, c, g, or t
  misc_feature (929)..(929): n is a, c, g, or t
  misc_feature (945)..(945): n is a, c, g, or t
  misc_feature (948)..(948): n is a, c, g, or t
  misc_feature (951)..(951): n is a, c, g, or t
  misc_feature (954)..(955): n is a, c, g, or t
  misc_feature (961)..(961): n is a, c, g, or t
  misc_feature (965)..(965): n is a, c, g, or t
  misc_feature (967)..(967): n is a, c, g, or t
  misc_feature (972)..(972): n is a, c, g, or t
  misc_feature (976)..(976): n is a, c, g, or t
  misc_feature (978)..(978): n is a, c, g, or t
  misc_feature (985)..(986): n is a, c, g, or t
  misc_feature (989)..(989): n is a, c, g, or t
  misc_feature (994)..(994): n is a, c, g, or t
  misc_feature (997)..(997): n is a, c, g, or t
  misc_feature (1001)..(1001): n is a, c, g, or t
  misc_feature (1004)..(1004): n is a, c, g, or t
  misc_feature (1006)..(1007): n is a, c, g, or t
  misc_feature (1009)..(1009): n is a, c, g, or t
  misc_feature (1013)..(1013): n is a, c, g, or t
  misc_feature (1020)..(1020): n is a, c, g, or t
  misc_feature (1023)..(1023): n is a, c, g, or t
  misc_feature (1026)..(1026): n is a, c, g, or t
  misc_feature (1028)..(1028): n is a, c, g, or t
  misc_feature (1031)..(1032): n is a, c, g, or t
  misc_feature (1040)..(1042): n is a, c, g, or t
  misc_feature (1046)..(1046): n is a, c, g, or t
  misc_feature (1048)..(1048): n is a, c, g, or t
  misc_feature (1050)..(1051): n is a, c, g, or t
  misc_feature (1053)..(1053): n is a, c, g, or t
  misc_feature (1057)..(1057): n is a, c, g, or t
  misc_feature (1060)..(1060): n is a, c, g, or t
  misc_feature (1071)..(1072): n is a, c, g, or t
  misc_feature (1074)..(1074): n is a, c, g, or t
  misc_feature (1077)..(1077): n is a, c, g, or t
  misc_feature (1081)..(1081): n is a, c, g, or t
  misc_feature (1084)..(1084): n is a, c, g, or t
  misc_feature (1086)..(1086): n is a, c, g, or t
  misc_feature (1088)..(1088): n is a, c, g, or t
  misc_feature (1094)..(1095): n is a, c, g, or t
  misc_feature (1101)..(1102): n is a, c, g, or t
  misc_feature (1107)..(1107): n is a, c, g, or t
  misc_feature (1110)..(1110): n is a, c, g, or t
  misc_feature (1118)..(1118): n is a, c, g, or t
  misc_feature (1124)..(1125): n is a, c, g, or t
  misc_feature (1127)..(1129): n is a, c, g, or t
  misc_feature (1133)..(1133): n is a, c, g, or t
  misc_feature (1136)..(1136): n is a, c, g, or t
  misc_feature (1139)..(1140): n is a, c, g, or t
  misc_feature (1147)..(1149): n is a, c, g, or t
  misc_feature (1151)..(1151): n is a, c, g, or t
  misc_feature (1153)..(1155): n is a, c, g, or t
  misc_feature (1165)..(1165): n is a, c, g, or t
  misc_feature (1173)..(1173): n is a, c, g, or t
  misc_feature (1175)..(1177): n is a, c, g, or t
  misc_feature (1179)..(1179): n is a, c, g, or t
  misc_feature (1181)..(1181): n is a, c, g, or t
  misc_feature (1183)..(1183): n is a, c, g, or t
  misc_feature (1200)..(1200): n is a, c, g, or t
nnttagagagaattactatggagaggatcgcatcaccatcancatcacggatcctatttaggtgacactatagaatcgtcgacccacgcgtccgagcacccattcccgtgccctacgtcctaccgcacggccctcacctactacctggacatcaccaacccgccgcgtaccaacgtgctgtacgagctggcgcagtacgcctcggagccctcggagcaggagctgctgcgcaagatggcctcctcctccggcgagggcaaggagctgtacctgagctgggtggtggaggcccggaggcacatcctggccatcctgcaggactgcccgtccctgcggccccccatcgaccacctgtgtgagctgctgccgcgcctgcaggcccgctactactccatcgcctcatcctccaaggtccaccccaactctgtgcacatctgtgcggtggttgtggagtacgagaccaaggccggccgcatcaacaagggcgtggccaccaactggctgcgggccaaggagcctgccggggagaacggcggccgtgcgctggtgcccatgttcgtgcgcaagtcccagttccgcctgcccttcaaggccaccacgcctgtcatcatggtgggccccggcaccggggtggcacccttcataggcttcatccaggagcgggcctggctgcgacagcagggcaaggaggtgggggagacgctgctgtactacggctgccgccgctcanatgaggactacctgtaccgggaggagctggcgcanttccacagggacggtgcgctcacccagctcaacgtggccttctcccgggagcagtcccacaaggtctacgtccagcacctgctaaagcaagancgaaagcacctgtggaanttgatcnaaggnggtgcccacatctacntctgtggggatgcacggaanatggncagggatgtgcaaaanacnttntannaaatcntggntnaactngggncntggaacnngcncaggnggnggantantnnanaaantgatgancanggncnctnntcctgaannntggnancnnanccanggnctgatgggggnncnggnttcntgncntngaggcnntggccnnggggntgnaaaaaggntttttnntnnngaanggnccnnccctccnnnantnnngggggaaaantttaaaancnnngncntngaaaaaatttttttttn

SEQ ID NO: 631 - DNA, 1409 bp, Homo Sapiens
  misc_feature (1)..(1): n is a, c, g, or t
  misc_feature (865)..(865): n is a, c, g, or t
  misc_feature (893)..(893): n is a, c, g, or t
  misc_feature (941)..(941): n is a, c, g, or t
  misc_feature (965)..(965): n is a, c, g, or t
  misc_feature (986)..(986): n is a, c, g, or t
  misc_feature (1005)..(1005): n is a, c, g, or t
  misc_feature (1007)..(1007): n is a, c, g, or t
  misc_feature (1013)..(1013): n is a, c, g, or t
  misc_feature (1021)..(1021): n is a, c, g, or t
  misc_feature (1025)..(1025): n is a, c, g, or t
  misc_feature (1041)..(1041): n is a, c, g, or t
  misc_feature (1048)..(1048): n is a, c, g, or t
  misc_feature (1054)..(1054): n is a, c, g, or t
  misc_feature (1065)..(1065): n is a, c, g, or t
  misc_feature (1068)..(1068): n is a, c, g, or t
  misc_feature (1075)..(1075): n is a, c, g, or t
  misc_feature (1089)..(1089): n is a, c, g, or t
  misc_feature (1105)..(1105): n is a, c, g, or t
  misc_feature (1150)..(1152): n is a, c, g, or t
  misc_feature (1156)..(1156): n is a, c, g, or t
  misc_feature (1160)..(1163): n is a, c, g, or t
  misc_feature (1181)..(1181): n is a, c, g, or t
  misc_feature (1184)..(1184): n is a, c, g, or t
  misc_feature (1188)..(1190): n is a, c, g, or t
  misc_feature (1193)..(1194): n is a, c, g, or t
  misc_feature (1198)..(1200): n is a, c, g, or t
  misc_feature (1203)..(1203): n is a, c, g, or t
  misc_feature (1209)..(1209): n is a, c, g, or t
  misc_feature (1211)..(1212): n is a, c, g, or t
  misc_feature (1218)..(1218): n is a, c, g, or t
  misc_feature (1224)..(1225): n is a, c, g, or t
  misc_feature (1227)..(1227): n is a, c, g, or t
  misc_feature (1235)..(1236): n is a, c, g, or t
  misc_feature (1238)..(1238): n is a, c, g, or t
  misc_feature (1240)..(1240): n is a, c, g, or t
  misc_feature (1246)..(1246): n is a, c, g, or t
  misc_feature (1250)..(1250): n is a, c, g, or t
  misc_feature (1256)..(1256): n is a, c, g, or t
  misc_feature (1258)..(1258): n is a, c, g, or t
  misc_feature (1263)..(1266): n is a, c, g, or t
  misc_feature (1273)..(1273): n is a, c, g, or t
  misc_feature (1277)..(1277): n is a, c, g, or t
  misc_feature (1287)..(1287): n is a, c, g, or t
  misc_feature (1293)..(1293): n is a, c, g, or t
  misc_feature (1295)..(1295): n is a, c, g, or t
  misc_feature (1299)..(1299): n is a, c, g, or t
  misc_feature (1304)..(1305): n is a, c, g, or t
  misc_feature (1324)..(1324): n is a, c, g, or t
  misc_feature (1326)..(1326): n is a, c, g, or t
  misc_feature (1328)..(1328): n is a, c, g, or t
  misc_feature (1334)..(1334): n is a, c, g, or t
  misc_feature (1336)..(1336): n is a, c, g, or t
  misc_feature (1341)..(1342): n is a, c, g, or t
  misc_feature (1355)..(1355): n is a, c, g, or t
  misc_feature (1367)..(1368): n is a, c, g, or t
  misc_feature (1372)..(1373): n is a, c, g, or t
  misc_feature (1377)..(1379): n is a, c, g, or t
  misc_feature (1381)..(1386): n is a, c, g, or t
  misc_feature (1388)..(1388): n is a, c, g, or t
  misc_feature (1391)..(1391): n is a, c, g, or t
  misc_feature (1393)..(1393): n is a, c, g, or t
  misc_feature (1396)..(1397): n is a, c, g, or t
  misc_feature (1400)..(1402): n is a, c, g, or t
  misc_feature (1405)..(1405): n is a, c, g, or t
naatagagaaattactatgagaggatcgcatcaccatcaccatcacggatcctatttaggtgacactatagaatcgtcgacccacgcgtccgggcagcaactcaccctcactcagaggtcttctggttctggaaacaactctagctcagccttctccaccatgagcctcagacttgataccaccccttcctgtaacagtgcgagaccacttcatgccttgcaggtgctgctgcttctgtcattgctgctgactgctctggcttcctccaccaaaggacaaactaagagaaacttggcgaaaggcaaagaggaaagtctagacagtgacttgtatgctgaactccgctgcatgtgtataaagacaacctctggaattcatcccaaaaacatccaaagtttggaagtgatcgggaaaggaacccattgcaaccaagtcgaagtgatagccacactgaaggatgggaggaaaatctgcctggacccagatgctcccagaatcaagaaaattgtacagaaaaaattggcaggtgatgaatctgctgattaatttgttctgtttctgccaaacttctttaactcccaggaagggtagaattttgaaaccttgattttctagagttctcatttattcaggatacctattcttactgtattaaaatttggatatgtgtttcattctgtctcaaaaatcacattttattctgagaaggttggttaaaagatggcagaaagaagatgaaaataaataagcctggtttcaaccctctaattcttgcctaaacattggactgtactttgcatttttttctttaaaaatttctattctaacacaacttggttgatttttcctggtctactttatggntattagacatactcatgggtattattanatttcataatggtcaatgataataggaattacatggagcccaacaganaatatttgctcaatacatttttgnttaatatatttaggaacttantggagtctctcagggtctnantcctangatgtctnattnaaaaaccccctgaaangtttatnctgaangtttattttanccntcaaacnctaaaataaaaaanttggggaaaatgaatnttaaaaactggggttagctggtttaaaggaaaaatttgcccctannnaacnaaannnntggaggaaaggattaccnttncccnnnttnnattnnntcnttaaangnnccttanaaaaannanaaaaaggnntncnccttanaaancccaantnaaatnnnnttttttncaanaaattttttntttttnancccnaattnncccccttttttaaaaattncngnaaaaantnttttnnaaaaaaaaaaaanggggcccccccnngggnnaaannnannnnnngnccngnaannaannnccnaccc

SEQ ID NO: 632 - DNA, 1367 bp, Homo Sapiens
  misc_feature (1)..(3): n is a, c, g, or t
  misc_feature (656)..(656): n is a, c, g, or t
  misc_feature (693)..(693): n is a, c, g, or t
  misc_feature (716)..(716): n is a, c, g, or t
  misc_feature (750)..(750): n is a, c, g, or t
  misc_feature (783)..(783): n is a, c, g, or t
  misc_feature (785)..(785): n is a, c, g, or t
  misc_feature (794)..(794): n is a, c, g, or t
  misc_feature (802)..(803): n is a, c, g, or t
  misc_feature (806)..(806): n is a, c, g, or t
  misc_feature (810)..(810): n is a, c, g, or t
  misc_feature (812)..(812): n is a, c, g, or t
  misc_feature (814)..(814): n is a, c, g, or t
  misc_feature (821)..(821): n is a, c, g, or t
  misc_feature (829)..(830): n is a, c, g, or t
  misc_feature (837)..(837): n is a, c, g, or t
  misc_feature (859)..(859): n is a, c, g, or t
  misc_feature (863)..(863): n is a, c, g, or t
  misc_feature (873)..(874): n is a, c, g, or t
  misc_feature (878)..(878): n is a, c, g, or t
  misc_feature (881)..(881): n is a, c, g, or t
  misc_feature (883)..(883): n is a, c, g, or t
  misc_feature (885)..(885): n is a, c, g, or t
  misc_feature (893)..(893): n is a, c, g, or t
  misc_feature (896)..(896): n is a, c, g, or t
  misc_feature (906)..(906): n is a, c, g, or t
  misc_feature (912)..(912): n is a, c, g, or t
  misc_feature (914)..(914): n is a, c, g, or t
  misc_feature (917)..(917): n is a, c, g, or t
  misc_feature (919)..(920): n is a, c, g, or t
  misc_feature (926)..(926): n is a, c, g, or t
  misc_feature (944)..(944): n is a, c, g, or t
  misc_feature (948)..(948): n is a, c, g, or t
  misc_feature (954)..(956): n is a, c, g, or t
  misc_feature (958)..(958): n is a, c, g, or t
  misc_feature (960)..(960): n is a, c, g, or t
  misc_feature (964)..(968): n is a, c, g, or t
  misc_feature (970)..(970): n is a, c, g, or t
  misc_feature (972)..(972): n is a, c, g, or t
  misc_feature (975)..(975): n is a, c, g, or t
  misc_feature (978)..(978): n is a, c, g, or t
  misc_feature (980)..(981): n is a, c, g, or t
  misc_feature (985)..(985): n is a, c, g, or t
  misc_feature (995)..(995): n is a, c, g, or t
  misc_feature (1000)..(1000): n is a, c, g, or t
  misc_feature (1004)..(1004): n is a, c, g, or t
  misc_feature (1008)..(1012): n is a, c, g, or t
  misc_feature (1015)..(1017): n is a, c, g, or t
  misc_feature (1020)..(1022): n is a, c, g, or t
  misc_feature (1027)..(1028): n is a, c, g, or t
  misc_feature (1031)..(1031): n is a, c, g, or t
  misc_feature (1034)..(1034): n is a, c, g, or t
  misc_feature (1041)..(1043): n is a, c, g, or t
  misc_feature (1046)..(1052): n is a, c, g, or t
  misc_feature (1056)..(1056): n is a, c, g, or t
  misc_feature (1058)..(1060): n is a, c, g, or t
  misc_feature (1065)..(1065): n is a, c, g, or t
  misc_feature (1067)..(1067): n is a, c, g, or t
  misc_feature (1072)..(1072): n is a, c, g, or t
  misc_feature (1074)..(1074): n is a, c, g, or t
  misc_feature (1079)..(1080): n is a, c, g, or t
  misc_feature (1082)..(1084): n is a, c, g, or t
  misc_feature (1086)..(1087): n is a, c, g, or t
  misc_feature (1089)..(1089): n is a, c, g, or t
  misc_feature (1097)..(1097): n is a, c, g, or t
  misc_feature (1099)..(1100): n is a, c, g, or t
  misc_feature (1102)..(1106): n is a, c, g, or t
  misc_feature (1119)..(1120): n is a, c, g, or t
  misc_feature (1122)..(1122): n is a, c, g, or t
  misc_feature (1125)..(1127): n is a, c, g, or t
  misc_feature (1129)..(1141): n is a, c, g, or t
  misc_feature (1143)..(1143): n is a, c, g, or t
  misc_feature (1145)..(1145): n is a, c, g, or t
  misc_feature (1147)..(1148): n is a, c, g, or t
  misc_feature (1150)..(1151): n is a, c, g, or t
  misc_feature (1153)..(1157): n is a, c, g, or t
  misc_feature (1160)..(1163): n is a, c, g, or t
  misc_feature (1165)..(1177): n is a, c, g, or t
  misc_feature (1179)..(1180): n is a, c, g, or t
  misc_feature (1182)..(1185): n is a, c, g, or t
  misc_feature (1187)..(1188): n is a, c, g, or t
  misc_feature (1190)..(1191): n is a, c, g, or t
  misc_feature (1193)..(1193): n is a, c, g, or t
  misc_feature (1196)..(1199): n is a, c, g, or t
  misc_feature (1201)..(1208): n is a, c, g, or t
  misc_feature (1210)..(1219): n is a, c, g, or t
  misc_feature (1222)..(1225): n is a, c, g, or t
  misc_feature (1227)..(1231): n is a, c, g, or t
  misc_feature (1233)..(1251): n is a, c, g, or t
  misc_feature (1253)..(1257): n is a, c, g, or t
  misc_feature (1259)..(1263): n is a, c, g, or t
  misc_feature (1265)..(1270): n is a, c, g, or t
  misc_feature (1272)..(1273): n is a, c, g, or t
  misc_feature (1275)..(1287): n is a, c, g, or t
  misc_feature (1289)..(1290): n is a, c, g, or t
  misc_feature (1292)..(1293): n is a, c, g, or t
  misc_feature (1295)..(1298): n is a, c, g, or t
  misc_feature (1300)..(1300): n is a, c, g, or t
  misc_feature (1302)..(1305): n is a, c, g, or t
  misc_feature (1307)..(1313): n is a, c, g, or t
  misc_feature (1317)..(1321): n is a, c, g, or t
  misc_feature (1323)..(1323): n is a, c, g, or t
  misc_feature (1325)..(1325): n is a, c, g, or t
  misc_feature (1327)..(1333): n is a, c, g, or t
  misc_feature (1336)..(1338): n is a, c, g, or t
  misc_feature (1340)..(1353): n is a, c, g, or t
  misc_feature (1355)..(1359): n is a, c, g, or t
  misc_feature (1361)..(1361): n is a, c, g, or t
  misc_feature (1363)..(1367): n is a, c, g, or t
nnntagagagaattactatgagaggatcgcatcaccatcaccatcacggatcctatttaggtgacactatagaatcgtcgacccacgcgtccgcccacgcgtccgccgagccggaggggggaaacggcgcccgccgcccgcccggagcccgcgagcaaccccagtcccccccacccgcgcgtggcggcgccggctccctagccaccgcggccccaccctcttccggcctcagctgtccgggctgccttcgcctccgcctgtggatgctgcgcctctccgaacgcaacatgaaggtgctccttgccgccgccctcatcgcggggtccgtcttcttcctgctgctgccgggaccttctgcggccgatgagaagaagaaggggcccaaagtcaccgtcaaggtgtattttgacctacgaattggagatgaagatgtaggccgggtgatctttggtctcttcggaaagactgttccaaaaacagtggataattttgtggccttagctacaggagagaaaggatttggctacaaaaacagcaaattccatcgtgtaatcaaggacttcatgatccagggcggagacttcaccaggggagatggcacaggaggaaagagcatctacggtgagcgcttccccgatgagaacttcaaactgaancactacgggcctggctgggtgagcatggccaacgcangcaaagacaccaacggctcccanttcttcatcacgacagtcaagacagcctggctanatggcaagcatgtggtgtttggcaaagttctananggcatgtangtggtgcnnaangtgnanancaccaanaaagacannccggganaaaacccctgaaggatgtgatnatcncaaactgcgnnaaanttnangntgaaaaanccntttgccattnccaaanantangnnacaggnaaattttttttttgaatnaacnttttgnnnangncctnnnnntncncanaangnntttnaatttaatgnccccngtgntggnnnnntgnnnaannnaaacnnttncantaaattnnnaannnnnnngaantnnnttttnanaaaantntctannannntnntnataaaaananngnnnnnttttttttttttnnanaannnannnnnnnnnnnnntnananntnnannnnnaannnntnnnnnnnnnnnnnanntnnnnanntnntnatnnnntnnnnnnnntnnnnnnnnnnatnnnnannnnntnnnnnnnnnnnnnnnnnnntnnnnnannnnnannnnnntnnannnnnnnnnnnnnannanntnnnnantnnnntnnnnnnnaatnnnnntntntnnnnnnnaannntnnnnnnnnnnnnnnannnnnantnnnnn

SEQ ID NO: 633 - DNA, 1310 bp, Homo Sapiens
  misc_feature (889)..(889): n is a, c, g, or t
  misc_feature (942)..(942): n is a, c, g, or t
  misc_feature (944)..(944): n is a, c, g, or t
  misc_feature (957)..(957): n is a, c, g, or t
  misc_feature (969)..(969): n is a, c, g, or t
  misc_feature (980)..(980): n is a, c, g, or t
  misc_feature (988)..(988): n is a, c, g, or t
  misc_feature (992)..(992): n is a, c, g, or t
  misc_feature (1025)..(1025): n is a, c, g, or t
  misc_feature (1033)..(1033): n is a, c, g, or t
  misc_feature (1055)..(1055): n is a, c, g, or t
  misc_feature (1066)..(1066): n is a, c, g, or t
  misc_feature (1101)..(1101): n is a, c, g, or t
  misc_feature (1108)..(1108): n is a, c, g, or t
  misc_feature (1120)..(1120): n is a, c, g, or t
  misc_feature (1122)..(1122): n is a, c, g, or t
  misc_feature (1125)..(1125): n is a, c, g, or t
  misc_feature (1128)..(1128): n is a, c, g, or t
  misc_feature (1134)..(1134): n is a, c, g, or t
  misc_feature (1146)..(1146): n is a, c, g, or t
  misc_feature (1151)..(1151): n is a, c, g, or t
  misc_feature (1159)..(1159): n is a, c, g, or t
  misc_feature (1166)..(1166): n is a, c, g, or t
  misc_feature (1172)..(1172): n is a, c, g, or t
  misc_feature (1177)..(1177): n is a, c, g, or t
  misc_feature (1179)..(1179): n is a, c, g, or t
  misc_feature (1184)..(1184): n is a, c, g, or t
  misc_feature (1191)..(1191): n is a, c, g, or t
  misc_feature (1195)..(1195): n is a, c, g, or t
  misc_feature (1199)..(1200): n is a, c, g, or t
  misc_feature (1211)..(1211): n is a, c, g, or t
  misc_feature (1214)..(1214): n is a, c, g, or t
  misc_feature (1217)..(1217): n is a, c, g, or t
  misc_feature (1237)..(1237): n is a, c, g, or t
  misc_feature (1247)..(1247): n is a, c, g, or t
  misc_feature (1257)..(1257): n is a, c, g, or t
  misc_feature (1261)..(1261): n is a, c, g, or t
  misc_feature (1269)..(1269): n is a, c, g, or t
  misc_feature (1277)..(1277): n is a, c, g, or t
  misc_feature (1281)..(1281): n is a, c, g, or t
  misc_feature (1286)..(1286): n is a, c, g, or t
  misc_feature (1292)..(1292): n is a, c, g, or t
  misc_feature (1303)..(1303): n is a, c, g, or t
  misc_feature (1309)..(1309): n is a, c, g, or t
tagagaaattactatgagaggatcgcatcaccatcaccatcacggatcctatttaggtgacactatagaatcgtcgacccacgcgtccgcccacgcgtccgatttggatgggaaacatgtggtgtttggccaagtaattaaaggaataggagtggcaaggatattggaaaatgtggaagtgaaaggtgaaaaacctgctaaattgtgcgttattgcagaatgtggagaattgaaggaaggagatgacgggggaatattcccaaaagatggctctggcgacagtcatccagatttccctgaggatgcggatatagatttaaaagatgtagataaaattttattaataacagaagacttaaaaaacattggaaatacttttttcaaatcccagaactgggagatggctattaaaaaatatgcagaagttttaagatacgtggacagttcaaaggctgttattgagacagcagatagagccaagctgcaacctatagctttaagctgtgtactgaatattggtgcttgtaaactgaagatgtcaaattggcagggagcaattgacagttgtttagaggctcttgaactagacccatcaaataccaaagcattgtaccgcagagctcaaggatggcaaggattaaaagaatatgatcaagcattggctgatcttaagaaagctcaggggatagcaccagaagataaagctatccaggcagaattgctgaaagtcaaacaaaagataaaggcacagaaagataaagagaaggcagtatatgcaaaaatgtttgcttagaaaggattcagttttgcttattgtgtgttgattgtataaatgcaataagaaaatgtaaaggtttttgtctatgaatatgatccctaatgtgtttcntttgacaccttagttccttactgtttacagtttaggagtactgatagggggtncntgcttaataaacntgtcccaatacngtaagtaaagnggttttgnttgnttcctttgaaatggagtcttgctctgtcccccnggctggangcgggggcgcaatcccggctcnctgcatccccnggccccccggggtccaagcaattcccccgcccccncctcccnagtagctgggantnacnggncccggncccccccccccncctantttttgtntttttanaaaaanggggntnccccnaattggncccncccnntgggcctgaanccntgnccctgggacccccccccccntggccccccnaagggggggnaaanggggggancccccccncccnccccnaaaaangttttttaaangggttng

SEQ ID NO: 634 - DNA, 1336 bp, Homo Sapiens
  misc_feature (1)..(1): n is a, c, g, or t
  misc_feature (949)..(978): n is a, c, g, or t
  misc_feature (1004)..(1004): n is a, c, g, or t
  misc_feature (1011)..(1011): n is a, c, g, or t
  misc_feature (1018)..(1018): n is a, c, g, or t
  misc_feature (1022)..(1022): n is a, c, g, or t
  misc_feature (1024)..(1024): n is a, c, g, or t
  misc_feature (1028)..(1029): n is a, c, g, or t
  misc_feature (1035)..(1035): n is a, c, g, or t
  misc_feature (1048)..(1048): n is a, c, g, or t
  misc_feature (1062)..(1063): n is a, c, g, or t
  misc_feature (1084)..(1084): n is a, c, g, or t
  misc_feature (1089)..(1089): n is a, c, g, or t
  misc_feature (1108)..(1108): n is a, c, g, or t
  misc_feature (1112)..(1112): n is a, c, g, or t
  misc_feature (1114)..(1114): n is a, c, g, or t
  misc_feature (1124)..(1125): n is a, c, g, or t
  misc_feature (1133)..(1133): n is a, c, g, or t
  misc_feature (1136)..(1136): n is a, c, g, or t
  misc_feature (1149)..(1149): n is a, c, g, or t
  misc_feature (1154)..(1154): n is a, c, g, or t
  misc_feature (1156)..(1157): n is a, c, g, or t
  misc_feature (1159)..(1159): n is a, c, g, or t
  misc_feature (1162)..(1162): n is a, c, g, or t
  misc_feature (1172)..(1173): n is a, c, g, or t
  misc_feature (1182)..(1182): n is a, c, g, or t
  misc_feature (1185)..(1185): n is a, c, g, or t
  misc_feature (1191)..(1191): n is a, c, g, or t
  misc_feature (1195)..(1195): n is a, c, g, or t
  misc_feature (1213)..(1213): n is a, c, g, or t
  misc_feature (1220)..(1221): n is a, c, g, or t
  misc_feature (1228)..(1228): n is a, c, g, or t
  misc_feature (1230)..(1230): n is a, c, g, or t
  misc_feature (1235)..(1235): n is a, c, g, or t
  misc_feature (1241)..(1241): n is a, c, g, or t
  misc_feature (1243)..(1243): n is a, c, g, or t
  misc_feature (1246)..(1246): n is a, c, g, or t
  misc_feature (1249)..(1251): n is a, c, g, or t
  misc_feature (1265)..(1265): n is a, c, g, or t
  misc_feature (1268)..(1268): n is a, c, g, or t
  misc_feature (1274)..(1275): n is a, c, g, or t
  misc_feature (1278)..(1279): n is a, c, g, or t
  misc_feature (1281)..(1283): n is a, c, g, or t
  misc_feature (1291)..(1291): n is a, c, g, or t
  misc_feature (1294)..(1295): n is a, c, g, or t
  misc_feature (1301)..(1301): n is a, c, g, or t
  misc_feature (1303)..(1306): n is a, c, g, or t
  misc_feature (1309)..(1309): n is a, c, g, or t
  misc_feature (1311)..(1312): n is a, c, g, or t
  misc_feature (1314)..(1314): n is a, c, g, or t
  misc_feature (1320)..(1320): n is a, c, g, or t
  misc_feature (1322)..(1322): n is a, c, g, or t
  misc_feature (1334)..(1334): n is a, c, g, or t
naatagagaaattactatgagaggatcgcatcaccatcaccatcacggatcctatttaggtgacactatagaatcgtcgacccacgcgtccgaaaagatcttctgctgccacggaggcctgtccccggacctgcagtctatggagcagattcggcggatcatgcggcccacagatgtgcctgaccagggcctgctgtgtgacctgctgtggtctgaccctgacaaggacgtgcagggctggggcgagaacgaccgtggcgtctcttttacctttggagccgaggtggtggccaagttcctccacaagcacgacttggacctcatctgccgagcacaccaggtggtagaagacggctacgagttctttgccaagcggcagctggtgacacttttctcagctcccaactactgtggcgagtttgacaatgctggcgccatgatgagtgtggacgagaccctcatgtgctctttccagatcctcaagcccgccgacaagaacaaggggaagtacgggcagttcagtggcctgaaccctggaggccgacccatcaccccaccccgcaattccgccaaagccaagaaatagcccccgcacaccaccctgtgccccagatgatggattgattgtacagaaatcatgctgccatgctgggggggggtcaccccgacccctcaggcccacttgtcacggggaacatggagccttggtgtatttttcttttctttttttaatgaatcaatagcagcgtccagtcccccagggctgcttcctgcctgcacctgcggtgactgtgagcaggatcctggggccgaggctgcagctcagggcaacggcaggccaggtcgtgggtctccagccgtgcttggcctcagggctggcagccggatcctgggggcaacccatctggtctcttgaataaaaggtcaaagctggattctcaaaaaaaannnnnnnnnnnnnnnnnnnnnnnnnnnnnnaaaaagggcgggcccccccctaaaanggagtcnaataaancttnantaanntgaacnttggacctcctgntgaaaaaatcccannaatgaccctccaaaactcccntttgnaattttttcaaaaaacccnccgntngcccccgggnntttttttnttnggggaaaaatccnaaccnanntnggnaaaatttttnnggaacctanggnaacctnaaantgggaaaaaaaaatcccngggaatnnccccccntnaaaanttcccnanggnccnnnaaaaaaatttttgnggnttttcnnccnntnnncccagggnccnnaaaccnannnnttncnngnaaaaancncctttttaaaancc

SEQ ID NO: 635 - DNA, 1379 bp, Homo Sapiens
  misc_feature (923)..(923): n is a, c, g, or t
  misc_feature (965)..(965): n is a, c, g, or t
  misc_feature (968)..(968): n is a, c, g, or t
  misc_feature (973)..(973): n is a, c, g, or t
  misc_feature (994)..(994): n is a, c, g, or t
  misc_feature (1024)..(1024): n is a, c, g, or t
  misc_feature (1031)..(1031): n is a, c, g, or t
  misc_feature (1035)..(1035): n is a, c, g, or t
  misc_feature (1041)..(1041): n is a, c, g, or t
  misc_feature (1043)..(1043): n is a, c, g, or t
  misc_feature (1070)..(1070): n is a, c, g, or t
  misc_feature (1078)..(1078): n is a, c, g, or t
  misc_feature (1087)..(1087): n is a, c, g, or t
  misc_feature (1090)..(1090): n is a, c, g, or t
  misc_feature (1092)..(1092): n is a, c, g, or t
  misc_feature (1101)..(1101): n is a, c, g, or t
  misc_feature (1126)..(1126): n is a, c, g, or t
  misc_feature (1132)..(1132): n is a, c, g, or t
  misc_feature (1136)..(1136): n is a, c, g, or t
  misc_feature (1142)..(1142): n is a, c, g, or t
  misc_feature (1146)..(1146): n is a, c, g, or t
  misc_feature (1155)..(1155): n is a, c, g, or t
  misc_feature (1164)..(1164): n is a, c, g, or t
  misc_feature (1168)..(1168): n is a, c, g, or t
  misc_feature (1174)..(1174): n is a, c, g, or t
  misc_feature (1185)..(1185): n is a, c, g, or t
  misc_feature (1194)..(1194): n is a, c, g, or t
  misc_feature (1207)..(1207): n is a, c, g, or t
  misc_feature (1210)..(1210): n is a, c, g, or t
  misc_feature (1213)..(1213): n is a, c, g, or t
  misc_feature (1216)..(1217): n is a, c, g, or t
  misc_feature (1235)..(1237): n is a, c, g, or t
  misc_feature (1243)..(1243): n is a, c, g, or t
  misc_feature (1258)..(1259): n is a, c, g, or t
  misc_feature (1273)..(1273): n is a, c, g, or t
  misc_feature (1292)..(1292): n is a, c, g, or t
  misc_feature (1298)..(1298): n is a, c, g, or t
  misc_feature (1301)..(1301): n is a, c, g, or t
  misc_feature (1304)..(1306): n is a, c, g, or t
  misc_feature (1310)..(1316): n is a, c, g, or t
  misc_feature (1332)..(1334): n is a, c, g, or t
  misc_feature (1339)..(1341): n is a, c, g, or t
  misc_feature (1346)..(1346): n is a, c, g, or t
  misc_feature (1348)..(1348): n is a, c, g, or t
  misc_feature (1351)..(1351): n is a, c, g, or t
  misc_feature (1354)..(1354): n is a, c, g, or t
  misc_feature (1357)..(1358): n is a, c, g, or t
  misc_feature (1360)..(1360): n is a, c, g, or t
  misc_feature (1363)..(1365): n is a, c, g, or t
  misc_feature (1375)..(1376): n is a, c, g, or t
  misc_feature (1378)..(1379): n is a, c, g, or t
tagagaaattactatgagaggatcgcatcaccatcaccatcacggatcctatttaggtgacactatagaatcgtcgacccacgcgtccggcccggcaatggcggcctcgacggcctcgcaccggcccatcaaggggatcttgaagaacaagacctctacgacttcctctatggtggcgtcggccgaacagccccgcgggaatgtcgacgaggagctgagcaaaaaatcccagaagtgggatgaaatgaacatcttggcgacgtatcatccagcagacaaagactatggtttaatgaaaatagatgaaccaagcactccttaccatagtatgatgggggatgatgaagatgcctgtagtgacaccgaggccactgaagccatggcgccagacatcttagccaggaaaaaaaaagcgacaatttgaaatgaaaaggaagcttcactacaatgaaggactcaatatcaaactagccagacaattaatttcaaaagacctacatgatgatgatgaagatgaagaaatgttagagactgcagatggagaaagcatgaatacggaagaatcaaatcaaggatctactccaagtgaccaacagcaaaacaaattacgaagttcatagacgagatttgttcaacactgcaattgtttgttagatgtaaaccctgtgactatagtacgttgcttcttgttcttcacaattcatgacttaagtaccaaaatgcataccagttattatatattgccaagaattaaatgataaacttagagactgattagactgaaaatgcctaatcgatatatatattcttgtgcctagtactttaccacaaatacagtgtaatatcatcagtccaaaactgcattacttttgtaaaacactggttaatttgtataagatattatagagctttttatgctttanaagttaaacaatatctttggggggggaactaatttattttcntcncttgnaatgtggtagctcttacaaangtttattgatttgattttttttaaaaatcnaaagccnattngaccancnggatatttagactgataaatatttagnctgaaaantatttaacnctngncctccactngattggccggttaattgaaaaaatnaaaaanttcnggtgcntttncgaaccacnattttaaantccngggganttcttgggttnaaaggaagnatgaattttttcnccnaantanntttttccccaaaaaattnnnggtaantttcccaggccgccnntttttttttggggntttttttttttttttaagntttggnccnggnnnactnnnnnnnttttttaaaaaaaatnnnggggnnnccccncnttnaanggnnanccnnntttttccctnncnn

SEQ ID NO: 636 - DNA, 1200 bp, Homo Sapiens
  misc_feature (932)..(932): n is a, c, g, or t
  misc_feature (935)..(935): n is a, c, g, or t
  misc_feature (965)..(965): n is a, c, g, or t
  misc_feature (1001)..(1001): n is a, c, g, or t
  misc_feature (1013)..(1013): n is a, c, g, or t
  misc_feature (1031)..(1031): n is a, c, g, or t
  misc_feature (1034)..(1034): n is a, c, g, or t
  misc_feature (1041)..(1041): n is a, c, g, or t
  misc_feature (1054)..(1054): n is a, c, g, or t
  misc_feature (1060)..(1061): n is a, c, g, or t
  misc_feature (1071)..(1071): n is a, c, g, or t
  misc_feature (1077)..(1077): n is a, c, g, or t
  misc_feature (1087)..(1087): n is a, c, g, or t
  misc_feature (1127)..(1128): n is a, c, g, or t
  misc_feature (1131)..(1131): n is a, c, g, or t
  misc_feature (1146)..(1146): n is a, c, g, or t
  misc_feature (1156)..(1156): n is a, c, g, or t
  misc_feature (1158)..(1158): n is a, c, g, or t
  misc_feature (1160)..(1160): n is a, c, g, or t
  misc_feature (1166)..(1166): n is a, c, g, or t
  misc_feature (1169)..(1169): n is a, c, g, or t
  misc_feature (1171)..(1171): n is a, c, g, or t
  misc_feature (1176)..(1177): n is a, c, g, or t
  misc_feature (1181)..(1181): n is a, c, g, or t
  misc_feature (1185)..(1185): n is a, c, g, or t
  misc_feature (1187)..(1187): n is a, c, g, or t
  misc_feature (1189)..(1189): n is a, c, g, or t
  misc_feature (1195)..(1195): n is a, c, g, or t
catagagaaattactatgagaggatcgcatcaccatcaccatcacggatcctatttaggtgacactatagaatcgtcgacccacgcgtccggccgggcgcctcttgcaatggagacggtcatttcttcagatagctccccagctgtggaaaatgagcatcctcaagagaccccagaatccaacaatagcgtgtatacttccttcatgaagtctcatcgctgctatgacctgattcccacaagctccaaattggttgtatttgatacgtccctgcaggtgaagaaagctttttttgctttggtgactaacggtgtacgagctgcccctttatgggatagtaagaagcaaagttttgtgggcatgctgaccatcactgatttcatcaatatcctgcaccgctactataaatcagccttggtacagatctatgagctagaagaacacaagatagaaacttggagagaggtgtatctccaggactcctttaaaccgcttgtctgcatttctcctaatgccagcttgtttgatgctgtctcttcattaattcggaacaagatccacaggctgccagttattgacccagaatcaggcaatactttgtacatcctcacccacaagcgcattctgaagttcctcaaattgtttatcactgagttccccaagccagagttcatgtccaagtctctggaagagctacagattggcacctatgccaatattgctatggttcgcactaccacccccgtctatgtggctctggggatttttgtacagcatcgagtctcagccctgccagtggtggatgaaaaggggcgtgtggtggacatctactccaagtttgatgttatcaatctggcagcagaaaagacctacaacaacctaaatgtatctgtgactaagccttgcaacatcgatcacattactttgagggngtnctcaagtgctacctgcatgaaactctgganaccatcatcaacaggctagtggaaaccaaaggttcnccgacttgtaangggggaagaaaatgatgnggncaaaggnaattgtatcctgnctgaanntcctgcaggncctggngctcaaaggnggaaaaaaaaaaccctgaactggggaaagggtccagcacnnccngggaaatgcccaccncctgccggcngnanccttgnggnanccaannaaantgangnantggganctgtt

SEQ ID NO: 637 - DNA, 1200 bp, Homo Sapiens
  misc_feature (2)..(2): n is a, c, g, or t
  misc_feature (836)..(836): n is a, c, g, or t
  misc_feature (863)..(863): n is a, c, g, or t
  misc_feature (929)..(929): n is a, c, g, or t
  misc_feature (979)..(979): n is a, c, g, or t
  misc_feature (982)..(982): n is a, c, g, or t
  misc_feature (995)..(995): n is a, c, g, or t
  misc_feature (1000)..(1000): n is a, c, g, or t
  misc_feature (1008)..(1008): n is a, c, g, or t
  misc_feature (1010)..(1010): n is a, c, g, or t
  misc_feature (1015)..(1015): n is a, c, g, or t
  misc_feature (1024)..(1024): n is a, c, g, or t
  misc_feature (1053)..(1053): n is a, c, g, or t
  misc_feature (1058)..(1058): n is a, c, g, or t
  misc_feature (1067)..(1068): n is a, c, g, or t
  misc_feature (1071)..(1071): n is a, c, g, or t
  misc_feature (1073)..(1073): n is a, c, g, or t
  misc_feature (1080)..(1081): n is a, c, g, or t
  misc_feature (1091)..(1091): n is a, c, g, or t
  misc_feature (1096)..(1096): n is a, c, g, or t
  misc_feature (1099)..(1099): n is a, c, g, or t
  misc_feature (1106)..(1106): n is a, c, g, or t
  misc_feature (1119)..(1119): n is a, c, g, or t
  misc_feature (1125)..(1125): n is a, c, g, or t
  misc_feature (1137)..(1137): n is a, c, g, or t
  misc_feature (1142)..(1142): n is a, c, g, or t
  misc_feature (1146)..(1146): n is a, c, g, or t
  misc_feature (1153)..(1153): n is a, c, g, or t
  misc_feature (1156)..(1156): n is a, c, g, or t
  misc_feature (1169)..(1169): n is a, c, g, or t
  misc_feature (1183)..(1184): n is a, c, g, or t
  misc_feature (1192)..(1192): n is a, c, g, or t
  misc_feature (1197)..(1197): n is a, c, g, or t
  misc_feature (1199)..(1200): n is a, c, g, or t
antagagaaattactatgaagaggatcgcatcaccatcaccatcacggatcctatttaggtgacactatagaatcgtcgacccacgcgtccgcccacgcgtccggctacacgcagttgcagtacatcggcgagggcgcgtacggcatggtcagctcggcctatgaccacgtgcgcaagactcgcgtggccatcaagaagatcagccccttcgaacatcagacctactgccagcgcacgctccgggagatccagatcctgctgcgcttccgccatgagaatgtcatcggcatccgagacattctgcgggcgtccaccctggaagccatgagagatgtctacattgtgcaggacctgatggagactgacctgtacaagttgctgaaaagccagcagctgagcaatgaccatatctgctacttcctctaccagatcctgcggggcctcaagtacatccactccgccaacgtgctccaccgagatctaaagccctccaacctgctcatcaacaccacctgcgaccttaagatttgtgatttcggcctggcccggattgccgatcctgagcatgaccacaccggcttcctgacggagtatgtggctacgcgctggtaccgggccccagagatcatgctgaactccaagggctataccaagtccatcgacatctggtctgtgggctgcattctggctgagatgctctctaaccggcccatcttccctggcaagcactacctggatcagctcaaccacattctgggcatcctgggctccccatcccaggaggacctgaattgtatcatcaacatgaaggcccgaaactacctacagtctctgnccctccaagaccaaggtggcttgggcnaagcttttccccaagtcaaactccaagcccttgacctgctggaccggatgttaacctttaaccccnaataaacggatcaagtggaagaagcgctggctcacccctacctggagcantantatgacccgacgnatganccagtggncnaagancccttcccnttcccctggagctggaagacctactaagnacggntgaaggagnnatntncagaaanncccgcttccncccgnagngtggagnccctaaccaaaanaatttntgcccctgggcnggaantggnttttggntgncctttcccccaantgtaaaaaaggaanntgggcccncccgnann

SEQ ID NO: 638 - DNA, 1347 bp, Homo Sapiens
  misc_feature (90)..(90): n is a, c, g, or t
  misc_feature (100)..(100): n is a, c, g, or t
  misc_feature (125)..(125): n is a, c, g, or t
  misc_feature (143)..(143): n is a, c, g, or t
  misc_feature (148)..(148): n is a, c, g, or t
  misc_feature (155)..(156): n is a, c, g, or t
  misc_feature (195)..(195): n is a, c, g, or t
  misc_feature (230)..(230): n is a, c, g, or t
  misc_feature (235)..(236): n is a, c, g, or t
  misc_feature (240)..(240): n is a, c, g, or t
  misc_feature (257)..(257): n is a, c, g, or t
  misc_feature (259)..(260): n is a, c, g, or t
  misc_feature (266)..(266): n is a, c, g, or t
  misc_feature (271)..(271): n is a, c, g, or t
  misc_feature (274)..(274): n is a, c, g, or t
  misc_feature (276)..(276): n is a, c, g, or t
  misc_feature (291)..(291): n is a, c, g, or t
  misc_feature (355)..(355): n is a, c, g, or t
  misc_feature (357)..(357): n is a, c, g, or t
  misc_feature (360)..(360): n is a, c, g, or t
  misc_feature (363)..(365): n is a, c, g, or t
  misc_feature (370)..(370): n is a, c, g, or t
  misc_feature (378)..(378): n is a, c, g, or t
  misc_feature (380)..(380): n is a, c, g, or t
  misc_feature (385)..(386): n is a, c, g, or t
  misc_feature (395)..(396): n is a, c, g, or t
  misc_feature (399)..(400): n is a, c, g, or t
  misc_feature (407)..(407): n is a, c, g, or t
  misc_feature (422)..(422): n is a, c, g, or t
  misc_feature (426)..(426): n is a, c, g, or t
  misc_feature (440)..(440): n is a, c, g, or t
  misc_feature (461)..(461): n is a, c, g, or t
  misc_feature (469)..(469): n is a, c, g, or t
  misc_feature (472)..(472): n is a, c, g, or t
  misc_feature (486)..(486): n is a, c, g, or t
  misc_feature (492)..(492): n is a, c, g, or t
  misc_feature (495)..(495): n is a, c, g, or t
  misc_feature (503)..(503): n is a, c, g, or t
  misc_feature (551)..(551): n is a, c, g, or t
  misc_feature (559)..(559): n is a, c, g, or t
  misc_feature (568)..(568): n is a, c, g, or t
  misc_feature (572)..(572): n is a, c, g, or t
  misc_feature (586)..(586): n is a, c, g, or t
  misc_feature (594)..(594): n is a, c, g, or t
  misc_feature (609)..(609): n is a, c, g, or t
  misc_feature (661)..(661): n is a, c, g, or t
  misc_feature (665)..(665): n is a, c, g, or t
  misc_feature (698)..(698): n is a, c, g, or t
  misc_feature (703)..(703): n is a, c, g, or t
  misc_feature (706)..(706): n is a, c, g, or t
  misc_feature (709)..(710): n is a, c, g, or t
  misc_feature (722)..(722): n is a, c, g, or t
  misc_feature (729)..(730): n is a, c, g, or t
  misc_feature (736)..(736): n is a, c, g, or t
  misc_feature (749)..(749): n is a, c, g, or t
  misc_feature (758)..(758): n is a, c, g, or t
  misc_feature (768)..(768): n is a, c, g, or t
  misc_feature (781)..(781): n is a, c, g, or t
  misc_feature (813)..(813): n is a, c, g, or t
  misc_feature (818)..(819): n is a, c, g, or t
  misc_feature (835)..(835): n is a, c, g, or t
  misc_feature (840)..(840): n is a, c, g, or t
  misc_feature (848)..(849): n is a, c, g, or t
  misc_feature (862)..(862): n is a, c, g, or t
  misc_feature (874)..(874): n is a, c, g, or t
  misc_feature (882)..(882): n is a, c, g, or t
  misc_feature (902)..(902): n is a, c, g, or t
  misc_feature (908)..(909): n is a, c, g, or t
  misc_feature (918)..(918): n is a, c, g, or t
  misc_feature (921)..(921): n is a, c, g, or t
  misc_feature (928)..(928): n is a, c, g, or t
  misc_feature (942)..(942): n is a, c, g, or t
  misc_feature (965)..(965): n is a, c, g, or t
  misc_feature (974)..(974): n is a, c, g, or t
  misc_feature (976)..(976): n is a, c, g, or t
  misc_feature (981)..(982): n is a, c, g, or t
  misc_feature (990)..(990): n is a, c, g, or t
  misc_feature (996)..(996): n is a, c, g, or t
  misc_feature (1009)..(1009): n is a, c, g, or t
  misc_feature (1014)..(1015): n is a, c, g, or t
  misc_feature (1020)..(1020): n is a, c, g, or t
  misc_feature (1027)..(1027): n is a, c, g, or t
  misc_feature (1036)..(1036): n is a, c, g, or t
  misc_feature (1040)..(1040): n is a, c, g, or t
  misc_feature (1063)..(1063): n is a, c, g, or t
  misc_feature (1070)..(1070): n is a, c, g, or t
  misc_feature (1078)..(1078): n is a, c, g, or t
  misc_feature (1085)..(1085): n is a, c, g, or t
  misc_feature (1092)..(1092): n is a, c, g, or t
  misc_feature (1096)..(1096): n is a, c, g, or t
  misc_feature (1102)..(1109): n is a, c, g, or t
  misc_feature (1112)..(1112): n is a, c, g, or t
  misc_feature (1116)..(1116): n is a, c, g, or t
  misc_feature (1118)..(1118): n is a, c, g, or t
  misc_feature (1120)..(1125): n is a, c, g, or t
  misc_feature (1128)..(1129): n is a, c, g, or t
  misc_feature (1131)..(1131): n is a, c, g, or t
  misc_feature (1137)..(1137): n is a, c, g, or t
  misc_feature (1141)..(1141): n is a, c, g, or t
  misc_feature (1143)..(1143): n is a, c, g, or t
  misc_feature (1146)..(1147): n is a, c, g, or t
  misc_feature (1156)..(1157): n is a, c, g, or t
  misc_feature (1161)..(1161): n is a, c, g, or t
  misc_feature (1163)..(1163): n is a, c, g, or t
  misc_feature (1178)..(1180): n is a, c, g, or t
  misc_feature (1185)..(1185): n is a, c, g, or t
  misc_feature (1188)..(1191): n is a, c, g, or t
  misc_feature (1197)..(1197): n is a, c, g, or t
  misc_feature (1201)..(1201): n is a, c, g, or t
  misc_feature (1210)..(1213): n is a, c, g, or t
  misc_feature (1216)..(1216): n is a, c, g, or t
  misc_feature (1218)..(1219): n is a, c, g, or t
  misc_feature (1221)..(1221): n is a, c, g, or t
  misc_feature (1223)..(1224): n is a, c, g, or t
  misc_feature (1230)..(1230): n is a, c, g, or t
  misc_feature (1232)..(1232): n is a, c, g, or t
  misc_feature (1236)..(1237): n is a, c, g, or t
  misc_feature (1254)..(1255): n is a, c, g, or t
  misc_feature (1258)..(1259): n is a, c, g, or t
  misc_feature (1262)..(1262): n is a, c, g, or t
  misc_feature (1265)..(1266): n is a, c, g, or t
  misc_feature (1278)..(1278): n is a, c, g, or t
  misc_feature (1285)..(1285): n is a, c, g, or t
  misc_feature (1296)..(1297): n is a, c, g, or t
  misc_feature (1300)..(1300): n is a, c, g, or t
  misc_feature (1311)..(1311): n is a, c, g, or t
  misc_feature (1321)..(1323): n is a, c, g, or t
  misc_feature (1327)..(1327): n is a, c, g, or t
  misc_feature (1330)..(1331): n is a, c, g, or t
  misc_feature (1333)..(1334): n is a, c, g, or t
  misc_feature (1336)..(1336): n is a, c, g, or t
  misc_feature (1340)..(1340): n is a, c, g, or t
agagaaattaactatgagaggatcgcatcaccatcaccatcacggatcctatttaggtgacactatagaatcgtcgacccacgcgtccgntcctcctggncctgtagcccagcccactggcccgnaaccacaatcatgagggntctanctctggnnctgtaccccagcctgcctgcccaccccctgggcctgcancccacccaattggccctcctgggcccatccctgtncccgnnccancacaaattgccacctcnannagcctnctggntgncnagtcacttgtgccancccctgggctgcctggctccagcagcccaggagttttgccttacttcccacctggcctgcagancnaanacnnnagganagcccctnantcttnnatgtcacanncanntgatgtnaaccttgtgacccancatntatctaagtcacangtgagaggaccccctgccccntgtgttcncangcacaccaaagggnaatggnganggctacgntgttggctttgacgtgttaggaattcttaaaccattctttcaaaatgnaacgtggngtgatgggngcanaggatggccaattngattaaanctctctctcagcctnacagcttgctgactgactcgaaggccatgacatgaaccctgccgatattgantccntgcagcgagagatccatatggactccccaatgntgctnganganntgcctgacctcnaggaacnntgaggnccccagactgtgncttgctgcnacaatagacntagttcaaggatncatgaatagcattttcaaaggctttagcccanggaanncaacaggtgaggatcngcttnaataattnntgcaggtttcatntaaaaacccacnttttgagncataagaaaaacaacctganccaacnntttaaactnggncaggatntgtttaaaccccanctcccccctgaaaaatccttttncaaaaatananttttnnttattaanaagggnatttaataaaaanggtcnnttttngccaaanaaaaagaangccntgtggaaaaaaaaaaggtttccntttctgncaaactgnaaaaaanaaatttntttnaaaaannnnnnnnttnaaancngnnnnnnttnngngggggncgcntnccnnaaagggaanntttnanaaaaatttttattannntaaanttnnnncctccnggtnaaaaaaaannnnaangnncntnnaaaccncntttnnaatttttttaaaaaccnnaannaanccnngggggttttttnattgggnaaaaacaaaanncantttggggaaantttttggagnnnaaanaanncnnantttnaaaaaaa

SEQ ID NO: 639 - DNA, 1393 bp, Homo Sapiens
  misc_feature (1)..(2): n is a, c, g, or t
  misc_feature (5)..(13): n is a, c, g, or t
  misc_feature (33)..(33): n is a, c, g, or t
  misc_feature (843)..(843): n is a, c, g, or t
  misc_feature (884)..(884): n is a, c, g, or t
  misc_feature (911)..(911): n is a, c, g, or t
  misc_feature (927)..(927): n is a, c, g, or t
  misc_feature (976)..(976): n is a, c, g, or t
  misc_feature (985)..(985): n is a, c, g, or t
  misc_feature (1005)..(1005): n is a, c, g, or t
  misc_feature (1038)..(1038): n is a, c, g, or t
  misc_feature (1059)..(1059): n is a, c, g, or t
  misc_feature (1068)..(1068): n is a, c, g, or t
  misc_feature (1070)..(1070): n is a, c, g, or t
  misc_feature (1074)..(1074): n is a, c, g, or t
  misc_feature (1088)..(1088): n is a, c, g, or t
  misc_feature (1099)..(1099): n is a, c, g, or t
  misc_feature (1119)..(1119): n is a, c, g, or t
  misc_feature (1149)..(1149): n is a, c, g, or t
  misc_feature (1155)..(1155): n is a, c, g, or t
  misc_feature (1167)..(1167): n is a, c, g, or t
  misc_feature (1174)..(1175): n is a, c, g, or t
  misc_feature (1188)..(1188): n is a, c, g, or t
  misc_feature (1190)..(1190): n is a, c, g, or t
  misc_feature (1194)..(1194): n is a, c, g, or t
  misc_feature (1201)..(1201): n is a, c, g, or t
  misc_feature (1216)..(1216): n is a, c, g, or t
  misc_feature (1220)..(1221): n is a, c, g, or t
  misc_feature (1224)..(1224): n is a, c, g, or t
  misc_feature (1238)..(1238): n is a, c, g, or t
  misc_feature (1242)..(1242): n is a, c, g, or t
  misc_feature (1252)..(1252): n is a, c, g, or t
  misc_feature (1256)..(1256): n is a, c, g, or t
  misc_feature (1260)..(1260): n is a, c, g, or t
  misc_feature (1262)..(1263): n is a, c, g, or t
  misc_feature (1265)..(1265): n is a, c, g, or t
  misc_feature (1277)..(1277): n is a, c, g, or t
  misc_feature (1282)..(1282): n is a, c, g, or t
  misc_feature (1290)..(1290): n is a, c, g, or t
  misc_feature (1304)..(1304): n is a, c, g, or t
  misc_feature (1308)..(1308): n is a, c, g, or t
  misc_feature (1311)..(1311): n is a, c, g, or t
  misc_feature (1319)..(1319): n is a, c, g, or t
  misc_feature (1323)..(1323): n is a, c, g, or t
  misc_feature (1334)..(1334): n is a, c, g, or t
  misc_feature (1337)..(1337): n is a, c, g, or t
  misc_feature (1341)..(1341): n is a, c, g, or t
  misc_feature (1345)..(1345): n is a, c, g, or t
  misc_feature (1356)..(1356): n is a, c, g, or t
  misc_feature (1362)..(1362): n is a, c, g, or t
  misc_feature (1367)..(1367): n is a, c, g, or t
  misc_feature (1369)..(1369): n is a, c, g, or t
  misc_feature (1381)..(1381): n is a, c, g, or t
  misc_feature (1391)..(1393): n is a, c, g, or t
nnttnnnnnnnnnaaatagaggaaaattaaccnatggagagggatcgcatcaccatcaccattcacggatcctatttaggtgacactatagaatcgtcgacccacgcgtccgcgccaatcttcgctctgaggtgctgtctcaccggtgagacctggaagcgggcgagtctcgtgctgtgtcggacctgcagcccctggccttccgccaccatggagtacctcatcggtatccaaggccccgactatgttcttgtcgcctccgaccgggtggccgccagcaatattgtccagatgaaggacgatcatgacaagatgtttaagatgagtgaaaagatattactcctgtgtgttggagaggctggagacactgtacagtttgcagaatatattcagaaaaacgtgcaactttataagatgcgaaatggatatgaattgtctcccacggcagcagctaacttcacacgccgaaacctggctgactgtcttcggagtcggaccccatatcatgtgaacctcctcctggctggctatgatgagcatgaagggccagcgctgtattacatggactacctggcagccttggccaaggccccttttgcagcccacggctatggtgccttcctgactctcagtatcctcgaccgatactacacaccgactatctcacgtgagagggcagtggaactccttaggaaatgtctggaggagctccagaaacgcttcatcctgaatctgccaaccttcagtgttcgaatcattgacaaaaatggcatccatgacctggataacatttccttccccaaacagggctcctaacatcatgtcctccctcccacttgccanggaacttttttttgatgggctcctttatttttttctactcnttttcaggcgcactcttgataaatggnttaattcaaaataaanggtgactatggaatataattgaaaaaaaaaaaaaaaaaaaaggggcggnccgctcccntaaagtgagtcgaattaaancttaaattaactgaacttggaactcctgttganaaaatccagtaaatgaccccnaaaattccntntggnaatttttcaaaaanctcggttgccnccgggggtttttttattggngaaaaacccagcttactttggcaaaatttncggganctaaggaacctnaaatggnnaaaaaaaatcctngnaatnacccccngttgaaaatcccaanggcnntcnaaaaaaaatttggngganttcagcccgntggnccangnncnaaaaccaacccntccantggaattnagcccttttttaanaccnaanaaaaaaancccnattttttccgnccntttntccnttttccccccnaaaaanccccncngaatttttgaanaaaaaggggnnn

SEQ ID NO: 640 - DNA, 1404 bp, Homo Sapiens
  misc_feature (1)..(1): n is a, c, g, or t
  misc_feature (897)..(897): n is a, c, g, or t
  misc_feature (916)..(916): n is a, c, g, or t
  misc_feature (953)..(953): n is a, c, g, or t
  misc_feature (961)..(961): n is a, c, g, or t
  misc_feature (1028)..(1028): n is a, c, g, or t
  misc_feature (1033)..(1033): n is a, c, g, or t
  misc_feature (1041)..(1041): n is a, c, g, or t
  misc_feature (1049)..(1049): n is a, c, g, or t
  misc_feature (1068)..(1069): n is a, c, g, or t
  misc_feature (1087)..(1087): n is a, c, g, or t
  misc_feature (1099)..(1099): n is a, c, g, or t
  misc_feature (1107)..(1107): n is a, c, g, or t
  misc_feature (1111)..(1111): n is a, c, g, or t
  misc_feature (1121)..(1121): n is a, c, g, or t
  misc_feature (1135)..(1135): n is a, c, g, or t
  misc_feature (1146)..(1147): n is a, c, g, or t
  misc_feature (1161)..(1161): n is a, c, g, or t
  misc_feature (1163)..(1163): n is a, c, g, or t
  misc_feature (1165)..(1167): n is a, c, g, or t
  misc_feature (1184)..(1184): n is a, c, g, or t
  misc_feature (1188)..(1188): n is a, c, g, or t
  misc_feature (1212)..(1212): n is a, c, g, or t
  misc_feature (1215)..(1216): n is a, c, g, or t
  misc_feature (1226)..(1226): n is a, c, g, or t
  misc_feature (1247)..(1247): n is a, c, g, or t
  misc_feature (1250)..(1251): n is a, c, g, or t
  misc_feature (1259)..(1259): n is a, c, g, or t
  misc_feature (1266)..(1266): n is a, c, g, or t
  misc_feature (1273)..(1274): n is a, c, g, or t
  misc_feature (1278)..(1278): n is a, c, g, or t
  misc_feature (1280)..(1280): n is a, c, g, or t
  misc_feature (1287)..(1287): n is a, c, g, or t
  misc_feature (1299)..(1300): n is a, c, g, or t
  misc_feature (1303)..(1304): n is a, c, g, or t
  misc_feature (1306)..(1306): n is a, c, g, or t
  misc_feature (1315)..(1315): n is a, c, g, or t
  misc_feature (1334)..(1334): n is a, c, g, or t
  misc_feature (1336)..(1338): n is a, c, g, or t
  misc_feature (1341)..(1341): n is a, c, g, or t
  misc_feature (1344)..(1347): n is a, c, g, or t
  misc_feature (1349)..(1350): n is a, c, g, or t
  misc_feature (1353)..(1353): n is a, c, g, or t
  misc_feature (1360)..(1360): n is a, c, g, or t
  misc_feature (1362)..(1363): n is a, c, g, or t
  misc_feature (1366)..(1366): n is a, c, g, or t
  misc_feature (1370)..(1371): n is a, c, g, or t
  misc_feature (1387)..(1387): n is a, c, g, or t
  misc_feature (1400)..(1400): n is a, c, g, or t
ntagagaaattactatgagaggatcgcatcaccatcaccatcacggatcctatttaggtgacactatagaatcgtcgacccacgcgtccgcttccggcagcggcagctcaagtggccaaggcaagatgggtcaaagtcagagtggtggtcatggtcctggaggtggcaagaaggatgacaaggacaagaaaaagaaatatgaacctcctgtaccaactagagtggggaaaaagaagaagaaaacaaagggaccagatgctgccagcaaactgccactggtgacacctcacactcagtgccggttaaaattactgaagttagagagaattaaagactatcttctcatggaggaagaattcattagaaatcaggaacaaatgaaaccattagaagaaaagcaagaggaggaaagatcaaaagtggatgatctgagggggaccccgatgtcagtaggaaccttggaagagattattgatgacaatcatgccatcgtgtctacatctgtgggctcagaacactacgtcagcattctttcatttgtagacaaggatctgctggaacctggctgctcggtcctgctcaaccacaaggtgcatgccgtgataggggtgctgatggatgacacggatcccctggtcacagtgatgaaggtagaaaaggccccccaggagacctatgcagatattggggggttggacaaccaaattcaggaaattaaggaatctgtggagcttcctctcacccatcctgaatattatgaagagatgggtataaagcctcctaagggggtcattctctatggtccacctggcacaggtaaaaccttgttagccaaagcagtagcaaacccaaacctcagccactttcttgagagtggttggctctgaacttattcanaagtacctaggtgatgggnccccaactcgtacgggaattgttccgagttgctgaanaacatgcnccgtccatcgtgtttattgatgaaattgaccccttgggacaaaaaatatgactccaattctgggggngaaanaaaattcnccgaacantgttggaactgctgaaccnnttggatggatttgattcnaggggaaatggnaagtttcntggnccccaacccnaataaaaactttgnatccccccttnntcaacccagccccntnannngaaaattgaattccccngccngaaaaaaaaacaaaaaacccctcnttnnaattcccccnaccggaagaccccggctgaanatnnaccccggnaaacctnttctggnnaaananacccccnggggggaactannggnntnttaaaaaangggtttgggcctttaaaancnnnaangannnncnnggnacccccnannccnaaanntttttttaaaaagggncccccgggggttnttta

SEQ ID NO: 641 - DNA, 1357 bp, Homo Sapiens
  misc_feature (1)..(3): n is a, c, g, or t
  misc_feature (5)..(6): n is a, c, g, or t
  misc_feature (8)..(10): n is a, c, g, or t
  misc_feature (12)..(12): n is a, c, g, or t
  misc_feature (14)..(14): n is a, c, g, or t
  misc_feature (16)..(16): n is a, c, g, or t
  misc_feature (18)..(18): n is a, c, g, or t
  misc_feature (20)..(20): n is a, c, g, or t
  misc_feature (23)..(23): n is a, c, g, or t
  misc_feature (425)..(425): n is a, c, g, or t
  misc_feature (430)..(430): n is a, c, g, or t
  misc_feature (537)..(537): n is a, c, g, or t
  misc_feature (543)..(543): n is a, c, g, or t
  misc_feature (550)..(550): n is a, c, g, or t
  misc_feature (577)..(577): n is a, c, g, or t
  misc_feature (590)..(590): n is a, c, g, or t
  misc_feature (595)..(595): n is a, c, g, or t
  misc_feature (606)..(606): n is a, c, g, or t
  misc_feature (612)..(612): n is a, c, g, or t
  misc_feature (623)..(623): n is a, c, g, or t
  misc_feature (636)..(636): n is a, c, g, or t
  misc_feature (642)..(642): n is a, c, g, or t
  misc_feature (648)..(648): n is a, c, g, or t
  misc_feature (658)..(659): n is a, c, g, or t
  misc_feature (695)..(695): n is a, c, g, or t
  misc_feature (702)..(702): n is a, c, g, or t
  misc_feature (705)..(705): n is a, c, g, or t
  misc_feature (707)..(707): n is a, c, g, or t
  misc_feature (711)..(711): n is a, c, g, or t
  misc_feature (713)..(713): n is a, c, g, or t
  misc_feature (722)..(722): n is a, c, g, or t
  misc_feature (724)..(724): n is a, c, g, or t
  misc_feature (730)..(730): n is a, c, g, or t
  misc_feature (743)..(743): n is a, c, g, or t
  misc_feature (746)..(747): n is a, c, g, or t
  misc_feature (749)..(749): n is a, c, g, or t
  misc_feature (753)..(753): n is a, c, g, or t
  misc_feature (764)..(764): n is a, c, g, or t
  misc_feature (766)..(767): n is a, c, g, or t
  misc_feature (772)..(773): n is a, c, g, or t
  misc_feature (777)..(777): n is a, c, g, or t
  misc_feature (785)..(786): n is a, c, g, or t
  misc_feature (790)..(791): n is a, c, g, or t
  misc_feature (794)..(796): n is a, c, g, or t
  misc_feature (800)..(800): n is a, c, g, or t
  misc_feature (802)..(802): n is a, c, g, or t
  misc_feature (806)..(806): n is a, c, g, or t
  misc_feature (808)..(808): n is a, c, g, or t
  misc_feature (821)..(821): n is a, c, g, or t
  misc_feature (826)..(827): n is a, c, g, or t
  misc_feature (833)..(833): n is a, c, g, or t
  misc_feature (839)..(840): n is a, c, g, or t
  misc_feature (842)..(842): n is a, c, g, or t
  misc_feature (844)..(844): n is a, c, g, or t
  misc_feature (846)..(846): n is a, c, g, or t
  misc_feature (849)..(849): n is a, c, g, or t
  misc_feature (852)..(854): n is a, c, g, or t
  misc_feature (859)..(859): n is a, c, g, or t
  misc_feature (863)..(863): n is a, c, g, or t
  misc_feature (866)..(867): n is a, c, g, or t
  misc_feature (869)..(869): n is a, c, g, or t
  misc_feature (872)..(872): n is a, c, g, or t
  misc_feature (874)..(874): n is a, c, g, or t
  misc_feature (878)..(878): n is a, c, g, or t
  misc_feature (883)..(883): n is a, c, g, or t
  misc_feature (885)..(885): n is a, c, g, or t
  misc_feature (887)..(887): n is a, c, g, or t
  misc_feature (889)..(890): n is a, c, g, or t
  misc_feature (894)..(894): n is a, c, g, or t
  misc_feature (900)..(900): n is a, c, g, or t
  misc_feature (904)..(905): n is a, c, g, or t
  misc_feature (907)..(908): n is a, c, g, or t
  misc_feature (913)..(913): n is a, c, g, or t
  misc_feature (916)..(916): n is a, c, g, or t
  misc_feature (919)..(919): n is a, c, g, or t
  misc_feature (923)..(924): n is a, c, g, or t
  misc_feature (931)..(932): n is a, c, g, or t
  misc_feature (935)..(935): n is a, c, g, or t
  misc_feature (942)..(944): n is a, c, g, or t
  misc_feature (946)..(947): n is a, c, g, or t
  misc_feature (949)..(949): n is a, c, g, or t
  misc_feature (955)..(955): n is a, c, g, or t
  misc_feature (957)..(961): n is a, c, g, or t
  misc_feature (963)..(966): n is a, c, g, or t
  misc_feature (972)..(975): n is a, c, g, or t
  misc_feature (979)..(980): n is a, c, g, or t
  misc_feature (984)..(984): n is a, c, g, or t
  misc_feature (987)..(987): n is a, c, g, or t
  misc_feature (992)..(992): n is a, c, g, or t
  misc_feature (995)..(1000): n is a, c, g, or t
  misc_feature (1006)..(1006): n is a, c, g, or t
  misc_feature (1012)..(1013): n is a, c, g, or t
  misc_feature (1016)..(1017): n is a, c, g, or t
  misc_feature (1025)..(1025): n is a, c, g, or t
  misc_feature (1027)..(1027): n is a, c, g, or t
  misc_feature (1029)..(1029): n is a, c, g, or t
  misc_feature (1032)..(1032): n is a, c, g, or t
  misc_feature (1034)..(1039): n is a, c, g, or t
  misc_feature (1043)..(1043): n is a, c, g, or t
  misc_feature (1047)..(1048): n is a, c, g, or t
  misc_feature (1056)..(1057): n is a, c, g, or t
  misc_feature (1060)..(1062): n is a, c, g, or t
  misc_feature (1066)..(1066): n is a, c, g, or t
  misc_feature (1068)..(1068): n is a, c, g, or t
  misc_feature (1073)..(1073): n is a, c, g, or t
  misc_feature (1076)..(1076): n is a, c, g, or t
  misc_feature (1078)..(1084): n is a, c, g, or t
  misc_feature (1087)..(1087): n is a, c, g, or t
  misc_feature (1089)..(1091): n is a, c, g, or t
  misc_feature (1093)..(1093): n is a, c, g, or t
  misc_feature (1095)..(1097): n is a, c, g, or t
  misc_feature (1099)..(1103): n is a, c, g, or t
  misc_feature (1111)..(1111): n is a, c, g, or t
  misc_feature (1114)..(1117): n is a, c, g, or t
  misc_feature (1119)..(1122): n is a, c, g, or t
  misc_feature (1126)..(1126): n is a, c, g, or t
  misc_feature (1129)..(1132): n is a, c, g, or t
  misc_feature (1134)..(1135): n is a, c, g, or t
  misc_feature (1138)..(1139): n is a, c, g, or t
  misc_feature (1142)..(1144): n is a, c, g, or t
  misc_feature (1146)..(1146): n is a, c, g, or t
  misc_feature (1149)..(1150): n is a, c, g, or t
  misc_feature (1154)..(1158): n is a, c, g, or t
  misc_feature (1160)..(1163): n is a, c, g, or t
  misc_feature (1166)..(1166): n is a, c, g, or t
  misc_feature (1168)..(1173): n is a, c, g, or t
  misc_feature (1179)..(1179): n is a, c, g, or t
  misc_feature (1181)..(1181): n is a, c, g, or t
  misc_feature (1185)..(1186): n is a, c, g, or t
  misc_feature (1190)..(1190): n is a, c, g, or t
  misc_feature (1194)..(1195): n is a, c, g, or t
  misc_feature (1197)..(1197): n is a, c, g, or t
  misc_feature (1199)..(1201): n is a, c, g, or t
  misc_feature (1203)..(1204): n is a, c, g, or t
  misc_feature (1206)..(1207): n is a, c, g, or t
  misc_feature (1209)..(1209): n is a, c, g, or t
  misc_feature (1211)..(1212): n is a, c, g, or t
  misc_feature (1214)..(1215): n is a, c, g, or t
  misc_feature (1217)..(1219): n is a, c, g, or t
  misc_feature (1222)..(1222): n is a, c, g, or t
  misc_feature (1224)..(1229): n is a, c, g, or t
  misc_feature (1231)..(1231): n is a, c, g, or t
  misc_feature (1234)..(1234): n is a, c, g, or t
  misc_feature (1236)..(1236): n is a, c, g, or t
  misc_feature (1238)..(1241): n is a, c, g, or t
  misc_feature (1243)..(1246): n is a, c, g, or t
  misc_feature (1249)..(1251): n is a, c, g, or t
  misc_feature (1253)..(1253): n is a, c, g, or t
  misc_feature (1255)..(1255): n is a, c, g, or t
  misc_feature (1257)..(1257): n is a, c, g, or t
  misc_feature (1261)..(1266): n is a, c, g, or t
  misc_feature (1269)..(1269): n is a, c, g, or t
  misc_feature (1271)..(1273): n is a, c, g, or t
  misc_feature (1275)..(1275): n is a, c, g, or t
  misc_feature (1277)..(1278): n is a, c, g, or t
  misc_feature (1280)..(1284): n is a, c, g, or t
  misc_feature (1286)..(1289): n is a, c, g, or t
  misc_feature (1291)..(1291): n is a, c, g, or t
  misc_feature (1295)..(1298): n is a, c, g, or t
  misc_feature (1302)..(1306): n is a, c, g, or t
  misc_feature (1308)..(1308): n is a, c, g, or t
  misc_feature (1311)..(1313): n is a, c, g, or t
  misc_feature (1316)..(1316): n is a, c, g, or t
  misc_feature (1318)..(1319): n is a, c, g, or t
  misc_feature (1321)..(1321): n is a, c, g, or t
  misc_feature (1328)..(1334): n is a, c, g, or t
  misc_feature (1338)..(1339): n is a, c, g, or t
  misc_feature (1341)..(1341): n is a, c, g, or t
  misc_feature (1343)..(1345): n is a, c, g, or t
  misc_feature (1347)..(1348): n is a, c, g, or t
  misc_feature (1350)..(1354): n is a, c, g, or t
nnnanngnnnanantncnanganaggatcgcatcaccatcaccatcacggatcctatttaggtgacactatagaatcgtcgacccacgcgtccggctactgctgccggtgtttgcgtgtggcagggagccaggcctggcgagcggggtgtgtcgcgatgccggagctggcagtgcagaaggtggtggtccaccccctggtgctgctcagtgtggtggatcatttcaaccgaatcggcaaggttggaaaccagaagcgtgttgttggtgtgcttttggggtcatggcaaaagaaagtacttgatgtatcgaacagttttgcagttccttttgatgaagatgacaaagacgattctgtatggtttttagaccatgattatttggaaaacatgtatggaatgtttaagaaagtcaatgccagggaaanaatanttggctggtaccacacaggccctaaactacacaagaatgacattgccatcaacgaactcatgaaaagatactgtcctaattccgtattggtcatcattgatgtgaancccaangacctanggctgcctacaaaaacgtacatttcantggaaaaaatccntgatnatggaactccnacctcnaaaacattttnaacacctgaccantgaaantggacnaaagaaactnnaagaaaattggaatttgaacacttgttaccaaaaantccaaanacncnaacngnggggcactntnttcccnccgaataacaaancanntncatnggtttttaaangnntgaanntccnaaccttcnngaanntannnaacntncctngnaaaaaaatccccncaagnnaacttncccttnnancnanccnaannntctancaanttnnanganancttnaaacntntncnnaaanattcancctnncnnaaaantcnttnaagnnctttttnnctnaaaaaannnannancaaaangnnnnnannnntaattnnnncccnntaanacntttcntgnnnnnnccttcnaaaccnnttnnaaaaaaanantnccnannnnnnaaanaaannaaaaaaannacnnncaananaaaanaantnnnnnnnttnannnanannnannnnnaaattaanaannnntnnnnaatnttnnnntnnaanntannnanacnnaaannnnnannnntcntnnnnnncttttnanatannaaanaaannantnnnannannanannannannnaanannnnnntncantnannnntnnnnaannntnancnaaannnnnntancnnnantnntnnnnnannnnanaaannnnaaannnnnanatnnnatnanntnttcttannnnnnnaaannancnnntnntnnnnntaa

SEQ ID NO: 642 - DNA, 1369 bp, Homo Sapiens
  misc_feature (1)..(1): n is a, c, g, or t
  misc_feature (856)..(856): n is a, c, g, or t
  misc_feature (926)..(926): n is a, c, g, or t
  misc_feature (958)..(958): n is a, c, g, or t
  misc_feature (962)..(962): n is a, c, g, or t
  misc_feature (967)..(967): n is a, c, g, or t
  misc_feature (970)..(970): n is a, c, g, or t
  misc_feature (974)..(974): n is a, c, g, or t
  misc_feature (1020)..(1020): n is a, c, g, or t
  misc_feature (1023)..(1024): n is a, c, g, or t
  misc_feature (1026)..(1026): n is a, c, g, or t
  misc_feature (1050)..(1051): n is a, c, g, or t
  misc_feature (1053)..(1053): n is a, c, g, or t
  misc_feature (1072)..(1072): n is a, c, g, or t
  misc_feature (1080)..(1080): n is a, c, g, or t
  misc_feature (1084)..(1084): n is a, c, g, or t
  misc_feature (1094)..(1094): n is a, c, g, or t
  misc_feature (1106)..(1106): n is a, c, g, or t
  misc_feature (1108)..(1108): n is a, c, g, or t
  misc_feature (1111)..(1127): n is a, c, g, or t
  misc_feature (1130)..(1151): n is a, c, g, or t
  misc_feature (1153)..(1159): n is a, c, g, or t
  misc_feature (1164)..(1164): n is a, c, g, or t
  misc_feature (1175)..(1175): n is a, c, g, or t
  misc_feature (1177)..(1177): n is a, c, g, or t
  misc_feature (1179)..(1179): n is a, c, g, or t
  misc_feature (1181)..(1181): n is a, c, g, or t
  misc_feature (1187)..(1187): n is a, c, g, or t
  misc_feature (1190)..(1190): n is a, c, g, or t
  misc_feature (1197)..(1197): n is a, c, g, or t
  misc_feature (1200)..(1201): n is a, c, g, or t
  misc_feature (1204)..(1204): n is a, c, g, or t
  misc_feature (1206)..(1206): n is a, c, g, or t
  misc_feature (1208)..(1208): n is a, c, g, or t
  misc_feature (1211)..(1211): n is a, c, g, or t
  misc_feature (1216)..(1216): n is a, c, g, or t
  misc_feature (1222)..(1222): n is a, c, g, or t
  misc_feature (1225)..(1225): n is a, c, g, or t
  misc_feature (1230)..(1230): n is a, c, g, or t
  misc_feature (1237)..(1238): n is a, c, g, or t
  misc_feature (1245)..(1245): n is a, c, g, or t
  misc_feature (1255)..(1255): n is a, c, g, or t
  misc_feature (1270)..(1270): n is a, c, g, or t
  misc_feature (1280)..(1280): n is a, c, g, or t
  misc_feature (1291)..(1291): n is a, c, g, or t
  misc_feature (1301)..(1301): n is a, c, g, or t
  misc_feature (1307)..(1307): n is a, c, g, or t
  misc_feature (1309)..(1310): n is a, c, g, or t
  misc_feature (1312)..(1312): n is a, c, g, or t
  misc_feature (1314)..(1315): n is a, c, g, or t
  misc_feature (1317)..(1317): n is a, c, g, or t
  misc_feature (1324)..(1324): n is a, c, g, or t
  misc_feature (1330)..(1330): n is a, c, g, or t
  misc_feature (1340)..(1340): n is a, c, g, or t
  misc_feature (1346)..(1346): n is a, c, g, or t
  misc_feature (1348)..(1348): n is a, c, g, or t
  misc_feature (1359)..(1360): n is a, c, g, or t
  misc_feature (1365)..(1365): n is a, c, g, or t
  misc_feature (1367)..(1367): n is a, c, g, or t
  misc_feature (1369)..(1369): n is a, c, g, or t
naattagagaaattactatgagaggatcgcatcaccatcaccatcacggatcctatttaggtgacactatagaatcgtcgacccacgcgtccgaagcgaggcagagcggaggctcctcgcaggccggcgtcgtgactgtcagcgacgtccaggagctgatgcggcgcaaggaggagatagaagcgcagatcaaggccaactatgacgtgctggaaagccaaaaaggcattgggatgaacgagccgctggtggactgtgagggctacccccggtcagacgtggacctgtaccaagtccgcaccgccaggcacaacatcatatgcctgcagaatgatcacaaggcagtgatgaagcaggtggaggaggccctgcaccagctgcacgctcgcgacaaggagaagcaggcccgggacatggctgaggcccacaaagaggccatgagccgcaaactgggtcagagtgagagccagggccctccacgggccttcgccaaagtgaacagcatcagccccggctccccagccagcatcgcgggtctgcaagtggatgatgagattgtggagttcggctctgtgaacacccagaacttccagtcactgcataacattggcagtgtggtgcagcacagtgaggggaagcccctgaatgtgacagtgatccgcaggggggaaaaacaccagcttagacttgttccaacacgctgggcaggaaaaggactgctgggctgcaacattattcctctgcaaagatgattgtccctggggaacagtaacaggaaagcatcttcccttgccctggacttgggtctagggatttccaacttgtcttctctccctgaagcataaggatctggaanaagcttgtaacctgaacttctgtgtggtggcagtactgtggcccaccagtgtaatctccctggattaagncattcttaaaaacttaggcttggcctctttcnaaanttagnccncggnccctaaataagaaattccctggattgtgggccaagtgggccggaanttnntnctggcaggtacttgggggtgaatnntnattattatttttaaaaaanagttttanagtnctgtttttgnaaaaaaaaaaananaannnnnnnnnnnnnnnnnttnnnnnnnnnnnnnnnnnnnnnntnnnnnnnggggnccccccccctnangngncccatnaanctttttnacnnaantngnccnccttnaaaaanccnaaaancccccanncccttgnttttttaaanctttgttgccccggntttttttggnaaacccctttngggatttttnggactngnntnanngnaaaaaancttttncccctttatntccggncntaaaaattttnnttttntntn

SEQ ID NO: 643 - DNA, 1200 bp, Homo Sapiens
  misc_feature (899)..(899): n is a, c, g, or t
  misc_feature (919)..(919): n is a, c, g, or t
  misc_feature (934)..(934): n is a, c, g, or t
  misc_feature (938)..(938): n is a, c, g, or t
  misc_feature (944)..(944): n is a, c, g, or t
  misc_feature (949)..(949): n is a, c, g, or t
  misc_feature (951)..(951): n is a, c, g, or t
  misc_feature (970)..(970): n is a, c, g, or t
  misc_feature (979)..(979): n is a, c, g, or t
  misc_feature (983)..(983): n is a, c, g, or t
  misc_feature (1015)..(1015): n is a, c, g, or t
  misc_feature (1077)..(1077): n is a, c, g, or t
  misc_feature (1087)..(1088): n is a, c, g, or t
  misc_feature (1094)..(1094): n is a, c, g, or t
  misc_feature (1097)..(1097): n is a, c, g, or t
  misc_feature (1099)..(1099): n is a, c, g, or t
  misc_feature (1107)..(1107): n is a, c, g, or t
  misc_feature (1113)..(1113): n is a, c, g, or t
  misc_feature (1115)..(1115): n is a, c, g, or t
  misc_feature (1117)..(1117): n is a, c, g, or t
  misc_feature (1120)..(1120): n is a, c, g, or t
  misc_feature (1130)..(1130): n is a, c, g, or t
  misc_feature (1132)..(1132): n is a, c, g, or t
  misc_feature (1139)..(1139): n is a, c, g, or t
  misc_feature (1143)..(1144): n is a, c, g, or t
  misc_feature (1150)..(1150): n is a, c, g, or t
  misc_feature (1157)..(1157): n is a, c, g, or t
  misc_feature (1185)..(1186): n is a, c, g, or t
  misc_feature (1189)..(1189): n is a, c, g, or t
  misc_feature (1194)..(1194): n is a, c, g, or t
  misc_feature (1200)..(1200): n is a, c, g, or t
gagaaattactatgagaggatcgcatcaccatcaccatcacggatcctatttaggtgacactatagaatcgtcgacccacgcgtccggtcagggcgtaattgagtcaaaggcaggatcaggttccccgccttccagtccaaaaatcccgccaagagagccccagagcagaggaaaatccaaagtggagagaggggaagaaagagaccagtgagtcatccgtccagaaggcggggagagcagcagcggcccaagcaggagctgcagcgagccgggtacctggactcagcggtagcaacctcgccccttgcaacaaaggcagactgagcgccagagaggacgtttccaactcaaaaatgcaggctcaacagtaccagcagcagcgtcgaaaatttgcagctgccttcttggcattcattttcatactggcagctgtggatactgctgaagcagggaagaaagagaaaccagaaaaaaaaagtgaagaagtctgactgtggagaatggcagtggagtgtgtgtgtgcccaccagtggagactgtgggctgggcacacgggagggcactcggactggagctgagtgcaagcaaaccatgaagacccagagatgtaagatcccctgcaactggaagaagcaatttggcgcggagtgcaaataccagttccaggcctggggagaatgtgacctgaacacagccctgaagaccagaactggaagtctgaagcgagccctgcacaatgccgaatgccagaagactgtcaccatctccaagccctgtggcaaactgaccaagcccaaacctcaagcagaatctaagaagaagaaaaaggaaggcaagaaacaggagaagatgctggattaaaagatgtcacctgtggaacataaaaaggacatcagcnaacaggatcagttaactatngcatttatatgtacngtangctttngtatncnaaaattatctatagctaantaccccatnagcnaaaaccaaaagaaaagaaattttttgtagtancgttttttaatgtatactatagtaccgtagggcttttaataaggactgtaatcttttttggnagttgacttnnagtacntgnanaatgatanacattngngntanttttttgaantntgggacntttnnattaanttttttnaatttttttgggccccattttaatgttnnganttgtnaacccn

SEQ ID NO: 644 - DNA, 1200 bp, Homo Sapiens
  misc_feature (5)..(5): n is a, c, g, or t
  misc_feature (20)..(20): n is a, c, g, or t
  misc_feature (25)..(25): n is a, c, g, or t
  misc_feature (40)..(40): n is a, c, g, or t
  misc_feature (48)..(48): n is a, c, g, or t
  misc_feature (51)..(51): n is a, c, g, or t
  misc_feature (55)..(56): n is a, c, g, or t
  misc_feature (62)..(62): n is a, c, g, or t
  misc_feature (65)..(65): n is a, c, g, or t
  misc_feature (67)..(67): n is a, c, g, or t
  misc_feature (72)..(72): n is a, c, g, or t
  misc_feature (74)..(74): n is a, c, g, or t
  misc_feature (82)..(82): n is a, c, g, or t
  misc_feature (86)..(86): n is a, c, g, or t
  misc_feature (98)..(98): n is a, c, g, or t
  misc_feature (100)..(101): n is a, c, g, or t
  misc_feature (103)..(103): n is a, c, g, or t
  misc_feature (116)..(118): n is a, c, g, or t
  misc_feature (141)..(141): n is a, c, g, or t
  misc_feature (144)..(144): n is a, c, g, or t
  misc_feature (167)..(167): n is a, c, g, or t
  misc_feature (172)..(172): n is a, c, g, or t
  misc_feature (185)..(185): n is a, c, g, or t
  misc_feature (188)..(188): n is a, c, g, or t
  misc_feature (194)..(194): n is a, c, g, or t
  misc_feature (198)..(198): n is a, c, g, or t
  misc_feature (202)..(202): n is a, c, g, or t
  misc_feature (206)..(206): n is a, c, g, or t
  misc_feature (211)..(211): n is a, c, g, or t
  misc_feature (215)..(215): n is a, c, g, or t
  misc_feature (217)..(217): n is a, c, g, or t
  misc_feature (233)..(233): n is a, c, g, or t
  misc_feature (236)..(236): n is a, c, g, or t
  misc_feature (238)..(239): n is a, c, g, or t
  misc_feature (246)..(246): n is a, c, g, or t
  misc_feature (262)..(263): n is a, c, g, or t
  misc_feature (283)..(283): n is a, c, g, or t
  misc_feature (303)..(303): n is a, c, g, or t
  misc_feature (327)..(327): n is a, c, g, or t
  misc_feature (329)..(331): n is a, c, g, or t
  misc_feature (333)..(333): n is a, c, g, or t
  misc_feature (340)..(340): n is a, c, g, or t
  misc_feature (343)..(343): n is a, c, g, or t
  misc_feature (347)..(347): n is a, c, g, or t
  misc_feature (350)..(351): n is a, c, g, or t
  misc_feature (353)..(353): n is a, c, g, or t
  misc_feature (356)..(356): n is a, c, g, or t
  misc_feature (358)..(358): n is a, c, g, or t
  misc_feature (360)..(360): n is a, c, g, or t
  misc_feature (369)..(369): n is a, c, g, or t
  misc_feature (371)..(372): n is a, c, g, or t
  misc_feature (379)..(379): n is a, c, g, or t
  misc_feature (389)..(390): n is a, c, g, or t
  misc_feature (396)..(396): n is a, c, g, or t
  misc_feature (405)..(405): n is a, c, g, or t
  misc_feature (413)..(414): n is a, c, g, or t
  misc_feature (426)..(427): n is a, c, g, or t
  misc_feature (438)..(438): n is a, c, g, or t
  misc_feature (453)..(453): n is a, c, g, or t
  misc_feature (462)..(462): n is a, c, g, or t
  misc_feature (467)..(468): n is a, c, g, or t
  misc_feature (470)..(470): n is a, c, g, or t
  misc_feature (476)..(476): n is a, c, g, or t
  misc_feature (478)..(478): n is a, c, g, or t
  misc_feature (481)..(481): n is a, c, g, or t
  misc_feature (494)..(495): n is a, c, g, or t
  misc_feature (497)..(497): n is a, c, g, or t
  misc_feature (500)..(500): n is a, c, g, or t
  misc_feature (508)..(508): n is a, c, g, or t
  misc_feature (510)..(510): n is a, c, g, or t
  misc_feature (517)..(517): n is a, c, g, or t
  misc_feature (523)..(523): n is a, c, g, or t
  misc_feature (526)..(526): n is a, c, g, or t
  misc_feature (530)..(531): n is a, c, g, or t
  misc_feature (535)..(535): n is a, c, g, or t
  misc_feature (537)..(537): n is a, c, g, or t
  misc_feature (539)..(539): n is a, c, g, or t
  misc_feature (544)..(544): n is a, c, g, or t
  misc_feature (568)..(568): n is a, c, g, or t
  misc_feature (579)..(579): n is a, c, g, or t
  misc_feature (595)..(595): n is a, c, g, or t
  misc_feature (603)..(603): n is a, c, g, or t
  misc_feature (609)..(609): n is a, c, g, or t
  misc_feature (611)..(611): n is a, c, g, or t
  misc_feature (621)..(621): n is a, c, g, or t
  misc_feature (623)..(623): n is a, c, g, or t
  misc_feature (625)..(625): n is a, c, g, or t
  misc_feature (629)..(629): n is a, c, g, or t
  misc_feature (637)..(638): n is a, c, g, or t
  misc_feature (640)..(640): n is a, c, g, or t
  misc_feature (651)..(652): n is a, c, g, or t
  misc_feature (660)..(660): n is a, c, g, or t
  misc_feature (662)..(662): n is a, c, g, or t
  misc_feature (665)..(665): n is a, c, g, or t
  misc_feature (667)..(667): n is a, c, g, or t
  misc_feature (669)..(669): n is a, c, g, or t
  misc_feature (679)..(679): n is a, c, g, or t
  misc_feature (701)..(701): n is a, c, g, or t
  misc_feature (709)..(709): n is a, c, g, or t
  misc_feature (721)..(721): n is a, c, g, or t
  misc_feature (729)..(729): n is a, c, g, or t
  misc_feature (731)..(731): n is a, c, g, or t
  misc_feature (742)..(743): n is a, c, g, or t
  misc_feature (751)..(751): n is a, c, g, or t
  misc_feature (764)..(764): n is a, c, g, or t
  misc_feature (766)..(766): n is a, c, g, or t
  misc_feature (785)..(785): n is a, c, g, or t
  misc_feature (790)..(790): n is a, c, g, or t
  misc_feature (795)..(795): n is a, c, g, or t
  misc_feature (800)..(800): n is a, c, g, or t
  misc_feature (804)..(804): n is a, c, g, or t
  misc_feature (806)..(806): n is a, c, g, or t
  misc_feature (808)..(808): n is a, c, g, or t
  misc_feature (815)..(815): n is a, c, g, or t
  misc_feature (821)..(821): n is a, c, g, or t
  misc_feature (827)..(827): n is a, c, g, or t
  misc_feature (829)..(829): n is a, c, g, or t
  misc_feature (831)..(831): n is a, c, g, or t
  misc_feature (838)..(838): n is a, c, g, or t
  misc_feature (844)..(844): n is a, c, g, or t
  misc_feature (852)..(852): n is a, c, g, or t
  misc_feature (862)..(862): n is a, c, g, or t
  misc_feature (871)..(871): n is a, c, g, or t
  misc_feature (877)..(877): n is a, c, g, or t
  misc_feature (880)..(880): n is a, c, g, or t
  misc_feature (887)..(888): n is a, c, g, or t
  misc_feature (891)..(892): n is a, c, g, or t
  misc_feature (896)..(896): n is a, c, g, or t
  misc_feature (907)..(908): n is a, c, g, or t
  misc_feature (910)..(911): n is a, c, g, or t
  misc_feature (918)..(919): n is a, c, g, or t
  misc_feature (924)..(924): n is a, c, g, or t
  misc_feature (927)..(927): n is a, c, g, or t
  misc_feature (936)..(936): n is a, c, g, or t
  misc_feature (941)..(941): n is a, c, g, or t
  misc_feature (950)..(950): n is a, c, g, or t
  misc_feature (955)..(956): n is a, c, g, or t
  misc_feature (962)..(963): n is a, c, g, or t
  misc_feature (975)..(977): n is a, c, g, or t
  misc_feature (981)..(981): n is a, c, g, or t
  misc_feature (985)..(985): n is a, c, g, or t
  misc_feature (989)..(989): n is a, c, g, or t
  misc_feature (992)..(992): n is a, c, g, or t
  misc_feature (994)..(994): n is a, c, g, or t
  misc_feature (1000)..(1000): n is a, c, g, or t
  misc_feature (1002)..(1002): n is a, c, g, or t
  misc_feature (1007)..(1007): n is a, c, g, or t
  misc_feature (1009)..(1009): n is a, c, g, or t
  misc_feature (1014)..(1014): n is a, c, g, or t
  misc_feature (1018)..(1018): n is a, c, g, or t
  misc_feature (1022)..(1024): n is a, c, g, or t
  misc_feature (1026)..(1026): n is a, c, g, or t
  misc_feature (1031)..(1031): n is a, c, g, or t
  misc_feature (1038)..(1038): n is a, c, g, or t
  misc_feature (1045)..(1048): n is a, c, g, or t
  misc_feature (1052)..(1052): n is a, c, g, or t
  misc_feature (1054)..(1054): n is a, c, g, or t
  misc_feature (1057)..(1058): n is a, c, g, or t
  misc_feature (1062)..(1062): n is a, c, g, or t
  misc_feature (1088)..(1088): n is a, c, g, or t
  misc_feature (1090)..(1090): n is a, c, g, or t
  misc_feature (1094)..(1094): n is a, c, g, or t
  misc_feature (1097)..(1097): n is a, c, g, or t
  misc_feature (1101)..(1101): n is a, c, g, or t
  misc_feature (1111)..(1111): n is a, c, g, or t
  misc_feature (1113)..(1113): n is a, c, g, or t
  misc_feature (1120)..(1122): n is a, c, g, or t
  misc_feature (1128)..(1129): n is a, c, g, or t
  misc_feature (1131)..(1131): n is a, c, g, or t
  misc_feature (1133)..(1133): n is a, c, g, or t
  misc_feature (1140)..(1140): n is a, c, g, or t
  misc_feature (1148)..(1148): n is a, c, g, or t
  misc_feature (1150)..(1152): n is a, c, g, or t
  misc_feature (1154)..(1154): n is a, c, g, or t
  misc_feature (1156)..(1156): n is a, c, g, or t
  misc_feature (1158)..(1158): n is a, c, g, or t
  misc_feature (1160)..(1161): n is a, c, g, or t
  misc_feature (1164)..(1164): n is a, c, g, or t
  misc_feature (1179)..(1179): n is a, c, g, or t
  misc_feature (1184)..(1184): n is a, c, g, or t
  misc_feature (1188)..(1189): n is a, c, g, or t
  misc_feature (1196)..(1196): n is a, c, g, or t
  misc_feature (1199)..(1199): n is a, c, g, or t
ccacngacctcccgggtatngattngggcgcatctatacncctggganganggannacctcnatntnaagcnantccctatnaagntcttgatgatgntnncnctacagtggagcnnntctaggatgtgccttgtgggaanatngggggcctcgtgggcgtggacangttcntggtgaagacggncanctgccncagncttnaagnatgcncacnanatgcgggtgatgcaanttngnnggtcagncctgttgtcagagtgnncgtgtgaggccaagaacccntgctgacctgccatgtctgncgtaggggctgagattgctggccnannncnatcccanggngaantgnntnatngngnagtctgganannacatcanctagggcgcnngcgagnttgacctgnagatctgnntgaaggatctgnntgaggacctcncctgcttccccatcntaaaatctnacccnntngtctcntnccnacgagacggtcanntnaanaatcgaangngctctgnctcatnaantccnncaanangntctancggcttgttcatgaaggcgcggcncttcctgcagngcctgggcgccccgtnggactcgnatcacncntaagaaccancntnttcnaattctcnnangacacctgggnntactgtcncnaancngncgactctccnctgataggtttttgggggcctngctgcctnccatgctctaanccataacnantttgatttctnncttccttnaataatttatttncncaacccgggagggcagtgntactngaccntcttnattncngnatttaanggggtncggccntngnaaggatnaaggcntcataagnattccccaanacttttttntttttnttnctcagtnncannttcngaatgtcccanntnntttcttnnttatnccntttaaaatnttatnttagtttgntgtgnncgttanntgcttttgcccnnngaangggnaaanggnancccctngncaaantnatctncttncttnnnangaatnctggganggtcccnnnnagcncntcnntggntagtttggccttgaatttaaaatttntnaaangtngttnaaaagttatntnttgaaannnctcttnnantntttttanatagggcngnnncncntncnntgntaaattatttattantgganttgnnctttttnctna

SEQ ID NO: 645 - DNA, 1200 bp, Homo Sapiens
  misc_feature (521)..(521): n is a, c, g, or t
  misc_feature (543)..(543): n is a, c, g, or t
  misc_feature (853)..(854): n is a, c, g, or t
  misc_feature (862)..(862): n is a, c, g, or t
  misc_feature (870)..(870): n is a, c, g, or t
  misc_feature (883)..(883): n is a, c, g, or t
  misc_feature (887)..(887): n is a, c, g, or t
  misc_feature (918)..(918): n is a, c, g, or t
  misc_feature (936)..(936): n is a, c, g, or t
  misc_feature (947)..(947): n is a, c, g, or t
  misc_feature (962)..(962): n is a, c, g, or t
  misc_feature (968)..(968): n is a, c, g, or t
  misc_feature (971)..(971): n is a, c, g, or t
  misc_feature (977)..(977): n is a, c, g, or t
  misc_feature (983)..(983): n is a, c, g, or t
  misc_feature (987)..(987): n is a, c, g, or t
  misc_feature (996)..(996): n is a, c, g, or t
  misc_feature (998)..(998): n is a, c, g, or t
  misc_feature (1003)..(1003): n is a, c, g, or t
  misc_feature (1010)..(1010): n is a, c, g, or t
  misc_feature (1056)..(1056): n is a, c, g, or t
  misc_feature (1062)..(1062): n is a, c, g, or t
  misc_feature (1064)..(1064): n is a, c, g, or t
  misc_feature (1069)..(1069): n is a, c, g, or t
  misc_feature (1086)..(1086): n is a, c, g, or t
  misc_feature (1089)..(1090): n is a, c, g, or t
  misc_feature (1093)..(1094): n is a, c, g, or t
  misc_feature (1099)..(1099): n is a, c, g, or t
  misc_feature (1107)..(1109): n is a, c, g, or t
  misc_feature (1112)..(1112): n is a, c, g, or t
  misc_feature (1114)..(1114): n is a, c, g, or t
  misc_feature (1137)..(1138): n is a, c, g, or t
  misc_feature (1144)..(1144): n is a, c, g, or t
  misc_feature (1152)..(1153): n is a, c, g, or t
  misc_feature (1161)..(1163): n is a, c, g, or t
  misc_feature (1169)..(1169): n is a, c, g, or t
  misc_feature (1175)..(1175): n is a, c, g, or t
  misc_feature (1178)..(1179): n is a, c, g, or t
  misc_feature (1184)..(1185): n is a, c, g, or t
  misc_feature (1189)..(1189): n is a, c, g, or t
  misc_feature (1193)..(1193): n is a, c, g, or t
  misc_feature (1197)..(1198): n is a, c, g, or t
aaatagagagaattactatgagaggatcgcatcaccatcaccatcacggatcctatttaggtgacactatagaatcgtcgacccacgcgtccgtgaaacgcaccgctcctgcgtgcgcccccacctggtccccggatgcccccaccacctggacagaggccacactgactgcccacccagctgtggcgggaggtgcagagcagagggctttagggagcagtgactgcggtcacccctttagttctctgggtgtagaccacaccacctcccactgggcaccccccaacacggtgtcctgccacccagcgcctggctccaggaaaacacgcttgccttccttcccggcagcttcgccactctccttatggactctgttctgtttgtacatggctgacggaaatctctttggtacaaccgaaaaaaaaaaaaaaaaaaaagggcggccgctccctatagtgagtcgtattaagcttaattagctgagcttggactcctgttgatagatccagtaatgacctcanaactccatctggatttgttcanaacgctcggttgccgccgggcgttttttattggtgagaatccaagctagcttggcgagattttcaggagctaaggaagctaaaatggagaaaaaaatcactggatataccaccgttgatatatcccaatggcatcgtaaagaacattttgaggcatttcagtcagttgctcaatgtacctataaccagaccgttcagctggatattacggcctttttaaagaccgtaaagaaaaataagcacaagttttatccggcctttattcacattcttgcccgcctgatgaatgctcatccggaatttcgtatggnnaatgaaanacggtganctggtgaaatggnatantgttcacccttgttacaccgttttccatgancaaactgaaacgttttcntcgctctggantgaataccacgaacnatttcnggnagtttnttacanatanattcccaanangtggngggttanggtgaaaacttggcctattttccctaaagggtttattgaaaaaatnttttcntntcaanccaatccctgggggaanttnnccnnttttnaatttaannnggncnaaatggaaaaattttttcccccnntttttnccatgggnnaaaattannnccaagnaaaaanggnnttaanncccntggnaatnnag

SEQ ID NO: 646 - DNA, 1194 bp, Homo Sapiens
  misc_feature (1)..(1): n is a, c, g, or t
  misc_feature (6)..(6): n is a, c, g, or t
  misc_feature (769)..(769): n is a, c, g, or t
  misc_feature (791)..(791): n is a, c, g, or t
  misc_feature (808)..(808): n is a, c, g, or t
  misc_feature (813)..(813): n is a, c, g, or t
  misc_feature (816)..(816): n is a, c, g, or t
  misc_feature (861)..(861): n is a, c, g, or t
  misc_feature (874)..(874): n is a, c, g, or t
  misc_feature (889)..(889): n is a, c, g, or t
  misc_feature (892)..(892): n is a, c, g, or t
  misc_feature (903)..(903): n is a, c, g, or t
  misc_feature (916)..(916): n is a, c, g, or t
  misc_feature (923)..(923): n is a, c, g, or t
  misc_feature (935)..(935): n is a, c, g, or t
  misc_feature (959)..(959): n is a, c, g, or t
  misc_feature (961)..(961): n is a, c, g, or t
  misc_feature (971)..(971): n is a, c, g, or t
  misc_feature (974)..(975): n is a, c, g, or t
  misc_feature (986)..(986): n is a, c, g, or t
  misc_feature (989)..(989): n is a, c, g, or t
  misc_feature (994)..(994): n is a, c, g, or t
  misc_feature (997)..(997): n is a, c, g, or t
  misc_feature (1003)..(1003): n is a, c, g, or t
  misc_feature (1015)..(1015): n is a, c, g, or t
  misc_feature (1020)..(1021): n is a, c, g, or t
  misc_feature (1023)..(1023): n is a, c, g, or t
  misc_feature (1031)..(1031): n is a, c, g, or t
  misc_feature (1034)..(1034): n is a, c, g, or t
  misc_feature (1038)..(1039): n is a, c, g, or t
  misc_feature (1068)..(1068): n is a, c, g, or t
  misc_feature (1073)..(1073): n is a, c, g, or t
  misc_feature (1075)..(1075): n is a, c, g, or t
  misc_feature (1086)..(1086): n is a, c, g, or t
  misc_feature (1092)..(1092): n is a, c, g, or t
  misc_feature (1094)..(1094): n is a, c, g, or t
  misc_feature (1101)..(1101): n is a, c, g, or t
  misc_feature (1107)..(1107): n is a, c, g, or t
  misc_feature (1110)..(1110): n is a, c, g, or t
  misc_feature (1117)..(1117): n is a, c, g, or t
  misc_feature (1120)..(1120): n is a, c, g, or t
  misc_feature (1124)..(1124): n is a, c, g, or t
  misc_feature (1133)..(1133): n is a, c, g, or t
  misc_feature (1135)..(1136): n is a, c, g, or t
  misc_feature (1150)..(1150): n is a, c, g, or t
  misc_feature (1155)..(1155): n is a, c, g, or t
  misc_feature (1159)..(1159): n is a, c, g, or t
  misc_feature (1161)..(1162): n is a, c, g, or t
  misc_feature (1171)..(1171): n is a, c, g, or t
  misc_feature (1175)..(1175): n is a, c, g, or t
naaatngagaaaattactatgagaggatcgcatcaccatcaccatcacggatcctatttaggtgacactatagaatcgtcgacccacgcgtccgtctatcccacctacgactacacacactgcctctgtgactccatcgagcacatcactcactcactctgcaccaaggaattccaggcccgacgctcttcctacttctggctttgcaatgcactggacgtctattgccctgtgcagtgggagtatggccgcctcaacctgcactatgctgttgtctctaagaggaagatcctccagcttgtagcaactggtgctgtgcgggactgggatgacccacggctctttacactcacggccctgcgacggcggggcttcccacctgaggccatcaacaacttctgtgcccgggtgggagtgactgtggcacaaaccacaatggagccacatcttctagaagcctgtgtgcgtgatgtgctgaatgacacagccccacgagccatggctgtgctggagtcactacgggtcatcatcaccaactttcctgctgccaagtccttggacatccaggtgcccaacttcccagctgatgagaccaaaggcttccatcaggttccctttgcacccattgtcttcattgagaggactgacttcaaggaggagccagagccaggatttaagcgcctggcttggggccagcctgtgggcctgaggcatacaggctacgtcattgagctgcagcatgttgtcaagggccccagtggttgtgtanagagtctggaggtgacctgcanacgggcagatgctgganagaanccnaaaggcctttattcactgggtgtcacagcctttgatgtgtgaggntcgcctctatgancgactattccagcanaanaacccctgaanatcctactgaggnggctggnggaatttttaantgacctgaaacctggcatcactanangtggggggangcnncattaatggantgntctgnggncctggnaaaaacctttcnaaaanntncaagtttngancggnnttggaaaatttctccgggggatccaaaanagccntncaggggaaaanttttgntnttttaanccgaanttntcccccntgnaagnaaaaacccnannaaaagggggggaanctggnaaananntgaaacctnaccnttttcccccttgggggggg

SEQ ID NO: 647 - DNA, 1350 bp, Homo Sapiens
  misc_feature (896)..(896): n is a, c, g, or t
  misc_feature (901)..(901): n is a, c, g, or t
  misc_feature (928)..(928): n is a, c, g, or t
  misc_feature (955)..(955): n is a, c, g, or t
  misc_feature (964)..(964): n is a, c, g, or t
  misc_feature (966)..(966): n is a, c, g, or t
  misc_feature (974)..(974): n is a, c, g, or t
  misc_feature (979)..(979): n is a, c, g, or t
  misc_feature (987)..(987): n is a, c, g, or t
  misc_feature (1009)..(1009): n is a, c, g, or t
  misc_feature (1011)..(1011): n is a, c, g, or t
  misc_feature (1025)..(1025): n is a, c, g, or t
  misc_feature (1046)..(1046): n is a, c, g, or t
  misc_feature (1054)..(1054): n is a, c, g, or t
  misc_feature (1057)..(1057): n is a, c, g, or t
  misc_feature (1059)..(1059): n is a, c, g, or t
  misc_feature (1068)..(1068): n is a, c, g, or t
  misc_feature (1071)..(1071): n is a, c, g, or t
  misc_feature (1076)..(1076): n is a, c, g, or t
  misc_feature (1078)..(1078): n is a, c, g, or t
  misc_feature (1096)..(1096): n is a, c, g, or t
  misc_feature (1098)..(1098): n is a, c, g, or t
  misc_feature (1102)..(1102): n is a, c, g, or t
  misc_feature (1105)..(1105): n is a, c, g, or t
  misc_feature (1110)..(1110): n is a, c, g, or t
  misc_feature (1112)..(1112): n is a, c, g, or t
  misc_feature (1128)..(1128): n is a, c, g, or t
  misc_feature (1130)..(1130): n is a, c, g, or t
  misc_feature (1135)..(1135): n is a, c, g, or t
  misc_feature (1140)..(1140): n is a, c, g, or t
  misc_feature (1148)..(1148): n is a, c, g, or t
  misc_feature (1151)..(1151): n is a, c, g, or t
  misc_feature (1158)..(1158): n is a, c, g, or t
  misc_feature (1161)..(1161): n is a, c, g, or t
  misc_feature (1165)..(1165): n is a, c, g, or t
  misc_feature (1168)..(1169): n is a, c, g, or t
  misc_feature (1175)..(1175): n is a, c, g, or t
  misc_feature (1178)..(1178): n is a, c, g, or t
  misc_feature (1185)..(1185): n is a, c, g, or t
  misc_feature (1198)..(1198): n is a, c, g, or t
  misc_feature (1214)..(1214): n is a, c, g, or t
  misc_feature (1219)..(1219): n is a, c, g, or t
  misc_feature (1232)..(1232): n is a, c, g, or t
  misc_feature (1244)..(1246): n is a, c, g, or t
  misc_feature (1253)..(1256): n is a, c, g, or t
  misc_feature (1262)..(1262): n is a, c, g, or t
  misc_feature (1283)..(1284): n is a, c, g, or t
  misc_feature (1289)..(1289): n is a, c, g, or t
  misc_feature (1295)..(1295): n is a, c, g, or t
  misc_feature (1298)..(1298): n is a, c, g, or t
  misc_feature (1300)..(1300): n is a, c, g, or t
  misc_feature (1310)..(1310): n is a, c, g, or t
  misc_feature (1315)..(1315): n is a, c, g, or t
  misc_feature (1327)..(1327): n is a, c, g, or t
  misc_feature (1330)..(1330): n is a, c, g, or t
  misc_feature (1339)..(1340): n is a, c, g, or t
ctatagagaaattactatgagaggatcgcatcaccatcaccatcacggatcctatttaggtgacactatagaatcgtcgacccacgcgtccgcccacgcgtccgagcgtccgcgccgcgaggaggaggccctgctggtttctgtgcgggctcttgtcaggatggtgaagctgttcatcggaaacctgccccgggaggctacagagcaggagattcgctcactcttcgagcagtatgggaaggtgctggaatgtgacatcattaagaattacggctttgtgcacatagaagacaagacggcagctgaggatgccatacgcaacctgcaccattacaagcttcatggggtgaacatcaacgtggaagccagcaagaataagagcaaaacctcaacaaagttgcatgtgggcaacatcagtcccacctgcaccaataaggagcttcgagccaagtttgaggagtatggtccggtcatcgaatgtgacatcgtgaaagattatgccttcgtacacatggagcgggcagaggatgcagtggaggccatcaggggccttgataacacagagtttcaaggcaaacgaatgcacgtgcagttgtccaccagccggcttaggactgcgcccgggatgggagaccagagcggctgctatcggtgcgggaaagaggggcactggtccaaagagtgtccgatagatcgttcaggccgcgtggcagacttgaccgagcaatataatgagcaatacggagcagtgcgtacgccttacaccatgagctatggggattcattgtattacaacaacgcgtacggagcgctcgatgcctactacaagcgctgccgtgctgcccggtcctatgaagcagtggcagctgcagctgcctccgtgtataattacgcanaacanaacctgtcccagctgccacaagtccanaatacagccatggccagtcacctcacntccactctntngatcctangaaanaaacctgntgccacctcaggactgctgccnanctgctgctgcacancacccctgctgctgttactgnaacttccnttnanattacgggnggnatcgnanccccttgggtcgcgctanancccnatncccantnttgggaaaggctacgntnccggncatgnaaaatganttntccaagnttnaaanccnngggaanttncttttanaaaatggcccggnttaaacggaaaaaatnccatngggccggaaaccnccttttaaactnnngggggannnnggggcnaaattcaaaccggggtggggnnaaaancccctnggnancccctccggnaaatnccggcttggggntancccccaaanngggaattttt

SEQ ID NO: 648 - DNA, 1200 bp, Homo Sapiens
  misc_feature (8)..(9): n is a, c, g, or t
  misc_feature (11)..(11): n is a, c, g, or t
  misc_feature (14)..(14): n is a, c, g, or t
  misc_feature (18)..(18): n is a, c, g, or t
  misc_feature (28)..(28): n is a, c, g, or t
  misc_feature (67)..(67): n is a, c, g, or t
  misc_feature (73)..(73): n is a, c, g, or t
  misc_feature (99)..(99): n is a, c, g, or t
  misc_feature (101)..(101): n is a, c, g, or t
  misc_feature (113)..(113): n is a, c, g, or t
  misc_feature (115)..(115): n is a, c, g, or t
  misc_feature (119)..(119): n is a, c, g, or t
  misc_feature (122)..(123): n is a, c, g, or t
  misc_feature (135)..(136): n is a, c, g, or t
  misc_feature (152)..(152): n is a, c, g, or t
  misc_feature (163)..(163): n is a, c, g, or t
  misc_feature (165)..(166): n is a, c, g, or t
  misc_feature (169)..(169): n is a, c, g, or t
  misc_feature (171)..(171): n is a, c, g, or t
  misc_feature (187)..(187): n is a, c, g, or t
  misc_feature (189)..(189): n is a, c, g, or t
  misc_feature (195)..(195): n is a, c, g, or t
  misc_feature (199)..(199): n is a, c, g, or t
  misc_feature (201)..(201): n is a, c, g, or t
  misc_feature (203)..(203): n is a, c, g, or t
  misc_feature (206)..(206): n is a, c, g, or t
  misc_feature (209)..(209): n is a, c, g, or t
  misc_feature (228)..(228): n is a, c, g, or t
  misc_feature (248)..(249): n is a, c, g, or t
  misc_feature (257)..(257): n is a, c, g, or t
  misc_feature (274)..(274): n is a, c, g, or t
  misc_feature (281)..(283): n is a, c, g, or t
  misc_feature (290)..(290): n is a, c, g, or t
  misc_feature (293)..(293): n is a, c, g, or t
  misc_feature (295)..(296): n is a, c, g, or t
  misc_feature (301)..(301): n is a, c, g, or t
  misc_feature (303)..(303): n is a, c, g, or t
  misc_feature (311)..(312): n is a, c, g, or t
  misc_feature (314)..(314): n is a, c, g, or t
  misc_feature (320)..(320): n is a, c, g, or t
  misc_feature (330)..(330): n is a, c, g, or t
  misc_feature (332)..(332): n is a, c, g, or t
  misc_feature (348)..(348): n is a, c, g, or t
  misc_feature (351)..(351): n is a, c, g, or t
  misc_feature (353)..(355): n is a, c, g, or t
  misc_feature (358)..(358): n is a, c, g, or t
  misc_feature (360)..(360): n is a, c, g, or t
  misc_feature (364)..(364): n is a, c, g, or t
  misc_feature (368)..(368): n is a, c, g, or t
  misc_feature (374)..(374): n is a, c, g, or t
  misc_feature (377)..(377): n is a, c, g, or t
  misc_feature (380)..(380): n is a, c, g, or t
  misc_feature (382)..(382): n is a, c, g, or t
  misc_feature (384)..(385): n is a, c, g, or t
  misc_feature (389)..(389): n is a, c, g, or t
  misc_feature (394)..(394): n is a, c, g, or t
  misc_feature (408)..(410): n is a, c, g, or t
  misc_feature (415)..(415): n is a, c, g, or t
  misc_feature (418)..(418): n is a, c, g, or t
  misc_feature (424)..(424): n is a, c, g, or t
  misc_feature (428)..(428): n is a, c, g, or t
  misc_feature (436)..(436): n is a, c, g, or t
  misc_feature (442)..(442): n is a, c, g, or t
  misc_feature (447)..(450): n is a, c, g, or t
  misc_feature (452)..(452): n is a, c, g, or t
  misc_feature (455)..(455): n is a, c, g, or t
  misc_feature (459)..(460): n is a, c, g, or t
  misc_feature (465)..(465): n is a, c, g, or t
  misc_feature (477)..(477): n is a, c, g, or t
  misc_feature (486)..(487): n is a, c, g, or t
  misc_feature (490)..(490): n is a, c, g, or t
  misc_feature (493)..(493): n is a, c, g, or t
  misc_feature (501)..(501): n is a, c, g, or t
  misc_feature (507)..(507): n is a, c, g, or t
  misc_feature (511)..(511): n is a, c, g, or t
  misc_feature (513)..(513): n is a, c, g, or t
  misc_feature (528)..(528): n is a, c, g, or t
  misc_feature (532)..(532): n is a, c, g, or t
  misc_feature (540)..(540): n is a, c, g, or t
  misc_feature (551)..(551): n is a, c, g, or t
  misc_feature (557)..(557): n is a, c, g, or t
  misc_feature (571)..(571): n is a, c, g, or t
  misc_feature (578)..(579): n is a, c, g, or t
  misc_feature (581)..(581): n is a, c, g, or t
  misc_feature (585)..(586): n is a, c, g, or t
  misc_feature (595)..(595): n is a, c, g, or t
  misc_feature (616)..(616): n is a, c, g, or t
  misc_feature (620)..(620): n is a, c, g, or t
  misc_feature (622)..(622): n is a, c, g, or t
  misc_feature (625)..(625): n is a, c, g, or t
  misc_feature (632)..(632): n is a, c, g, or t
  misc_feature (641)..(641): n is a, c, g, or t
  misc_feature (645)..(645): n is a, c, g, or t
  misc_feature (651)..(651): n is a, c, g, or t
  misc_feature (657)..(657): n is a, c, g, or t
  misc_feature (661)..(661): n is a, c, g, or t
  misc_feature (669)..(671): n is a, c, g, or t
  misc_feature (676)..(677): n is a, c, g, or t
  misc_feature (680)..(680): n is a, c, g, or t
  misc_feature (686)..(687): n is a, c, g, or t
  misc_feature (702)..(702): n is a, c, g, or t
  misc_feature (704)..(704): n is a, c, g, or t
  misc_feature (706)..(706): n is a, c, g, or t
  misc_feature (721)..(721): n is a, c, g, or t
  misc_feature (723)..(723): n is a, c, g, or t
  misc_feature (732)..(734): n is a, c, g, or t
  misc_feature (736)..(736): n is a, c, g, or t
  misc_feature (752)..(752): n is a, c, g, or t
  misc_feature (757)..(757): n is a, c, g, or t
  misc_feature (762)..(762): n is a, c, g, or t
  misc_feature (765)..(765): n is a, c, g, or t
  misc_feature (769)..(769): n is a, c, g, or t
  misc_feature (775)..(775): n is a, c, g, or t
  misc_feature (781)..(781): n is a, c, g, or t
  misc_feature (783)..(783): n is a, c, g, or t
  misc_feature (792)..(792): n is a, c, g, or t
  misc_feature (794)..(794): n is a, c, g, or t
  misc_feature (797)..(797): n is a, c, g, or t
  misc_feature (803)..(804): n is a, c, g, or t
  misc_feature (806)..(806): n is a, c, g, or t
  misc_feature (813)..(813): n is a, c, g, or t
  misc_feature (816)..(817): n is a, c, g, or t
  misc_feature (822)..(822): n is a, c, g, or t
  misc_feature (831)..(831): n is a, c, g, or t
  misc_feature (838)..(839): n is a, c, g, or t
  misc_feature (843)..(843): n is a, c, g, or t
  misc_feature (846)..(851): n is a, c, g, or t
  misc_feature (853)..(853): n is a, c, g, or t
  misc_feature (857)..(857): n is a, c, g, or t
  misc_feature (866)..(866): n is a, c, g, or t
  misc_feature (868)..(869): n is a, c, g, or t
  misc_feature (875)..(875): n is a, c, g, or t
  misc_feature (882)..(882): n is a, c, g, or t
  misc_feature (884)..(884): n is a, c, g, or t
  misc_feature (886)..(890): n is a, c, g, or t
  misc_feature (894)..(894): n is a, c, g, or t
  misc_feature (896)..(896): n is a, c, g, or t
  misc_feature (898)..(899): n is a, c, g, or t
  misc_feature (903)..(903): n is a, c, g, or t
  misc_feature (905)..(905): n is a, c, g, or t
  misc_feature (909)..(909): n is a, c, g, or t
  misc_feature (911)..(911): n is a, c, g, or t
  misc_feature (917)..(917): n is a, c, g, or t
  misc_feature (920)..(920): n is a, c, g, or t
  misc_feature (922)..(922): n is a, c, g, or t
  misc_feature (930)..(930): n is a, c, g, or t
  misc_feature (934)..(935): n is a, c, g, or t
  misc_feature (937)..(937): n is a, c, g, or t
  misc_feature (940)..(941): n is a, c, g, or t
  misc_feature (943)..(944): n is a, c, g, or t
  misc_feature (950)..(950): n is a, c, g, or t
  misc_feature (952)..(953): n is a, c, g, or t
  misc_feature (955)..(955): n is a, c, g, or t
  misc_feature (958)..(959): n is a, c, g, or t
  misc_feature (968)..(969): n is a, c, g, or t
  misc_feature (971)..(971): n is a, c, g, or t
  misc_feature (980)..(980): n is a, c, g, or t
  misc_feature (982)..(982): n is a, c, g, or t
  misc_feature (984)..(984): n is a, c, g, or t
  misc_feature (986)..(986): n is a, c, g, or t
  misc_feature (1004)..(1004): n is a, c, g, or t
  misc_feature (1006)..(1006): n is a, c, g, or t
  misc_feature (1011)..(1011): n is a, c, g, or t
  misc_feature (1013)..(1015): n is a, c, g, or t
  misc_feature (1019)..(1019): n is a, c, g, or t
  misc_feature (1021)..(1022): n is a, c, g, or t
  misc_feature (1024)..(1025): n is a, c, g, or t
  misc_feature (1031)..(1031): n is a, c, g, or t
  misc_feature (1040)..(1040): n is a, c, g, or t
  misc_feature (1045)..(1049): n is a, c, g, or t
  misc_feature (1051)..(1054): n is a, c, g, or t
  misc_feature (1059)..(1060): n is a, c, g, or t
  misc_feature (1066)..(1066): n is a, c, g, or t
  misc_feature (1068)..(1069): n is a, c, g, or t
  misc_feature (1071)..(1071): n is a, c, g, or t
  misc_feature (1074)..(1075): n is a, c, g, or t
  misc_feature (1083)..(1083): n is a, c, g, or t
  misc_feature (1088)..(1088): n is a, c, g, or t
  misc_feature (1091)..(1091): n is a, c, g, or t
  misc_feature (1097)..(1097): n is a, c, g, or t
  misc_feature (1104)..(1104): n is a, c, g, or t
  misc_feature (1108)..(1108): n is a, c, g, or t
  misc_feature (1112)..(1112): n is a, c, g, or t
  misc_feature (1114)..(1115): n is a, c, g, or t
  misc_feature (1118)..(1118): n is a, c, g, or t
  misc_feature (1121)..(1121): n is a, c, g, or t
  misc_feature (1125)..(1125): n is a, c, g, or t
  misc_feature (1132)..(1132): n is a, c, g, or t
  misc_feature (1142)..(1143): n is a, c, g, or t
  misc_feature (1150)..(1150): n is a, c, g, or t
  misc_feature (1152)..(1152): n is a, c, g, or t
  misc_feature (1155)..(1155): n is a, c, g, or t
  misc_feature (1162)..(1162): n is a, c, g, or t
  misc_feature (1170)..(1170): n is a, c, g, or t
  misc_feature (1178)..(1178): n is a, c, g, or t
  misc_feature (1183)..(1183): n is a, c, g, or t
  misc_feature (1189)..(1190): n is a, c, g, or t
aaggaaannanagnaatncgccaggctnggtccgagctcggcatccactagttaacggctcgctatntgatgntgagaattcacccattagtcgtggcncncgcgctccaggntnggtngtnngtccatatgtcnnacattcaaatgggctntggaatgctgntnngangngtctgcacgaaatctngnataacngccngnanacngancccctatggtgaatacggnccgctggtacaaggtccgtnnactaaacngcccctcaggcaacacnaccctgnnnaacttgntgngnntatancnactccagnncnagctgnaagccacacngnccctttaggactgtgncancnnnaancncagncagnttttgnacnccncnanncatnccaangtggtaaaactgcnnngaganggnagtggnaagnaggaagancgccgnaacannnnanacntggnnggagncgccgggcctcngtctgagtnnganctntaggacgngcgacntacnantatactggaatgggnatgncatacggntccttgtaggnaccagncggtttcctttggnaaattcnngnaagnnctgctgccncatcactgaaatgctggtganatantntgnaatggangcacccccnaggnagcccnctaaancccngtcattannngggannagnatcccnnaaacttcctcagcantnancgtgaaagagccgancnaaacctgtnnngnacatgtatcttcgganacctngttantcncatntccaanttcccntnggaaatctncnatnaaaaanntncctggangtnnctaantgttgaaantggacanncttnttnnnnnnanaagngccccatantnnacaaangcccctntntnnnnnggancntnnaaanangggncntaactntcntnaaaaaacncctnntnttnnannccacananncnctnnttaattttnncnagttagaancncnangggaaaaccctttcttcncngtttntnnnttcntnnanncttganttcccctgnatagnnnnngnnnntttgnnccgatnanncnaanntttctttnccacntgnattttntttcctntccnacgntnnggnccnatcncttcccnccaaggtatnnggcccananaanccatatnattccccngtcctggngagtncccccnncaaaaaaaat

SEQ ID NO: 649 - DNA, 1332 bp, Homo Sapiens
  misc_feature (831)..(832): n is a, c, g, or t
  misc_feature (842)..(843): n is a, c, g, or t
  misc_feature (845)..(845): n is a, c, g, or t
  misc_feature (847)..(847): n is a, c, g, or t
  misc_feature (849)..(849): n is a, c, g, or t
  misc_feature (851)..(851): n is a, c, g, or t
  misc_feature (853)..(873): n is a, c, g, or t
  misc_feature (875)..(877): n is a, c, g, or t
  misc_feature (884)..(884): n is a, c, g, or t
  misc_feature (887)..(887): n is a, c, g, or t
  misc_feature (905)..(906): n is a, c, g, or t
  misc_feature (919)..(919): n is a, c, g, or t
  misc_feature (935)..(935): n is a, c, g, or t
  misc_feature (944)..(944): n is a, c, g, or t
  misc_feature (954)..(954): n is a, c, g, or t
  misc_feature (956)..(957): n is a, c, g, or t
  misc_feature (960)..(960): n is a, c, g, or t
  misc_feature (968)..(968): n is a, c, g, or t
  misc_feature (970)..(970): n is a, c, g, or t
  misc_feature (974)..(974): n is a, c, g, or t
  misc_feature (976)..(976): n is a, c, g, or t
  misc_feature (978)..(978): n is a, c, g, or t
  misc_feature (985)..(985): n is a, c, g, or t
  misc_feature (998)..(998): n is a, c, g, or t
  misc_feature (1000)..(1001): n is a, c, g, or t
  misc_feature (1011)..(1011): n is a, c, g, or t
  misc_feature (1014)..(1015): n is a, c, g, or t
  misc_feature (1023)..(1023): n is a, c, g, or t
  misc_feature (1028)..(1028): n is a, c, g, or t
  misc_feature (1031)..(1031): n is a, c, g, or t
  misc_feature (1039)..(1039): n is a, c, g, or t
  misc_feature (1044)..(1044): n is a, c, g, or t
  misc_feature (1047)..(1047): n is a, c, g, or t
  misc_feature (1053)..(1054): n is a, c, g, or t
  misc_feature (1064)..(1064): n is a, c, g, or t
  misc_feature (1067)..(1067): n is a, c, g, or t
  misc_feature (1069)..(1069): n is a, c, g, or t
  misc_feature (1074)..(1074): n is a, c, g, or t
  misc_feature (1082)..(1082): n is a, c, g, or t
  misc_feature (1086)..(1086): n is a, c, g, or t
  misc_feature (1099)..(1099): n is a, c, g, or t
  misc_feature (1109)..(1109): n is a, c, g, or t
  misc_feature (1117)..(1117): n is a, c, g, or t
  misc_feature (1125)..(1125): n is a, c, g, or t
  misc_feature (1136)..(1138): n is a, c, g, or t
  misc_feature (1140)..(1140): n is a, c, g, or t
  misc_feature (1151)..(1151): n is a, c, g, or t
  misc_feature (1156)..(1156): n is a, c, g, or t
  misc_feature (1159)..(1161): n is a, c, g, or t
  misc_feature (1168)..(1170): n is a, c, g, or t
  misc_feature (1172)..(1173): n is a, c, g, or t
  misc_feature (1176)..(1178): n is a, c, g, or t
  misc_feature (1185)..(1185): n is a, c, g, or t
  misc_feature (1192)..(1192): n is a, c, g, or t
  misc_feature (1198)..(1198): n is a, c, g, or t
  misc_feature (1203)..(1203): n is a, c, g, or t
  misc_feature (1206)..(1207): n is a, c, g, or t
  misc_feature (1213)..(1213): n is a, c, g, or t
  misc_feature (1222)..(1223): n is a, c, g, or t
  misc_feature (1226)..(1226): n is a, c, g, or t
  misc_feature (1238)..(1239): n is a, c, g, or t
  misc_feature (1247)..(1247): n is a, c, g, or t
  misc_feature (1253)..(1254): n is a, c, g, or t
  misc_feature (1266)..(1266): n is a, c, g, or t
  misc_feature (1268)..(1268): n is a, c, g, or t
  misc_feature (1270)..(1270): n is a, c, g, or t
  misc_feature (1276)..(1277): n is a, c, g, or t
  misc_feature (1279)..(1279): n is a, c, g, or t
  misc_feature (1284)..(1284): n is a, c, g, or t
  misc_feature (1291)..(1291): n is a, c, g, or t
  misc_feature (1299)..(1299): n is a, c, g, or t
  misc_feature (1301)..(1301): n is a, c, g, or t
  misc_feature (1311)..(1311): n is a, c, g, or t
  misc_feature (1315)..(1315): n is a, c, g, or t
  misc_feature (1317)..(1317): n is a, c, g, or t
  misc_feature (1328)..(1328): n is a, c, g, or t
  misc_feature (1331)..(1331): n is a, c, g, or t
aatagagaaaattaactatgaagaggatcgcatcaccattcaccatcacggatcctatttaggtgacactatagaatcgtcgacccacgcgtccggtgccactgaagatcctggtgtcgccatgggccgccgccccgcccgttgttaccggtattgtaagaacaagccgtacccaaagtctcgcttctgccgaggtgtccctgatgccaagattcgcatttttgacctggggcggaaaaaggcaaaagtggatgagtttccgctttgtggccacatggtgtcagatgaatatgagcagctgtcctctgaagccctggaggctgcccgaatttgtgccaataagtacatggtaaaaagttgtggcaaagatggcttccatatccgggtgcggctccaccccttccacgtcatccgcatcaacaagatgttgtcctgtgctggggctgacaggctccaaacaggcatgcgaggtgcctttggaaagccccagggcactgtggccagggttcacattggccaagttatcatgtccatccgcaccaagctgcagaacaaggagcatgtgattgaggccctgcgcagggccaagttcaagtttcctggccgccagaagatccacatctcaaagaagtggggcttcaccaagttcaatgctgatgaatttgaagacatggtggctgaaaagcggctcatcccagatggctgtggggtcaagtacatccccagtcgtggccctctggacaagtggcgggccctgcactcatgagggcttccaatgtgctgccccccctcttaatactcaccaataaattctacttcctgtccacctannaaaaaaaaannananananannnnnnnnnnnnnnnnnnnnnannnggggcgnccnctccctaaagggaatccnnataaaccttaatnacctgaacttggaacnccgttgaanaaaatccagnannganctcaaaancncccntntngaatttntttcaaaaacccncnnttgccccccnggnntttttttnttggnggnaaaatccnaaacnaantttggnnaaaattttcnggnancttanggaacctnaaanggaaaaaaaaaanccctggaaanaccccccntttaaaanttcccaagggnnncnaaaaaaaaaanttttnaannntttttcnnncnnttnnncccaagntaccctnaaaccnaaccnttnnacctgnaaattaacnnccntttttaaaaccnnaaaaaaanaaaccnnaatttttttccngncntttttnnanttttnccccccnaaaaaagncnccccaaattntatngnaaaaaaaaaanggna

SEQ ID NO: 650 - DNA, 1402 bp, Homo Sapiens
  misc_feature (665)..(666): n is a, c, g, or t
  misc_feature (672)..(672): n is a, c, g, or t
  misc_feature (679)..(679): n is a, c, g, or t
  misc_feature (681)..(756): n is a, c, g, or t
  misc_feature (758)..(771): n is a, c, g, or t
  misc_feature (778)..(778): n is a, c, g, or t
  misc_feature (791)..(792): n is a, c, g, or t
  misc_feature (798)..(798): n is a, c, g, or t
  misc_feature (801)..(802): n is a, c, g, or t
  misc_feature (805)..(805): n is a, c, g, or t
  misc_feature (807)..(808): n is a, c, g, or t
  misc_feature (811)..(811): n is a, c, g, or t
  misc_feature (816)..(819): n is a, c, g, or t
  misc_feature (825)..(825): n is a, c, g, or t
  misc_feature (827)..(828): n is a, c, g, or t
  misc_feature (833)..(833): n is a, c, g, or t
  misc_feature (837)..(837): n is a, c, g, or t
  misc_feature (845)..(846): n is a, c, g, or t
  misc_feature (849)..(849): n is a, c, g, or t
  misc_feature (856)..(856): n is a, c, g, or t
  misc_feature (862)..(862): n is a, c, g, or t
  misc_feature (867)..(867): n is a, c, g, or t
  misc_feature (869)..(869): n is a, c, g, or t
  misc_feature (871)..(871): n is a, c, g, or t
  misc_feature (884)..(884): n is a, c, g, or t
  misc_feature (889)..(890): n is a, c, g, or t
  misc_feature (894)..(894): n is a, c, g, or t
  misc_feature (917)..(917): n is a, c, g, or t
  misc_feature (924)..(927): n is a, c, g, or t
  misc_feature (929)..(930): n is a, c, g, or t
  misc_feature (937)..(938): n is a, c, g, or t
  misc_feature (946)..(946): n is a, c, g, or t
  misc_feature (951)..(952): n is a, c, g, or t
  misc_feature (954)..(954): n is a, c, g, or t
  misc_feature (957)..(958): n is a, c, g, or t
  misc_feature (962)..(964): n is a, c, g, or t
  misc_feature (966)..(967): n is a, c, g, or t
  misc_feature (969)..(969): n is a, c, g, or t
  misc_feature (981)..(982): n is a, c, g, or t
  misc_feature (985)..(985): n is a, c, g, or t
  misc_feature (989)..(989): n is a, c, g, or t
  misc_feature (995)..(995): n is a, c, g, or t
  misc_feature (1000)..(1000): n is a, c, g, or t
  misc_feature (1014)..(1015): n is a, c, g, or t
  misc_feature (1019)..(1019): n is a, c, g, or t
  misc_feature (1031)..(1031): n is a, c, g, or t
  misc_feature (1036)..(1036): n is a, c, g, or t
  misc_feature (1041)..(1041): n is a, c, g, or t
  misc_feature (1043)..(1047): n is a, c, g, or t
  misc_feature (1050)..(1050): n is a, c, g, or t
  misc_feature (1058)..(1058): n is a, c, g, or t
  misc_feature (1060)..(1060): n is a, c, g, or t
  misc_feature (1066)..(1069): n is a, c, g, or t
  misc_feature (1075)..(1075): n is a, c, g, or t
  misc_feature (1078)..(1080): n is a, c, g, or t
  misc_feature (1082)..(1082): n is a, c, g, or t
  misc_feature (1085)..(1086): n is a, c, g, or t
  misc_feature (1088)..(1091): n is a, c, g, or t
  misc_feature (1093)..(1093): n is a, c, g, or t
  misc_feature (1107)..(1107): n is a, c, g, or t
  misc_feature (1116)..(1116): n is a, c, g, or t
  misc_feature (1118)..(1118): n is a, c, g, or t
  misc_feature (1124)..(1124): n is a, c, g, or t
  misc_feature (1138)..(1138): n is a, c, g, or t
  misc_feature (1144)..(1144): n is a, c, g, or t
  misc_feature (1160)..(1161): n is a, c, g, or t
  misc_feature (1163)..(1163): n is a, c, g, or t
  misc_feature (1165)..(1165): n is a, c, g, or t
  misc_feature (1167)..(1167): n is a, c, g, or t
  misc_feature (1173)..(1173): n is a, c, g, or t
  misc_feature (1179)..(1179): n is a, c, g, or t
  misc_feature (1181)..(1181): n is a, c, g, or t
  misc_feature (1185)..(1186): n is a, c, g, or t
  misc_feature (1195)..(1195): n is a, c, g, or t
  misc_feature (1200)..(1201): n is a, c, g, or t
  misc_feature (1203)..(1204): n is a, c, g, or t
  misc_feature (1215)..(1215): n is a, c, g, or t
  misc_feature (1227)..(1227): n is a, c, g, or t
  misc_feature (1236)..(1236): n is a, c, g, or t
  misc_feature (1254)..(1254): n is a, c, g, or t
  misc_feature (1256)..(1256): n is a, c, g, or t
  misc_feature (1259)..(1259): n is a, c, g, or t
  misc_feature (1262)..(1262): n is a, c, g, or t
  misc_feature (1266)..(1266): n is a, c, g, or t
  misc_feature (1277)..(1278): n is a, c, g, or t
  misc_feature (1282)..(1282): n is a, c, g, or t
  misc_feature (1287)..(1287): n is a, c, g, or t
  misc_feature (1292)..(1292): n is a, c, g, or t
  misc_feature (1307)..(1308): n is a, c, g, or t
  misc_feature (1314)..(1314): n is a, c, g, or t
  misc_feature (1318)..(1318): n is a, c, g, or t
  misc_feature (1324)..(1325): n is a, c, g, or t
  misc_feature (1330)..(1331): n is a, c, g, or t
  misc_feature (1335)..(1335): n is a, c, g, or t
  misc_feature (1346)..(1346): n is a, c, g, or t
  misc_feature (1355)..(1355): n is a, c, g, or t
  misc_feature (1367)..(1368): n is a, c, g, or t
  misc_feature (1371)..(1373): n is a, c, g, or t
  misc_feature (1378)..(1378): n is a, c, g, or t
  misc_feature (1380)..(1380): n is a, c, g, or t
  misc_feature (1388)..(1389): n is a, c, g, or t
  misc_feature (1392)..(1392): n is a, c, g, or t
  misc_feature (1397)..(1398): n is a, c, g, or t
atagagaaattactatgagaggatcgcatcaccatcaccatcacggatcctatttaggtgacactatagaatcgtcgacccacgcgtccgactcccgtcagcagatccggaagctcatcaaagatgggctgatcatccgcaagcctgtgacggtccattcccgggctcgatgccggaaaaacaccttggcccgccggaagggcaggcacatgggcataggtaagcggaagggtacagccaatgcccgaatgccagagaaggtcacatggatgaggagaatgaggattttgcgccggctgctcagaagataccgtgaatctaagaagatcgatcgccacatgtatcacagcctgtacctgaaggtgaaggggaatgtgttcaaaaacaagcggattctcatggaacacatccacaagctgaaggcagacaaggcccgcaagaagctcctggctgaccaggctgaggcccgcaggtctaagaccaaggaagcacgcaagcgccgtgaagagcgcctccaggccaagaaggaggagatcatcaagactttatccaaggaggaagagaccaagaaataaaacctcccactttgtctgtacatactggcctctgtgattacatagatcagccattaaaataaaacaagccttaatctgaaaaaaaaaaannaaaaanaaaaaanannnnnnnnnnnnnnnnnnnnnnnnnnnnnnnnnnnnnnnnnnnnnnnnnnnnnnnnnnnnnnnnnnnnnnnnnnnnannnnnnnnnnnnnnaaagggnggccccccccctnngggggnccnnttnannttnttttnnnnaacttngnnccctntttnaaaacccnnaanggccccnaaaccnccttntntntttttttaaaaancctcnnttgnccccggggttttttttttggganaaatccnnnntnntttgggnnattttttnggggnntnggnntttnnntnngnaaaaaaattccnnggnattncccccngtttnttttcccccggggnntccnaaaaaatttttnggggnttttncnnnnnttncccaggtncntaaaannnnaccctnccnnngnaannannnncntttttttaaacccntaaaaaaananaccccnttttttttcccccntttttnttttttgccccccggnnangntncccccnaatttntntggnnaaaaaaaanggaanntnntattggaaaangttccccttttncccttttcngaaaaaaaaaaaattttntnccnggngaanaaaaaaaattnngggnttttnaattnttcaaaggggggttnnaaaccncctnttcccnnggttnnaaanttttttttccnccccggggnttcctttttttnngcnnnagaantncccccttnnggnattanngggg

SEQ ID NO: 651 - DNA, 1368 bp, Homo Sapiens
  misc_feature (534)..(534): n is a, c, g, or t
  misc_feature (618)..(618): n is a, c, g, or t
  misc_feature (677)..(677): n is a, c, g, or t
  misc_feature (871)..(871): n is a, c, g, or t
  misc_feature (883)..(883): n is a, c, g, or t
  misc_feature (938)..(938): n is a, c, g, or t
  misc_feature (942)..(942): n is a, c, g, or t
  misc_feature (952)..(952): n is a, c, g, or t
  misc_feature (967)..(967): n is a, c, g, or t
  misc_feature (976)..(976): n is a, c, g, or t
  misc_feature (982)..(982): n is a, c, g, or t
  misc_feature (994)..(994): n is a, c, g, or t
  misc_feature (999)..(999): n is a, c, g, or t
  misc_feature (1020)..(1020): n is a, c, g, or t
  misc_feature (1025)..(1025): n is a, c, g, or t
  misc_feature (1028)..(1028): n is a, c, g, or t
  misc_feature (1070)..(1070): n is a, c, g, or t
  misc_feature (1074)..(1074): n is a, c, g, or t
  misc_feature (1080)..(1080): n is a, c, g, or t
  misc_feature (1084)..(1084): n is a, c, g, or t
  misc_feature (1089)..(1089): n is a, c, g, or t
  misc_feature (1096)..(1096): n is a, c, g, or t
  misc_feature (1105)..(1105): n is a, c, g, or t
  misc_feature (1108)..(1108): n is a, c, g, or t
  misc_feature (1111)..(1111): n is a, c, g, or t
  misc_feature (1113)..(1114): n is a, c, g, or t
  misc_feature (1120)..(1120): n is a, c, g, or t
  misc_feature (1137)..(1139): n is a, c, g, or t
  misc_feature (1158)..(1158): n is a, c, g, or t
  misc_feature (1160)..(1160): n is a, c, g, or t
  misc_feature (1177)..(1177): n is a, c, g, or t
  misc_feature (1190)..(1190): n is a, c, g, or t
  misc_feature (1197)..(1198): n is a, c, g, or t
  misc_feature (1214)..(1214): n is a, c, g, or t
  misc_feature (1221)..(1221): n is a, c, g, or t
  misc_feature (1230)..(1231): n is a, c, g, or t
  misc_feature (1236)..(1236): n is a, c, g, or t
  misc_feature (1238)..(1238): n is a, c, g, or t
  misc_feature (1251)..(1251): n is a, c, g, or t
  misc_feature (1254)..(1254): n is a, c, g, or t
  misc_feature (1258)..(1258): n is a, c, g, or t
  misc_feature (1267)..(1267): n is a, c, g, or t
  misc_feature (1276)..(1277): n is a, c, g, or t
  misc_feature (1282)..(1282): n is a, c, g, or t
  misc_feature (1286)..(1286): n is a, c, g, or t
  misc_feature (1290)..(1291): n is a, c, g, or t
  misc_feature (1302)..(1302): n is a, c, g, or t
  misc_feature (1306)..(1306): n is a, c, g, or t
  misc_feature (1310)..(1310): n is a, c, g, or t
  misc_feature (1312)..(1312): n is a, c, g, or t
  misc_feature (1320)..(1321): n is a, c, g, or t
  misc_feature (1323)..(1323): n is a, c, g, or t
  misc_feature (1325)..(1325): n is a, c, g, or t
  misc_feature (1330)..(1330): n is a, c, g, or t
  misc_feature (1338)..(1339): n is a, c, g, or t
  misc_feature (1341)..(1341): n is a, c, g, or t
  misc_feature (1343)..(1343): n is a, c, g, or t
  misc_feature (1349)..(1349): n is a, c, g, or t
  misc_feature (1363)..(1363): n is a, c, g, or t
  misc_feature (1365)..(1366): n is a, c, g, or t
gaattagagaaattactatgagaggatcgcatcaccatcaccatcacggatcctatttaggtgacactatagaatcgtcgacccacgcgtccggtgatattgtagacatcaagggaatgggtactgttcaaaaaggaatgccccacaagtgttaccatggcaaaactggaagagtctacaatgttacccagcatgctgttggcattgttgtaaacaaacaagttaagggcaagattcttgccaagagaattaatgtgcgtattgagcacattaagcactctaagagccgagatagcttcctgaaacgtgtgaaggaaaatgatcagaaaaagaaagaagccaaagagaaaggtacctgggttcaactaaagcgccagcctgctccacccagagaagcacactttgtgagaaccaatgggaaggagcctgagctgctggaacctattccctatgaattcatggcataataggtgttaaaaaaaaaaataaaggacctctgggctacaaaaaaaaaaaaaaaaaaaaaaaaaaaangggcggccgctccctatagtgagtcgtattaagcttaattagctgagcttggactcctgttgatagatccagtaatgacctcanaactccatctggatttgttcagaacgctcggttgccgccgggcgttttttattggtganaatccaagctagcttggcgagattttcaggagctaaggaagctaaaatggagaaaaaaatcactggatataccaccgttgatatatcccaatggcatcgtaaagaacattttgaggcatttcagtcagttgctcaatgtacctataaccagaccgttcagctggatattacggccttttttaaagaccgtaaanaaaaaataagcncaagttttatcccggcctttattcccatttcttgccccccctgaagaatgccccntccngaaatttccntatggcaatgaaaanacgggtgancctggngatatggggaanagtgnttccccccttggttaccccgnttttnccntgaaccaaacttgaaaacgtttttcctcccccctgggagggnaaancccccnaccnatttnccggccngttttctcnccnatntnnttcccnaaaaatgtggccgggtnnncggggaaaaaccctggccntntttccccaaagggtttntttgaaaaaattntttttcnncccccccccacccccngggggantttcccccnnttttnanttaaaccgggccnaangggnaaaattttnttccccccnnttttncccngggnnaaatttttttncccngggncnaaaagggnntnanccccntggaaatnncngnttcccngcccctttggaggncnncc

SEQ ID NO: 652 - DNA, 1763 bp, Homo Sapiens
  misc_feature (2)..(3): n is a, c, g, or t
  misc_feature (7)..(7): n is a, c, g, or t
  misc_feature (10)..(10): n is a, c, g, or t
  misc_feature (22)..(22): n is a, c, g, or t
  misc_feature (28)..(28): n is a, c, g, or t
  misc_feature (36)..(36): n is a, c, g, or t
  misc_feature (39)..(39): n is a, c, g, or t
  misc_feature (46)..(46): n is a, c, g, or t
  misc_feature (69)..(69): n is a, c, g, or t
  misc_feature (71)..(72): n is a, c, g, or t
  misc_feature (85)..(86): n is a, c, g, or t
  misc_feature (95)..(95): n is a, c, g, or t
  misc_feature (97)..(98): n is a, c, g, or t
  misc_feature (104)..(104): n is a, c, g, or t
  misc_feature (106)..(106): n is a, c, g, or t
  misc_feature (109)..(109): n is a, c, g, or t
  misc_feature (115)..(115): n is a, c, g, or t
  misc_feature (124)..(124): n is a, c, g, or t
  misc_feature (131)..(131): n is a, c, g, or t
  misc_feature (135)..(135): n is a, c, g, or t
  misc_feature (140)..(140): n is a, c, g, or t
  misc_feature (142)..(142): n is a, c, g, or t
  misc_feature (145)..(145): n is a, c, g, or t
  misc_feature (148)..(148): n is a, c, g, or t
  misc_feature (164)..(165): n is a, c, g, or t
  misc_feature (170)..(171): n is a, c, g, or t
  misc_feature (174)..(174): n is a, c, g, or t
  misc_feature (176)..(176): n is a, c, g, or t
  misc_feature (195)..(195): n is a, c, g, or t
  misc_feature (201)..(201): n is a, c, g, or t
  misc_feature (217)..(217): n is a, c, g, or t
  misc_feature (221)..(223): n is a, c, g, or t
  misc_feature (230)..(230): n is a, c, g, or t
  misc_feature (232)..(232): n is a, c, g, or t
  misc_feature (234)..(234): n is a, c, g, or t
  misc_feature (259)..(259): n is a, c, g, or t
  misc_feature (264)..(266): n is a, c, g, or t
  misc_feature (269)..(271): n is a, c, g, or t
  misc_feature (282)..(282): n is a, c, g, or t
  misc_feature (288)..(288): n is a, c, g, or t
  misc_feature (305)..(305): n is a, c, g, or t
  misc_feature (311)..(311): n is a, c, g, or t
  misc_feature (314)..(316): n is a, c, g, or t
  misc_feature (318)..(318): n is a, c, g, or t
  misc_feature (327)..(327): n is a, c, g, or t
  misc_feature (331)..(331): n is a, c, g, or t
  misc_feature (339)..(339): n is a, c, g, or t
  misc_feature (347)..(348): n is a, c, g, or t
  misc_feature (354)..(354): n is a, c, g, or t
  misc_feature (360)..(360): n is a, c, g, or t
  misc_feature (364)..(364): n is a, c, g, or t
  misc_feature (367)..(367): n is a, c, g, or t
  misc_feature (371)..(372): n is a, c, g, or t
  misc_feature (374)..(374): n is a, c, g, or t
  misc_feature (384)..(385): n is a, c, g, or t
  misc_feature (387)..(387): n is a, c, g, or t
  misc_feature (392)..(392): n is a, c, g, or t
  misc_feature (397)..(397): n is a, c, g, or t
  misc_feature (399)..(399): n is a, c, g, or t
  misc_feature (402)..(402): n is a, c, g, or t
  misc_feature (404)..(405): n is a, c, g, or t
  misc_feature (409)..(410): n is a, c, g, or t
  misc_feature (416)..(416): n is a, c, g, or t
  misc_feature (419)..(419): n is a, c, g, or t
  misc_feature (424)..(424): n is a, c, g, or t
  misc_feature (426)..(426): n is a, c, g, or t
  misc_feature (428)..(428): n is a, c, g, or t
  misc_feature (430)..(430): n is a, c, g, or t
  misc_feature (436)..(436): n is a, c, g, or t
  misc_feature (438)..(438): n is a, c, g, or t
  misc_feature (440)..(441): n is a, c, g, or t
  misc_feature (450)..(450): n is a, c, g, or t
  misc_feature (452)..(452): n is a, c, g, or t
  misc_feature (455)..(455): n is a, c, g, or t
  misc_feature (465)..(465): n is a, c, g, or t
  misc_feature (472)..(472): n is a, c, g, or t
  misc_feature (475)..(475): n is a, c, g, or t
  misc_feature (479)..(479): n is a, c, g, or t
  misc_feature (484)..(484): n is a, c, g, or t
  misc_feature (490)..(492): n is a, c, g, or t
  misc_feature (496)..(496): n is a, c, g, or t
  misc_feature (500)..(502): n is a, c, g, or t
  misc_feature (507)..(507): n is a, c, g, or t
  misc_feature (512)..(512): n is a, c, g, or t
  misc_feature (514)..(514): n is a, c, g, or t
  misc_feature (516)..(516): n is a, c, g, or t
  misc_feature (518)..(518): n is a, c, g, or t
  misc_feature (520)..(520): n is a, c, g, or t
  misc_feature (522)..(522): n is a, c, g, or t
  misc_feature (526)..(526): n is a, c, g, or t
  misc_feature (530)..(532): n is a, c, g, or t
  misc_feature (536)..(536): n is a, c, g, or t
  misc_feature (541)..(541): n is a, c, g, or t
  misc_feature (543)..(543): n is a, c, g, or t
  misc_feature (548)..(548): n is a, c, g, or t
  misc_feature (553)..(553): n is a, c, g, or t
  misc_feature (555)..(555): n is a, c, g, or t
  misc_feature (567)..(567): n is a, c, g, or t
  misc_feature (570)..(570): n is a, c, g, or t
  misc_feature (572)..(572): n is a, c, g, or t
  misc_feature (578)..(578): n is a, c, g, or t
  misc_feature (581)..(582): n is a, c, g, or t
  misc_feature (584)..(584): n is a, c, g, or t
  misc_feature (591)..(591): n is a, c, g, or t
  misc_feature (599)..(599): n is a, c, g, or t
  misc_feature (608)..(608): n is a, c, g, or t
  misc_feature (610)..(611): n is a, c, g, or t
  misc_feature (614)..(614): n is a, c, g, or t
  misc_feature (617)..(618): n is a, c, g, or t
  misc_feature (620)..(620): n is a, c, g, or t
  misc_feature (622)..(623): n is a, c, g, or t
  misc_feature (626)..(626): n is a, c, g, or t
  misc_feature (629)..(630): n is a, c, g, or t
  misc_feature (632)..(632): n is a, c, g, or t
  misc_feature (637)..(637): n is a, c, g, or t
  misc_feature (639)..(640): n is a, c, g, or t
  misc_feature (642)..(642): n is a, c, g, or t
  misc_feature (644)..(646): n is a, c, g, or t
  misc_feature (649)..(649): n is a, c, g, or t
  misc_feature (651)..(651): n is a, c, g, or t
  misc_feature (654)..(656): n is a, c, g, or t
  misc_feature (661)..(661): n is a, c, g, or t
  misc_feature (664)..(664): n is a, c, g, or t
  misc_feature (667)..(667): n is a, c, g, or t
  misc_feature (674)..(674): n is a, c, g, or t
  misc_feature (676)..(676): n is a, c, g, or t
  misc_feature (680)..(681): n is a, c, g, or t
  misc_feature (710)..(710): n is a, c, g, or t
  misc_feature (716)..(717): n is a, c, g, or t
  misc_feature (723)..(723): n is a, c, g, or t
  misc_feature (726)..(726): n is a, c, g, or t
  misc_feature (729)..(729): n is a, c, g, or t
  misc_feature (731)..(732): n is a, c, g, or t
  misc_feature (734)..(734): n is a, c, g, or t
  misc_feature (747)..(748): n is a, c, g, or t
  misc_feature (752)..(754): n is a, c, g, or t
  misc_feature (757)..(757): n is a, c, g, or t
  misc_feature (761)..(761): n is a, c, g, or t
  misc_feature (767)..(767): n is a, c, g, or t
  misc_feature (770)..(772): n is a, c, g, or t
  misc_feature (776)..(776): n is a, c, g, or t
  misc_feature (780)..(780): n is a, c, g, or t
  misc_feature (787)..(788): n is a, c, g, or t
  misc_feature (790)..(791): n is a, c, g, or t
  misc_feature (795)..(796): n is a, c, g, or t
  misc_feature (798)..(798): n is a, c, g, or t
  misc_feature (806)..(806): n is a, c, g, or t
  misc_feature (809)..(810): n is a, c, g, or t
  misc_feature (823)..(823): n is a, c, g, or t
  misc_feature (828)..(828): n is a, c, g, or t
  misc_feature (830)..(831): n is a, c, g, or t
  misc_feature (834)..(834): n is a, c, g, or t
  misc_feature (837)..(837): n is a, c, g, or t
  misc_feature (842)..(842): n is a, c, g, or t
  misc_feature (846)..(847): n is a, c, g, or t
  misc_feature (852)..(852): n is a, c, g, or t
  misc_feature (860)..(860): n is a, c, g, or t
  misc_feature (862)..(862): n is a, c, g, or t
  misc_feature (865)..(865): n is a, c, g, or t
  misc_feature (868)..(868): n is a, c, g, or t
  misc_feature (871)..(872): n is a, c, g, or t
  misc_feature (876)..(876): n is a, c, g, or t
  misc_feature (879)..(879): n is a, c, g, or t
  misc_feature (883)..(887): n is a, c, g, or t
  misc_feature (891)..(893): n is a, c, g, or t
  misc_feature (902)..(902): n is a, c, g, or t
  misc_feature (905)..(906): n is a, c, g, or t
  misc_feature (909)..(914): n is a, c, g, or t
  misc_feature (916)..(916): n is a, c, g, or t
  misc_feature (919)..(919): n is a, c, g, or t
  misc_feature (926)..(926): n is a, c, g, or t
  misc_feature (928)..(928): n is a, c, g, or t
  misc_feature (933)..(933): n is a, c, g, or t
  misc_feature (935)..(935): n is a, c, g, or t
  misc_feature (937)..(937): n is a, c, g, or t
  misc_feature (939)..(939): n is a, c, g, or t
  misc_feature (941)..(941): n is a, c, g, or t
  misc_feature (944)..(944): n is a, c, g, or t
  misc_feature (946)..(946): n is a, c, g, or t
  misc_feature (949)..(949): n is a, c, g, or t
  misc_feature (953)..(953): n is a, c, g, or t
  misc_feature (959)..(959): n is a, c, g, or t
  misc_feature (961)..(961): n is a, c, g, or t
  misc_feature (963)..(963): n is a, c, g, or t
  misc_feature (968)..(969): n is a, c, g, or t
  misc_feature (973)..(973): n is a, c, g, or t
  misc_feature (977)..(977): n is a, c, g, or t
  misc_feature (982)..(982): n is a, c, g, or t
  misc_feature (988)..(988): n is a, c, g, or t
  misc_feature (993)..(993): n is a, c, g, or t
  misc_feature (995)..(995): n is a, c, g, or t
  misc_feature (998)..(998): n is a, c, g, or t
  misc_feature (1001)..(1001): n is a, c, g, or t
  misc_feature (1004)..(1004): n is a, c, g, or t
  misc_feature (1008)..(1008): n is a, c, g, or t
  misc_feature (1011)..(1013): n is a, c, g, or t
  misc_feature (1015)..(1017): n is a, c, g, or t
  misc_feature (1020)..(1021): n is a, c, g, or t
  misc_feature (1023)..(1025): n is a, c, g, or t
  misc_feature (1031)..(1031): n is a, c, g, or t
  misc_feature (1039)..(1039): n is a, c, g, or t
  misc_feature (1043)..(1045): n is a, c, g, or t
  misc_feature (1047)..(1048): n is a, c, g, or t
  misc_feature (1050)..(1050): n is a, c, g, or t
  misc_feature (1054)..(1056): n is a, c, g, or t
  misc_feature (1060)..(1061): n is a, c, g, or t
  misc_feature (1064)..(1064): n is a, c, g, or t
  misc_feature (1075)..(1075): n is a, c, g, or t
  misc_feature (1077)..(1078): n is a, c, g, or t
  misc_feature (1081)..(1081): n is a, c, g, or t
  misc_feature (1089)..(1089): n is a, c, g, or t
  misc_feature (1094)..(1094): n is a, c, g, or t
  misc_feature (1097)..(1097): n is a, c, g, or t
  misc_feature (1100)..(1100): n is a, c, g, or t
  misc_feature (1104)..(1104): n is a, c, g, or t
  misc_feature (1106)..(1106): n is a, c, g, or t
  misc_feature (1116)..(1116): n is a, c, g, or t
  misc_feature (1118)..(1118): n is a, c, g, or t
  misc_feature (1122)..(1122): n is a, c, g, or t
  misc_feature (1124)..(1125): n is a, c, g, or t
  misc_feature (1128)..(1128): n is a, c, g, or t
  misc_feature (1133)..(1133): n is a, c, g, or t
  misc_feature (1135)..(1137): n is a, c, g, or t
  misc_feature (1142)..(1142): n is a, c, g, or t
  misc_feature (1153)..(1153): n is a, c, g, or t
  misc_feature (1155)..(1156): n is a, c, g, or t
  misc_feature (1158)..(1158): n is a, c, g, or t
  misc_feature (1162)..(1162): n is a, c, g, or t
  misc_feature (1167)..(1167): n is a, c, g, or t
  misc_feature (1169)..(1169): n is a, c, g, or t
  misc_feature (1172)..(1173): n is a, c, g, or t
  misc_feature (1177)..(1177): n is a, c, g, or t
  misc_feature (1179)..(1179): n is a, c, g, or t
  misc_feature (1183)..(1184): n is a, c, g, or t
  misc_feature (1195)..(1195): n is a, c, g, or t
  misc_feature (1198)..(1198): n is a, c, g, or t
  misc_feature (1202)..(1203): n is a, c, g, or t
  misc_feature (1205)..(1206): n is a, c, g, or t
  misc_feature (1210)..(1210): n is a, c, g, or t
  misc_feature (1213)..(1213): n is a, c, g, or t
  misc_feature (1218)..(1218): n is a, c, g, or t
  misc_feature (1221)..(1222): n is a, c, g, or t
  misc_feature (1225)..(1225): n is a, c, g, or t
  misc_feature (1229)..(1229): n is a, c, g, or t
  misc_feature (1236)..(1236): n is a, c, g, or t
  misc_feature (1238)..(1241): n is a, c, g, or t
  misc_feature (1246)..(1246): n is a, c, g, or t
  misc_feature (1249)..(1249): n is a, c, g, or t
  misc_feature (1251)..(1251): n is a, c, g, or t
  misc_feature (1258)..(1258): n is a, c, g, or t
  misc_feature (1260)..(1260): n is a, c, g, or t
  misc_feature (1273)..(1274): n is a, c, g, or t
  misc_feature (1301)..(1301): n is a, c, g, or t
  misc_feature (1304)..(1305): n is a, c, g, or t
  misc_feature (1310)..(1311): n is a, c, g, or t
  misc_feature (1315)..(1315): n is a, c, g, or t
  misc_feature (1319)..(1320): n is a, c, g, or t
  misc_feature (1322)..(1322): n is a, c, g, or t
  misc_feature (1324)..(1324): n is a, c, g, or t
  misc_feature (1328)..(1328): n is a, c, g, or t
  misc_feature (1332)..(1332): n is a, c, g, or t
  misc_feature (1338)..(1338): n is a, c, g, or t
  misc_feature (1340)..(1341): n is a, c, g, or t
  misc_feature (1346)..(1346): n is a, c, g, or t
  misc_feature (1348)..(1348): n is a, c, g, or t
  misc_feature (1351)..(1351): n is a, c, g, or t
  misc_feature (1356)..(1356): n is a, c, g, or t
  misc_feature (1359)..(1359): n is a, c, g, or t
  misc_feature (1363)..(1364): n is a, c, g, or t
  misc_feature (1368)..(1368): n is a, c, g, or t
  misc_feature (1372)..(1372): n is a, c, g, or t
  misc_feature (1375)..(1375): n is a, c, g, or t
  misc_feature (1386)..(1386): n is a, c, g, or t
  misc_feature (1391)..(1391): n is a, c, g, or t
  misc_feature (1393)..(1394): n is a, c, g, or t
  misc_feature (1397)..(1397): n is a, c, g, or t
  misc_feature (1399)..(1399): n is a, c, g, or t
  misc_feature (1402)..(1402): n is a, c, g, or t
  misc_feature (1405)..(1405): n is a, c, g, or t
  misc_feature (1408)..(1408): n is a, c, g, or t
  misc_feature (1411)..(1411): n is a, c, g, or t
  misc_feature (1415)..(1415): n is a, c, g, or t
  misc_feature (1417)..(1418): n is a, c, g, or t
  misc_feature (1426)..(1426): n is a, c, g, or t
  misc_feature (1428)..(1429): n is a, c, g, or t
  misc_feature (1440)..(1441): n is a, c, g, or t
  misc_feature (1449)..(1452): n is a, c, g, or t
  misc_feature (1454)..(1454): n is a, c, g, or t
  misc_feature (1456)..(1456): n is a, c, g, or t
  misc_feature (1458)..(1460): n is a, c, g, or t
  misc_feature (1464)..(1464): n is a, c, g, or t
  misc_feature (1466)..(1466): n is a, c, g, or t
  misc_feature (1468)..(1468): n is a, c, g, or t
  misc_feature (1470)..(1471): n is a, c, g, or t
  misc_feature (1473)..(1473): n is a, c, g, or t
  misc_feature (1475)..(1475): n is a, c, g, or t
  misc_feature (1482)..(1482): n is a, c, g, or t
  misc_feature (1486)..(1486): n is a, c, g, or t
  misc_feature (1492)..(1492): n is a, c, g, or t
  misc_feature (1495)..(1495): n is a, c, g, or t
  misc_feature (1501)..(1501): n is a, c, g, or t
  misc_feature (1503)..(1503): n is a, c, g, or t
  misc_feature (1514)..(1516): n is a, c, g, or t
  misc_feature (1519)..(1520): n is a, c, g, or t
  misc_feature (1522)..(1522): n is a, c, g, or t
  misc_feature (1528)..(1528): n is a, c, g, or t
  misc_feature (1532)..(1532): n is a, c, g, or t
  misc_feature (1537)..(1537): n is a, c, g, or t
  misc_feature (1539)..(1539): n is a, c, g, or t
  misc_feature (1541)..(1541): n is a, c, g, or t
  misc_feature (1543)..(1543): n is a, c, g, or t
  misc_feature (1548)..(1549): n is a, c, g, or t
  misc_feature (1553)..(1553): n is a, c, g, or t
  misc_feature (1555)..(1555): n is a, c, g, or t
  misc_feature (1557)..(1558): n is a, c, g, or t
  misc_feature (1560)..(1561): n is a, c, g, or t
  misc_feature (1568)..(1569): n is a, c, g, or t
  misc_feature (1572)..(1572): n is a, c, g, or t
  misc_feature (1575)..(1575): n is a, c, g, or t
  misc_feature (1579)..(1579): n is a, c, g, or t
  misc_feature (1581)..(1582): n is a, c, g, or t
  misc_feature (1584)..(1584): n is a, c, g, or t
  misc_feature (1588)..(1589): n is a, c, g, or t
  misc_feature (1597)..(1597): n is a, c, g, or t
  misc_feature (1599)..(1599): n is a, c, g, or t
  misc_feature (1601)..(1602): n is a, c, g, or t
  misc_feature (1605)..(1605): n is a, c, g, or t
  misc_feature (1613)..(1613): n is a, c, g, or t
  misc_feature (1615)..(1616): n is a, c, g, or t
  misc_feature (1619)..(1619): n is a, c, g, or t
  misc_feature (1621)..(1621): n is a, c, g, or t
  misc_feature (1624)..(1625): n is a, c, g, or t
  misc_feature (1628)..(1628): n is a, c, g, or t
  misc_feature (1639)..(1640): n is a, c, g, or t
  misc_feature (1645)..(1645): n is a, c, g, or t
  misc_feature (1651)..(1652): n is a, c, g, or t
  misc_feature (1664)..(1664): n is a, c, g, or t
  misc_feature (1668)..(1668): n is a, c, g, or t
  misc_feature (1676)..(1676): n is a, c, g, or t
  misc_feature (1679)..(1679): n is a, c, g, or t
  misc_feature (1688)..(1688): n is a, c, g, or t
  misc_feature (1695)..(1695): n is a, c, g, or t
  misc_feature (1700)..(1700): n is a, c, g, or t
  misc_feature (1704)..(1704): n is a, c, g, or t
  misc_feature (1707)..(1707): n is a, c, g, or t
  misc_feature (1714)..(1714): n is a, c, g, or t
  misc_feature (1716)..(1718): n is a, c, g, or t
  misc_feature (1723)..(1723): n is a, c, g, or t
  misc_feature (1738)..(1738): n is a, c, g, or t
  misc_feature (1740)..(1740): n is a, c, g, or t
  misc_feature (1748)..(1750): n is a, c, g, or t
  misc_feature (1753)..(1754): n is a, c, g, or t
  misc_feature (1758)..(1761): n is a, c, g, or t
annaagnagnaaatatttatgnaggggntcgcctcnccnctccccntcccgggatcctattttaggggncnntaatagaatcgtnngaacccacncnntccggncnctngtccanagagaggcnttccgcnatanccaangntgncanacgtcggttgctgcanncctannacncnatccccccgggccaccagntggggntgcaaaataccacganaccnnnctgcacngncncacgaggccctgatatgacatcatnccttnnncannnttgatagaaanacaatnccccaactacagatcanctcaancannngntgtcgatcnaccntgagctgnagtcgagnncctgcnatgtgncttnccngccnncngcttgacganngnaactnttccnanctntnntgannacaaantgngtagngntntnctttcntntnngacacttgntntcngagacgcatnctattcnacntccncccanaaatannnccgnaggnnnacccnattgntnancncngngccncttnnngtcncgcancncaaanctacncnccttgcaatcanagntntcgaangtnnanagaaaanatcgcatngggctagcncnntcngannanannaancannangactntnntntnnncgnanatnnnggatncgnccnatccctntnaaanngaaacctttaatgttcccttctcacctanttgttnngactantgnccncnntnttcctaacgactnngagnnnacnaaanacaacnccnnnacantcancttccgnntnnaatnnanaaatcccnccnnatctaaactcccnaaagnannttnctncaagnatannctaanataacggnanccnctntannccanatntgannnnngtcnnnatgtaagcnaannacnnnnnntnaancatccanantgtgnantncnantananctngcantaaagntnanaatcnncccntatntaccntttcanaaatncnttntanacntatnctnnnannntcnnannnttgacnagataacngttnnntnngnaacnnnttcnntanttgttaacaantnncanttttattntctangcnccnttantnttcgcctatnanacananntanaaatncnnnaactncctagatatcncnncntatnttctntnatnnaagntnatgnnccctctatccncantttnntnnaaanacnacctnatnnatnaaangatgatntnnnncgtanctnanaaatttngnctttttttaaatnngaaacaaaataaacttttatgggtgtngannttgcnnatcnatcnntntnaatnactntcatcncnntcgantnagnataanacngctnncaanctgntanaactgcaccgntatantnncanangantanacnacnatcncnnaaaatcantnnctaatatacgnntttgtgannnntnantnnnctcngntntnntntntgcaatnatgnaagttnccnctttcntngtctcatcctnnncanntnttatantcgnccacncnantnatctnntagntnanntnntttctcnnctnctntttngnnangatnnttcttatncngnntantccatctncnnttncntcnncancacttacattnntctgngcactnntccatacaccanaccnatgaatantgnctatacatnaccattnaaatntttnacntattttntnnnctacntttttctcttgctantntattgttnnncgnnagannnnta

SEQ ID NO: 653 - DNA, 1200 bp, Homo Sapiens
  misc_feature (566)..(566): n is a, c, g, or t
  misc_feature (710)..(710): n is a, c, g, or t
  misc_feature (747)..(747): n is a, c, g, or t
  misc_feature (851)..(851): n is a, c, g, or t
  misc_feature (898)..(898): n is a, c, g, or t
  misc_feature (941)..(941): n is a, c, g, or t
  misc_feature (950)..(950): n is a, c, g, or t
  misc_feature (956)..(956): n is a, c, g, or t
  misc_feature (974)..(974): n is a, c, g, or t
  misc_feature (976)..(976): n is a, c, g, or t
  misc_feature (988)..(988): n is a, c, g, or t
  misc_feature (994)..(994): n is a, c, g, or t
  misc_feature (1003)..(1003): n is a, c, g, or t
  misc_feature (1018)..(1018): n is a, c, g, or t
  misc_feature (1021)..(1021): n is a, c, g, or t
  misc_feature (1024)..(1024): n is a, c, g, or t
  misc_feature (1038)..(1038): n is a, c, g, or t
  misc_feature (1052)..(1052): n is a, c, g, or t
  misc_feature (1058)..(1058): n is a, c, g, or t
  misc_feature (1077)..(1077): n is a, c, g, or t
  misc_feature (1085)..(1085): n is a, c, g, or t
  misc_feature (1100)..(1100): n is a, c, g, or t
  misc_feature (1107)..(1107): n is a, c, g, or t
  misc_feature (1111)..(1111): n is a, c, g, or t
  misc_feature (1116)..(1116): n is a, c, g, or t
  misc_feature (1129)..(1129): n is a, c, g, or t
  misc_feature (1131)..(1131): n is a, c, g, or t
  misc_feature (1136)..(1136): n is a, c, g, or t
  misc_feature (1155)..(1155): n is a, c, g, or t
  misc_feature (1170)..(1170): n is a, c, g, or t
  misc_feature (1181)..(1181): n is a, c, g, or t
  misc_feature (1183)..(1183): n is a, c, g, or t
  misc_feature (1187)..(1187): n is a, c, g, or t
  misc_feature (1193)..(1193): n is a, c, g, or t
  misc_feature (1198)..(1198): n is a, c, g, or t
tagagaaattactatgagaggatcgcatcaccatcaccatcacggatcctatttaggtgacactatagaatcgtcgacccacgcgtccgcccacgcgtccgaggcccgggtggttgctgccgaaatgggcaagttcatgaaacctgggaaggtggtgcttgtcctggctggacgctactccggacgcaaagctgtcatcgtgaagaacattgatgatggcacctcagatcgcccctacagccatgctctggtggctggaattgaccgctacccccgcaaagtgacagctgccatgggcaagaagaagatcgccaagagatcaaagataaaatcttttgtgaaagtgtataactacaatcacctaatgcccacaaggtactctgtggatatccccttggacaaaactgtcgtcaataaggatgtcttcagagatcctgctcttaaacgcaaggcccgacgggaggccaaggtcaagtttgaagagagatacaagacaggcaagaacaagtggttcttccagaaactgcggttttagatgctttgttttgatcattaaaaattataangaaaaaaaaaaaaaaaaaaaaaaaaaaaaaaaaaaaaagggcggccgctccctatagtgagtcgtattaagcttaattagctgagcttggactcctgttgatagatccagtaatgacctcagaactccatctggatttgttcanaacgctcggttgccgccgggcgttttttattggtganaatccaagctagcttggcgagattttcaggagctaaggaagctaaaatggagaaaaaaatcactggatataccaccgttgatatatcccaatggcatcgtaaanaacattttgaggcatttcagtcagttgctcaatgtacctataaccanaccgttcagctggatattacggccttttttaaagaccgtaaanaaaaataancccaanttttatccggcctttatncncattcttgcccncctgangaatgctcntccggaatttcctanggnaantgaaaaacggtganctggggaaatgggnaaaagngttcccccttgtttacccngttttccntgaacaaactgaaancgttttnctcncctcngggaggaaaaccncnaaaantttccggcagtttctaccnatattttcccaaaanggggcgggttnangggnaaaccnggccnat

SEQ ID NO: 654 - DNA, 1200 bp, Homo Sapiens
  misc_feature (1)..(1): n is a, c, g, or t
  misc_feature (561)..(561): n is a, c, g, or t
  misc_feature (569)..(570): n is a, c, g, or t
  misc_feature (586)..(587): n is a, c, g, or t
  misc_feature (589)..(589): n is a, c, g, or t
  misc_feature (596)..(596): n is a, c, g, or t
  misc_feature (599)..(599): n is a, c, g, or t
  misc_feature (602)..(602): n is a, c, g, or t
  misc_feature (611)..(611): n is a, c, g, or t
  misc_feature (615)..(615): n is a, c, g, or t
  misc_feature (618)..(618): n is a, c, g, or t
  misc_feature (620)..(620): n is a, c, g, or t
  misc_feature (623)..(624): n is a, c, g, or t
  misc_feature (632)..(632): n is a, c, g, or t
  misc_feature (634)..(635): n is a, c, g, or t
  misc_feature (639)..(640): n is a, c, g, or t
  misc_feature (645)..(645): n is a, c, g, or t
  misc_feature (655)..(655): n is a, c, g, or t
  misc_feature (658)..(658): n is a, c, g, or t
  misc_feature (662)..(663): n is a, c, g, or t
  misc_feature (665)..(666): n is a, c, g, or t
  misc_feature (668)..(669): n is a, c, g, or t
  misc_feature (673)..(673): n is a, c, g, or t
  misc_feature (677)..(677): n is a, c, g, or t
  misc_feature (680)..(680): n is a, c, g, or t
  misc_feature (684)..(684): n is a, c, g, or t
  misc_feature (686)..(686): n is a, c, g, or t
  misc_feature (689)..(689): n is a, c, g, or t
  misc_feature (695)..(695): n is a, c, g, or t
  misc_feature (697)..(698): n is a, c, g, or t
  misc_feature (704)..(704): n is a, c, g, or t
  misc_feature (709)..(709): n is a, c, g, or t
  misc_feature (719)..(719): n is a, c, g, or t
  misc_feature (722)..(722): n is a, c, g, or t
  misc_feature (736)..(737): n is a, c, g, or t
  misc_feature (741)..(741): n is a, c, g, or t
  misc_feature (747)..(749): n is a, c, g, or t
  misc_feature (751)..(751): n is a, c, g, or t
  misc_feature (758)..(758): n is a, c, g, or t
  misc_feature (774)..(774): n is a, c, g, or t
  misc_feature (778)..(779): n is a, c, g, or t
  misc_feature (781)..(785): n is a, c, g, or t
  misc_feature (793)..(793): n is a, c, g, or t
  misc_feature (795)..(795): n is a, c, g, or t
  misc_feature (797)..(797): n is a, c, g, or t
  misc_feature (803)..(803): n is a, c, g, or t
  misc_feature (816)..(816): n is a, c, g, or t
  misc_feature (822)..(822): n is a, c, g, or t
  misc_feature (828)..(828): n is a, c, g, or t
  misc_feature (834)..(834): n is a, c, g, or t
  misc_feature (851)..(853): n is a, c, g, or t
  misc_feature (855)..(855): n is a, c, g, or t
  misc_feature (861)..(863): n is a, c, g, or t
  misc_feature (866)..(867): n is a, c, g, or t
  misc_feature (869)..(870): n is a, c, g, or t
  misc_feature (886)..(886): n is a, c, g, or t
  misc_feature (888)..(889): n is a, c, g, or t
  misc_feature (891)..(893): n is a, c, g, or t
  misc_feature (898)..(898): n is a, c, g, or t
  misc_feature (901)..(901): n is a, c, g, or t
  misc_feature (905)..(905): n is a, c, g, or t
  misc_feature (907)..(907): n is a, c, g, or t
  misc_feature (911)..(911): n is a, c, g, or t
  misc_feature (919)..(919): n is a, c, g, or t
  misc_feature (921)..(924): n is a, c, g, or t
  misc_feature (927)..(928): n is a, c, g, or t
  misc_feature (932)..(932): n is a, c, g, or t
  misc_feature (936)..(936): n is a, c, g, or t
  misc_feature (941)..(941): n is a, c, g, or t
  misc_feature (946)..(946): n is a, c, g, or t
  misc_feature (949)..(949): n is a, c, g, or t
  misc_feature (955)..(955): n is a, c, g, or t
  misc_feature (957)..(957): n is a, c, g, or t
  misc_feature (959)..(959): n is a, c, g, or t
  misc_feature (961)..(961): n is a, c, g, or t
  misc_feature (963)..(964): n is a, c, g, or t
  misc_feature (966)..(966): n is a, c, g, or t
  misc_feature (969)..(971): n is a, c, g, or t
  misc_feature (974)..(974): n is a, c, g, or t
  misc_feature (985)..(985): n is a, c, g, or t
  misc_feature (987)..(987): n is a, c, g, or t
  misc_feature (992)..(993): n is a, c, g, or t
  misc_feature (996)..(996): n is a, c, g, or t
  misc_feature (1006)..(1007): n is a, c, g, or t
  misc_feature (1012)..(1012): n is a, c, g, or t
  misc_feature (1023)..(1023): n is a, c, g, or t
  misc_feature (1028)..(1028): n is a, c, g, or t
  misc_feature (1035)..(1035): n is a, c, g, or t
  misc_feature (1039)..(1039): n is a, c, g, or t
  misc_feature (1041)..(1041): n is a, c, g, or t
  misc_feature (1046)..(1047): n is a, c, g, or t
  misc_feature (1056)..(1057): n is a, c, g, or t
  misc_feature (1062)..(1062): n is a, c, g, or t
  misc_feature (1065)..(1065): n is a, c, g, or t
  misc_feature (1069)..(1070): n is a, c, g, or t
  misc_feature (1075)..(1076): n is a, c, g, or t
  misc_feature (1084)..(1085): n is a, c, g, or t
  misc_feature (1091)..(1093): n is a, c, g, or t
  misc_feature (1096)..(1096): n is a, c, g, or t
  misc_feature (1099)..(1105): n is a, c, g, or t
  misc_feature (1107)..(1107): n is a, c, g, or t
  misc_feature (1111)..(1112): n is a, c, g, or t
  misc_feature (1117)..(1118): n is a, c, g, or t
  misc_feature (1122)..(1122): n is a, c, g, or t
  misc_feature (1124)..(1124): n is a, c, g, or t
  misc_feature (1126)..(1128): n is a, c, g, or t
  misc_feature (1134)..(1134): n is a, c, g, or t
  misc_feature (1137)..(1137): n is a, c, g, or t
  misc_feature (1146)..(1146): n is a, c, g, or t
  misc_feature (1151)..(1151): n is a, c, g, or t
  misc_feature (1158)..(1159): n is a, c, g, or t
  misc_feature (1166)..(1166): n is a, c, g, or t
  misc_feature (1170)..(1171): n is a, c, g, or t
  misc_feature (1176)..(1176): n is a, c, g, or t
  misc_feature (1182)..(1182): n is a, c, g, or t
  misc_feature (1184)..(1184): n is a, c, g, or t
  misc_feature (1187)..(1187): n is a, c, g, or t
  misc_feature (1192)..(1192): n is a, c, g, or t
  misc_feature (1194)..(1194): n is a, c, g, or t
  misc_feature (1196)..(1196): n is a, c, g, or t
ntagaggaaattactatggagaggatcgcatcaccatcaccatcacggatcctatttaggtgacactatagaatcgtcgacccacgcgtccgcttggacgctgcagaatggctcccgcaaagaagggtggcgagaagaaaaagggccgttctgccatcaacgaagtggtaacccgagaatacaccatcaacattcacaagcgcatccatggagtgggcttcaagaagcgtgcacctcgggcactcaaagagattcggaaatttgccatgaaggagatgggaactccagatgtgcgcattgacaccaggctcaacaaagctgtctgggccaaaggaataaggaatgtgccataccgaatccgtgtgcggctgtccagaaaacgtaatgaggatgaagattcaccaaataagctatatactttggttacctatgtacctgttaccactttcaaaaatctacagacagtcaatgtggatgagaactaatcgctgatcgtcagatcaaataaagttataaaaaaaaaaaaaaaaaaaaaaaaaaaaaaaaaaaaaaaaaaaaaanaaaacaannaaaaaaaaaaaaaaannangaaaaanacncanaaaaaaacnaaanaantnaannggggggcncnncccnnaaatngggttccaantancttnntnnannaaancttngancccngnttnaaatantnnacctanggacnccaaaatccnttnttgaaattttgttnnaaancccccnnntnccccccngggggttttttttttngggnnannnnncccgaacnangnttgccnaaatttttcgggnaataanggacangaaaanggctaaaaaaaaaaccnnngnaaaaannnccnncnnaaaatcccccaagggntnncnnnaaaanaantttntnaggncgtttttntnnnntgnncccngggnccttnaaaanccnaccttntncntngnntnttnnnttnttttttttaancnccctnnaanaaaaaaatannccccngtttttttcgngcccnttttttncccncnttttnnccccccccnnaaaanggncccnnccccnnaatttttnnaagggnnnaanaannnnnnnanctcnngtccnnttgnanannngtgttnccnccttttttnccccntttttcnnaaaaacnaaannaaaanattttncnttncttcntnangaaa

SEQ ID NO: 655 - DNA, 1366 bp, Homo Sapiens
  misc_feature (644)..(652): n is a, c, g, or t
  misc_feature (661)..(661): n is a, c, g, or t
  misc_feature (663)..(663): n is a, c, g, or t
  misc_feature (679)..(679): n is a, c, g, or t
  misc_feature (685)..(685): n is a, c, g, or t
  misc_feature (694)..(694): n is a, c, g, or t
  misc_feature (723)..(724): n is a, c, g, or t
  misc_feature (762)..(762): n is a, c, g, or t
  misc_feature (773)..(773): n is a, c, g, or t
  misc_feature (792)..(792): n is a, c, g, or t
  misc_feature (795)..(795): n is a, c, g, or t
  misc_feature (801)..(801): n is a, c, g, or t
  misc_feature (803)..(803): n is a, c, g, or t
  misc_feature (807)..(807): n is a, c, g, or t
  misc_feature (816)..(816): n is a, c, g, or t
  misc_feature (823)..(823): n is a, c, g, or t
  misc_feature (830)..(830): n is a, c, g, or t
  misc_feature (835)..(835): n is a, c, g, or t
  misc_feature (841)..(842): n is a, c, g, or t
  misc_feature (846)..(847): n is a, c, g, or t
  misc_feature (866)..(866): n is a, c, g, or t
  misc_feature (875)..(875): n is a, c, g, or t
  misc_feature (877)..(877): n is a, c, g, or t
  misc_feature (888)..(888): n is a, c, g, or t
  misc_feature (890)..(891): n is a, c, g, or t
  misc_feature (893)..(893): n is a, c, g, or t
  misc_feature (902)..(902): n is a, c, g, or t
  misc_feature (908)..(909): n is a, c, g, or t
  misc_feature (919)..(921): n is a, c, g, or t
  misc_feature (924)..(924): n is a, c, g, or t
  misc_feature (936)..(937): n is a, c, g, or t
  misc_feature (942)..(942): n is a, c, g, or t
  misc_feature (944)..(944): n is a, c, g, or t
  misc_feature (948)..(948): n is a, c, g, or t
  misc_feature (953)..(953): n is a, c, g, or t
  misc_feature (957)..(958): n is a, c, g, or t
  misc_feature (964)..(964): n is a, c, g, or t
  misc_feature (981)..(981): n is a, c, g, or t
  misc_feature (983)..(983): n is a, c, g, or t
  misc_feature (991)..(991): n is a, c, g, or t
  misc_feature (996)..(996): n is a, c, g, or t
  misc_feature (998)..(1000): n is a, c, g, or t
  misc_feature (1004)..(1004): n is a, c, g, or t
  misc_feature (1006)..(1006): n is a, c, g, or t
  misc_feature (1015)..(1015): n is a, c, g, or t
  misc_feature (1022)..(1022): n is a, c, g, or t
  misc_feature (1027)..(1027): n is a, c, g, or t
  misc_feature (1030)..(1030): n is a, c, g, or t
  misc_feature (1044)..(1044): n is a, c, g, or t
  misc_feature (1048)..(1048): n is a, c, g, or t
  misc_feature (1053)..(1053): n is a, c, g, or t
  misc_feature (1061)..(1061): n is a, c, g, or t
  misc_feature (1064)..(1064): n is a, c, g, or t
  misc_feature (1066)..(1066): n is a, c, g, or t
  misc_feature (1080)..(1084): n is a, c, g, or t
  misc_feature (1088)..(1088): n is a, c, g, or t
  misc_feature (1092)..(1092): n is a, c, g, or t
  misc_feature (1096)..(1097): n is a, c, g, or t
  misc_feature (1104)..(1105): n is a, c, g, or t
  misc_feature (1108)..(1108): n is a, c, g, or t
  misc_feature (1116)..(1116): n is a, c, g, or t
  misc_feature (1119)..(1119): n is a, c, g, or t
  misc_feature (1123)..(1124): n is a, c, g, or t
  misc_feature (1131)..(1132): n is a, c, g, or t
  misc_feature (1139)..(1141): n is a, c, g, or t
  misc_feature (1145)..(1146): n is a, c, g, or t
  misc_feature (1151)..(1153): n is a, c, g, or t
  misc_feature (1160)..(1160): n is a, c, g, or t
  misc_feature (1164)..(1164): n is a, c, g, or t
  misc_feature (1167)..(1167): n is a, c, g, or t
  misc_feature (1169)..(1169): n is a, c, g, or t
  misc_feature (1176)..(1176): n is a, c, g, or t
  misc_feature (1178)..(1178): n is a, c, g, or t
  misc_feature (1183)..(1183): n is a, c, g, or t
  misc_feature (1188)..(1190): n is a, c, g, or t
  misc_feature (1193)..(1193): n is a, c, g, or t
  misc_feature (1195)..(1195): n is a, c, g, or t
  misc_feature (1197)..(1200): n is a, c, g, or t
  misc_feature (1202)..(1202): n is a, c, g, or t
  misc_feature (1210)..(1210): n is a, c, g, or t
  misc_feature (1214)..(1216): n is a, c, g, or t
  misc_feature (1219)..(1222): n is a, c, g, or t
  misc_feature (1225)..(1225): n is a, c, g, or t
  misc_feature (1227)..(1227): n is a, c, g, or t
  misc_feature (1230)..(1230): n is a, c, g, or t
  misc_feature (1237)..(1237): n is a, c, g, or t
  misc_feature (1239)..(1239): n is a, c, g, or t
  misc_feature (1242)..(1243): n is a, c, g, or t
  misc_feature (1246)..(1246): n is a, c, g, or t
  misc_feature (1253)..(1253): n is a, c, g, or t
  misc_feature (1261)..(1262): n is a, c, g, or t
  misc_feature (1267)..(1269): n is a, c, g, or t
  misc_feature (1275)..(1276): n is a, c, g, or t
  misc_feature (1283)..(1283): n is a, c, g, or t
  misc_feature (1285)..(1285): n is a, c, g, or t
  misc_feature (1290)..(1291): n is a, c, g, or t
  misc_feature (1295)..(1295): n is a, c, g, or t
  misc_feature (1297)..(1297): n is a, c, g, or t
  misc_feature (1304)..(1306): n is a, c, g, or t
  misc_feature (1310)..(1311): n is a, c, g, or t
  misc_feature (1313)..(1314): n is a, c, g, or t
  misc_feature (1317)..(1318): n is a, c, g, or t
  misc_feature (1321)..(1321): n is a, c, g, or t
  misc_feature (1326)..(1328): n is a, c, g, or t
  misc_feature (1333)..(1337): n is a, c, g, or t
  misc_feature (1345)..(1345): n is a, c, g, or t
  misc_feature (1352)..(1352): n is a, c, g, or t
  misc_feature (1356)..(1356): n is a, c, g, or t
  misc_feature (1360)..(1364): n is a, c, g, or t
  misc_feature (1366)..(1366): n is a, c, g, or t
attagagaaattactatgagaggatcgcatcaccatcaccatcacggatcctatttaggtgacactatagaatcgtcgacccacgcgtccgcgagagctgcgaaaggcgagagctgcgaagggccaggtgtcgggcgctgtttctcgttttcatcatatagacaaaacagccctgctgcaaagatggtcaacgtacctaaaacccgaagaaccttctgtaagaagtgtggcaagcatcagcctcacaaagtgacacagtataagaagggcaaggattctttgtatgcccagggaaggaggcgctatgatcggaagcagagtggctatggtgggcagacaaagccaattttccggaagaaggctaagaccacaaagaagattgtgctaaggctggaatgtgttgagcctaactgcagatccaagaggatgctggctattaagagatgcaagcattttgaactgggaggagataagaagagaaagggccaagtgatccagttctaaactttgggatatttttcttcaattttgaagagaaaatggtgaagccatagaaaagttacccgagggaaaataaaaagaattcattttaaaaaaaaaaaaaaaaaaaaaaaaaaaaaaaaaaaaaaaaaaaaaaaaaaaannnnnnnnngggcggccncnccctatagtgagtcgnattaancttaattanctgaccttggactcctgttgatagatccnntaatgacctcaaaactccctctggatttgttcaaaacnctcggttgccnccgggcgttttttattggnganaatccnanctancttggcganattttcnggagctnaggangctaanntggnnaaaaaaatccctggatatncccccgttnanattcccaatgncnncntaaaaaaanattttnnaggcatttcnnncanttgctccaaggnncctanancccngaccnttcnnctgganttacggccctttttaangnccgtaaanaaaantnnncccnanttttatccngcctttnttccnttntttgcccccctganaaangcccntcccgaanttntnatggcaataaaaannnnnaacngggnaaannggaaaanngtncccccttnttncccnntttcccnnaaaaaannnaaannttttnnnccccccngggnggnantcccccncnatttnccggnnnttncncnnnntnttttcccnaaannnggnnnnttncnggnaaaaccngnccnnttncccaaanggtttttnnaaaannntttttnnccccccnanccccnngggnanttccccnnntttnntnnaannggnccaannnaaaannnnncccccccntttcccngggnaaannnnncn

SEQ ID NO: 656 - DNA, 1370 bp, Homo Sapiens
  misc_feature (266)..(266): n is a, c, g, or t
  misc_feature (338)..(338): n is a, c, g, or t
  misc_feature (344)..(344): n is a, c, g, or t
  misc_feature (361)..(361): n is a, c, g, or t
  misc_feature (365)..(365): n is a, c, g, or t
  misc_feature (368)..(368): n is a, c, g, or t
  misc_feature (386)..(386): n is a, c, g, or t
  misc_feature (388)..(388): n is a, c, g, or t
  misc_feature (391)..(391): n is a, c, g, or t
  misc_feature (399)..(399): n is a, c, g, or t
  misc_feature (402)..(402): n is a, c, g, or t
  misc_feature (410)..(410): n is a, c, g, or t
  misc_feature (417)..(418): n is a, c, g, or t
  misc_feature (425)..(425): n is a, c, g, or t
  misc_feature (427)..(427): n is a, c, g, or t
  misc_feature (431)..(431): n is a, c, g, or t
  misc_feature (438)..(438): n is a, c, g, or t
  misc_feature (441)..(441): n is a, c, g, or t
  misc_feature (451)..(451): n is a, c, g, or t
  misc_feature (460)..(460): n is a, c, g, or t
  misc_feature (462)..(462): n is a, c, g, or t
  misc_feature (476)..(476): n is a, c, g, or t
  misc_feature (493)..(493): n is a, c, g, or t
  misc_feature (497)..(497): n is a, c, g, or t
  misc_feature (504)..(504): n is a, c, g, or t
  misc_feature (518)..(518): n is a, c, g, or t
  misc_feature (528)..(528): n is a, c, g, or t
  misc_feature (535)..(535): n is a, c, g, or t
  misc_feature (545)..(545): n is a, c, g, or t
  misc_feature (564)..(564): n is a, c, g, or t
  misc_feature (566)..(566): n is a, c, g, or t
  misc_feature (589)..(589): n is a, c, g, or t
  misc_feature (598)..(598): n is a, c, g, or t
  misc_feature (602)..(603): n is a, c, g, or t
  misc_feature (605)..(606): n is a, c, g, or t
  misc_feature (622)..(622): n is a, c, g, or t
  misc_feature (629)..(630): n is a, c, g, or t
  misc_feature (639)..(639): n is a, c, g, or t
  misc_feature (641)..(641): n is a, c, g, or t
  misc_feature (656)..(656): n is a, c, g, or t
  misc_feature (674)..(674): n is a, c, g, or t
  misc_feature (679)..(681): n is a, c, g, or t
  misc_feature (684)..(685): n is a, c, g, or t
  misc_feature (700)..(700): n is a, c, g, or t
  misc_feature (704)..(706): n is a, c, g, or t
  misc_feature (718)..(719): n is a, c, g, or t
  misc_feature (721)..(724): n is a, c, g, or t
  misc_feature (733)..(734): n is a, c, g, or t
  misc_feature (736)..(737): n is a, c, g, or t
  misc_feature (745)..(745): n is a, c, g, or t
  misc_feature (754)..(754): n is a, c, g, or t
  misc_feature (780)..(780): n is a, c, g, or t
  misc_feature (801)..(801): n is a, c, g, or t
  misc_feature (811)..(812): n is a, c, g, or t
  misc_feature (816)..(816): n is a, c, g, or t
  misc_feature (820)..(820): n is a, c, g, or t
  misc_feature (822)..(825): n is a, c, g, or t
  misc_feature (827)..(827): n is a, c, g, or t
  misc_feature (834)..(834): n is a, c, g, or t
  misc_feature (837)..(837): n is a, c, g, or t
  misc_feature (840)..(841): n is a, c, g, or t
  misc_feature (846)..(846): n is a, c, g, or t
  misc_feature (849)..(851): n is a, c, g, or t
  misc_feature (855)..(867): n is a, c, g, or t
  misc_feature (869)..(869): n is a, c, g, or t
  misc_feature (886)..(886): n is a, c, g, or t
  misc_feature (898)..(898): n is a, c, g, or t
  misc_feature (900)..(902): n is a, c, g, or t
  misc_feature (909)..(909): n is a, c, g, or t
  misc_feature (912)..(913): n is a, c, g, or t
  misc_feature (916)..(916): n is a, c, g, or t
  misc_feature (918)..(918): n is a, c, g, or t
  misc_feature (920)..(920): n is a, c, g, or t
  misc_feature (922)..(922): n is a, c, g, or t
  misc_feature (924)..(924): n is a, c, g, or t
  misc_feature (939)..(940): n is a, c, g, or t
  misc_feature (948)..(949): n is a, c, g, or t
  misc_feature (957)..(959): n is a, c, g, or t
  misc_feature (962)..(962): n is a, c, g, or t
  misc_feature (965)..(965): n is a, c, g, or t
  misc_feature (974)..(978): n is a, c, g, or t
  misc_feature (980)..(994): n is a, c, g, or t
  misc_feature (996)..(996): n is a, c, g, or t
  misc_feature (1011)..(1032): n is a, c, g, or t
  misc_feature (1041)..(1052): n is a, c, g, or t
  misc_feature (1064)..(1095): n is a, c, g, or t
  misc_feature (1097)..(1101): n is a, c, g, or t
  misc_feature (1103)..(1113): n is a, c, g, or t
  misc_feature (1117)..(1119): n is a, c, g, or t
  misc_feature (1133)..(1135): n is a, c, g, or t
  misc_feature (1159)..(1161): n is a, c, g, or t
  misc_feature (1163)..(1163): n is a, c, g, or t
  misc_feature (1165)..(1169): n is a, c, g, or t
  misc_feature (1171)..(1171): n is a, c, g, or t
  misc_feature (1186)..(1188): n is a, c, g, or t
  misc_feature (1190)..(1237): n is a, c, g, or t
  misc_feature (1239)..(1242): n is a, c, g, or t
  misc_feature (1244)..(1245): n is a, c, g, or t
  misc_feature (1247)..(1367): n is a, c, g, or t
  misc_feature (1370)..(1370): n is a, c, g, or t
gagaaattactatgagaggatcgcatcaccatcaccatcacggatcctatttaggtgacactatagaatcgtcgacccacgcgtccgcggcgctcggcaagttctcccaggagaaagccatgttcagttcgagcgccaagatcgtgaagcccaatggcgagaagccggacgagttcgagtccggcatctcccaggctcttctggagctggagatgaactcggacctcaaggctcagctcagggagctgaatattacggcagctaangaaaattgaagttggtggtggtcggaaagctatcataatctttgttcccgttcctcactgaaatctttccanaaatcnagtccggctagtacccnaatnganaaaaagttcagtgggaancntgncctctttntcncccaaagnaaaattnngcctaancnactncgaaaanccngaaaaaaaanaaacaaaangnttcccaggaacccnaatcttgaaattgggcnaaangcccccnttgggggaattggnttttccccanccaaaanttgggggggnaaaaaaaaccccccccaananaaagggggcccccgccccaaaanggttttttngggnnanncccccccaaaaaattnggggaanncaggggggnanctttttttggggggncaaaaaaaaacccccccnggggnnnggnnttttttttttttttncccnnntttttttttttnntnnnnaaaaggggnntnnaaaaaaanttttttttnccccccaaaaaaaaaaaaaaaaaaangggggggcccccccccccccngggggggggnnaaanaaanannnnanaaaaaanggngcnnccccnccnnngggnnnnnnnnnnnnngnccccccccccccccccntttttttttttnannnccccccnccnncgncncncncnttttttttttttttnnaaaaaaanncccccccnnnggnggnttttttttnnnnngnnnnnnnnnnnnnnnanaaaaaaaaaaaaaannnnnnnnnnnnnnnnnnnnnnttttttttnnnnnnnnnnnnaaaaaaaaaaannnnnnnnnnnnnnnnnnnnnnnnnnnnnnnnannnnnannnnnnnnnnngggnnntttttttttttttnnnaaaaaaaaaaaaaaaaaaaaaaannntntnnnnntntttttttttttttcnnncnnnnnnnnnnnnnnnnnnnnnnnnnnnnnnnnnnnnnnnnnnnnnnnngnnnngnngnnnnnnnnnnnnnnnnnnnnnnnnnnnnnnnnnnnnnnnnnnnnnnnnnnnnnnnnnnnnnnnnnnnnnnnnnnnnnnnnnnnnnnnnnnnnnnnnnnnnnnnnnnnnnnnnnnnnnnnnnttn

SEQ ID NO: 657 - DNA, 1229 bp, Homo Sapiens
  misc_feature (2)..(2): n is a, c, g, or t
  misc_feature (16)..(16): n is a, c, g, or t
  misc_feature (714)..(714): n is a, c, g, or t
  misc_feature (776)..(776): n is a, c, g, or t
  misc_feature (843)..(843): n is a, c, g, or t
  misc_feature (868)..(868): n is a, c, g, or t
  misc_feature (877)..(877): n is a, c, g, or t
  misc_feature (901)..(901): n is a, c, g, or t
  misc_feature (927)..(927): n is a, c, g, or t
  misc_feature (932)..(932): n is a, c, g, or t
  misc_feature (936)..(936): n is a, c, g, or t
  misc_feature (939)..(939): n is a, c, g, or t
  misc_feature (952)..(952): n is a, c, g, or t
  misc_feature (963)..(963): n is a, c, g, or t
  misc_feature (971)..(971): n is a, c, g, or t
  misc_feature (975)..(976): n is a, c, g, or t
  misc_feature (992)..(992): n is a, c, g, or t
  misc_feature (1008)..(1009): n is a, c, g, or t
  misc_feature (1054)..(1054): n is a, c, g, or t
  misc_feature (1073)..(1073): n is a, c, g, or t
  misc_feature (1075)..(1075): n is a, c, g, or t
  misc_feature (1081)..(1081): n is a, c, g, or t
  misc_feature (1085)..(1085): n is a, c, g, or t
  misc_feature (1091)..(1091): n is a, c, g, or t
  misc_feature (1100)..(1101): n is a, c, g, or t
  misc_feature (1105)..(1105): n is a, c, g, or t
  misc_feature (1108)..(1108): n is a, c, g, or t
  misc_feature (1111)..(1112): n is a, c, g, or t
  misc_feature (1114)..(1114): n is a, c, g, or t
  misc_feature (1121)..(1121): n is a, c, g, or t
  misc_feature (1123)..(1124): n is a, c, g, or t
  misc_feature (1127)..(1128): n is a, c, g, or t
  misc_feature (1132)..(1132): n is a, c, g, or t
  misc_feature (1137)..(1137): n is a, c, g, or t
  misc_feature (1143)..(1143): n is a, c, g, or t
  misc_feature (1152)..(1152): n is a, c, g, or t
  misc_feature (1157)..(1157): n is a, c, g, or t
  misc_feature (1167)..(1167): n is a, c, g, or t
  misc_feature (1171)..(1171): n is a, c, g, or t
  misc_feature (1183)..(1183): n is a, c, g, or t
  misc_feature (1206)..(1206): n is a, c, g, or t
  misc_feature (1208)..(1208): n is a, c, g, or t
  misc_feature (1210)..(1210): n is a, c, g, or t
  misc_feature (1220)..(1220): n is a, c, g, or t
  misc_feature (1224)..(1225): n is a, c, g, or t
tngaggaaaattactntgagaggatgcataccatcaccatcacggatcctatttaggtgacactatagaatcgtcgacccacgcgtccgcccacgcgtccggccagcgccgagcgatgggcatctctcgggacaactggcacaagcgccgcaaaaccgggggcaagagaaagccctaccacaagaagcggaagtatgagttggggcgcccagctgccaacaccaagattggcccccgccgcatccacacagtccgtgtgcggggaggtaacaagaaataccgtgccctgaggttggacgtggggaatttctcctggggctcagagtgttgtactcgtaaaacaaggatcatcgatgttgtctacaatgcatctaataacgagctggttcgtaccaagaccctggtgaagaattgcatcgtgctcatcgacagcacaccgtaccgacagtggtacgagtcccactatgcgctgcccctgggccgcaagaagggagccaagctgactcctgaggaagaagagattttaaacaaaaaacgatctaaaaaaattcagaagaaatatgatgaaaggaaaaagaatgccaaaatcagcagtctcctggaggagcagttccagcagggcaagcttcttgcgtgcatcgcttcaaggccgggacagtgtggccgagcagatggctatgtgctagagggcaaagagttggagttctatcttangaaaaatcaaggcccgcaaaggcaaataaaatccttgttttgtcttcacccatgtaataaanggtgtttattgtttttgttcccacaaaaaaaaaaaaaaaaaaaaaaaaaaaagggcggccgctcccntatagtgagtcgtattaagcttaanttagctgancttggactcctgttgaataaaatnccagtaatgacctcaaaactcccttntggantttnttnaaaaaccctcggntgccccccggngttttttntttnntgaaaatccaagctancttggggaaaattttnnggagctaagggagcttaaaatggggaaaaaaattccttgggattnccccccgtttaatttcccnangggctncttnaaaaantttttgagnntttncantcnntncccaaantnnctnnaacnaaacngttccnctggatttnacggncttttttaanaccntaaaaaaaaaancccaattttttccggcctttttncnanttttgccccnggannaggc

SEQ ID NO: 658 - DNA, 1386 bp, Homo Sapiens
  misc_feature (1)..(1): n is a, c, g, or t
  misc_feature (627)..(627): n is a, c, g, or t
  misc_feature (629)..(629): n is a, c, g, or t
  misc_feature (638)..(639): n is a, c, g, or t
  misc_feature (644)..(645): n is a, c, g, or t
  misc_feature (668)..(668): n is a, c, g, or t
  misc_feature (674)..(674): n is a, c, g, or t
  misc_feature (742)..(742): n is a, c, g, or t
  misc_feature (760)..(760): n is a, c, g, or t
  misc_feature (819)..(819): n is a, c, g, or t
  misc_feature (871)..(871): n is a, c, g, or t
  misc_feature (881)..(881): n is a, c, g, or t
  misc_feature (893)..(893): n is a, c, g, or t
  misc_feature (895)..(895): n is a, c, g, or t
  misc_feature (923)..(923): n is a, c, g, or t
  misc_feature (926)..(926): n is a, c, g, or t
  misc_feature (943)..(943): n is a, c, g, or t
  misc_feature (952)..(952): n is a, c, g, or t
  misc_feature (968)..(968): n is a, c, g, or t
  misc_feature (1004)..(1004): n is a, c, g, or t
  misc_feature (1021)..(1021): n is a, c, g, or t
  misc_feature (1032)..(1032): n is a, c, g, or t
  misc_feature (1039)..(1039): n is a, c, g, or t
  misc_feature (1043)..(1043): n is a, c, g, or t
  misc_feature (1054)..(1054): n is a, c, g, or t
  misc_feature (1059)..(1059): n is a, c, g, or t
  misc_feature (1061)..(1061): n is a, c, g, or t
  misc_feature (1065)..(1065): n is a, c, g, or t
  misc_feature (1068)..(1068): n is a, c, g, or t
  misc_feature (1070)..(1070): n is a, c, g, or t
  misc_feature (1081)..(1081): n is a, c, g, or t
  misc_feature (1084)..(1085): n is a, c, g, or t
  misc_feature (1087)..(1087): n is a, c, g, or t
  misc_feature (1091)..(1091): n is a, c, g, or t
  misc_feature (1093)..(1093): n is a, c, g, or t
  misc_feature (1103)..(1103): n is a, c, g, or t
  misc_feature (1123)..(1123): n is a, c, g, or t
  misc_feature (1127)..(1127): n is a, c, g, or t
  misc_feature (1134)..(1134): n is a, c, g, or t
  misc_feature (1140)..(1140): n is a, c, g, or t
  misc_feature (1153)..(1153): n is a, c, g, or t
  misc_feature (1156)..(1156): n is a, c, g, or t
  misc_feature (1161)..(1161): n is a, c, g, or t
  misc_feature (1167)..(1167): n is a, c, g, or t
  misc_feature (1174)..(1174): n is a, c, g, or t
  misc_feature (1180)..(1180): n is a, c, g, or t
  misc_feature (1186)..(1188): n is a, c, g, or t
  misc_feature (1190)..(1190): n is a, c, g, or t
  misc_feature (1199)..(1199): n is a, c, g, or t
  misc_feature (1201)..(1201): n is a, c, g, or t
  misc_feature (1205)..(1205): n is a, c, g, or t
  misc_feature (1214)..(1214): n is a, c, g, or t
  misc_feature (1235)..(1235): n is a, c, g, or t
  misc_feature (1240)..(1240): n is a, c, g, or t
  misc_feature (1242)..(1242): n is a, c, g, or t
  misc_feature (1245)..(1246): n is a, c, g, or t
  misc_feature (1249)..(1249): n is a, c, g, or t
  misc_feature (1251)..(1252): n is a, c, g, or t
  misc_feature (1257)..(1257): n is a, c, g, or t
  misc_feature (1260)..(1261): n is a, c, g, or t
  misc_feature (1268)..(1268): n is a, c, g, or t
  misc_feature (1273)..(1273): n is a, c, g, or t
  misc_feature (1275)..(1275): n is a, c, g, or t
  misc_feature (1278)..(1278): n is a, c, g, or t
  misc_feature (1281)..(1281): n is a, c, g, or t
  misc_feature (1286)..(1286): n is a, c, g, or t
  misc_feature (1290)..(1291): n is a, c, g, or t
  misc_feature (1294)..(1294): n is a, c, g, or t
  misc_feature (1298)..(1298): n is a, c, g, or t
  misc_feature (1303)..(1303): n is a, c, g, or t
  misc_feature (1308)..(1308): n is a, c, g, or t
  misc_feature (1311)..(1311): n is a, c, g, or t
  misc_feature (1313)..(1313): n is a, c, g, or t
  misc_feature (1321)..(1322): n is a, c, g, or t
  misc_feature (1324)..(1324): n is a, c, g, or t
  misc_feature (1326)..(1326): n is a, c, g, or t
  misc_feature (1335)..(1336): n is a, c, g, or t
  misc_feature (1346)..(1347): n is a, c, g, or t
  misc_feature (1351)..(1351): n is a, c, g, or t
  misc_feature (1354)..(1354): n is a, c, g, or t
  misc_feature (1366)..(1367): n is a, c, g, or t
  misc_feature (1374)..(1375): n is a, c, g, or t
  misc_feature (1386)..(1386): n is a, c, g, or t
nttagagaaattactatgagaggatcgcatcaccatcaccatcacggatcctatttaggtgacactatagaatcgtcgacccacgcgtccgggaagatggcggacattcagactgagcgtgcctaccaaaagcagccgaccatctttcaaaacaagaagagggtcctgctgggagaaactggcaaggagaagctcccgcggtactacaagaacatcggtctgggcttcaagacacccaaggaggctattgagggcacctacattgacaagaaatgccccttcactggtaatgtgtccattcgagggcggatcctctctggcgtggtgaccaagatgaagatgcagaggaccattgtcatccgccgagactatctgcactacatccgcaagtacaaccgcttcgagaagcgccacaagaacatgtctgtacacctgtccccctgcttcagggacgtccagatcggtgacatcgtcacagtgggcgagtgccggcctctgagcaagacagtgcgcttcaacgtgctcaaggtcaccaaggctgccggcaccaagaagcagttccagaagttctgaggctggacatcggcccgctccccacaatgaaataaagttattttctcattcccnanaaaaaaaannaaaannaaaaaaaaaaaaaaaaaaaaaanaaaaanaagggcggccgctccctatagtgagtcgtattaagcttaattagctgagcttggactcctgttgatanatccagtaatgacctcanaactccatctggatttgttcaaaacgctcggttgccgccgggcgttttttattggtganaatccaagctagcttggcgagattttcaggagctaaggaagctaaaatgganaaaaaaatcnctggatataccncngttgatatatcccaatggcatcgtaaanaanattttgaggcatttcantcagttgcncaatgtacctaaaacnaaccgttcagctggaaattacggccttttttaaaanccgtaaaaaaaaataancccaagttttntccggcntttnttcaatttttngcccncntgangangnccctccggaanttnntntggnantgaaaaacgngaactggggaattgggaaangttnccccttnttaacngttttccttgaanaantgaangttttntcccctnggaggnaaaacnnnanaatttccgngntttncaacatttnttccaaaaggggggttaaggnaaacngnccnnttncnnaaggnttnngaaaatnttttntnccnccnccccngggnnttncccnttttnttaanggncnaaaaaaanntntncccctttcnngggaaatttnnaggnaangggggccggggnnttttttnnttttttttttn

SEQ ID NO: 659 - DNA, 1451 bp, Homo Sapiens
  misc_feature (643)..(643): n is a, c, g, or t
  misc_feature (645)..(645): n is a, c, g, or t
  misc_feature (651)..(651): n is a, c, g, or t
  misc_feature (666)..(666): n is a, c, g, or t
  misc_feature (672)..(672): n is a, c, g, or t
  misc_feature (691)..(691): n is a, c, g, or t
  misc_feature (705)..(705): n is a, c, g, or t
  misc_feature (722)..(722): n is a, c, g, or t
  misc_feature (761)..(761): n is a, c, g, or t
  misc_feature (770)..(770): n is a, c, g, or t
  misc_feature (801)..(801): n is a, c, g, or t
  misc_feature (817)..(817): n is a, c, g, or t
  misc_feature (843)..(843): n is a, c, g, or t
  misc_feature (861)..(861): n is a, c, g, or t
  misc_feature (875)..(875): n is a, c, g, or t
  misc_feature (881)..(881): n is a, c, g, or t
  misc_feature (888)..(888): n is a, c, g, or t
  misc_feature (895)..(895): n is a, c, g, or t
  misc_feature (916)..(917): n is a, c, g, or t
  misc_feature (926)..(926): n is a, c, g, or t
  misc_feature (928)..(928): n is a, c, g, or t
  misc_feature (938)..(938): n is a, c, g, or t
  misc_feature (946)..(947): n is a, c, g, or t
  misc_feature (949)..(949): n is a, c, g, or t
  misc_feature (953)..(953): n is a, c, g, or t
  misc_feature (955)..(956): n is a, c, g, or t
  misc_feature (963)..(963): n is a, c, g, or t
  misc_feature (980)..(980): n is a, c, g, or t
  misc_feature (986)..(986): n is a, c, g, or t
  misc_feature (996)..(997): n is a, c, g, or t
  misc_feature (1013)..(1013): n is a, c, g, or t
  misc_feature (1017)..(1017): n is a, c, g, or t
  misc_feature (1022)..(1022): n is a, c, g, or t
  misc_feature (1035)..(1035): n is a, c, g, or t
  misc_feature (1042)..(1042): n is a, c, g, or t
  misc_feature (1046)..(1048): n is a, c, g, or t
  misc_feature (1060)..(1060): n is a, c, g, or t
  misc_feature (1066)..(1066): n is a, c, g, or t
  misc_feature (1069)..(1070): n is a, c, g, or t
  misc_feature (1081)..(1081): n is a, c, g, or t
  misc_feature (1086)..(1086): n is a, c, g, or t
  misc_feature (1093)..(1093): n is a, c, g, or t
  misc_feature (1106)..(1107): n is a, c, g, or t
  misc_feature (1111)..(1111): n is a, c, g, or t
  misc_feature (1114)..(1114): n is a, c, g, or t
  misc_feature (1126)..(1126): n is a, c, g, or t
  misc_feature (1129)..(1129): n is a, c, g, or t
  misc_feature (1136)..(1136): n is a, c, g, or t
  misc_feature (1146)..(1146): n is a, c, g, or t
  misc_feature (1148)..(1148): n is a, c, g, or t
  misc_feature (1151)..(1151): n is a, c, g, or t
  misc_feature (1156)..(1157): n is a, c, g, or t
  misc_feature (1159)..(1159): n is a, c, g, or t
  misc_feature (1171)..(1171): n is a, c, g, or t
  misc_feature (1174)..(1174): n is a, c, g, or t
  misc_feature (1179)..(1180): n is a, c, g, or t
  misc_feature (1184)..(1184): n is a, c, g, or t
  misc_feature (1190)..(1193): n is a, c, g, or t
  misc_feature (1195)..(1196): n is a, c, g, or t
  misc_feature (1200)..(1202): n is a, c, g, or t
  misc_feature (1207)..(1207): n is a, c, g, or t
  misc_feature (1217)..(1217): n is a, c, g, or t
  misc_feature (1221)..(1221): n is a, c, g, or t
  misc_feature (1232)..(1232): n is a, c, g, or t
  misc_feature (1235)..(1235): n is a, c, g, or t
  misc_feature (1237)..(1238): n is a, c, g, or t
  misc_feature (1240)..(1241): n is a, c, g, or t
  misc_feature (1246)..(1246): n is a, c, g, or t
  misc_feature (1249)..(1249): n is a, c, g, or t
  misc_feature (1258)..(1259): n is a, c, g, or t
  misc_feature (1261)..(1262): n is a, c, g, or t
  misc_feature (1266)..(1266): n is a, c, g, or t
  misc_feature (1268)..(1268): n is a, c, g, or t
  misc_feature (1270)..(1270): n is a, c, g, or t
  misc_feature (1272)..(1272): n is a, c, g, or t
  misc_feature (1274)..(1274): n is a, c, g, or t
  misc_feature (1276)..(1276): n is a, c, g, or t
  misc_feature (1301)..(1301): n is a, c, g, or t
  misc_feature (1304)..(1304): n is a, c, g, or t
  misc_feature (1309)..(1309): n is a, c, g, or t
  misc_feature (1316)..(1317): n is a, c, g, or t
  misc_feature (1319)..(1319): n is a, c, g, or t
  misc_feature (1330)..(1330): n is a, c, g, or t
  misc_feature (1334)..(1334): n is a, c, g, or t
  misc_feature (1338)..(1338): n is a, c, g, or t
  misc_feature (1356)..(1356): n is a, c, g, or t
  misc_feature (1361)..(1361): n is a, c, g, or t
  misc_feature (1366)..(1366): n is a, c, g, or t
  misc_feature (1369)..(1370): n is a, c, g, or t
  misc_feature (1374)..(1375): n is a, c, g, or t
  misc_feature (1378)..(1379): n is a, c, g, or t
  misc_feature (1382)..(1382): n is a, c, g, or t
  misc_feature (1384)..(1384): n is a, c, g, or t
  misc_feature (1393)..(1393): n is a, c, g, or t
  misc_feature (1396)..(1396): n is a, c, g, or t
  misc_feature (1399)..(1401): n is a, c, g, or t
  misc_feature (1403)..(1403): n is a, c, g, or t
  misc_feature (1405)..(1405): n is a, c, g, or t
  misc_feature (1408)..(1408): n is a, c, g, or t
  misc_feature (1414)..(1414): n is a, c, g, or t
  misc_feature (1418)..(1418): n is a, c, g, or t
  misc_feature (1424)..(1424): n is a, c, g, or t
  misc_feature (1426)..(1426): n is a, c, g, or t
  misc_feature (1429)..(1429): n is a, c, g, or t
  misc_feature (1433)..(1433): n is a, c, g, or t
  misc_feature (1435)..(1436): n is a, c, g, or t
  misc_feature (1438)..(1438): n is a, c, g, or t
  misc_feature (1445)..(1447): n is a, c, g, or t
tagagaaattactatgagaggatcgcatcaccatcaccatcacggatcctatttaggtgacactatagaatcgtcgacccacgcgtccggtggagtctggagacgacgtgcagaaatggcacctcgaaaggggaaggaaaagaaggaagaacaggtcatcagcctcggacctcaggtggctgaaggagagaatgtatttggtgtctgccatatctttgcatccttcaatgacacttttgtccatgtcactgatctttctggcaaggaaaccatctgccgtgtgactggtgggatgaaggtaaaggcagaccgagatgaatcctcaccatatgctgctatgttggctgcccaggatgtggcccagaggtgcaaggagctgggtatcaccgccctacacatcaaactccgggccacaggaggaaataggaccaagacccctggacctggggcccagtcggccctcagagcccttgcccgctcgggtatgaagatcgggcggattgaggatgtcacccccatcccctctgacagcactcgcaggaaggggggtcgccgtggtcgccgtctgtgaacaagattcctcaaaatattttctgttaataaattgccttcatgtaaaaaaaaataaaaaaaaaaaaaaaantnaaaaanaaaaaggggcggccnctcccnatagtgagtcgtattaaancttaattagctgancttggactcctgttganagatccagtaatgacctcaaaaactccatctggaatttnttcaaaacnctcggttgcccccggggcgtttttttattgntgaagaatccaacctnactttggccgagaattttcaggaagntaaggaagctaaaatggnagaaaaaaatcccntggaanatatccnccgtttnaaattatcccaatggccttcnnaaaaaaaananttttgaaggnattttcanncnattncnnccaatgntacctataaccccaaanccgttncacctggaannttaacggccttttttnaaanccccnaaaaaaaaaaaancccaagntttnnnccggcccttttnttcaanttnnttgcccccctngaaanaagcccnccccgaattttcnntggnaanaaaaacggaaanctnggaaaanggaaaaaggntnccnccttnntnccccctttttanaanaaatnnaaancttttnnnncnntggnnngaaanccccaaaatnttcngggttttctcnaantnntnnccaanaangggcggttnngnnaaancngncntntncctaagggtttttaaaattttttcnccncccanccccggnnanttcccttttantcantggnaaatggaaattttccccnttttncaggnaanntatnnagnnaantnaaacccccnaanttnnntntnttncccccnccanatatananatnaagngnngncattttnnntttc

SEQ ID NO: 660 - DNA, 1369 bp, Homo Sapiens
  misc_feature (1)..(1): n is a, c, g, or t
  misc_feature (3)..(3): n is a, c, g, or t
  misc_feature (829)..(829): n is a, c, g, or t
  misc_feature (849)..(849): n is a, c, g, or t
  misc_feature (896)..(896): n is a, c, g, or t
  misc_feature (901)..(901): n is a, c, g, or t
  misc_feature (921)..(921): n is a, c, g, or t
  misc_feature (963)..(963): n is a, c, g, or t
  misc_feature (973)..(973): n is a, c, g, or t
  misc_feature (999)..(999): n is a, c, g, or t
  misc_feature (1001)..(1001): n is a, c, g, or t
  misc_feature (1015)..(1015): n is a, c, g, or t
  misc_feature (1022)..(1022): n is a, c, g, or t
  misc_feature (1038)..(1038): n is a, c, g, or t
  misc_feature (1041)..(1042): n is a, c, g, or t
  misc_feature (1050)..(1050): n is a, c, g, or t
  misc_feature (1054)..(1054): n is a, c, g, or t
  misc_feature (1061)..(1061): n is a, c, g, or t
  misc_feature (1067)..(1067): n is a, c, g, or t
  misc_feature (1071)..(1071): n is a, c, g, or t
  misc_feature (1079)..(1079): n is a, c, g, or t
  misc_feature (1082)..(1082): n is a, c, g, or t
  misc_feature (1089)..(1089): n is a, c, g, or t
  misc_feature (1094)..(1094): n is a, c, g, or t
  misc_feature (1098)..(1098): n is a, c, g, or t
  misc_feature (1100)..(1100): n is a, c, g, or t
  misc_feature (1117)..(1117): n is a, c, g, or t
  misc_feature (1123)..(1123): n is a, c, g, or t
  misc_feature (1130)..(1130): n is a, c, g, or t
  misc_feature (1141)..(1141): n is a, c, g, or t
  misc_feature (1149)..(1149): n is a, c, g, or t
  misc_feature (1152)..(1153): n is a, c, g, or t
  misc_feature (1157)..(1158): n is a, c, g, or t
  misc_feature (1161)..(1162): n is a, c, g, or t
  misc_feature (1164)..(1164): n is a, c, g, or t
  misc_feature (1171)..(1171): n is a, c, g, or t
  misc_feature (1174)..(1174): n is a, c, g, or t
  misc_feature (1179)..(1179): n is a, c, g, or t
  misc_feature (1183)..(1183): n is a, c, g, or t
  misc_feature (1189)..(1189): n is a, c, g, or t
  misc_feature (1196)..(1196): n is a, c, g, or t
  misc_feature (1200)..(1200): n is a, c, g, or t
  misc_feature (1203)..(1203): n is a, c, g, or t
  misc_feature (1207)..(1207): n is a, c, g, or t
  misc_feature (1215)..(1215): n is a, c, g, or t
  misc_feature (1217)..(1217): n is a, c, g, or t
  misc_feature (1219)..(1219): n is a, c, g, or t
  misc_feature (1226)..(1226): n is a, c, g, or t
  misc_feature (1229)..(1229): n is a, c, g, or t
  misc_feature (1248)..(1250): n is a, c, g, or t
  misc_feature (1256)..(1257): n is a, c, g, or t
  misc_feature (1260)..(1260): n is a, c, g, or t
  misc_feature (1264)..(1264): n is a, c, g, or t
  misc_feature (1266)..(1266): n is a, c, g, or t
  misc_feature (1279)..(1279): n is a, c, g, or t
  misc_feature (1282)..(1282): n is a, c, g, or t
  misc_feature (1285)..(1285): n is a, c, g, or t
  misc_feature (1287)..(1287): n is a, c, g, or t
  misc_feature (1291)..(1292): n is a, c, g, or t
  misc_feature (1296)..(1296): n is a, c, g, or t
  misc_feature (1299)..(1300): n is a, c, g, or t
  misc_feature (1309)..(1309): n is a, c, g, or t
  misc_feature (1315)..(1315): n is a, c, g, or t
  misc_feature (1322)..(1327): n is a, c, g, or t
  misc_feature (1330)..(1330): n is a, c, g, or t
  misc_feature (1333)..(1339): n is a, c, g, or t
  misc_feature (1341)..(1355): n is a, c, g, or t
  misc_feature (1357)..(1358): n is a, c, g, or t
  misc_feature (1360)..(1369): n is a, c, g, or t
nancaaagaaataactatgagaggatcgcatcaccatcaccatcacggatcctatttaggtgacactatagaatcgtcgacccacgcgtccgggcgccgcgcggtgaggttgtctagtccacgctcggagccatgccgtccaagggcccgctgcagtctgtgcaggtcttcggacgcaagaagacagcgacagctgtggcgcactgcaaacgcggcaatggtctcatcaaggtgaacgggcggcccctggagatgattgagccgcgcacgctacagtacaagctgctggagccagttctgcttctcggcaaggagcgatttgctggtgtagacatccgtgtccgtgtaaagggtggtggtcacgtggcccagatttatgctatccgtcagtccatctccaaagccctggtggcctattaccagaaatatgtggatgaggcttccaagaaggagatcaaagacatcctcatccagtatgaccggaccctgctggtagctgaccctcgtcgctgcgagtccaaaaagtttggaggtcctggtgcccgcgctcgctaccagaaatcctaccgataagcccatcgtgactcaaaactcacttgtataataaacagtttttgagggattttaaagtttcaaaaaaaaaaaaaaaaaaaagggcggccgctccctatagtgagtcgtattaagcttaattagctgagcttggactcctgttgatagatccagtaatgacctcagaactccatctggatttgttcaaaacgctcggttgccgccgggcgttttttattggtgagaatccaagctagcttggcgagattttcagganctaaggaagctaaaatgganaaaaaaatcactggatataccaccgttgatatatcccaatggcatcntaaanaacattttgaggcatttcantcagttgctcaatgtacctataaccaaaccgttcagctgganattacggccntttttaaaaaccgtaaaaaaaataancncaagttttatccgnctttatncaaattcttgcccccngannaaggctcntccngaaattnctatgnaatnaaaaacgnganctggganatggnaaangntcccccttgtaaccccntttccngaacaantgaaacttttnttcccttnganngaannccnnanaatttcnggnatttntacnaaattnccaaaangggnggnttanggaaaacngncnatttccnaanggtttttgaaaaatttttnnncccccnnccngggnanttccccttttatnaanggncnaaannaaanttnnccccctttnccgggnaaaaaannnnnnaanggnnnnnnngnnnnnnnnnnnnnnntnngnnnnnnnnnn

SEQ ID NO: 661 - DNA, 1429 bp, Homo Sapiens
  misc_feature (2)..(4): n is a, c, g, or t
  misc_feature (6)..(6): n is a, c, g, or t
  misc_feature (565)..(566): n is a, c, g, or t
  misc_feature (632)..(632): n is a, c, g, or t
  misc_feature (638)..(638): n is a, c, g, or t
  misc_feature (686)..(686): n is a, c, g, or t
  misc_feature (748)..(748): n is a, c, g, or t
  misc_feature (823)..(823): n is a, c, g, or t
  misc_feature (848)..(849): n is a, c, g, or t
  misc_feature (854)..(854): n is a, c, g, or t
  misc_feature (874)..(874): n is a, c, g, or t
  misc_feature (911)..(911): n is a, c, g, or t
  misc_feature (927)..(927): n is a, c, g, or t
  misc_feature (936)..(936): n is a, c, g, or t
  misc_feature (946)..(946): n is a, c, g, or t
  misc_feature (955)..(955): n is a, c, g, or t
  misc_feature (975)..(975): n is a, c, g, or t
  misc_feature (981)..(981): n is a, c, g, or t
  misc_feature (983)..(984): n is a, c, g, or t
  misc_feature (990)..(990): n is a, c, g, or t
  misc_feature (1004)..(1004): n is a, c, g, or t
  misc_feature (1007)..(1007): n is a, c, g, or t
  misc_feature (1010)..(1010): n is a, c, g, or t
  misc_feature (1018)..(1018): n is a, c, g, or t
  misc_feature (1026)..(1026): n is a, c, g, or t
  misc_feature (1028)..(1028): n is a, c, g, or t
  misc_feature (1051)..(1051): n is a, c, g, or t
  misc_feature (1056)..(1056): n is a, c, g, or t
  misc_feature (1068)..(1069): n is a, c, g, or t
  misc_feature (1085)..(1085): n is a, c, g, or t
  misc_feature (1088)..(1088): n is a, c, g, or t
  misc_feature (1098)..(1098): n is a, c, g, or t
  misc_feature (1113)..(1113): n is a, c, g, or t
  misc_feature (1130)..(1130): n is a, c, g, or t
  misc_feature (1136)..(1136): n is a, c, g, or t
  misc_feature (1143)..(1143): n is a, c, g, or t
  misc_feature (1164)..(1164): n is a, c, g, or t
  misc_feature (1168)..(1168): n is a, c, g, or t
  misc_feature (1175)..(1175): n is a, c, g, or t
  misc_feature (1179)..(1179): n is a, c, g, or t
  misc_feature (1182)..(1182): n is a, c, g, or t
  misc_feature (1185)..(1185): n is a, c, g, or t
  misc_feature (1207)..(1208): n is a, c, g, or t
  misc_feature (1214)..(1214): n is a, c, g, or t
  misc_feature (1222)..(1222): n is a, c, g, or t
  misc_feature (1237)..(1237): n is a, c, g, or t
  misc_feature (1240)..(1240): n is a, c, g, or t
  misc_feature (1265)..(1265): n is a, c, g, or t
  misc_feature (1273)..(1274): n is a, c, g, or t
  misc_feature (1284)..(1285): n is a, c, g, or t
  misc_feature (1287)..(1288): n is a, c, g, or t
  misc_feature (1290)..(1291): n is a, c, g, or t
  misc_feature (1302)..(1302): n is a, c, g, or t
  misc_feature (1305)..(1305): n is a, c, g, or t
  misc_feature (1309)..(1309): n is a, c, g, or t
  misc_feature (1320)..(1320): n is a, c, g, or t
  misc_feature (1323)..(1324): n is a, c, g, or t
  misc_feature (1326)..(1326): n is a, c, g, or t
  misc_feature (1335)..(1335): n is a, c, g, or t
  misc_feature (1341)..(1341): n is a, c, g, or t
  misc_feature (1343)..(1343): n is a, c, g, or t
  misc_feature (1346)..(1346): n is a, c, g, or t
  misc_feature (1353)..(1353): n is a, c, g, or t
  misc_feature (1359)..(1359): n is a, c, g, or t
  misc_feature (1362)..(1363): n is a, c, g, or t
  misc_feature (1368)..(1368): n is a, c, g, or t
  misc_feature (1377)..(1378): n is a, c, g, or t
  misc_feature (1382)..(1382): n is a, c, g, or t
  misc_feature (1385)..(1385): n is a, c, g, or t
  misc_feature (1387)..(1389): n is a, c, g, or t
  misc_feature (1401)..(1403): n is a, c, g, or t
  misc_feature (1407)..(1407): n is a, c, g, or t
  misc_feature (1409)..(1410): n is a, c, g, or t
  misc_feature (1416)..(1416): n is a, c, g, or t
  misc_feature (1419)..(1419): n is a, c, g, or t
  misc_feature (1429)..(1429): n is a, c, g, or t
cnnncnaatagagagattactatggagaggatcgcatcaccatcaccatcacggatcctatttaggtgacactatagaatcgtcgacccacgcgctccggtcgtggacttcgtactgctaggaagctccgtagtcaccgacgagaccagaagtggcatgataaacagtataagaaagctcatttgggcacagccctaaaggccaacccttttggaggtgcttctcatgcaaaaggaatcgtgctggaaaaagtaggagttgaagccaaacagccaaattctgccattaggaagtgtgtaagggtccagctgatcaagaatggcaagaaaatcacagcctttgtacccaatgacggttgcttgaactttattgaggaaaatgatgaagttctggttgctggatttggtcgcaaaggtcatgctgttggtgatattcctggagtccgctttaaggttgtcaaagtagccaatgtttctcttttggccctatacaaaggcaagaaggaaagaccaagatcataaatattaatggtgaaaacactgtagtaataaattttcatatgccnnaaaaaaaaaaaaaaaaaaaaaaaaaaaaaaaaaaaaaaagggcggccgctccctatagtgagtcgnattaancttaattagctgagcttggactcctgttgatagatccagtaatgaccncagaactccatctggatttgttcaaaacgctcggttgccgccgggcgttttttattggtganaatccaagctagcttggcgagattttcaggagctaaggaagctaaaatggaaaaaaaaaatcactggatataccnccgttgatatatcccaatggcatcnnaaaanaacattttgaggcatttcantcagttgctcaatgtacctataaccaaaaccgttcanctggatattacggccntttttaaanacccgtaaanaaaaataancccaagtttttatccggccntttatncnnatttcntgcccccctgaaanaangcncctcccgnaatttccnangggcaatgaaaaacgggggaacntgggnaaatgggaaaanngttcccccctttttcnccngttttccatnaacaaactgaaaacnttttcctccctctgganggaaanaccccanaattccccgccatttccaccnattnttccccnaaanggncgngtttacgggaaaacctgccctnnttcccnaagggttnttgaaaaattttttnccnccccccaccccgggggatttccccnttttaatnnaccgggccanngnnannttctccccccnttncccngggaaaaatanccnngnaaaagggcnagcccngnaancggtccncccctngannccccncccaacttnnatanccncnnnaagggggggggnnntttnannatttgnccnccccgggaan

SEQ ID NO: 662 - DNA, 1200 bp, Homo Sapiens
  misc_feature (916)..(916): n is a, c, g, or t
  misc_feature (951)..(951): n is a, c, g, or t
  misc_feature (968)..(968): n is a, c, g, or t
  misc_feature (988)..(988): n is a, c, g, or t
  misc_feature (1014)..(1014): n is a, c, g, or t
  misc_feature (1022)..(1022): n is a, c, g, or t
  misc_feature (1024)..(1024): n is a, c, g, or t
  misc_feature (1036)..(1036): n is a, c, g, or t
  misc_feature (1050)..(1050): n is a, c, g, or t
  misc_feature (1055)..(1055): n is a, c, g, or t
  misc_feature (1058)..(1058): n is a, c, g, or t
  misc_feature (1069)..(1069): n is a, c, g, or t
  misc_feature (1082)..(1083): n is a, c, g, or t
  misc_feature (1098)..(1098): n is a, c, g, or t
  misc_feature (1100)..(1100): n is a, c, g, or t
  misc_feature (1102)..(1102): n is a, c, g, or t
  misc_feature (1114)..(1114): n is a, c, g, or t
  misc_feature (1121)..(1121): n is a, c, g, or t
  misc_feature (1131)..(1131): n is a, c, g, or t
  misc_feature (1137)..(1137): n is a, c, g, or t
  misc_feature (1141)..(1141): n is a, c, g, or t
  misc_feature (1156)..(1156): n is a, c, g, or t
  misc_feature (1159)..(1159): n is a, c, g, or t
  misc_feature (1163)..(1163): n is a, c, g, or t
  misc_feature (1165)..(1165): n is a, c, g, or t
  misc_feature (1171)..(1171): n is a, c, g, or t
  misc_feature (1181)..(1181): n is a, c, g, or t
  misc_feature (1188)..(1188): n is a, c, g, or t
  misc_feature (1192)..(1192): n is a, c, g, or t
  misc_feature (1200)..(1200): n is a, c, g, or t
tagagaaattactatgagaggatcgcatcaccatcaccatcacggatcctatttaggtgacactatagaatcgtcgacccacgcgtccgcggacgcgtgggcggacgcgtgggccacttcttctgtggttgaaggaaaggagctccccacgagaagttcaagtgaaaatgccaaagtgacaagcctggacagcagctcccatagaatcatcgcagttcactatgtactagaggagagcagcggctacatggagcccacgttgcgtatcttagctattctgcacacggtcatttctttcttctgcatcattggatactactgcttgaaagtcccattggttatttttaagcgagaaaaggaagtggcacggaaattggaatttgatgggctttatattacagaacagccttcagaagatgatattaaaggccagtgggatagactcgtaatcaacacacagtcatttcccaacaactactgggacaaatttgttaaaagaaaggttatggataaatatggagagttctacggccgagacagaatcagtgaattacttggcatggacaaggcagctctggacttcagtgatgccagagaaaagaagaagccaaagaaagacagctccttatcagctgtactgaactccattgatgtgaagtatcagatgtggaaactaggagtcgttttcactgacaactccttcctctacctagcctggtatatgactatgtctgttcttggacactataacaactttttttttgccgctcaccttctcgacattgctatgggattcaagacattaagaaccatcttgtcctcagtaactcacaatggcaaacagctcgtattaaccgttggcttattagctgttgttgtatacctatacactggggtggcattcaatttttttccnaaaaattctacaataaaagtgaagatggtgatacnccagatatgaaatgtgnacgatatgctaacatgctanatgttcccatgtatgttggaattccntgctggangnagggatcggggnataaaatccaaaanccccnccngggaaataaanatgaaatctttcnnaatccttcttttganancnccttccctcctncttgggnaattggccantccccntggnccaaaaaaaaagggnccnaaantnttggangccttttggnaaaactnaaanaccccacn

SEQ ID NO: 663 - DNA, 1200 bp, Homo Sapiens
  misc_feature (893)..(893): n is a, c, g, or t
  misc_feature (906)..(906): n is a, c, g, or t
  misc_feature (947)..(947): n is a, c, g, or t
  misc_feature (984)..(984): n is a, c, g, or t
  misc_feature (991)..(992): n is a, c, g, or t
  misc_feature (1000)..(1000): n is a, c, g, or t
  misc_feature (1015)..(1015): n is a, c, g, or t
  misc_feature (1021)..(1021): n is a, c, g, or t
  misc_feature (1046)..(1046): n is a, c, g, or t
  misc_feature (1060)..(1060): n is a, c, g, or t
  misc_feature (1063)..(1063): n is a, c, g, or t
  misc_feature (1065)..(1065): n is a, c, g, or t
  misc_feature (1082)..(1082): n is a, c, g, or t
  misc_feature (1085)..(1085): n is a, c, g, or t
  misc_feature (1090)..(1090): n is a, c, g, or t
  misc_feature (1096)..(1096): n is a, c, g, or t
  misc_feature (1110)..(1111): n is a, c, g, or t
  misc_feature (1115)..(1115): n is a, c, g, or t
  misc_feature (1128)..(1128): n is a, c, g, or t
  misc_feature (1131)..(1131): n is a, c, g, or t
  misc_feature (1142)..(1142): n is a, c, g, or t
  misc_feature (1162)..(1162): n is a, c, g, or t
  misc_feature (1172)..(1172): n is a, c, g, or t
  misc_feature (1177)..(1177): n is a, c, g, or t
  misc_feature (1179)..(1179): n is a, c, g, or t
  misc_feature (1186)..(1186): n is a, c, g, or t
  misc_feature (1190)..(1190): n is a, c, g, or t
  misc_feature (1196)..(1196): n is a, c, g, or t
tagagaaattactatgagaggatcgcatcaccatcaccatcacggatcctatttaggtgacactatagaatcgtcgacccacgcgtccgggccatccttccccacccaggaccacctcccggccacgccccgggtccggctctcattcaaagagctgaaggccacaggcaccgcccacttcttcaacttcctgctcaacacaaccgactaccgaatcttgctcaaggacgaggaccacgaccgcatgtacgtgggcagcaaggactacgtgctgtccctggacctgcacgacatcaaccgcgagcccctcattatacactgggcagcctccccacagcgcatcgaggaatgcgtgctctcaggcaaggatgtcaacggcgagtgtgggaacttcgtcaggctcatccagccctggaaccgaacacacctgtatgtgtgcgggacaggtgcctacaaccccatgtgcacctatgtgaaccgcggacgccgcgcccaggccacaccatggacccagactcaggcggtcagaggccgcggcagcagagccacggatggtgccctccgcccgatgcccacagccccacgccaggattacatcttctacctggagcctgagcgactcgagtcagggaagggcaagtgtccgtacgatcccaagctggacacagcatcggccctcatcaatgaggagctctatgctggtgtgtacatcgattttatgggcactgatgcagccatcttccgcacacttggaaagcagacagccatgcgcacggatcagtacaactcccggtggctgaacgacccgtcgttcatccatgctgagctcattcctgacagtgcggagcgcaatgatgataagctttacttcttcttccgtgagcggtcggcanaagcgccgcaaanccccgcggtgtacgcccgcatcgggcgcatttgcctgaacnatgacggtggtcactgttgcctggtcaacaagtggancacattnnttgaaggngcggctcgtctgctntgtccnggggaagaatggcattgaaactcantttgatgaactccnagnangtgtttttccagcaaanccnaggangtgagnaacctgtcatttannctgnctttacctcctcnggntccgggttccnaggctttgccgggggggtcnactccagggngaaantnccaaggntttnaagggncctt

SEQ ID NO: 664 - DNA, 1370 bp, Homo Sapiens
  misc_feature (832)..(832): n is a, c, g, or t
  misc_feature (892)..(892): n is a, c, g, or t
  misc_feature (906)..(906): n is a, c, g, or t
  misc_feature (938)..(939): n is a, c, g, or t
  misc_feature (958)..(958): n is a, c, g, or t
  misc_feature (960)..(960): n is a, c, g, or t
  misc_feature (965)..(965): n is a, c, g, or t
  misc_feature (968)..(968): n is a, c, g, or t
  misc_feature (978)..(978): n is a, c, g, or t
  misc_feature (983)..(983): n is a, c, g, or t
  misc_feature (995)..(995): n is a, c, g, or t
  misc_feature (1003)..(1003): n is a, c, g, or t
  misc_feature (1014)..(1014): n is a, c, g, or t
  misc_feature (1023)..(1023): n is a, c, g, or t
  misc_feature (1031)..(1031): n is a, c, g, or t
  misc_feature (1037)..(1037): n is a, c, g, or t
  misc_feature (1041)..(1041): n is a, c, g, or t
  misc_feature (1044)..(1044): n is a, c, g, or t
  misc_feature (1046)..(1046): n is a, c, g, or t
  misc_feature (1063)..(1063): n is a, c, g, or t
  misc_feature (1081)..(1081): n is a, c, g, or t
  misc_feature (1111)..(1112): n is a, c, g, or t
  misc_feature (1127)..(1128): n is a, c, g, or t
  misc_feature (1134)..(1134): n is a, c, g, or t
  misc_feature (1142)..(1142): n is a, c, g, or t
  misc_feature (1144)..(1144): n is a, c, g, or t
  misc_feature (1149)..(1150): n is a, c, g, or t
  misc_feature (1157)..(1157): n is a, c, g, or t
  misc_feature (1170)..(1170): n is a, c, g, or t
  misc_feature (1174)..(1174): n is a, c, g, or t
  misc_feature (1179)..(1180): n is a, c, g, or t
  misc_feature (1185)..(1186): n is a, c, g, or t
  misc_feature (1191)..(1192): n is a, c, g, or t
  misc_feature (1196)..(1196): n is a, c, g, or t
  misc_feature (1241)..(1241): n is a, c, g, or t
  misc_feature (1255)..(1255): n is a, c, g, or t
  misc_feature (1257)..(1257): n is a, c, g, or t
  misc_feature (1277)..(1277): n is a, c, g, or t
  misc_feature (1299)..(1299): n is a, c, g, or t
  misc_feature (1301)..(1302): n is a, c, g, or t
  misc_feature (1308)..(1308): n is a, c, g, or t
  misc_feature (1310)..(1310): n is a, c, g, or t
  misc_feature (1312)..(1312): n is a, c, g, or t
  misc_feature (1316)..(1317): n is a, c, g, or t
  misc_feature (1321)..(1326): n is a, c, g, or t
  misc_feature (1328)..(1331): n is a, c, g, or t
  misc_feature (1335)..(1337): n is a, c, g, or t
  misc_feature (1343)..(1343): n is a, c, g, or t
  misc_feature (1346)..(1346): n is a, c, g, or t
  misc_feature (1348)..(1349): n is a, c, g, or t
  misc_feature (1359)..(1359): n is a, c, g, or t
  misc_feature (1365)..(1366): n is a, c, g, or t
  misc_feature (1370)..(1370): n is a, c, g, or t
tagagagaattactatgagaggatcgcatcaccatcaccatcacggatcctatttaggtgacactatagaatcgtcgacccacgcgtccggcagtgagctttcagagaatcagcaaccaggagcaccaaatgctcctactcatcctgctcctccaggccttcatcaccaccataagcacaagggtcagcataggcagggtcacccagagaaccgagatatgccagcaagtgaagatttacaagatttacaaaagaagctctgtcgaaagagatgtataaatcaattactctgtaaattgcccacagattcagagttggctcctaggagctgatgctgccattgtcgacatctgatatttgaaaaaacagggtctgcaatcacctgacagtgtaaagaaaacctcccatctttatgtagctgacagggacttcgggcagaggagaacataactgaatcttgtcagtgacgtttgcctccagctgcctgacaaataagtcagcagcttatacccacagaagccagtgccagttgacgctgaaagaatcaggcaaaaaagtgagaatgaccttcaaactaaatatttaaaatagaacatactccccaatttagtctagacacaatttcatttccagcatttttataaactaccaaattagtgaaccaaaaatagaaattagatttgtgcaaacatggagaaatctactgaattggcttccagattttaaattttatgtcatagaaatattgactcaaaccatattttttatgatggagcaactgaaaggtgattgcagcttttggttaatatgtctttttttttctttttccagnggtctatttgctttaatgagaatagaaacgtaaactatgacctaggggtttctgttgganaattagcagtttanaatggaggaagaacaacaaagactgctttccnntttttttctttacttatcncncaaanaanataactttgnctttncaaccctccacntttaaccnaaaaaaaaagnggattttgnattttaanatcccnaaanacntnaaccggggaaatttttnctaaaaaagcaaaaaacntattttaaattccctttttcttttggaaanncaaaacccccccggnntttttncacccccngnaaaannccttggncctttttttcccnaggnggacnnacccnncaaannttgnggggggcttaaaaaaaaaggggaaaaaaatttggggccccttttntttaaaaatttccnanccgggggttttaaggaaccnccccaaaccgcccccctttggntnnattttnanangggnnaaannnnnncnnnntttnnnattttnaancnnaaaaaaaaanggggcnncttn

SEQ ID NO: 665 - DNA, 1200 bp, Homo Sapiens
  misc_feature (1)..(1): n is a, c, g, or t
  misc_feature (884)..(884): n is a, c, g, or t
  misc_feature (899)..(899): n is a, c, g, or t
  misc_feature (931)..(931): n is a, c, g, or t
  misc_feature (934)..(934): n is a, c, g, or t
  misc_feature (955)..(955): n is a, c, g, or t
  misc_feature (984)..(984): n is a, c, g, or t
  misc_feature (987)..(987): n is a, c, g, or t
  misc_feature (991)..(991): n is a, c, g, or t
  misc_feature (1001)..(1001): n is a, c, g, or t
  misc_feature (1005)..(1005): n is a, c, g, or t
  misc_feature (1026)..(1026): n is a, c, g, or t
  misc_feature (1041)..(1041): n is a, c, g, or t
  misc_feature (1051)..(1051): n is a, c, g, or t
  misc_feature (1090)..(1090): n is a, c, g, or t
  misc_feature (1096)..(1096): n is a, c, g, or t
  misc_feature (1098)..(1098): n is a, c, g, or t
  misc_feature (1107)..(1108): n is a, c, g, or t
  misc_feature (1110)..(1110): n is a, c, g, or t
  misc_feature (1117)..(1117): n is a, c, g, or t
  misc_feature (1122)..(1122): n is a, c, g, or t
  misc_feature (1130)..(1130): n is a, c, g, or t
  misc_feature (1149)..(1149): n is a, c, g, or t
  misc_feature (1151)..(1151): n is a, c, g, or t
  misc_feature (1153)..(1155): n is a, c, g, or t
  misc_feature (1160)..(1160): n is a, c, g, or t
  misc_feature (1162)..(1162): n is a, c, g, or t
  misc_feature (1166)..(1166): n is a, c, g, or t
  misc_feature (1171)..(1172): n is a, c, g, or t
  misc_feature (1175)..(1175): n is a, c, g, or t
  misc_feature (1181)..(1181): n is a, c, g, or t
  misc_feature (1185)..(1185): n is a, c, g, or t
  misc_feature (1189)..(1189): n is a, c, g, or t
  misc_feature (1192)..(1192): n is a, c, g, or t
  misc_feature (1194)..(1195): n is a, c, g, or t
  misc_feature (1200)..(1200): n is a, c, g, or t
naatagagaaattactatgagaggatcgcatcaccatcaccatcacggatcctatttaggtgacactatagaatcgtcgacccacgcgtccgcttcgccttcccttctctccccctccccgctccccccccgaccgcggagcagcaccatgtcggcgccggcggccaaagtcagtaaaaaggagctcaactccaaccacgacggggccgacgagacctcagaaaaagaacagcaagaagcgattgaacacattgatgaagtacaaaatgaaatagacagacttaatgaacaagccagtgaggagattttgaaagtagaacagaaatataacaaactccgccaaccattttttcagaagaggtcagaattgatcgccaaaatcccaaatttttgggtaacaacatttgtcaaccatccacaagtgtctgcactgcttggggaggaagatgaagaggcactgcattatttgaccagagttgaagtgacagaatttgaagatattaaatcaggttacagaatagatttttattttgatgaaaatccttactttgaaaataaagttctctccaaagaatttcatctgaatgagagtggtgatccatcttcgaagtccaccgaaatcaaatggaaatctggaaaggatttgacgaaacgttcgagtcaaacgcagaataaagccagcaggaagaggcagcatgaggaaccagagagcttctttacctggtttactgaccattctgatgcaggtgctgatgagttaggagaggtcatcaaagatgatatttggccaaacccattacagtactacttggttcccgatatggatgatgaagaaggagaaggagaagaagatgatgatgatgatgaagaggaggaaggattanaagatattgacgaanaaggggatgaggatgaaggtgaagaagatganagnaatgatgaaggggaagaaagnaaaggaggatgaaggaaaaaatgactaantanaacnctgatggatnccanccttcctttttttaatttttnccagtccctggggancagttgcagnctttttttttttttttttttttttccccctggggcccancccccngntcttgaggnncntttcccnacccngggtcccnattttttgggggaaaaccntngnnnaaaanangggnaaaannccncccccntttngtcnaantnnttttn

SEQ ID NO: 666 - DNA, 1360 bp, Homo Sapiens
  misc_feature (1)..(1): n is a, c, g, or t
  misc_feature (11)..(11): n is a, c, g, or t
  misc_feature (789)..(789): n is a, c, g, or t
  misc_feature (807)..(807): n is a, c, g, or t
  misc_feature (813)..(813): n is a, c, g, or t
  misc_feature (820)..(820): n is a, c, g, or t
  misc_feature (868)..(868): n is a, c, g, or t
  misc_feature (893)..(893): n is a, c, g, or t
  misc_feature (907)..(907): n is a, c, g, or t
  misc_feature (931)..(931): n is a, c, g, or t
  misc_feature (949)..(949): n is a, c, g, or t
  misc_feature (951)..(951): n is a, c, g, or t
  misc_feature (955)..(955): n is a, c, g, or t
  misc_feature (972)..(972): n is a, c, g, or t
  misc_feature (979)..(979): n is a, c, g, or t
  misc_feature (996)..(996): n is a, c, g, or t
  misc_feature (1000)..(1001): n is a, c, g, or t
  misc_feature (1003)..(1003): n is a, c, g, or t
  misc_feature (1006)..(1006): n is a, c, g, or t
  misc_feature (1009)..(1009): n is a, c, g, or t
  misc_feature (1014)..(1014): n is a, c, g, or t
  misc_feature (1022)..(1022): n is a, c, g, or t
  misc_feature (1025)..(1025): n is a, c, g, or t
  misc_feature (1052)..(1052): n is a, c, g, or t
  misc_feature (1066)..(1066): n is a, c, g, or t
  misc_feature (1093)..(1093): n is a, c, g, or t
  misc_feature (1096)..(1096): n is a, c, g, or t
  misc_feature (1100)..(1100): n is a, c, g, or t
  misc_feature (1114)..(1114): n is a, c, g, or t
  misc_feature (1119)..(1121): n is a, c, g, or t
  misc_feature (1124)..(1124): n is a, c, g, or t
  misc_feature (1127)..(1127): n is a, c, g, or t
  misc_feature (1131)..(1131): n is a, c, g, or t
  misc_feature (1134)..(1134): n is a, c, g, or t
  misc_feature (1138)..(1138): n is a, c, g, or t
  misc_feature (1140)..(1140): n is a, c, g, or t
  misc_feature (1143)..(1143): n is a, c, g, or t
  misc_feature (1148)..(1148): n is a, c, g, or t
  misc_feature (1150)..(1151): n is a, c, g, or t
  misc_feature (1157)..(1157): n is a, c, g, or t
  misc_feature (1164)..(1164): n is a, c, g, or t
  misc_feature (1186)..(1186): n is a, c, g, or t
  misc_feature (1195)..(1195): n is a, c, g, or t
  misc_feature (1207)..(1207): n is a, c, g, or t
  misc_feature (1223)..(1223): n is a, c, g, or t
  misc_feature (1226)..(1226): n is a, c, g, or t
  misc_feature (1228)..(1228): n is a, c, g, or t
  misc_feature (1232)..(1232): n is a, c, g, or t
  misc_feature (1235)..(1236): n is a, c, g, or t
  misc_feature (1238)..(1238): n is a, c, g, or t
  misc_feature (1254)..(1255): n is a, c, g, or t
  misc_feature (1258)..(1259): n is a, c, g, or t
  misc_feature (1269)..(1270): n is a, c, g, or t
  misc_feature (1279)..(1279): n is a, c, g, or t
  misc_feature (1285)..(1285): n is a, c, g, or t
  misc_feature (1292)..(1292): n is a, c, g, or t
  misc_feature (1300)..(1300): n is a, c, g, or t
  misc_feature (1304)..(1305): n is a, c, g, or t
  misc_feature (1318)..(1318): n is a, c, g, or t
  misc_feature (1335)..(1335): n is a, c, g, or t
  misc_feature (1337)..(1337): n is a, c, g, or t
  misc_feature (1339)..(1339): n is a, c, g, or t
  misc_feature (1343)..(1343): n is a, c, g, or t
  misc_feature (1345)..(1345): n is a, c, g, or t
  misc_feature (1347)..(1347): n is a, c, g, or t
  misc_feature (1352)..(1352): n is a, c, g, or t
naattagaganaattaactatgagaggatcgcatcaccatcaccatcacggatcctatttaggtgacactatagaatcgtcgacccacgcgtccgcaggtgcgctagcctgcggagcccgtccgtgctgttctgcggcaaggcctttcccagtgtccccacgcggaaggcaactgcctgagaggcgcggcgtcgcaccgcccagagctgaggaagccggcgccagttcgcggggctccgggccgccactcagagctatgagctacggccgcccccctcccgatgtggagggtatgacctccctcaaggtggacaacctgacctaccgcacctcgcccgacacgctgaggcgcgtcttcgagaagtacgggcgcgtcggcgacgtgtacatcccgcgggatcgctacaccaaggagtcccgcggcttcgccttcgttcgctttcacgacaagcgcgacgctgaggacgctatggatgccatggacggggccgtgctggacggccgcgagctgcgggtgcaaatggcgcgctacggccgccccccggactcacaccacagccgccggggaccgccaccccgcaggtacgggggcggtggctacggacgccggagccgcagccctaggcggcgtcgccgcagccgatcccggagtcggagccgttccaggtctcgcagccgatctcgctacagccgctcgaagtctcggtcccgcactcgttctcgatctcggtcgacctccaagtccagatccgcacgaaggtccaagtccaagtcctcgtcggtctccanatctcgttcgcggtccangtcccngtctcgntccaggaattcctcccccagtgtccaaagagggaatcccaaatccagntcgcgatcaaagaattccccccaantctcctgaaaaagnaaggaaccggtgttcctcttaaanaaaatgatgttatcggcnancaantgtaaaacgggaggaantttgggnaaaaaaaggaccccatnattnnantcnaanaaaantcctttgnaanaagcaattggcttattgaaaaagttantttgaaaaatttgnccaaatttttaacttgtttaacctttnccncaanttgggaaaacttcnatttnnnggncantttnttncctntnttnaaaantnnttgaanttaaggnagggaaaaaatttcaaaattcntttattggntttggaattttnaagaaaattttttttnttnanatanggnnantttttttttttaaaannaannaattgtaacnnaatttgtgncccccnaattttnggaaaaantggnngcttttcacacanctaaattttaaaaaatnancncctntncnctttnttaaaaaa

SEQ ID NO: 667 - DNA, 1434 bp, Homo Sapiens
  misc_feature (744)..(744): n is a, c, g, or t
  misc_feature (778)..(778): n is a, c, g, or t
  misc_feature (804)..(804): n is a, c, g, or t
  misc_feature (809)..(809): n is a, c, g, or t
  misc_feature (840)..(840): n is a, c, g, or t
  misc_feature (855)..(855): n is a, c, g, or t
  misc_feature (870)..(870): n is a, c, g, or t
  misc_feature (893)..(893): n is a, c, g, or t
  misc_feature (941)..(941): n is a, c, g, or t
  misc_feature (945)..(945): n is a, c, g, or t
  misc_feature (957)..(957): n is a, c, g, or t
  misc_feature (985)..(985): n is a, c, g, or t
  misc_feature (988)..(988): n is a, c, g, or t
  misc_feature (999)..(999): n is a, c, g, or t
  misc_feature (1005)..(1005): n is a, c, g, or t
  misc_feature (1011)..(1012): n is a, c, g, or t
  misc_feature (1014)..(1014): n is a, c, g, or t
  misc_feature (1023)..(1023): n is a, c, g, or t
  misc_feature (1041)..(1041): n is a, c, g, or t
  misc_feature (1043)..(1043): n is a, c, g, or t
  misc_feature (1050)..(1050): n is a, c, g, or t
  misc_feature (1063)..(1063): n is a, c, g, or t
  misc_feature (1065)..(1065): n is a, c, g, or t
  misc_feature (1069)..(1071): n is a, c, g, or t
  misc_feature (1076)..(1076): n is a, c, g, or t
  misc_feature (1085)..(1085): n is a, c, g, or t
  misc_feature (1088)..(1091): n is a, c, g, or t
  misc_feature (1101)..(1101): n is a, c, g, or t
  misc_feature (1106)..(1106): n is a, c, g, or t
  misc_feature (1108)..(1108): n is a, c, g, or t
  misc_feature (1110)..(1110): n is a, c, g, or t
  misc_feature (1112)..(1113): n is a, c, g, or t
  misc_feature (1119)..(1119): n is a, c, g, or t
  misc_feature (1124)..(1125): n is a, c, g, or t
  misc_feature (1128)..(1128): n is a, c, g, or t
  misc_feature (1131)..(1131): n is a, c, g, or t
  misc_feature (1135)..(1135): n is a, c, g, or t
  misc_feature (1137)..(1137): n is a, c, g, or t
  misc_feature (1144)..(1144): n is a, c, g, or t
  misc_feature (1146)..(1146): n is a, c, g, or t
  misc_feature (1164)..(1164): n is a, c, g, or t
  misc_feature (1171)..(1171): n is a, c, g, or t
  misc_feature (1174)..(1174): n is a, c, g, or t
  misc_feature (1178)..(1178): n is a, c, g, or t
  misc_feature (1180)..(1180): n is a, c, g, or t
  misc_feature (1189)..(1189): n is a, c, g, or t
  misc_feature (1192)..(1192): n is a, c, g, or t
  misc_feature (1194)..(1194): n is a, c, g, or t
  misc_feature (1208)..(1208): n is a, c, g, or t
  misc_feature (1214)..(1214): n is a, c, g, or t
  misc_feature (1216)..(1218): n is a, c, g, or t
  misc_feature (1225)..(1225): n is a, c, g, or t
  misc_feature (1232)..(1232): n is a, c, g, or t
  misc_feature (1234)..(1234): n is a, c, g, or t
  misc_feature (1236)..(1237): n is a, c, g, or t
  misc_feature (1239)..(1239): n is a, c, g, or t
  misc_feature (1243)..(1243): n is a, c, g, or t
  misc_feature (1247)..(1247): n is a, c, g, or t
  misc_feature (1249)..(1249): n is a, c, g, or t
  misc_feature (1252)..(1252): n is a, c, g, or t
  misc_feature (1255)..(1255): n is a, c, g, or t
  misc_feature (1257)..(1257): n is a, c, g, or t
  misc_feature (1260)..(1260): n is a, c, g, or t
  misc_feature (1262)..(1264): n is a, c, g, or t
  misc_feature (1268)..(1269): n is a, c, g, or t
  misc_feature (1272)..(1272): n is a, c, g, or t
  misc_feature (1275)..(1275): n is a, c, g, or t
  misc_feature (1279)..(1279): n is a, c, g, or t
  misc_feature (1290)..(1290): n is a, c, g, or t
  misc_feature (1294)..(1294): n is a, c, g, or t
  misc_feature (1299)..(1300): n is a, c, g, or t
  misc_feature (1303)..(1303): n is a, c, g, or t
  misc_feature (1310)..(1310): n is a, c, g, or t
  misc_feature (1312)..(1312): n is a, c, g, or t
  misc_feature (1316)..(1316): n is a, c, g, or t
  misc_feature (1318)..(1319): n is a, c, g, or t
  misc_feature (1322)..(1322): n is a, c, g, or t
  misc_feature (1325)..(1325): n is a, c, g, or t
  misc_feature (1329)..(1329): n is a, c, g, or t
  misc_feature (1333)..(1333): n is a, c, g, or t
  misc_feature (1338)..(1338): n is a, c, g, or t
  misc_feature (1345)..(1345): n is a, c, g, or t
  misc_feature (1361)..(1361): n is a, c, g, or t
  misc_feature (1366)..(1367): n is a, c, g, or t
  misc_feature (1370)..(1371): n is a, c, g, or t
  misc_feature (1383)..(1383): n is a, c, g, or t
  misc_feature (1385)..(1385): n is a, c, g, or t
  misc_feature (1387)..(1388): n is a, c, g, or t
  misc_feature (1393)..(1395): n is a, c, g, or t
  misc_feature (1400)..(1401): n is a, c, g, or t
  misc_feature (1415)..(1415): n is a, c, g, or t
  misc_feature (1417)..(1418): n is a, c, g, or t
  misc_feature (1421)..(1421): n is a, c, g, or t
  misc_feature (1424)..(1424): n is a, c, g, or t
  misc_feature (1428)..(1428): n is a, c, g, or t
  misc_feature (1431)..(1431): n is a, c, g, or t
atagagaaattactatgagaggatcgcatcaccatcaccatcacggatcctatttaggtgacactatagaatcgtcgacccacgcgtccggcgatctgctctggcgccggatagcccgggcctcgctcaactccggcttcacgcggctcggcaccgacctgatgaccagtgtcccagtgaaggaacgagtgaaggtgtctcagaactggagactggggcgctgccgagaggggattctgctgaagtggagatgcagtcagatgccctggatgcagctagaggatgattctctgtacatatcccaggctaatttcatcctggcctaccagttccgtccagatggtgccagcttgaatcgtcggcctctgggagtctttgctgggcatgatgaggacgtttgccactttgtgctggccaactcgcatattgttagtgcaggaggggatgggaagattggcattcataagattcacagcaccttcactgtcaagtactcggctcatgaacaggaggtgaactgtgtggattgcaaagggggcatcattgtgagtggctccagggacaggacggccaaggtgtggcctttggcctcaggccggctggggcagtgcttacacaccatccagactgaagaccgagtctggtccattgctatcagcccattactcagctcttttgtgacagggacggcttgttgcgggcacttctcacccctgagaatctgggacctcaacagtggggcanctgatgacacacttgggcagtgactttcccccanggggctggggtgctggaatgtcatgnatgantcccctttcacactgctgtcctgtggctatnacacctatgttcgcntactgggaacctccnccaccaaccgtccggaaaatgtntcatggaagtgggaaggaacccccaccaacagccaccctgtactgccntgcnaacaagaatggnaaaccccttgcctggccacaaggttccnccntaataaccggngtttanacggcnntnggaaccggngttaaaaaggccttcccngnacccccnttcccgcttaaantnaaannnccctncaaaaaccntgnnnnattccctggnttttncncncnnaaaaanttttnngcnggncccntnttaaaancnccccttcctgggattttnaaaaccntgnaacntngagggcccnccntncccttgggcccggnaaaccncnnnttcaggnaattttntncnngnaggngccnanaanacncnccncnnngccnnatngtnctgnggcttgacccnaggntctannccnttaatanancttntnnccngantctntaantcacnaaaaaanccccccccaaaccttnaaaannagnncctctctttttnangnnaaaannnccctnnccttttttcaaaananngtntcngagnccnctc

SEQ ID NO: 668 - DNA, 1200 bp, Homo Sapiens
  misc_feature (879)..(879): n is a, c, g, or t
  misc_feature (907)..(907): n is a, c, g, or t
  misc_feature (924)..(924): n is a, c, g, or t
  misc_feature (930)..(930): n is a, c, g, or t
  misc_feature (965)..(965): n is a, c, g, or t
  misc_feature (972)..(972): n is a, c, g, or t
  misc_feature (1009)..(1009): n is a, c, g, or t
  misc_feature (1026)..(1026): n is a, c, g, or t
  misc_feature (1036)..(1036): n is a, c, g, or t
  misc_feature (1049)..(1049): n is a, c, g, or t
  misc_feature (1069)..(1069): n is a, c, g, or t
  misc_feature (1077)..(1078): n is a, c, g, or t
  misc_feature (1086)..(1086): n is a, c, g, or t
  misc_feature (1103)..(1103): n is a, c, g, or t
  misc_feature (1118)..(1118): n is a, c, g, or t
  misc_feature (1125)..(1125): n is a, c, g, or t
  misc_feature (1150)..(1150): n is a, c, g, or t
  misc_feature (1183)..(1183): n is a, c, g, or t
  misc_feature (1186)..(1186): n is a, c, g, or t
  misc_feature (1191)..(1191): n is a, c, g, or t
  misc_feature (1196)..(1196): n is a, c, g, or t
attagagaaattactatgagaggatcgcatcaccatcaccatcacggatcctatttaggtgacactatagaatcgtcgacccacgcgtccgcccacgcgtccgaccagctggaggagaacgcacgcctcttccacccgaagctgatcatcgcaggaaccagctgctactcccgaaacctggaatatgcccggctacggaagattgcagatgagaacggggcgtatctcatggcggacatggctcacatcagcgggctggtggcggctggcgtggtgccctccccatttgaacactgccatgtggtgaccaccaccactcacaagaccctgcgaggctgccgagctggcatgatcttctacaggaaaggagtgaaaagtgtggatcccaagactggcaaagagattctgtacaacctggagtctcttatcaattctgctgtgttccctggcctgcagggaggtccccacaaccacgccattgctggggttgctgtggcactgaagcaagctatgactctggaatttaaagtttatcaacaccaggtggtggccaactgcagggctctgtctgaggccctgacggagctgggctacaaaatagtcacaggtggttctgacaaccatttgatccttgtggatctccgttccaaaggcacagatggtggaagggctgagaaggtgctagaagcctgttctattgcctgcaacaagaacacctgtccaggtgacagaagcgctctgcggcccagtggactgcggctggggaccccagcactgacgtcccgtggacttttggaaaaagacttccaaaaagtagcccactttattcacagaggggatagagctgaccctgcagatccagagcgacactggtgtcanagccaccctgaaagagttcaagggaaanactggcaggggataaantaccanggcggccgtgcaggctcctccggaaggaggttganagcttcncctcttttcttcccctctgcctgggcctggcctgaanttctaaaagaagcgggncccactctgnaaccccctgggcncccaaaaaaaaaacctggcntgccggannaacccccnctttgaaaaaatggatnaaactgcctccaaanggggaanctgtttgaaacctcgggcccctttngaggggggtttctttttgggaactttttttccnggnttttntttcnaaaa

SEQ ID NO: 669 - DNA, 1296 bp, Homo Sapiens
  misc_feature (2)..(10): n is a, c, g, or t
  misc_feature (15)..(15): n is a, c, g, or t
  misc_feature (17)..(17): n is a, c, g, or t
  misc_feature (19)..(26): n is a, c, g, or t
  misc_feature (29)..(30): n is a, c, g, or t
  misc_feature (36)..(36): n is a, c, g, or t
  misc_feature (41)..(41): n is a, c, g, or t
  misc_feature (117)..(117): n is a, c, g, or t
  misc_feature (519)..(519): n is a, c, g, or t
  misc_feature (584)..(584): n is a, c, g, or t
  misc_feature (604)..(604): n is a, c, g, or t
  misc_feature (617)..(617): n is a, c, g, or t
  misc_feature (631)..(631): n is a, c, g, or t
  misc_feature (644)..(644): n is a, c, g, or t
  misc_feature (660)..(660): n is a, c, g, or t
  misc_feature (670)..(670): n is a, c, g, or t
  misc_feature (684)..(684): n is a, c, g, or t
  misc_feature (699)..(699): n is a, c, g, or t
  misc_feature (711)..(711): n is a, c, g, or t
  misc_feature (729)..(729): n is a, c, g, or t
  misc_feature (732)..(733): n is a, c, g, or t
  misc_feature (735)..(735): n is a, c, g, or t
  misc_feature (741)..(741): n is a, c, g, or t
  misc_feature (745)..(745): n is a, c, g, or t
  misc_feature (748)..(748): n is a, c, g, or t
  misc_feature (752)..(752): n is a, c, g, or t
  misc_feature (765)..(765): n is a, c, g, or t
  misc_feature (774)..(774): n is a, c, g, or t
  misc_feature (786)..(786): n is a, c, g, or t
  misc_feature (796)..(796): n is a, c, g, or t
  misc_feature (810)..(812): n is a, c, g, or t
  misc_feature (818)..(818): n is a, c, g, or t
  misc_feature (833)..(834): n is a, c, g, or t
  misc_feature (838)..(839): n is a, c, g, or t
  misc_feature (857)..(857): n is a, c, g, or t
  misc_feature (864)..(864): n is a, c, g, or t
  misc_feature (868)..(868): n is a, c, g, or t
  misc_feature (870)..(870): n is a, c, g, or t
  misc_feature (873)..(875): n is a, c, g, or t
  misc_feature (886)..(886): n is a, c, g, or t
  misc_feature (890)..(891): n is a, c, g, or t
  misc_feature (894)..(894): n is a, c, g, or t
  misc_feature (910)..(912): n is a, c, g, or t
  misc_feature (914)..(914): n is a, c, g, or t
  misc_feature (916)..(916): n is a, c, g, or t
  misc_feature (919)..(919): n is a, c, g, or t
  misc_feature (923)..(924): n is a, c, g, or t
  misc_feature (931)..(931): n is a, c, g, or t
  misc_feature (937)..(937): n is a, c, g, or t
  misc_feature (939)..(939): n is a, c, g, or t
  misc_feature (951)..(954): n is a, c, g, or t
  misc_feature (960)..(960): n is a, c, g, or t
  misc_feature (971)..(971): n is a, c, g, or t
  misc_feature (979)..(979): n is a, c, g, or t
  misc_feature (990)..(990): n is a, c, g, or t
  misc_feature (993)..(999): n is a, c, g, or t
  misc_feature (1004)..(1008): n is a, c, g, or t
  misc_feature (1013)..(1014): n is a, c, g, or t
  misc_feature (1016)..(1016): n is a, c, g, or t
  misc_feature (1026)..(1027): n is a, c, g, or t
  misc_feature (1032)..(1035): n is a, c, g, or t
  misc_feature (1037)..(1038): n is a, c, g, or t
  misc_feature (1043)..(1043): n is a, c, g, or t
  misc_feature (1048)..(1048): n is a, c, g, or t
  misc_feature (1053)..(1053): n is a, c, g, or t
  misc_feature (1057)..(1057): n is a, c, g, or t
  misc_feature (1062)..(1063): n is a, c, g, or t
  misc_feature (1066)..(1066): n is a, c, g, or t
  misc_feature (1068)..(1069): n is a, c, g, or t
  misc_feature (1071)..(1071): n is a, c, g, or t
  misc_feature (1078)..(1078): n is a, c, g, or t
  misc_feature (1083)..(1084): n is a, c, g, or t
  misc_feature (1086)..(1087): n is a, c, g, or t
  misc_feature (1089)..(1089): n is a, c, g, or t
  misc_feature (1100)..(1101): n is a, c, g, or t
  misc_feature (1109)..(1109): n is a, c, g, or t
  misc_feature (1112)..(1112): n is a, c, g, or t
  misc_feature (1114)..(1114): n is a, c, g, or t
  misc_feature (1116)..(1116): n is a, c, g, or t
  misc_feature (1122)..(1124): n is a, c, g, or t
  misc_feature (1126)..(1126): n is a, c, g, or t
  misc_feature (1128)..(1129): n is a, c, g, or t
  misc_feature (1131)..(1131): n is a, c, g, or t
  misc_feature (1133)..(1139): n is a, c, g, or t
  misc_feature (1142)..(1143): n is a, c, g, or t
  misc_feature (1145)..(1146): n is a, c, g, or t
  misc_feature (1153)..(1153): n is a, c, g, or t
  misc_feature (1155)..(1160): n is a, c, g, or t
  misc_feature (1168)..(1171): n is a, c, g, or t
  misc_feature (1173)..(1177): n is a, c, g, or t
  misc_feature (1184)..(1184): n is a, c, g, or t
  misc_feature (1187)..(1189): n is a, c, g, or t
  misc_feature (1191)..(1191): n is a, c, g, or t
  misc_feature (1193)..(1195): n is a, c, g, or t
  misc_feature (1199)..(1202): n is a, c, g, or t
  misc_feature (1204)..(1210): n is a, c, g, or t
  misc_feature (1215)..(1215): n is a, c, g, or t
  misc_feature (1217)..(1217): n is a, c, g, or t
  misc_feature (1219)..(1222): n is a, c, g, or t
  misc_feature (1224)..(1227): n is a, c, g, or t
  misc_feature (1229)..(1231): n is a, c, g, or t
  misc_feature (1233)..(1235): n is a, c, g, or t
  misc_feature (1237)..(1241): n is a, c, g, or t
  misc_feature (1243)..(1247): n is a, c, g, or t
  misc_feature (1249)..(1251): n is a, c, g, or t
  misc_feature (1253)..(1260): n is a, c, g, or t
  misc_feature (1262)..(1264): n is a, c, g, or t
  misc_feature (1268)..(1273): n is a, c, g, or t
  misc_feature (1275)..(1276): n is a, c, g, or t
  misc_feature (1280)..(1280): n is a, c, g, or t
  misc_feature (1282)..(1287): n is a, c, g, or t
  misc_feature (1289)..(1289): n is a, c, g, or t
  misc_feature (1293)..(1293): n is a, c, g, or t
annnnnnnnnggggngngnnnnnnnnaanngagganaattnctatgagagggatcgcatcaccatcaccatcacggatcctatttaggtgacactatagaatcgtcgacccacgcgntccgcggacgcgtgggagacgccatctgcttacgagctgccctatgggaccaaggggagtgaggatctgctcctccgggtgctagccatcaccagctcctccatccccaagaacatccagagcctcaggtgccgccgctgtgtggtcgtggggaacgggcaccggctgcggaacagctcactgggagatgccatcaacaagtacgatgtggtcatcagattgaacaatgccccagtggctggctatgagggtgacgtgggctccaagaccaccatgcgtctcttctaccctgaatctgcccacttcgaccccaaagtagaaaacaacccagacacactcctcgtcctggtagctttcaaggcaatggacttccactggattgagaccatcctgagtgataanaagcgggtgcgaaagggtttctggaaacagcctcccctcatctgggatgtcaatcctaaaacagnattcggattctcaacccccnttcttcatggganattggcagcttganaaaactgctgaancctgccaatgcaacangccacggaanaattaaacaaaaancccaccacgggcctntttggccatcangctgggccctcccccctntgnnantttggnggcncanttgncgggcttttgggntaccccaanaccccctaccancaagaaacanaaacctttttcctnnnttttgnaacgaaatccccccnncaanntcccatgggggggggttnaggcccnaaantnttnnncccaaaaaggncccnnggnccttttaaaccgggannngntnggnaaannggaactnttttananaaaaccccccgnnnntttttnaaaacttgggnaaaaaaantttaaacccgnggnnnnnnngcccnnnnnccgtnntntgggggaaannccccnnnntnngtttntttgnggggntggnttggnnccnanntnaaccccnttttnntnnanccccccccccnncttggggnaananantttttnnngngnngngnnnnnnntannannaaaaaanannnnnncccccccnnnngnnnnntttttanggnnngnannnaaannnntnnnnnnnggggngngnnnngnnnntnnntnnngnnnnngnnnnncnnncnnnnnnnngnnngagnnnnnntnntttntnnnnnncncccnccc

SEQ ID NO: 670 - DNA, 1419 bp, Homo Sapiens
  misc_feature (2)..(2): n is a, c, g, or t
  misc_feature (578)..(578): n is a, c, g, or t
  misc_feature (580)..(580): n is a, c, g, or t
  misc_feature (635)..(635): n is a, c, g, or t
  misc_feature (647)..(647): n is a, c, g, or t
  misc_feature (683)..(683): n is a, c, g, or t
  misc_feature (686)..(686): n is a, c, g, or t
  misc_feature (692)..(692): n is a, c, g, or t
  misc_feature (703)..(703): n is a, c, g, or t
  misc_feature (712)..(712): n is a, c, g, or t
  misc_feature (715)..(715): n is a, c, g, or t
  misc_feature (722)..(722): n is a, c, g, or t
  misc_feature (725)..(725): n is a, c, g, or t
  misc_feature (736)..(736): n is a, c, g, or t
  misc_feature (761)..(761): n is a, c, g, or t
  misc_feature (778)..(778): n is a, c, g, or t
  misc_feature (803)..(803): n is a, c, g, or t
  misc_feature (811)..(811): n is a, c, g, or t
  misc_feature (815)..(816): n is a, c, g, or t
  misc_feature (832)..(832): n is a, c, g, or t
  misc_feature (837)..(838): n is a, c, g, or t
  misc_feature (845)..(845): n is a, c, g, or t
  misc_feature (848)..(848): n is a, c, g, or t
  misc_feature (851)..(851): n is a, c, g, or t
  misc_feature (855)..(855): n is a, c, g, or t
  misc_feature (861)..(862): n is a, c, g, or t
  misc_feature (872)..(872): n is a, c, g, or t
  misc_feature (882)..(882): n is a, c, g, or t
  misc_feature (885)..(885): n is a, c, g, or t
  misc_feature (887)..(889): n is a, c, g, or t
  misc_feature (892)..(892): n is a, c, g, or t
  misc_feature (896)..(896): n is a, c, g, or t
  misc_feature (898)..(898): n is a, c, g, or t
  misc_feature (904)..(904): n is a, c, g, or t
  misc_feature (913)..(913): n is a, c, g, or t
  misc_feature (924)..(924): n is a, c, g, or t
  misc_feature (927)..(928): n is a, c, g, or t
  misc_feature (934)..(934): n is a, c, g, or t
  misc_feature (940)..(941): n is a, c, g, or t
  misc_feature (947)..(947): n is a, c, g, or t
  misc_feature (953)..(953): n is a, c, g, or t
  misc_feature (957)..(958): n is a, c, g, or t
  misc_feature (960)..(960): n is a, c, g, or t
  misc_feature (970)..(970): n is a, c, g, or t
  misc_feature (974)..(974): n is a, c, g, or t
  misc_feature (976)..(976): n is a, c, g, or t
  misc_feature (978)..(978): n is a, c, g, or t
  misc_feature (983)..(983): n is a, c, g, or t
  misc_feature (995)..(996): n is a, c, g, or t
  misc_feature (1004)..(1004): n is a, c, g, or t
  misc_feature (1019)..(1019): n is a, c, g, or t
  misc_feature (1021)..(1022): n is a, c, g, or t
  misc_feature (1028)..(1029): n is a, c, g, or t
  misc_feature (1039)..(1039): n is a, c, g, or t
  misc_feature (1046)..(1046): n is a, c, g, or t
  misc_feature (1048)..(1048): n is a, c, g, or t
  misc_feature (1067)..(1068): n is a, c, g, or t
  misc_feature (1072)..(1072): n is a, c, g, or t
  misc_feature (1078)..(1078): n is a, c, g, or t
  misc_feature (1083)..(1084): n is a, c, g, or t
  misc_feature (1088)..(1089): n is a, c, g, or t
  misc_feature (1097)..(1097): n is a, c, g, or t
  misc_feature (1103)..(1105): n is a, c, g, or t
  misc_feature (1115)..(1115): n is a, c, g, or t
  misc_feature (1117)..(1117): n is a, c, g, or t
  misc_feature (1121)..(1122): n is a, c, g, or t
  misc_feature (1124)..(1125): n is a, c, g, or t
  misc_feature (1128)..(1128): n is a, c, g, or t
  misc_feature (1133)..(1133): n is a, c, g, or t
  misc_feature (1136)..(1137): n is a, c, g, or t
  misc_feature (1142)..(1142): n is a, c, g, or t
  misc_feature (1150)..(1150): n is a, c, g, or t
  misc_feature (1155)..(1155): n is a, c, g, or t
  misc_feature (1173)..(1173): n is a, c, g, or t
  misc_feature (1178)..(1180): n is a, c, g, or t
  misc_feature (1183)..(1183): n is a, c, g, or t
  misc_feature (1185)..(1185): n is a, c, g, or t
  misc_feature (1188)..(1188): n is a, c, g, or t
  misc_feature (1190)..(1190): n is a, c, g, or t
  misc_feature (1193)..(1193): n is a, c, g, or t
  misc_feature (1196)..(1196): n is a, c, g, or t
  misc_feature (1200)..(1200): n is a, c, g, or t
  misc_feature (1204)..(1204): n is a, c, g, or t
  misc_feature (1207)..(1208): n is a, c, g, or t
  misc_feature (1211)..(1211): n is a, c, g, or t
  misc_feature (1213)..(1213): n is a, c, g, or t
  misc_feature (1216)..(1216): n is a, c, g, or t
  misc_feature (1218)..(1218): n is a, c, g, or t
  misc_feature (1220)..(1220): n is a, c, g, or t
  misc_feature (1229)..(1235): n is a, c, g, or t
  misc_feature (1237)..(1238): n is a, c, g, or t
  misc_feature (1242)..(1242): n is a, c, g, or t
  misc_feature (1248)..(1248): n is a, c, g, or t
  misc_feature (1250)..(1254): n is a, c, g, or t
  misc_feature (1259)..(1260): n is a, c, g, or t
  misc_feature (1263)..(1263): n is a, c, g, or t
  misc_feature (1270)..(1270): n is a, c, g, or t
  misc_feature (1274)..(1274): n is a, c, g, or t
  misc_feature (1276)..(1278): n is a, c, g, or t
  misc_feature (1280)..(1280): n is a, c, g, or t
  misc_feature (1284)..(1286): n is a, c, g, or t
  misc_feature (1295)..(1296): n is a, c, g, or t
  misc_feature (1298)..(1304): n is a, c, g, or t
  misc_feature (1307)..(1307): n is a, c, g, or t
  misc_feature (1309)..(1309): n is a, c, g, or t
  misc_feature (1311)..(1311): n is a, c, g, or t
  misc_feature (1313)..(1315): n is a, c, g, or t
  misc_feature (1318)..(1319): n is a, c, g, or t
  misc_feature (1322)..(1322): n is a, c, g, or t
  misc_feature (1324)..(1324): n is a, c, g, or t
  misc_feature (1327)..(1327): n is a, c, g, or t
  misc_feature (1331)..(1334): n is a, c, g, or t
  misc_feature (1336)..(1340): n is a, c, g, or t
  misc_feature (1342)..(1342): n is a, c, g, or t
  misc_feature (1347)..(1347): n is a, c, g, or t
  misc_feature (1349)..(1355): n is a, c, g, or t
  misc_feature (1357)..(1357): n is a, c, g, or t
  misc_feature (1360)..(1360): n is a, c, g, or t
  misc_feature (1363)..(1368): n is a, c, g, or t
  misc_feature (1370)..(1370): n is a, c, g, or t
  misc_feature (1372)..(1373): n is a, c, g, or t
  misc_feature (1376)..(1378): n is a, c, g, or t
  misc_feature (1381)..(1381): n is a, c, g, or t
  misc_feature (1384)..(1385): n is a, c, g, or t
  misc_feature (1387)..(1396): n is a, c, g, or t
  misc_feature (1401)..(1401): n is a, c, g, or t
  misc_feature (1405)..(1405): n is a, c, g, or t
  misc_feature (1410)..(1417): n is a, c, g, or t
antagagaaattactatgagaggatcgcatcaccatcaccatcacggatcctatttaggtgacactatagaatcgtcgacccacgcgtccggccgcgggctgcgggctccggcgcctgcgtccgcccggccagcccggctctgcgctgcgagaggccggacggcagtcgcggctgcgctcgggagagagcgcgggggacatggggcgcggcggcccgcctgggcctcgcaggctccggagccccgaggtccgggtgcccttggaggagccccctctaagtccagacgtggaggaggaggacgatgacttgggcaagaccttggctgtgagcaggtttggggacctcatcagcaagcccccggcctgggaccccgagaagcccagccgcagctacagcgagcgggactttgagtttcaccggcacacatcccaccacacccaccacccgctctcagcgcgcctgcctccaccccacaagctgcggcggctgccccccacctctgcccggcacaccaggagaaagaggaagaaggagaaaacctctgctcctccctccgaggggacccctcccatccagnangaggggggagctggagtggatgaggaagaggaggaagaggaggaataggaagganaatctgaggcanaacctgtggagccccccccctcagggaccccacaanaangcaaanttctccattgnaaattgacnagnatgacantcnaaggccctccntgggagggctgctgtcatcaagccnctgccctcggtgggccnacacaacttgacaagaaccccccantattccancaannttccccaaaccccccnggacnngggcctnccnaanttcntttggnnaaaaaaaatnttggccttgnaancnnntcngtcnantttatnaactttccngaaacaaattnttnnccaaanaaattnnccctgngaaaanccanngngttccaaaanaacnangntgccnaaaaaataaagnnaaaagccnaaaattcttgggttntnnaaaaannttgaacaaantaaaaantnccccaatgttaaaaaaacnnttgngtgctncaaannttannaaaaaaancctttnnngaactaagtngnaaanntnnatntccancgnnttttnccccatcnttttnaaaaaaaaaaaaaataanaaatnnnacncnaancnacnatnaatntttnttnnatntnaanananttatttttnnnnnnnannatancccttntnnnnnaaaannctntttaaanattnannnantttnnnaaaaaaaannannnnnnnaancnantnnnccnnctnanatnaaannnntnnnnnanaaaanannnnnnnanaanccnnnnnntnanntannnttnttnntnnnnnnnnnnaaatntttntaaannnnnnnnaa

SEQ ID NO: 671 - DNA, 1337 bp, Homo Sapiens
  misc_feature (2)..(2): n is a, c, g, or t
  misc_feature (581)..(581): n is a, c, g, or t
  misc_feature (793)..(793): n is a, c, g, or t
  misc_feature (825)..(825): n is a, c, g, or t
  misc_feature (879)..(879): n is a, c, g, or t
  misc_feature (888)..(888): n is a, c, g, or t
  misc_feature (900)..(900): n is a, c, g, or t
  misc_feature (904)..(905): n is a, c, g, or t
  misc_feature (931)..(931): n is a, c, g, or t
  misc_feature (935)..(935): n is a, c, g, or t
  misc_feature (954)..(955): n is a, c, g, or t
  misc_feature (959)..(959): n is a, c, g, or t
  misc_feature (966)..(966): n is a, c, g, or t
  misc_feature (973)..(973): n is a, c, g, or t
  misc_feature (975)..(975): n is a, c, g, or t
  misc_feature (980)..(980): n is a, c, g, or t
  misc_feature (984)..(984): n is a, c, g, or t
  misc_feature (986)..(986): n is a, c, g, or t
  misc_feature (991)..(991): n is a, c, g, or t
  misc_feature (994)..(994): n is a, c, g, or t
  misc_feature (999)..(999): n is a, c, g, or t
  misc_feature (1027)..(1027): n is a, c, g, or t
  misc_feature (1030)..(1030): n is a, c, g, or t
  misc_feature (1042)..(1042): n is a, c, g, or t
  misc_feature (1044)..(1044): n is a, c, g, or t
  misc_feature (1054)..(1054): n is a, c, g, or t
  misc_feature (1060)..(1060): n is a, c, g, or t
  misc_feature (1063)..(1063): n is a, c, g, or t
  misc_feature (1077)..(1077): n is a, c, g, or t
  misc_feature (1087)..(1087): n is a, c, g, or t
  misc_feature (1090)..(1090): n is a, c, g, or t
  misc_feature (1099)..(1099): n is a, c, g, or t
  misc_feature (1110)..(1110): n is a, c, g, or t
  misc_feature (1119)..(1119): n is a, c, g, or t
  misc_feature (1121)..(1121): n is a, c, g, or t
  misc_feature (1135)..(1135): n is a, c, g, or t
  misc_feature (1140)..(1140): n is a, c, g, or t
  misc_feature (1144)..(1144): n is a, c, g, or t
  misc_feature (1149)..(1149): n is a, c, g, or t
  misc_feature (1155)..(1155): n is a, c, g, or t
  misc_feature (1158)..(1159): n is a, c, g, or t
  misc_feature (1172)..(1172): n is a, c, g, or t
  misc_feature (1179)..(1179): n is a, c, g, or t
  misc_feature (1189)..(1189): n is a, c, g, or t
  misc_feature (1196)..(1196): n is a, c, g, or t
  misc_feature (1198)..(1198): n is a, c, g, or t
  misc_feature (1205)..(1205): n is a, c, g, or t
  misc_feature (1225)..(1225): n is a, c, g, or t
  misc_feature (1235)..(1236): n is a, c, g, or t
  misc_feature (1238)..(1238): n is a, c, g, or t
  misc_feature (1241)..(1241): n is a, c, g, or t
  misc_feature (1249)..(1249): n is a, c, g, or t
  misc_feature (1255)..(1255): n is a, c, g, or t
  misc_feature (1257)..(1257): n is a, c, g, or t
  misc_feature (1273)..(1273): n is a, c, g, or t
  misc_feature (1277)..(1277): n is a, c, g, or t
  misc_feature (1285)..(1285): n is a, c, g, or t
  misc_feature (1287)..(1287): n is a, c, g, or t
  misc_feature (1290)..(1292): n is a, c, g, or t
  misc_feature (1294)..(1294): n is a, c, g, or t
  misc_feature (1313)..(1313): n is a, c, g, or t
  misc_feature (1322)..(1322): n is a, c, g, or t
  misc_feature (1336)..(1336): n is a, c, g, or t
anaacgattagagaaaattactatgagaggatcgcatcaccatcaccatcacggatcctatttaggtgacactatagaatcgatcgacccacgcggtccgacgagcgtgaaactgctggagaagattcctgagaatgccgaggccacggtggtccttgtgggctgcgtggagttcctctcccgccccaccatggcctttgtgcggctccgggaggctgtggagttggacgcagtgttggaggtgccggtgcctgtgcgtttcctcttcctgctgctgggcccgagtagtgccaacatggactaccacgagatcggccgctccatctccaccctcatgtcagacaagcaattccacgaggcagcctacctggctgacgagcgggaggacctgctgacggccatcaacgccttcctggactgcagcgtggtgctgccgccttcagaagtgcagggcgaggagctgctgcgctctgtggcccacttccagcgccagatgctcaagaagcgagaggagcagggccggctgctacctacaggggctgggctggagcccaaatctgcccaagataaggcgctcctgnagatggtaaaggcggcaggggcagctgaagatgatccccttcggcggacggggcggccctttggggggctgatccgagatgtgcggcgccgctatccccactacctgagtgacttccgagatgcacttgaccctcagtgcctgggccgcagtcatcttcatctactttgccgccctgtctcctgccatcacctttgggggggctgctggganagaagacgcaggacctgataggggtgtcgganctgattatgtccacaagcgcttccaaagggccgtggtcttctggccctgctggnatgcccaancccctgttggtngatnngccttctcaaaggcccctgcttggtntttnaaggaggcccttctttctnntttntgttaanaacaaancnacctngaangnacctnggntgggncccgagttggtgaaatcggccttctggnctnggggggttcctngncccctgcctnttggtnggnccccttgaaaaggnaaattttctnggnccgctttcnttctacccgcntttcccccnanaaaaaatttttccnccttncttnaatcnccaccncannctttccacttatnaaaaccnttcttaaaanacctggnanaaaattntttcctagaaaccccccccntggaaggggnngnttnaccctccnaaaaantnaaaaaggggaaccggngtanaaaaaaantnaannngnccggggaaaaaaacccctntcttggggngccggaaaaaaaana

SEQ ID NO: 672 - DNA, 1200 bp, Homo Sapiens
  misc_feature (15)..(15): n is a, c, g, or t
  misc_feature (17)..(17): n is a, c, g, or t
  misc_feature (19)..(20): n is a, c, g, or t
  misc_feature (24)..(24): n is a, c, g, or t
  misc_feature (31)..(31): n is a, c, g, or t
  misc_feature (41)..(41): n is a, c, g, or t
  misc_feature (48)..(48): n is a, c, g, or t
  misc_feature (55)..(55): n is a, c, g, or t
  misc_feature (85)..(85): n is a, c, g, or t
  misc_feature (98)..(98): n is a, c, g, or t
  misc_feature (915)..(915): n is a, c, g, or t
  misc_feature (967)..(967): n is a, c, g, or t
  misc_feature (969)..(969): n is a, c, g, or t
  misc_feature (972)..(972): n is a, c, g, or t
  misc_feature (996)..(996): n is a, c, g, or t
  misc_feature (1015)..(1015): n is a, c, g, or t
  misc_feature (1028)..(1028): n is a, c, g, or t
  misc_feature (1033)..(1033): n is a, c, g, or t
  misc_feature (1036)..(1036): n is a, c, g, or t
  misc_feature (1038)..(1038): n is a, c, g, or t
  misc_feature (1065)..(1066): n is a, c, g, or t
  misc_feature (1071)..(1071): n is a, c, g, or t
  misc_feature (1074)..(1087): n is a, c, g, or t
  misc_feature (1096)..(1096): n is a, c, g, or t
  misc_feature (1112)..(1112): n is a, c, g, or t
  misc_feature (1115)..(1115): n is a, c, g, or t
  misc_feature (1121)..(1121): n is a, c, g, or t
  misc_feature (1124)..(1124): n is a, c, g, or t
  misc_feature (1137)..(1137): n is a, c, g, or t
  misc_feature (1146)..(1146): n is a, c, g, or t
  misc_feature (1149)..(1149): n is a, c, g, or t
  misc_feature (1157)..(1157): n is a, c, g, or t
  misc_feature (1163)..(1163): n is a, c, g, or t
  misc_feature (1181)..(1181): n is a, c, g, or t
  misc_feature (1188)..(1188): n is a, c, g, or t
  misc_feature (1193)..(1193): n is a, c, g, or t
  misc_feature (1196)..(1196): n is a, c, g, or t
tttgaggaaaaattncntnntagnagggatngcatcaccantcaccantcacggnatcctatttagggtgacactatagaatcgntcgacccacgcgntccgagaccttctcctcttcctcctcatccaagaagatgggcagcatcttcgaccgcgaggaccaggccagcccacgggccggcagcctggcggcgctcgagaaacggcaggccgagaagaagaaagagctgatgaaggcgcagagtctgcccaagacctcagcctcccaggcgcgcaaggccatgattgagaagctggagaaggagggcgcggccggcagccctggcggaccccgcgcagccgtgcagcgatccaccagcttcggggtccccaacgccaacagcatcaagcagatgctgctggactggtgtcgagccaagactcgcggctacgagcacgtcgacatccagaacttctcctccagctggagtgatgggatggccttctgtgccctggtgcacaacttcttccctgaggccttcgactatgggcagcttagccctcagaaccgacgccagaacttcgaggtggccttctcatctgcggagacccatgcggactgcccgcagctcctggatacagaggacatggtgcggcttcgagagcctgactggaagtgcgtgtacacgtacatccaggaattctaccgctgtctggtccagaaggggctggtaaaaaccaaaaagtcctaacccctgctcggggccccacggatgctggtggactgtgtgcccctggtggaggtggacgacatgatgatcatgggcaagaagcctgaccccaagtgtgtcttcacctatgtgcagtcgctctacaaccacctgcgacgccacgaaactgcgcctgcgcggcaagaatgtctagcctgcccgcccngcatggccagccagtggcaaagctgccgcccccactctccgggcaccgtctncntgnctgtgcgtccgcccacggctgccntgtctgttgcgacaccttncccccccacatanacacncangnttttgataaattattggttttcaccgnnaaaanaannnnnnnnnnnnnnaaagggggncccctcccttaagggntcnaataanctnatttactgaactnggactctgntgnaaaatccntaatgncctcaaacttcctttggnttttttnaaaanttngttg

SEQ ID NO: 673 - DNA, 1374 bp, Homo Sapiens
  misc_feature (722)..(722): n is a, c, g, or t
  misc_feature (781)..(781): n is a, c, g, or t
  misc_feature (842)..(842): n is a, c, g, or t
  misc_feature (844)..(844): n is a, c, g, or t
  misc_feature (846)..(846): n is a, c, g, or t
  misc_feature (853)..(853): n is a, c, g, or t
  misc_feature (856)..(856): n is a, c, g, or t
  misc_feature (865)..(865): n is a, c, g, or t
  misc_feature (867)..(867): n is a, c, g, or t
  misc_feature (871)..(872): n is a, c, g, or t
  misc_feature (878)..(878): n is a, c, g, or t
  misc_feature (888)..(888): n is a, c, g, or t
  misc_feature (891)..(891): n is a, c, g, or t
  misc_feature (905)..(905): n is a, c, g, or t
  misc_feature (908)..(908): n is a, c, g, or t
  misc_feature (911)..(911): n is a, c, g, or t
  misc_feature (918)..(918): n is a, c, g, or t
  misc_feature (934)..(934): n is a, c, g, or t
  misc_feature (941)..(941): n is a, c, g, or t
  misc_feature (951)..(951): n is a, c, g, or t
  misc_feature (963)..(963): n is a, c, g, or t
  misc_feature (972)..(972): n is a, c, g, or t
  misc_feature (987)..(987): n is a, c, g, or t
  misc_feature (990)..(991): n is a, c, g, or t
  misc_feature (993)..(994): n is a, c, g, or t
  misc_feature (1000)..(1000): n is a, c, g, or t
  misc_feature (1003)..(1003): n is a, c, g, or t
  misc_feature (1008)..(1009): n is a, c, g, or t
  misc_feature (1013)..(1015): n is a, c, g, or t
  misc_feature (1019)..(1023): n is a, c, g, or t
  misc_feature (1026)..(1029): n is a, c, g, or t
  misc_feature (1033)..(1034): n is a, c, g, or t
  misc_feature (1037)..(1038): n is a, c, g, or t
  misc_feature (1041)..(1041): n is a, c, g, or t
  misc_feature (1046)..(1051): n is a, c, g, or t
  misc_feature (1053)..(1056): n is a, c, g, or t
  misc_feature (1058)..(1059): n is a, c, g, or t
  misc_feature (1064)..(1067): n is a, c, g, or t
  misc_feature (1074)..(1074): n is a, c, g, or t
  misc_feature (1079)..(1080): n is a, c, g, or t
  misc_feature (1082)..(1083): n is a, c, g, or t
  misc_feature (1086)..(1087): n is a, c, g, or t
  misc_feature (1094)..(1095): n is a, c, g, or t
  misc_feature (1098)..(1098): n is a, c, g, or t
  misc_feature (1100)..(1100): n is a, c, g, or t
  misc_feature (1103)..(1103): n is a, c, g, or t
  misc_feature (1105)..(1105): n is a, c, g, or t
  misc_feature (1108)..(1112): n is a, c, g, or t
  misc_feature (1114)..(1120): n is a, c, g, or t
  misc_feature (1122)..(1123): n is a, c, g, or t
  misc_feature (1125)..(1127): n is a, c, g, or t
  misc_feature (1130)..(1131): n is a, c, g, or t
  misc_feature (1133)..(1137): n is a, c, g, or t
  misc_feature (1145)..(1152): n is a, c, g, or t
  misc_feature (1155)..(1163): n is a, c, g, or t
  misc_feature (1165)..(1172): n is a, c, g, or t
  misc_feature (1174)..(1180): n is a, c, g, or t
  misc_feature (1182)..(1374): n is a, c, g, or t
tagagaaattaactatgagaggatcgcatcaccatcaccatcacggatcctatttaggtgacactatagaatcgtcgacccacgcgtccgcactcacccccctccaaaaaaaacaaaaacagaaaaaaccggtgtggtctggggtgcggagcgtcccagctgggcctcctgccccggcttggtgtctcagggtgcatgcttggggttgtggaggagccccctcccccacagcagagtccagcgtggagttaaccttcagtttctttgcagcgattttggccgccctggcgggagggggctgttccatcatgtgggagaggaagggccggggagcctagggggtggcgggtgagggtggacgtctcccccgaccaggagtggttggggcgctgagaggaagcagacgctgagatggagcaggcccttcaccggtttgggagagggttggtctggctgtcagttgcctggctgtctgttgggcgtgtgcgtgtgcgtgatgatggggacacggggcggggattctgtagagctgggcctgtcctgactagaggaccctctggggactcctctcccctccccctccccacatctgttacagccgcttacaaacacgcagatggcaagaagattgatggcaggagggtccttgtggacgtggagaggggccgaaccgtgaagggctggaggccccggcggctaggaggaggcctcggtggtaccanaagaggaggggctgatgtgaacatccggcattcaggccgcgatgacacctcccgctacnatgagaggcccgggcccctccccgcttccgcacagggaccgggaccgggaccgtgagcggnancncaaaaancgnaaccgggancnaaannaagaancaaaacggcnacnctcccgctcccggnacnggnggaagcnctcacggaatcccaanaaggaanaacggaagcnctccaggaacgnaacaagganaaggaccggaaccgnaanngnnaaacanccnaatcnnaacnnncccnnnnnaannnnaacnnaannaanaactnnnnnngnnnngnnaaatnnnnaaccctncaagnngnngannccccccnnaananggncnccnnnnnannnnnnncnnannnccnnannnnnaaaaaaannnnnnnnatnnnnnnnnnannnnnnnnannnnnnnannnnnnnnnnnnnnnnnnnnnnnnnnnnnnnnnnnnnnnnnnnnnnnnnnnnnnnnnnnnnnnnnnnnnnnnnnnnnnnnnnnnnnnnnnnnnnnnnnnnnnnnnnnnnnnnnnnnnnnnnnnnnnnnnnnnnnnnnnnnnnnnnnnnnnnnnnnnnnnnnnnnnnnnnnnnnnnnnnnnnnnnnnnnnnnnn

SEQ ID NO: 674 - DNA, 1464 bp, Homo Sapiens
  misc_feature (8)..(8): n is a, c, g, or t
  misc_feature (11)..(11): n is a, c, g, or t
  misc_feature (17)..(17): n is a, c, g, or t
  misc_feature (658)..(658): n is a, c, g, or t
  misc_feature (674)..(674): n is a, c, g, or t
  misc_feature (712)..(712): n is a, c, g, or t
  misc_feature (721)..(721): n is a, c, g, or t
  misc_feature (745)..(745): n is a, c, g, or t
  misc_feature (760)..(760): n is a, c, g, or t
  misc_feature (763)..(763): n is a, c, g, or t
  misc_feature (770)..(770): n is a, c, g, or t
  misc_feature (789)..(789): n is a, c, g, or t
  misc_feature (823)..(823): n is a, c, g, or t
  misc_feature (833)..(833): n is a, c, g, or t
  misc_feature (838)..(838): n is a, c, g, or t
  misc_feature (848)..(848): n is a, c, g, or t
  misc_feature (879)..(879): n is a, c, g, or t
  misc_feature (894)..(894): n is a, c, g, or t
  misc_feature (896)..(896): n is a, c, g, or t
  misc_feature (903)..(904): n is a, c, g, or t
  misc_feature (906)..(906): n is a, c, g, or t
  misc_feature (910)..(910): n is a, c, g, or t
  misc_feature (923)..(923): n is a, c, g, or t
  misc_feature (940)..(940): n is a, c, g, or t
  misc_feature (949)..(949): n is a, c, g, or t
  misc_feature (961)..(961): n is a, c, g, or t
  misc_feature (980)..(980): n is a, c, g, or t
  misc_feature (988)..(988): n is a, c, g, or t
  misc_feature (991)..(991): n is a, c, g, or t
  misc_feature (997)..(997): n is a, c, g, or t
  misc_feature (1006)..(1007): n is a, c, g, or t
  misc_feature (1009)..(1009): n is a, c, g, or t
  misc_feature (1011)..(1011): n is a, c, g, or t
  misc_feature (1013)..(1015): n is a, c, g, or t
  misc_feature (1036)..(1036): n is a, c, g, or t
  misc_feature (1041)..(1041): n is a, c, g, or t
  misc_feature (1048)..(1048): n is a, c, g, or t
  misc_feature (1063)..(1064): n is a, c, g, or t
  misc_feature (1077)..(1077): n is a, c, g, or t
  misc_feature (1079)..(1079): n is a, c, g, or t
  misc_feature (1103)..(1103): n is a, c, g, or t
  misc_feature (1105)..(1105): n is a, c, g, or t
  misc_feature (1111)..(1111): n is a, c, g, or t
  misc_feature (1120)..(1120): n is a, c, g, or t
  misc_feature (1124)..(1124): n is a, c, g, or t
  misc_feature (1128)..(1128): n is a, c, g, or t
  misc_feature (1135)..(1135): n is a, c, g, or t
  misc_feature (1137)..(1137): n is a, c, g, or t
  misc_feature (1141)..(1141): n is a, c, g, or t
  misc_feature (1145)..(1145): n is a, c, g, or t
  misc_feature (1158)..(1158): n is a, c, g, or t
  misc_feature (1161)..(1161): n is a, c, g, or t
  misc_feature (1163)..(1163): n is a, c, g, or t
  misc_feature (1167)..(1167): n is a, c, g, or t
  misc_feature (1178)..(1178): n is a, c, g, or t
  misc_feature (1185)..(1185): n is a, c, g, or t
  misc_feature (1190)..(1190): n is a, c, g, or t
  misc_feature (1192)..(1195): n is a, c, g, or t
  misc_feature (1207)..(1207): n is a, c, g, or t
  misc_feature (1218)..(1219): n is a, c, g, or t
  misc_feature (1223)..(1223): n is a, c, g, or t
  misc_feature (1228)..(1229): n is a, c, g, or t
  misc_feature (1237)..(1237): n is a, c, g, or t
  misc_feature (1239)..(1239): n is a, c, g, or t
  misc_feature (1249)..(1249): n is a, c, g, or t
  misc_feature (1252)..(1253): n is a, c, g, or t
  misc_feature (1264)..(1264): n is a, c, g, or t
  misc_feature (1272)..(1272): n is a, c, g, or t
  misc_feature (1275)..(1276): n is a, c, g, or t
  misc_feature (1278)..(1279): n is a, c, g, or t
  misc_feature (1286)..(1287): n is a, c, g, or t
  misc_feature (1292)..(1292): n is a, c, g, or t
  misc_feature (1298)..(1298): n is a, c, g, or t
  misc_feature (1303)..(1303): n is a, c, g, or t
  misc_feature (1307)..(1307): n is a, c, g, or t
  misc_feature (1310)..(1311): n is a, c, g, or t
  misc_feature (1321)..(1321): n is a, c, g, or t
  misc_feature (1324)..(1324): n is a, c, g, or t
  misc_feature (1342)..(1342): n is a, c, g, or t
  misc_feature (1346)..(1346): n is a, c, g, or t
  misc_feature (1353)..(1353): n is a, c, g, or t
  misc_feature (1357)..(1357): n is a, c, g, or t
  misc_feature (1362)..(1364): n is a, c, g, or t
  misc_feature (1366)..(1366): n is a, c, g, or t
  misc_feature (1376)..(1376): n is a, c, g, or t
  misc_feature (1387)..(1387): n is a, c, g, or t
  misc_feature (1389)..(1389): n is a, c, g, or t
  misc_feature (1395)..(1395): n is a, c, g, or t
  misc_feature (1398)..(1398): n is a, c, g, or t
  misc_feature (1403)..(1404): n is a, c, g, or t
  misc_feature (1408)..(1408): n is a, c, g, or t
  misc_feature (1410)..(1410): n is a, c, g, or t
  misc_feature (1412)..(1412): n is a, c, g, or t
  misc_feature (1417)..(1417): n is a, c, g, or t
  misc_feature (1419)..(1419): n is a, c, g, or t
  misc_feature (1422)..(1422): n is a, c, g, or t
  misc_feature (1427)..(1428): n is a, c, g, or t
  misc_feature (1438)..(1439): n is a, c, g, or t
  misc_feature (1444)..(1444): n is a, c, g, or t
  misc_feature (1448)..(1448): n is a, c, g, or t
  misc_feature (1450)..(1451): n is a, c, g, or t
  misc_feature (1464)..(1464): n is a, c, g, or t
gaataganagnattacnatgagaggatcgcatcaccatcaccatcacggatcctatttaggtgacactatagaatcgtcgacccacgcgtccgccctggagtaggcgcttccggccattcatactgcagtcggtcagtgttcggttgaaggattctgtgtgctgtcggacccagagggtgacggcgccgctaggatgaagctcgtgagatttttgatgaaattgagtcatgaaactgtaaccattgaattgaagaacggaacacaggtccatggaacaatcacaggtgtggatgtcagcatgaatacacatcttaaagctgtgaaaatgaccctgaagaacagagaacctgtacagctggaaacgctgagtattcgaggaaataacattcggtattttattctaccagacagtttacctctggatacactacttgtggatgttgaacctaaggtgaaatctaagaaaagggaagctgttgcaggaagaggcagaggaagaggaagaggaagaggacgtggccgtggcagaggaagagggggtcctaggcgataatgtctctcaagatttcaaagtcatatgagatttgggatattttttgtacaggttgtgtttgtttatgtcagtttttaataaacataaatgtgggacaaaaaaanaaaaaaaaaaaaaaanaaaaagggcggccgctccctatagtgagtcgtattaancttaattanctgagcttggactcctgttgatanatccagtaatgaccncanaactccntctggatttgttcaaaacnctcggtttgccgcccggcgttttttattggtganaaatcccaancctancttggccaanattttcaggaagctaaaggaaagcttaaaantggagaaaaaaaaancnccggganntncccnccgtttgaatatntcccccatgggcatcgntaaaaaaanatttttgaggcnttttccatccagttgctcnatgtaccntanaacccnaaccgttcnncngnannnttccgcccctttttaagaccngtaanaaaaaanaaccccaattttttnnccggccttttttncncattcttgcccccccgaaagaagncncccccngaattccanaggnccangaaaaangngacntggnaaaatggaaaaangtncncccntttttaccccnttttctnggacnannnnaaactttttccnccccctggggnnaatncccanncaattccngnctttctaccnaanntttccccaatntgggcgtntcnngnnaaaaccnnctccnttcccntaagngttnttnnaaaatttttnctncccccaccccggggattncacntttttantaancggcnnntnaaattttctncccctttcctngngaatanatnttcanngcangncnttacncntgnactcnnctaccacttnnatctnccancnncaataaatattan

SEQ ID NO: 675 - DNA, 1364 bp, Homo Sapiens
  misc_feature (772)..(772): n is a, c, g, or t
  misc_feature (831)..(831): n is a, c, g, or t
  misc_feature (900)..(900): n is a, c, g, or t
  misc_feature (914)..(914): n is a, c, g, or t
  misc_feature (925)..(925): n is a, c, g, or t
  misc_feature (932)..(933): n is a, c, g, or t
  misc_feature (937)..(937): n is a, c, g, or t
  misc_feature (940)..(940): n is a, c, g, or t
  misc_feature (954)..(954): n is a, c, g, or t
  misc_feature (958)..(958): n is a, c, g, or t
  misc_feature (970)..(970): n is a, c, g, or t
  misc_feature (972)..(972): n is a, c, g, or t
  misc_feature (976)..(976): n is a, c, g, or t
  misc_feature (984)..(984): n is a, c, g, or t
  misc_feature (987)..(987): n is a, c, g, or t
  misc_feature (993)..(993): n is a, c, g, or t
  misc_feature (1007)..(1007): n is a, c, g, or t
  misc_feature (1023)..(1023): n is a, c, g, or t
  misc_feature (1027)..(1027): n is a, c, g, or t
  misc_feature (1033)..(1033): n is a, c, g, or t
  misc_feature (1037)..(1037): n is a, c, g, or t
  misc_feature (1047)..(1047): n is a, c, g, or t
  misc_feature (1054)..(1054): n is a, c, g, or t
  misc_feature (1056)..(1056): n is a, c, g, or t
  misc_feature (1062)..(1062): n is a, c, g, or t
  misc_feature (1079)..(1079): n is a, c, g, or t
  misc_feature (1087)..(1087): n is a, c, g, or t
  misc_feature (1090)..(1090): n is a, c, g, or t
  misc_feature (1094)..(1094): n is a, c, g, or t
  misc_feature (1096)..(1096): n is a, c, g, or t
  misc_feature (1108)..(1108): n is a, c, g, or t
  misc_feature (1122)..(1122): n is a, c, g, or t
  misc_feature (1134)..(1135): n is a, c, g, or t
  misc_feature (1138)..(1138): n is a, c, g, or t
  misc_feature (1143)..(1143): n is a, c, g, or t
  misc_feature (1145)..(1145): n is a, c, g, or t
  misc_feature (1149)..(1149): n is a, c, g, or t
  misc_feature (1163)..(1163): n is a, c, g, or t
  misc_feature (1167)..(1167): n is a, c, g, or t
  misc_feature (1178)..(1178): n is a, c, g, or t
  misc_feature (1183)..(1184): n is a, c, g, or t
  misc_feature (1191)..(1191): n is a, c, g, or t
  misc_feature (1209)..(1210): n is a, c, g, or t
  misc_feature (1224)..(1224): n is a, c, g, or t
  misc_feature (1228)..(1228): n is a, c, g, or t
  misc_feature (1233)..(1233): n is a, c, g, or t
  misc_feature (1240)..(1240): n is a, c, g, or t
  misc_feature (1243)..(1243): n is a, c, g, or t
  misc_feature (1255)..(1255): n is a, c, g, or t
  misc_feature (1257)..(1258): n is a, c, g, or t
  misc_feature (1261)..(1261): n is a, c, g, or t
  misc_feature (1268)..(1269): n is a, c, g, or t
  misc_feature (1272)..(1272): n is a, c, g, or t
  misc_feature (1282)..(1283): n is a, c, g, or t
  misc_feature (1285)..(1285): n is a, c, g, or t
  misc_feature (1297)..(1297): n is a, c, g, or t
  misc_feature (1305)..(1305): n is a, c, g, or t
  misc_feature (1319)..(1319): n is a, c, g, or t
  misc_feature (1321)..(1321): n is a, c, g, or t
  misc_feature (1338)..(1338): n is a, c, g, or t
  misc_feature (1341)..(1342): n is a, c, g, or t
  misc_feature (1350)..(1350): n is a, c, g, or t
  misc_feature (1352)..(1352): n is a, c, g, or t
  misc_feature (1361)..(1361): n is a, c, g, or t
tagagaaattaactatgagaggatcgcatcaccatcaccatcacggatcctatttaggtgacactatagaatcgtcgacccacgcgtccggaaaagttcaccttggagaagctccgagaacacacagattgtgtctcattcatcttcagacacaggcacatagtgtggcactttgttcagttaacatttgtggagctgtcatcagctcagctttaacaacacaggtgactctttcccttgataaagtcataggtaattcaaagtgctgggattacaggcgtgagccaccaggcccggctgtctgtggtttttctttctggaatttctgttactcagatggtggacccagaattacctctcctccctgtgtgccccaaccccaattttcttttcttttgatcataatttatggaggattactccaagttgattctctgattgttcctttatatacgtagatatatagggacagtaccttgttccttgttgcaacatctttgaggatattaatatgctctgtagaagctttcatctccctgcatatgtctttctgctttctgttcttcaatttaatctttcatgttacagactttctttagctgcctggcaatcgttggtaatcttgcttatatttaagagtggagtattaaaaagaatatgtgattgtaaaaaaaaaaaaaaaaaaaaagggcggccgctccctatagtgagtcgtattaagcttaattagctgagcttggactcctgttgatagatccagtaatgacctcanaactccatctggatttgttcaaaacgctcggttgccgccgggcgttttttattggtganaatccaagctagcttggcgagattttcaggagctaaggaagctaaaatggaaaaaaaaaatcactgganataccaccgttganatatccccaanggcatcnnaaanaanattttgaggcattncagncagttgctcaangnaccnaaaaccanacngttcanctggaaattacggncctttttaaaaaccgnaaanaaaaanaaancccaagtttnatccggncntttatnccaattctggccccccngaagaagnccncccngnaattccaaaggnaatgaaaaacgggnaaccggggaaannggnaaaangnttcnccctgttaacccgntttnccgaaaaaaangaaannttttccncccctgggaggaaaaccnnaaaaattccggggntttncaaanaaaattnccnaaaagggggggntnnggnaaaaccnnccnattccccaanngnttttaaaaaaantttttccncccccccccggggnanttcccctttttttaaanggnnaaaaaaantnccccccctnccc

SEQ ID NO: 676 - DNA, 1496 bp, Homo Sapiens
  misc_feature (482)..(482): n is a, c, g, or t
  misc_feature (488)..(488): n is a, c, g, or t
  misc_feature (498)..(498): n is a, c, g, or t
  misc_feature (514)..(514): n is a, c, g, or t
  misc_feature (516)..(516): n is a, c, g, or t
  misc_feature (519)..(520): n is a, c, g, or t
  misc_feature (525)..(525): n is a, c, g, or t
  misc_feature (527)..(527): n is a, c, g, or t
  misc_feature (532)..(532): n is a, c, g, or t
  misc_feature (536)..(536): n is a, c, g, or t
  misc_feature (542)..(542): n is a, c, g, or t
  misc_feature (547)..(547): n is a, c, g, or t
  misc_feature (550)..(550): n is a, c, g, or t
  misc_feature (555)..(555): n is a, c, g, or t
  misc_feature (563)..(563): n is a, c, g, or t
  misc_feature (565)..(565): n is a, c, g, or t
  misc_feature (567)..(567): n is a, c, g, or t
  misc_feature (569)..(569): n is a, c, g, or t
  misc_feature (573)..(573): n is a, c, g, or t
  misc_feature (581)..(582): n is a, c, g, or t
  misc_feature (584)..(584): n is a, c, g, or t
  misc_feature (597)..(597): n is a, c, g, or t
  misc_feature (600)..(600): n is a, c, g, or t
  misc_feature (602)..(603): n is a, c, g, or t
  misc_feature (606)..(606): n is a, c, g, or t
  misc_feature (614)..(614): n is a, c, g, or t
  misc_feature (622)..(622): n is a, c, g, or t
  misc_feature (624)..(625): n is a, c, g, or t
  misc_feature (631)..(631): n is a, c, g, or t
  misc_feature (633)..(633): n is a, c, g, or t
  misc_feature (637)..(637): n is a, c, g, or t
  misc_feature (639)..(639): n is a, c, g, or t
  misc_feature (645)..(646): n is a, c, g, or t
  misc_feature (649)..(649): n is a, c, g, or t
  misc_feature (656)..(656): n is a, c, g, or t
  misc_feature (662)..(662): n is a, c, g, or t
  misc_feature (665)..(665): n is a, c, g, or t
  misc_feature (667)..(667): n is a, c, g, or t
  misc_feature (671)..(672): n is a, c, g, or t
  misc_feature (674)..(674): n is a, c, g, or t
  misc_feature (679)..(679): n is a, c, g, or t
  misc_feature (683)..(684): n is a, c, g, or t
  misc_feature (688)..(688): n is a, c, g, or t
  misc_feature (691)..(691): n is a, c, g, or t
  misc_feature (693)..(693): n is a, c, g, or t
  misc_feature (695)..(695): n is a, c, g, or t
  misc_feature (698)..(698): n is a, c, g, or t
  misc_feature (700)..(701): n is a, c, g, or t
  misc_feature (705)..(706): n is a, c, g, or t
  misc_feature (710)..(710): n is a, c, g, or t
  misc_feature (712)..(712): n is a, c, g, or t
  misc_feature (723)..(723): n is a, c, g, or t
  misc_feature (725)..(725): n is a, c, g, or t
  misc_feature (734)..(737): n is a, c, g, or t
  misc_feature (739)..(740): n is a, c, g, or t
  misc_feature (742)..(742): n is a, c, g, or t
  misc_feature (744)..(745): n is a, c, g, or t
  misc_feature (748)..(749): n is a, c, g, or t
  misc_feature (757)..(757): n is a, c, g, or t
  misc_feature (759)..(759): n is a, c, g, or t
  misc_feature (766)..(766): n is a, c, g, or t
  misc_feature (771)..(772): n is a, c, g, or t
  misc_feature (774)..(774): n is a, c, g, or t
  misc_feature (778)..(779): n is a, c, g, or t
  misc_feature (782)..(782): n is a, c, g, or t
  misc_feature (789)..(790): n is a, c, g, or t
  misc_feature (796)..(796): n is a, c, g, or t
  misc_feature (802)..(802): n is a, c, g, or t
  misc_feature (804)..(804): n is a, c, g, or t
  misc_feature (810)..(810): n is a, c, g, or t
  misc_feature (813)..(819): n is a, c, g, or t
  misc_feature (822)..(822): n is a, c, g, or t
  misc_feature (824)..(824): n is a, c, g, or t
  misc_feature (826)..(826): n is a, c, g, or t
  misc_feature (828)..(829): n is a, c, g, or t
  misc_feature (847)..(848): n is a, c, g, or t
  misc_feature (851)..(851): n is a, c, g, or t
  misc_feature (857)..(857): n is a, c, g, or t
  misc_feature (859)..(859): n is a, c, g, or t
  misc_feature (866)..(867): n is a, c, g, or t
  misc_feature (873)..(873): n is a, c, g, or t
  misc_feature (879)..(879): n is a, c, g, or t
  misc_feature (881)..(881): n is a, c, g, or t
  misc_feature (883)..(883): n is a, c, g, or t
  misc_feature (885)..(886): n is a, c, g, or t
  misc_feature (888)..(890): n is a, c, g, or t
  misc_feature (893)..(893): n is a, c, g, or t
  misc_feature (898)..(898): n is a, c, g, or t
  misc_feature (905)..(906): n is a, c, g, or t
  misc_feature (913)..(914): n is a, c, g, or t
  misc_feature (922)..(922): n is a, c, g, or t
  misc_feature (925)..(926): n is a, c, g, or t
  misc_feature (928)..(930): n is a, c, g, or t
  misc_feature (936)..(936): n is a, c, g, or t
  misc_feature (946)..(946): n is a, c, g, or t
  misc_feature (948)..(948): n is a, c, g, or t
  misc_feature (952)..(952): n is a, c, g, or t
  misc_feature (954)..(954): n is a, c, g, or t
  misc_feature (959)..(960): n is a, c, g, or t
  misc_feature (963)..(963): n is a, c, g, or t
  misc_feature (965)..(965): n is a, c, g, or t
  misc_feature (967)..(968): n is a, c, g, or t
  misc_feature (970)..(970): n is a, c, g, or t
  misc_feature (972)..(975): n is a, c, g, or t
  misc_feature (978)..(978): n is a, c, g, or t
  misc_feature (984)..(984): n is a, c, g, or t
  misc_feature (988)..(988): n is a, c, g, or t
  misc_feature (992)..(994): n is a, c, g, or t
  misc_feature (1000)..(1002): n is a, c, g, or t
  misc_feature (1006)..(1006): n is a, c, g, or t
  misc_feature (1009)..(1009): n is a, c, g, or t
  misc_feature (1014)..(1014): n is a, c, g, or t
  misc_feature (1017)..(1017): n is a, c, g, or t
  misc_feature (1021)..(1022): n is a, c, g, or t
  misc_feature (1026)..(1026): n is a, c, g, or t
  misc_feature (1031)..(1031): n is a, c, g, or t
  misc_feature (1033)..(1033): n is a, c, g, or t
  misc_feature (1038)..(1041): n is a, c, g, or t
  misc_feature (1050)..(1050): n is a, c, g, or t
  misc_feature (1055)..(1057): n is a, c, g, or t
  misc_feature (1064)..(1064): n is a, c, g, or t
  misc_feature (1078)..(1078): n is a, c, g, or t
  misc_feature (1081)..(1081): n is a, c, g, or t
  misc_feature (1085)..(1085): n is a, c, g, or t
  misc_feature (1109)..(1109): n is a, c, g, or t
  misc_feature (1112)..(1112): n is a, c, g, or t
  misc_feature (1117)..(1117): n is a, c, g, or t
  misc_feature (1119)..(1120): n is a, c, g, or t
  misc_feature (1122)..(1123): n is a, c, g, or t
  misc_feature (1127)..(1128): n is a, c, g, or t
  misc_feature (1137)..(1137): n is a, c, g, or t
  misc_feature (1139)..(1139): n is a, c, g, or t
  misc_feature (1149)..(1149): n is a, c, g, or t
  misc_feature (1151)..(1151): n is a, c, g, or t
  misc_feature (1155)..(1155): n is a, c, g, or t
  misc_feature (1161)..(1161): n is a, c, g, or t
  misc_feature (1167)..(1167): n is a, c, g, or t
  misc_feature (1174)..(1174): n is a, c, g, or t
  misc_feature (1176)..(1176): n is a, c, g, or t
  misc_feature (1183)..(1183): n is a, c, g, or t
  misc_feature (1188)..(1188): n is a, c, g, or t
  misc_feature (1190)..(1190): n is a, c, g, or t
  misc_feature (1192)..(1192): n is a, c, g, or t
  misc_feature (1195)..(1195): n is a, c, g, or t
  misc_feature (1197)..(1197): n is a, c, g, or t
  misc_feature (1201)..(1201): n is a, c, g, or t
  misc_feature (1203)..(1205): n is a, c, g, or t
  misc_feature (1211)..(1211): n is a, c, g, or t
  misc_feature (1213)..(1215): n is a, c, g, or t
  misc_feature (1217)..(1217): n is a, c, g, or t
  misc_feature (1223)..(1223): n is a, c, g, or t
  misc_feature (1230)..(1230): n is a, c, g, or t
  misc_feature (1236)..(1237): n is a, c, g, or t
  misc_feature (1241)..(1241): n is a, c, g, or t
  misc_feature (1245)..(1245): n is a, c, g, or t
  misc_feature (1247)..(1247): n is a, c, g, or t
  misc_feature (1266)..(1266): n is a, c, g, or t
  misc_feature (1270)..(1270): n is a, c, g, or t
  misc_feature (1272)..(1272): n is a, c, g, or t
  misc_feature (1274)..(1274): n is a, c, g, or t
  misc_feature (1276)..(1276): n is a, c, g, or t
  misc_feature (1278)..(1279): n is a, c, g, or t
  misc_feature (1282)..(1282): n is a, c, g, or t
  misc_feature (1284)..(1284): n is a, c, g, or t
  misc_feature (1286)..(1287): n is a, c, g, or t
  misc_feature (1294)..(1295): n is a, c, g, or t
  misc_feature (1301)..(1301): n is a, c, g, or t
  misc_feature (1306)..(1307): n is a, c, g, or t
  misc_feature (1310)..(1310): n is a, c, g, or t
  misc_feature (1317)..(1318): n is a, c, g, or t
  misc_feature (1328)..(1328): n is a, c, g, or t
  misc_feature (1336)..(1337): n is a, c, g, or t
  misc_feature (1339)..(1340): n is a, c, g, or t
  misc_feature (1343)..(1343): n is a, c, g, or t
  misc_feature (1345)..(1345): n is a, c, g, or t
  misc_feature (1348)..(1348): n is a, c, g, or t
  misc_feature (1351)..(1351): n is a, c, g, or t
  misc_feature (1355)..(1356): n is a, c, g, or t
  misc_feature (1360)..(1360): n is a, c, g, or t
  misc_feature (1363)..(1363): n is a, c, g, or t
  misc_feature (1368)..(1369): n is a, c, g, or t
  misc_feature (1377)..(1377): n is a, c, g, or t
  misc_feature (1381)..(1382): n is a, c, g, or t
  misc_feature (1390)..(1391): n is a, c, g, or t
  misc_feature (1395)..(1395): n is a, c, g, or t
  misc_feature (1397)..(1397): n is a, c, g, or t
  misc_feature (1409)..(1409): n is a, c, g, or t
  misc_feature (1411)..(1411): n is a, c, g, or t
  misc_feature (1421)..(1421): n is a, c, g, or t
  misc_feature (1426)..(1427): n is a, c, g, or t
  misc_feature (1441)..(1441): n is a, c, g, or t
  misc_feature (1445)..(1445): n is a, c, g, or t
  misc_feature (1452)..(1453): n is a, c, g, or t
  misc_feature (1457)..(1457): n is a, c, g, or t
  misc_feature (1459)..(1459): n is a, c, g, or t
  misc_feature (1469)..(1470): n is a, c, g, or t
  misc_feature (1485)..(1485): n is a, c, g, or t
  misc_feature (1487)..(1487): n is a, c, g, or t
  misc_feature (1490)..(1490): n is a, c, g, or t
aaatagagaaattactatgagaggatcgcatcaccatcaccatcacggatcctatttaggtgacactatagaatcgtcgacccacgcgtccgcgcctcctcccccacgcccggctccaccgcctccacgggcggcaaggccgacgacccgagctggtgcaagaccccgagtgggcacatcaagcgacccatgaacgccttcatggtgtggtcgcagatcgagcggcgcaagatcatggagcagtcgcccgacatgcacaacgccgagatctccaagcggctgggcaaacgctggaagctgctcaaagacagcgacaagatccctttcattcgagaggcggagcggctgcgcctcaagcacatggctgactaccccgactacaagtaccggcccaggaagaaggtgaagtccggcaacgccaactccagctcctcggccgccgcctcctccaagccgggggagaagggagacacggtcggtgncagtgncgggggcggncatgggggcggcggcngnggnnggagnancaacnctgngggagnaggcngcngtgcnagtggcgncngnancaantccaaacnngngtaaaaaaagatntgngnntcnaaattgantggcgccncnngcgttngncttnanaaaacnnatnctcaagntcatcntgncnatanntnggttncagnntcanagnantngangnngtcnncttntnctcttttatantnaaaatattnnnncnncnannctnncttgattnanctctggngcaanntncatnnatntacttannactttntacaanancactcntannnnnnnatntntntnnttcttctaaatacttaannatntaaatntntcataannatattnattttnangncnntnnntanaaatnatttttnncgaaaannttaacatnttnnannnacaatnattatctttntncacntntatcnnacntntnnantnnnntgnaaaganaaantttnnntaatcnnnaaanaancccantcntctnnttgngcctntnctcannnnagaattgtnaagtnnnatttttntactaaatttatanttntccnaatatttctctattctatatattnacnttccnannanntttnnatttattgnanacatttaagnanttgntgtaanataatntatatcntntatactnacatnantnatnancttntnnntaactntnnnantccccntggtttnattttnnggtntaantntcataaaacatcgtcatanattntntnantnnatnananngatatanntgaacnatttnntgntttattnntataatatcncttcctanntnnatnanaanaantatnnatanatntaaanncttctctntaanntatgtatnnatantnctatattctttntnatttatactnctaannacaattaattcttntacntgtaatnntacntnccaatcttannatattataattaaananctntgatta

SEQ ID NO: 677 - DNA, 1401 bp, Homo Sapiens
  misc_feature (8)..(8): n is a, c, g, or t
  misc_feature (882)..(882): n is a, c, g, or t
  misc_feature (908)..(908): n is a, c, g, or t
  misc_feature (911)..(911): n is a, c, g, or t
  misc_feature (933)..(933): n is a, c, g, or t
  misc_feature (943)..(943): n is a, c, g, or t
  misc_feature (953)..(953): n is a, c, g, or t
  misc_feature (959)..(959): n is a, c, g, or t
  misc_feature (968)..(968): n is a, c, g, or t
  misc_feature (973)..(973): n is a, c, g, or t
  misc_feature (984)..(985): n is a, c, g, or t
  misc_feature (988)..(988): n is a, c, g, or t
  misc_feature (1008)..(1008): n is a, c, g, or t
  misc_feature (1010)..(1011): n is a, c, g, or t
  misc_feature (1017)..(1017): n is a, c, g, or t
  misc_feature (1023)..(1023): n is a, c, g, or t
  misc_feature (1035)..(1035): n is a, c, g, or t
  misc_feature (1041)..(1041): n is a, c, g, or t
  misc_feature (1049)..(1049): n is a, c, g, or t
  misc_feature (1053)..(1053): n is a, c, g, or t
  misc_feature (1087)..(1088): n is a, c, g, or t
  misc_feature (1095)..(1095): n is a, c, g, or t
  misc_feature (1097)..(1097): n is a, c, g, or t
  misc_feature (1109)..(1109): n is a, c, g, or t
  misc_feature (1112)..(1112): n is a, c, g, or t
  misc_feature (1115)..(1115): n is a, c, g, or t
  misc_feature (1131)..(1131): n is a, c, g, or t
  misc_feature (1133)..(1133): n is a, c, g, or t
  misc_feature (1139)..(1139): n is a, c, g, or t
  misc_feature (1148)..(1148): n is a, c, g, or t
  misc_feature (1155)..(1155): n is a, c, g, or t
  misc_feature (1162)..(1162): n is a, c, g, or t
  misc_feature (1165)..(1165): n is a, c, g, or t
  misc_feature (1172)..(1172): n is a, c, g, or t
  misc_feature (1176)..(1176): n is a, c, g, or t
  misc_feature (1189)..(1190): n is a, c, g, or t
  misc_feature (1192)..(1192): n is a, c, g, or t
  misc_feature (1196)..(1196): n is a, c, g, or t
  misc_feature (1199)..(1199): n is a, c, g, or t
  misc_feature (1204)..(1205): n is a, c, g, or t
  misc_feature (1255)..(1255): n is a, c, g, or t
  misc_feature (1260)..(1260): n is a, c, g, or t
  misc_feature (1265)..(1265): n is a, c, g, or t
  misc_feature (1285)..(1285): n is a, c, g, or t
  misc_feature (1293)..(1293): n is a, c, g, or t
  misc_feature (1300)..(1300): n is a, c, g, or t
  misc_feature (1304)..(1304): n is a, c, g, or t
  misc_feature (1316)..(1316): n is a, c, g, or t
  misc_feature (1319)..(1319): n is a, c, g, or t
  misc_feature (1328)..(1328): n is a, c, g, or t
  misc_feature (1333)..(1333): n is a, c, g, or t
  misc_feature (1348)..(1348): n is a, c, g, or t
  misc_feature (1355)..(1355): n is a, c, g, or t
  misc_feature (1357)..(1358): n is a, c, g, or t
  misc_feature (1360)..(1360): n is a, c, g, or t
  misc_feature (1362)..(1362): n is a, c, g, or t
  misc_feature (1368)..(1368): n is a, c, g, or t
  misc_feature (1372)..(1372): n is a, c, g, or t
  misc_feature (1375)..(1375): n is a, c, g, or t
  misc_feature (1380)..(1381): n is a, c, g, or t
  misc_feature (1398)..(1398): n is a, c, g, or t
  misc_feature (1400)..(1400): n is a, c, g, or t
agagagantactatgagaggatcgcatcaccatcaccatcacggatcctatttaggtgacactatagaatcgtcgacccacgcgtccgggaactaccatcttttattcttaataattattaatcccttcaatgaaactttaaaaaaactgaatttttatacatggcatacatttttctagttccttctgcttgctttattaactcaaaagttctagttctagtctgttgatctgccttttgttctcccaaaatgtacagtaattccatttgtttgtataaatatgcctggattttcattataaaaatgtcattgtagggagtagagactcatatcatggccttttaaatattgtaataaaggcaaatagatatttgcccttagtttactggttaaaagtttgtttacagaacttttctctggtgcttaaatgatgctatgtaaaatgtcatgagtggaaagaatatttgtagtagtaacaagaatttttcatttaggaaagatttcttaggttttgaaagaatacattaaaataaaaaacttgcccctactaggtaagaactttataatgaagacatacattcttcttaattttactcttgctcttgttaaagatttgtttgaatatagaagatgcatgatttctgggtttttttttttttttgagacagagtttcgctcttgttgcccaggctggagtgcaatggcgcaatctcgactcaccacaacctccgcctcccaggttcaagcaattctcctgcctcagcctcccgagtagctgggattacaggcatgcgccactaccccagctaattttgtatttttagtagagatggggtttctccatgttggtcaggctggtcttgaactcctgacctcaggngatccgcccgcctcggcctcccaagngcngggattacaggcataagccccngcccccgccngaaaaggcangattcntaggacccnatgcnggttggagccnnaanggaaaacaggcccctccaancnngacttnggaccnccccggaaaaanaaaaangaaagtgnaaanaaaaggggaaaaaaaattttttcccgcccaaccnngcctagntnaggggagggganaanccnttagggcccaaccttncncccccntttgaaaancggaacnaaggggntangaaaatnttgngaaaaaatggaanncnaaanaanctccnntaacccaaaattcctgtttctttaaagaaaaactttggaccggaaacggnaacanaaagnaaggggccccccccttaaanggcccccnacccggnaacncgggggactttnaanaatccgggnaaaanagggggacccccccngaaaccngnngntncccccncccnggnaattnnccccctttttttggggnana

SEQ ID NO: 678 - DNA, 1369 bp, Homo Sapiens
  misc_feature (916)..(916): n is a, c, g, or t
  misc_feature (971)..(971): n is a, c, g, or t
  misc_feature (985)..(985): n is a, c, g, or t
  misc_feature (1003)..(1003): n is a, c, g, or t
  misc_feature (1008)..(1008): n is a, c, g, or t
  misc_feature (1050)..(1050): n is a, c, g, or t
  misc_feature (1070)..(1070): n is a, c, g, or t
  misc_feature (1081)..(1081): n is a, c, g, or t
  misc_feature (1083)..(1083): n is a, c, g, or t
  misc_feature (1119)..(1119): n is a, c, g, or t
  misc_feature (1135)..(1135): n is a, c, g, or t
  misc_feature (1156)..(1156): n is a, c, g, or t
  misc_feature (1160)..(1160): n is a, c, g, or t
  misc_feature (1175)..(1175): n is a, c, g, or t
  misc_feature (1195)..(1195): n is a, c, g, or t
  misc_feature (1201)..(1201): n is a, c, g, or t
  misc_feature (1207)..(1207): n is a, c, g, or t
  misc_feature (1214)..(1214): n is a, c, g, or t
  misc_feature (1225)..(1225): n is a, c, g, or t
  misc_feature (1254)..(1254): n is a, c, g, or t
  misc_feature (1258)..(1258): n is a, c, g, or t
  misc_feature (1261)..(1261): n is a, c, g, or t
  misc_feature (1263)..(1263): n is a, c, g, or t
  misc_feature (1273)..(1273): n is a, c, g, or t
  misc_feature (1281)..(1281): n is a, c, g, or t
  misc_feature (1284)..(1284): n is a, c, g, or t
  misc_feature (1290)..(1290): n is a, c, g, or t
  misc_feature (1294)..(1294): n is a, c, g, or t
  misc_feature (1296)..(1297): n is a, c, g, or t
  misc_feature (1299)..(1299): n is a, c, g, or t
  misc_feature (1331)..(1331): n is a, c, g, or t
  misc_feature (1339)..(1339): n is a, c, g, or t
  misc_feature (1342)..(1342): n is a, c, g, or t
  misc_feature (1345)..(1347): n is a, c, g, or t
  misc_feature (1358)..(1358): n is a, c, g, or t
  misc_feature (1369)..(1369): n is a, c, g, or t
tagagaaattactatgagaggatcgcatcaccatcaccatcacggatcctatttaggtgacactatagaatcgtcgacccacgcgtccggcatggcgtacccggggcatcctggcgccggcggcgggtactacccaggcgggtatggaggggctcccggagggcctgcgtttcccggacaaactcaggatccgctgtatggttactttgctgctgtagctggacaggatgggcagatagatgctgatgaattgcagagatgtctgacacagtctggcattgctggaggatacaaaccttttaacctggagacttgccggcttatggtttcaatgctggatagagatatgtctggcacaatgggtttcaatgaatttaaagaactctgggctgtactgaatggctggagacaacactttatcagttttgacactgacaggagtggaacagtagacccacaagaattgcagaaggccctgacaacaatgggatttaggttgagtccccaggctgtgaattcaattgcaaaacgatacagcaccaatggaaagatcaccttcgacgactacatcgcctgctgcgtcaaactgagggctcttacagacagctttcgaagacgggatactgctcagcaaggtgttgtgaatttcccatatgatgatttcattcaatgtgtcatgagtgtttaaatcaagaggaagctgcatgaatgtaatcaacattccaactggagctctcctttgcttgtcctctttgccttcggtaatatgtataaacttacatcacgactttctcttaacagctgttgtaaagtttattactttatgtacaactgaagttttgttttagttttgataataaattctttggaactttaataagatctagtctgttacaccatttagaactttcctganccattatcagtcatgccttattttcttgctaaactctatgtaatttaagtatgcnaaatgtttaagtcncattatttatttttcatngtganaccctaaaaactgttaatcaaactacagctgttatctttccnccctacaaaaaaactccccncataaaacctnangtaaatgacataaaccccttgggtgaaaaaaacacnaaaaggtatcccgtanccccctcggatccccttaaanttancccccccctcaaacnggtgaaaattgattggaaanaatctncccaanccctttngcccaattaancttgtaaccccctaaaacttggccttaancttnctntnaaaaaatttnaaaaaaanggnattggnaatnanngnttttggaaagaatccaaaattttttttaaaantttaaatnaanccnnntaaaaaatttnaaaaacccctn

SEQ ID NO: 679 - DNA, 1384 bp, Homo Sapiens
  misc_feature (856)..(856): n is a, c, g, or t
  misc_feature (882)..(882): n is a, c, g, or t
  misc_feature (936)..(936): n is a, c, g, or t
  misc_feature (960)..(960): n is a, c, g, or t
  misc_feature (970)..(970): n is a, c, g, or t
  misc_feature (972)..(972): n is a, c, g, or t
  misc_feature (975)..(975): n is a, c, g, or t
  misc_feature (981)..(982): n is a, c, g, or t
  misc_feature (987)..(987): n is a, c, g, or t
  misc_feature (993)..(993): n is a, c, g, or t
  misc_feature (997)..(997): n is a, c, g, or t
  misc_feature (999)..(999): n is a, c, g, or t
  misc_feature (1002)..(1003): n is a, c, g, or t
  misc_feature (1005)..(1006): n is a, c, g, or t
  misc_feature (1010)..(1011): n is a, c, g, or t
  misc_feature (1014)..(1014): n is a, c, g, or t
  misc_feature (1016)..(1016): n is a, c, g, or t
  misc_feature (1022)..(1022): n is a, c, g, or t
  misc_feature (1028)..(1028): n is a, c, g, or t
  misc_feature (1035)..(1035): n is a, c, g, or t
  misc_feature (1043)..(1043): n is a, c, g, or t
  misc_feature (1045)..(1045): n is a, c, g, or t
  misc_feature (1056)..(1058): n is a, c, g, or t
  misc_feature (1061)..(1061): n is a, c, g, or t
  misc_feature (1068)..(1068): n is a, c, g, or t
  misc_feature (1074)..(1075): n is a, c, g, or t
  misc_feature (1077)..(1077): n is a, c, g, or t
  misc_feature (1080)..(1080): n is a, c, g, or t
  misc_feature (1093)..(1093): n is a, c, g, or t
  misc_feature (1095)..(1096): n is a, c, g, or t
  misc_feature (1098)..(1098): n is a, c, g, or t
  misc_feature (1102)..(1104): n is a, c, g, or t
  misc_feature (1107)..(1107): n is a, c, g, or t
  misc_feature (1121)..(1121): n is a, c, g, or t
  misc_feature (1123)..(1123): n is a, c, g, or t
  misc_feature (1128)..(1128): n is a, c, g, or t
  misc_feature (1133)..(1135): n is a, c, g, or t
  misc_feature (1138)..(1138): n is a, c, g, or t
  misc_feature (1142)..(1142): n is a, c, g, or t
  misc_feature (1149)..(1149): n is a, c, g, or t
  misc_feature (1151)..(1151): n is a, c, g, or t
  misc_feature (1158)..(1158): n is a, c, g, or t
  misc_feature (1160)..(1160): n is a, c, g, or t
  misc_feature (1162)..(1162): n is a, c, g, or t
  misc_feature (1165)..(1166): n is a, c, g, or t
  misc_feature (1178)..(1179): n is a, c, g, or t
  misc_feature (1182)..(1182): n is a, c, g, or t
  misc_feature (1185)..(1185): n is a, c, g, or t
  misc_feature (1189)..(1191): n is a, c, g, or t
  misc_feature (1195)..(1196): n is a, c, g, or t
  misc_feature (1198)..(1198): n is a, c, g, or t
  misc_feature (1200)..(1200): n is a, c, g, or t
  misc_feature (1202)..(1202): n is a, c, g, or t
  misc_feature (1205)..(1205): n is a, c, g, or t
  misc_feature (1208)..(1208): n is a, c, g, or t
  misc_feature (1211)..(1211): n is a, c, g, or t
  misc_feature (1213)..(1214): n is a, c, g, or t
  misc_feature (1218)..(1219): n is a, c, g, or t
  misc_feature (1222)..(1222): n is a, c, g, or t
  misc_feature (1224)..(1225): n is a, c, g, or t
  misc_feature (1229)..(1230): n is a, c, g, or t
  misc_feature (1235)..(1235): n is a, c, g, or t
  misc_feature (1237)..(1237): n is a, c, g, or t
  misc_feature (1239)..(1242): n is a, c, g, or t
  misc_feature (1245)..(1246): n is a, c, g, or t
  misc_feature (1248)..(1249): n is a, c, g, or t
  misc_feature (1251)..(1251): n is a, c, g, or t
  misc_feature (1253)..(1253): n is a, c, g, or t
  misc_feature (1255)..(1255): n is a, c, g, or t
  misc_feature (1259)..(1260): n is a, c, g, or t
  misc_feature (1262)..(1263): n is a, c, g, or t
  misc_feature (1265)..(1266): n is a, c, g, or t
  misc_feature (1272)..(1273): n is a, c, g, or t
  misc_feature (1278)..(1278): n is a, c, g, or t
  misc_feature (1283)..(1283): n is a, c, g, or t
  misc_feature (1293)..(1294): n is a, c, g, or t
  misc_feature (1298)..(1298): n is a, c, g, or t
  misc_feature (1302)..(1302): n is a, c, g, or t
  misc_feature (1307)..(1311): n is a, c, g, or t
  misc_feature (1315)..(1315): n is a, c, g, or t
  misc_feature (1318)..(1318): n is a, c, g, or t
  misc_feature (1320)..(1320): n is a, c, g, or t
  misc_feature (1328)..(1328): n is a, c, g, or t
  misc_feature (1336)..(1336): n is a, c, g, or t
  misc_feature (1338)..(1340): n is a, c, g, or t
  misc_feature (1344)..(1347): n is a, c, g, or t
  misc_feature (1351)..(1356): n is a, c, g, or t
  misc_feature (1358)..(1363): n is a, c, g, or t
  misc_feature (1369)..(1369): n is a, c, g, or t
  misc_feature (1376)..(1376): n is a, c, g, or t
  misc_feature (1378)..(1378): n is a, c, g, or t
  misc_feature (1383)..(1384): n is a, c, g, or t
aattagagagaattactatgagaggatcgcatcaccatcaccatcacggatcctatttaggtgacactatagaatcgtcgacccacgcgtccggcccctagcctgcagagcagtgttcggcagcgcctgacggagccacagcatggcctgggatctcagagggatttgacccattccgattcggagtcctccctccacatgagtgaccgccagcgtgtggcccccaaacctcctcagatgagccgtgctgcagacgaggctctcaatgccatgacttccaatggcagccaccggctgatcgagggggtccacccagggtctctggtggagaaactgcctgacagccctgccctggccaagaaggcattactggcgctgaaccatgggctggacaaggcccacagcctgatggagctgagcccctcagccccacctggtggctctccacatttggattcttcccgttctcacagccccagctccccagacccagacacaccatctccagttggggacagccgagccctgcaagccagccgaaacacacgcattccccacctggctggcaagaaggctgtggctgaggaggataatggctctattggcgaggaaacagactccagcccaggccggaagaagtttcccctcaaaatctttaagaagcctcttaagaagtaggcaggatggggtggcagtaaagggacagcttgtccttccctgggtgttctgtctctccttccctcccttccttcaagataactggccccaagagtggggcatgggaagggctggtccaggggtctgggcactgtacatacctgccccctcatccttggggtccttcattattatttantaactgaccaccatggccctgcctgnccctgcctccgtcccaaccatgggctgctgctgtcactcccctctccacttcantgcatgtcttaattgctgttcccntcaacttccnanctncacctnnggggnttcaancttntnttnntnnctgnnccnantttttnaggttnggtttcntggtttcngncccttggtttnnnggntctcccntcccannanttnccaattttccctnannantttnnnggnaaaaaaaaaaaaanantttcnaaatnnntgncctnaaattgntnccccccnancnaannggttttgttttnnccnaangggnnnaggnncnancnttnaanttntnnttgnnttnanngggnnaaaanancnnnnttnntnncncnancccnngnntnnggggannaaacnttttnaaaaaacccnnaaantttnaaaannnnntttnaangntgaaaaantttttttnannngggnnnnaaannnnnnannnnnntttttnttccccncntcccnn

SEQ ID NO: 680 - DNA, 1381 bp, Homo Sapiens
  misc_feature (1)..(1): n is a, c, g, or t
  misc_feature (4)..(4): n is a, c, g, or t
  misc_feature (106)..(106): n is a, c, g, or t
  misc_feature (721)..(721): n is a, c, g, or t
  misc_feature (788)..(788): n is a, c, g, or t
  misc_feature (790)..(790): n is a, c, g, or t
  misc_feature (806)..(806): n is a, c, g, or t
  misc_feature (829)..(829): n is a, c, g, or t
  misc_feature (908)..(908): n is a, c, g, or t
  misc_feature (910)..(910): n is a, c, g, or t
  misc_feature (915)..(915): n is a, c, g, or t
  misc_feature (930)..(930): n is a, c, g, or t
  misc_feature (938)..(938): n is a, c, g, or t
  misc_feature (944)..(944): n is a, c, g, or t
  misc_feature (947)..(947): n is a, c, g, or t
  misc_feature (960)..(960): n is a, c, g, or t
  misc_feature (968)..(968): n is a, c, g, or t
  misc_feature (974)..(974): n is a, c, g, or t
  misc_feature (983)..(983): n is a, c, g, or t
  misc_feature (985)..(985): n is a, c, g, or t
  misc_feature (989)..(991): n is a, c, g, or t
  misc_feature (999)..(999): n is a, c, g, or t
  misc_feature (1002)..(1002): n is a, c, g, or t
  misc_feature (1018)..(1018): n is a, c, g, or t
  misc_feature (1029)..(1029): n is a, c, g, or t
  misc_feature (1031)..(1031): n is a, c, g, or t
  misc_feature (1035)..(1035): n is a, c, g, or t
  misc_feature (1038)..(1038): n is a, c, g, or t
  misc_feature (1044)..(1044): n is a, c, g, or t
  misc_feature (1046)..(1047): n is a, c, g, or t
  misc_feature (1049)..(1049): n is a, c, g, or t
  misc_feature (1061)..(1061): n is a, c, g, or t
  misc_feature (1064)..(1064): n is a, c, g, or t
  misc_feature (1073)..(1073): n is a, c, g, or t
  misc_feature (1083)..(1083): n is a, c, g, or t
  misc_feature (1093)..(1093): n is a, c, g, or t
  misc_feature (1101)..(1101): n is a, c, g, or t
  misc_feature (1105)..(1105): n is a, c, g, or t
  misc_feature (1107)..(1109): n is a, c, g, or t
  misc_feature (1111)..(1111): n is a, c, g, or t
  misc_feature (1120)..(1120): n is a, c, g, or t
  misc_feature (1122)..(1122): n is a, c, g, or t
  misc_feature (1127)..(1127): n is a, c, g, or t
  misc_feature (1133)..(1133): n is a, c, g, or t
  misc_feature (1137)..(1137): n is a, c, g, or t
  misc_feature (1142)..(1142): n is a, c, g, or t
  misc_feature (1151)..(1151): n is a, c, g, or t
  misc_feature (1156)..(1158): n is a, c, g, or t
  misc_feature (1169)..(1169): n is a, c, g, or t
  misc_feature (1171)..(1171): n is a, c, g, or t
  misc_feature (1178)..(1178): n is a, c, g, or t
  misc_feature (1180)..(1180): n is a, c, g, or t
  misc_feature (1184)..(1185): n is a, c, g, or t
  misc_feature (1188)..(1188): n is a, c, g, or t
  misc_feature (1194)..(1194): n is a, c, g, or t
  misc_feature (1207)..(1207): n is a, c, g, or t
  misc_feature (1214)..(1215): n is a, c, g, or t
  misc_feature (1223)..(1223): n is a, c, g, or t
  misc_feature (1226)..(1226): n is a, c, g, or t
  misc_feature (1233)..(1233): n is a, c, g, or t
  misc_feature (1237)..(1237): n is a, c, g, or t
  misc_feature (1255)..(1255): n is a, c, g, or t
  misc_feature (1257)..(1258): n is a, c, g, or t
  misc_feature (1260)..(1260): n is a, c, g, or t
  misc_feature (1262)..(1262): n is a, c, g, or t
  misc_feature (1277)..(1277): n is a, c, g, or t
  misc_feature (1286)..(1286): n is a, c, g, or t
  misc_feature (1289)..(1289): n is a, c, g, or t
  misc_feature (1300)..(1300): n is a, c, g, or t
  misc_feature (1302)..(1302): n is a, c, g, or t
  misc_feature (1305)..(1305): n is a, c, g, or t
  misc_feature (1308)..(1308): n is a, c, g, or t
  misc_feature (1316)..(1316): n is a, c, g, or t
  misc_feature (1318)..(1318): n is a, c, g, or t
  misc_feature (1328)..(1328): n is a, c, g, or t
  misc_feature (1341)..(1341): n is a, c, g, or t
  misc_feature (1344)..(1344): n is a, c, g, or t
  misc_feature (1350)..(1351): n is a, c, g, or t
  misc_feature (1357)..(1357): n is a, c, g, or t
  misc_feature (1367)..(1367): n is a, c, g, or t
  misc_feature (1370)..(1370): n is a, c, g, or t
nccnaaatagagagaattactatgagaggatcgcatcaccatcaccatcacggatcctatttaggtgacactatagaatcgtcgacccacgcgtccgcccacgcgntccggcaagcagcgtgggttgcctctatttgtcttgagcaaaggtgcatgttgtctcccatggccagaacaagagagggtggaattgaaccttgtcagaggtctggctgacagcgcttaggtctgtagatggcaccacagacaggttgtggccagtgtggacatcctgggtagatgacagttaccgtaagctgggctgggccgggccaggggtggggatgccttggctgggttgatttctaggttttcttgttttcccccagattgaggacgagacgcaggtgtcacgggccactcagggtgaacaggacaattacgagatgcatgtgcgagccgccaacatcgtccgagccggcgagtccctgatgaagctggtgtccgacctcaagcagttcctgatcctcaatgacttcccctccgtgaacgaggccattgaccagcgcaaccagcagctgcgcacactgcaggaggagtgcgaccggaagctcatcacgctgcgagacgagatctccattgacctctacgagctggaggaggagtattactcgtccaggtataaatagcgctggactccccatgcagagcgggagcctgcctacctgggcctggccagcangcagggctgccttctgctttttcaaattcttgctggtcttaacagtggagccatgcctgggtttcanancaaaagctcctggccnagagcgtttgaccgacagacaantcacatccatatgccagggccctgggccctttcccacagtgcaatgtgatgaaaaccacaggactcacgccagtcgganangcccnaatctggaaaaaggnaagccccntggctnttntccccccgcaagnccctcttnccaaanaaccttccncntcgnnnaaatgcgntcnggggggatggggcctngctccctgttnancttncgnaatccnanntntaaaaaaatttncanccaaaagcntggggcccancctttttttngggccaantccngnnncnacccccttntntcccngggccnccanggaangcaaattcncattnnnagatttccccnanccccccngngtgnnganagccanggaacactctttngtaaagnnggggaaanaancccccanccanggaaatgccctttaaaancnntntnaaccccaaattttcngaacccctnccnccttatccccngnagntgnaaccatcntnagttccggcnccccggtttgttnccngggtanncaaaangttaaaaccnctntctctgaccct

SEQ ID NO: 681 - DNA, 1384 bp, Homo Sapiens
  misc_feature (4)..(4): n is a, c, g, or t
  misc_feature (825)..(825): n is a, c, g, or t
  misc_feature (873)..(873): n is a, c, g, or t
  misc_feature (875)..(875): n is a, c, g, or t
  misc_feature (886)..(886): n is a, c, g, or t
  misc_feature (902)..(902): n is a, c, g, or t
  misc_feature (904)..(904): n is a, c, g, or t
  misc_feature (922)..(922): n is a, c, g, or t
  misc_feature (932)..(932): n is a, c, g, or t
  misc_feature (958)..(958): n is a, c, g, or t
  misc_feature (974)..(974): n is a, c, g, or t
  misc_feature (977)..(977): n is a, c, g, or t
  misc_feature (979)..(979): n is a, c, g, or t
  misc_feature (987)..(987): n is a, c, g, or t
  misc_feature (1004)..(1004): n is a, c, g, or t
  misc_feature (1030)..(1030): n is a, c, g, or t
  misc_feature (1039)..(1039): n is a, c, g, or t
  misc_feature (1046)..(1046): n is a, c, g, or t
  misc_feature (1055)..(1055): n is a, c, g, or t
  misc_feature (1063)..(1063): n is a, c, g, or t
  misc_feature (1073)..(1074): n is a, c, g, or t
  misc_feature (1084)..(1084): n is a, c, g, or t
  misc_feature (1095)..(1098): n is a, c, g, or t
  misc_feature (1118)..(1119): n is a, c, g, or t
  misc_feature (1121)..(1122): n is a, c, g, or t
  misc_feature (1133)..(1133): n is a, c, g, or t
  misc_feature (1136)..(1136): n is a, c, g, or t
  misc_feature (1147)..(1148): n is a, c, g, or t
  misc_feature (1155)..(1156): n is a, c, g, or t
  misc_feature (1159)..(1159): n is a, c, g, or t
  misc_feature (1165)..(1165): n is a, c, g, or t
  misc_feature (1175)..(1175): n is a, c, g, or t
  misc_feature (1177)..(1177): n is a, c, g, or t
  misc_feature (1183)..(1183): n is a, c, g, or t
  misc_feature (1202)..(1202): n is a, c, g, or t
  misc_feature (1204)..(1204): n is a, c, g, or t
  misc_feature (1206)..(1206): n is a, c, g, or t
  misc_feature (1208)..(1208): n is a, c, g, or t
  misc_feature (1216)..(1216): n is a, c, g, or t
  misc_feature (1221)..(1221): n is a, c, g, or t
  misc_feature (1224)..(1224): n is a, c, g, or t
  misc_feature (1231)..(1231): n is a, c, g, or t
  misc_feature (1233)..(1233): n is a, c, g, or t
  misc_feature (1239)..(1239): n is a, c, g, or t
  misc_feature (1261)..(1261): n is a, c, g, or t
  misc_feature (1268)..(1269): n is a, c, g, or t
  misc_feature (1273)..(1273): n is a, c, g, or t
  misc_feature (1278)..(1278): n is a, c, g, or t
  misc_feature (1280)..(1280): n is a, c, g, or t
  misc_feature (1289)..(1290): n is a, c, g, or t
  misc_feature (1294)..(1294): n is a, c, g, or t
  misc_feature (1297)..(1298): n is a, c, g, or t
  misc_feature (1304)..(1304): n is a, c, g, or t
  misc_feature (1307)..(1308): n is a, c, g, or t
  misc_feature (1311)..(1311): n is a, c, g, or t
  misc_feature (1313)..(1316): n is a, c, g, or t
  misc_feature (1323)..(1323): n is a, c, g, or t
  misc_feature (1326)..(1326): n is a, c, g, or t
  misc_feature (1330)..(1330): n is a, c, g, or t
  misc_feature (1339)..(1340): n is a, c, g, or t
  misc_feature (1342)..(1343): n is a, c, g, or t
  misc_feature (1347)..(1348): n is a, c, g, or t
  misc_feature (1356)..(1356): n is a, c, g, or t
  misc_feature (1359)..(1360): n is a, c, g, or t
  misc_feature (1362)..(1365): n is a, c, g, or t
  misc_feature (1375)..(1375): n is a, c, g, or t
  misc_feature (1378)..(1378): n is a, c, g, or t
  misc_feature (1380)..(1380): n is a, c, g, or t
caantagagaaattactatgagaggatcgcatcaccatcaccatcacggatcctatttaggtgacactatagaatcgtcgacccacgcgtccgggtccgggcggggctggcgcctcggcgtctcccgggagtgtcccgtccagccgccgagcagggtgcttgagtgtctctgcagaaaagactccaggaccccgccaccatgttcccggagcccccaaccccggggcctccatcgcccgacacgcctcccgactccagtcgcatcagccacggcccagtgcccccctgggccctggccaccatcgtgctggtctcaggcctcctcatcttcagctgctgtttctgtctctaccggaagagctgtcggaggcggacaggcaagaagagccaggcccaagcccaggtccaccttcaggaagtgaaggggctgggccagagttacatagacaaggtgcagccagaagtagaggagctggagccagcaccatccgggccagggcagcaggtggcagacaagcatgagctaggacgactgcagtactccctggattatgacttccagagtggccagctgctggtgggcattctgcaagcaatgggattggcagccttggatcttggtggctcctcggacccctatgtgcgggtctacctgctgccggacaaacggaggcggtacgagaccaaggtgcatcggcagacgctgaaccctcactttggggagaccttcgccttcaaggtcccctacgtggagctggggggcagggtgctggtcatggcggtgtacgacttcgaccgcttctctcgcaatgacgccatcggggnaggtgcgggtccctatgagctccgtggacctgggggcggccagtgcangnctggcgggaanctgcaggcggcttccncngggaggaaccaggaaaancttggggganattctgctttttcccttccgctaatntcccccacggccgggnaancntcaccgtnattcgtccttgaaaggntaaaaaactttaaaaaaaaatggacntaaggaagnattgttnaaatccatnactttaanggtccacctnntttcaagggnggaaaaaaggnnnnggaaaaaaaaaaaacccccnntnnaaaaaaaaaanctntgaaacccctnnttaaaannaanttttanctttcaaggngnccttgngaacaaaatccaaaaaggngnangnggaaattnaaccngtnttgaatnanaaaaanttgggaaaaaaaaaacctttgnaagggtnncctnggggncnccccctccnntaanggnnccaatnaannttntnnnntaaattngantccnttttaaaanncnnaaannccccaaanccnntnnnnttttttaaanttntntccc

SEQ ID NO: 682 - DNA, 1200 bp, Homo Sapiens
  misc_feature (1)..(1): n is a, c, g, or t
  misc_feature (16)..(16): n is a, c, g, or t
  misc_feature (848)..(848): n is a, c, g, or t
  misc_feature (950)..(950): n is a, c, g, or t
  misc_feature (953)..(953): n is a, c, g, or t
  misc_feature (955)..(955): n is a, c, g, or t
  misc_feature (986)..(986): n is a, c, g, or t
  misc_feature (994)..(994): n is a, c, g, or t
  misc_feature (996)..(997): n is a, c, g, or t
  misc_feature (1011)..(1011): n is a, c, g, or t
  misc_feature (1014)..(1014): n is a, c, g, or t
  misc_feature (1022)..(1022): n is a, c, g, or t
  misc_feature (1025)..(1025): n is a, c, g, or t
  misc_feature (1049)..(1049): n is a, c, g, or t
  misc_feature (1054)..(1054): n is a, c, g, or t
  misc_feature (1059)..(1059): n is a, c, g, or t
  misc_feature (1063)..(1063): n is a, c, g, or t
  misc_feature (1069)..(1069): n is a, c, g, or t
  misc_feature (1082)..(1083): n is a, c, g, or t
  misc_feature (1092)..(1092): n is a, c, g, or t
  misc_feature (1095)..(1095): n is a, c, g, or t
  misc_feature (1098)..(1098): n is a, c, g, or t
  misc_feature (1100)..(1100): n is a, c, g, or t
  misc_feature (1103)..(1103): n is a, c, g, or t
  misc_feature (1107)..(1107): n is a, c, g, or t
  misc_feature (1109)..(1109): n is a, c, g, or t
  misc_feature (1117)..(1117): n is a, c, g, or t
  misc_feature (1125)..(1125): n is a, c, g, or t
  misc_feature (1137)..(1137): n is a, c, g, or t
  misc_feature (1139)..(1139): n is a, c, g, or t
  misc_feature (1144)..(1144): n is a, c, g, or t
  misc_feature (1152)..(1153): n is a, c, g, or t
  misc_feature (1165)..(1165): n is a, c, g, or t
  misc_feature (1167)..(1167): n is a, c, g, or t
  misc_feature (1170)..(1170): n is a, c, g, or t
  misc_feature (1174)..(1175): n is a, c, g, or t
  misc_feature (1194)..(1194): n is a, c, g, or t
  misc_feature (1199)..(1199): n is a, c, g, or t
naattagagaaattanctatgagaggatcgcatcaccatcaccatcacggatcctatttaggtgacactatagaatcgtcgacccacgcgtccgaactcctaaaaaatgcagatgaattagtcaaacagaaaattcatcccacatcagttattagtggctatcgacttgcttgcaaggaagcagtgcgttatatcaatgaaaacctaattgttaacacagatgaactgggaagagattgcctgattaatgctgctaagacatccatgtcttccaaaatcattggaataaatggtgatttctttgctaacatggtagtagatgctgtacttgctattaaatacacagacataagaggccagccacgctatccagtcaactctgttaatattttgaaagcccatgggagaagtcaaatggagagtatgctcatcagtggctatgcactcaactgtgtggtgggatcccagggcatgcccaagagaatcgtaaatgcaaaaattgcttgccttgacttcagcctgcaaaaaacaaaaatgaagcttggtgtacaggtggtcattacagaccctgaaaaactggaccaaattagacagagagaatcagatatcaccaaggagagaattcagaagatcctggcaactggtgccaatgttattctaaccactggtggaattgatgatatgtgtctgaagtattttgtggaggctggtgctatggcagttagaagagttttaaaaagggaccttaaacgcattgccaaagcttctggagcaactattctgtcaaccctggccaatttggaaaggtgaagaaacttttgaagctgcaatgttgggacaggcagaanaagtggtacaggagagaatttgtgatgatgagctgatcttaatcaaaaatactaaggctcgtacgtctgcatcgattatcttacgtggggcaaatgatttcntgngngatgaaaatggagcgctctttacatgatgcnctttgggnanngaaaaagtttggantcnaaatctgnggntcccggggggggggctgtaaaacnccccnttccntatnccttgnaaactatgcaccnncatggggtnccnggnanaanctgncnatgcaaanttgcaaancccttctggttntncccanacctaccnntaatggggcccngnacncccnnattgggtgcaaaataaaanctttnt

SEQ ID NO: 683 - DNA, 1200 bp, Homo Sapiens
  misc_feature (64)..(64): n is a, c, g, or t
  misc_feature (81)..(81): n is a, c, g, or t
  misc_feature (550)..(550): n is a, c, g, or t
  misc_feature (759)..(759): n is a, c, g, or t
  misc_feature (786)..(786): n is a, c, g, or t
  misc_feature (793)..(793): n is a, c, g, or t
  misc_feature (797)..(797): n is a, c, g, or t
  misc_feature (805)..(806): n is a, c, g, or t
  misc_feature (808)..(811): n is a, c, g, or t
  misc_feature (814)..(814): n is a, c, g, or t
  misc_feature (816)..(817): n is a, c, g, or t
  misc_feature (819)..(819): n is a, c, g, or t
  misc_feature (824)..(824): n is a, c, g, or t
  misc_feature (829)..(830): n is a, c, g, or t
  misc_feature (834)..(834): n is a, c, g, or t
  misc_feature (841)..(842): n is a, c, g, or t
  misc_feature (846)..(847): n is a, c, g, or t
  misc_feature (855)..(855): n is a, c, g, or t
  misc_feature (858)..(858): n is a, c, g, or t
  misc_feature (860)..(860): n is a, c, g, or t
  misc_feature (871)..(871): n is a, c, g, or t
  misc_feature (876)..(876): n is a, c, g, or t
  misc_feature (879)..(879): n is a, c, g, or t
  misc_feature (890)..(890): n is a, c, g, or t
  misc_feature (895)..(896): n is a, c, g, or t
  misc_feature (902)..(903): n is a, c, g, or t
  misc_feature (912)..(912): n is a, c, g, or t
  misc_feature (914)..(914): n is a, c, g, or t
  misc_feature (919)..(922): n is a, c, g, or t
  misc_feature (924)..(924): n is a, c, g, or t
  misc_feature (927)..(928): n is a, c, g, or t
  misc_feature (933)..(933): n is a, c, g, or t
  misc_feature (939)..(942): n is a, c, g, or t
  misc_feature (961)..(964): n is a, c, g, or t
  misc_feature (966)..(967): n is a, c, g, or t
  misc_feature (974)..(974): n is a, c, g, or t
  misc_feature (981)..(981): n is a, c, g, or t
  misc_feature (983)..(983): n is a, c, g, or t
  misc_feature (985)..(986): n is a, c, g, or t
  misc_feature (992)..(992): n is a, c, g, or t
  misc_feature (1002)..(1003): n is a, c, g, or t
  misc_feature (1010)..(1011): n is a, c, g, or t
  misc_feature (1016)..(1016): n is a, c, g, or t
  misc_feature (1020)..(1020): n is a, c, g, or t
  misc_feature (1027)..(1027): n is a, c, g, or t
  misc_feature (1041)..(1041): n is a, c, g, or t
  misc_feature (1046)..(1046): n is a, c, g, or t
  misc_feature (1049)..(1049): n is a, c, g, or t
  misc_feature (1052)..(1052): n is a, c, g, or t
  misc_feature (1058)..(1058): n is a, c, g, or t
  misc_feature (1060)..(1060): n is a, c, g, or t
  misc_feature (1068)..(1070): n is a, c, g, or t
  misc_feature (1074)..(1074): n is a, c, g, or t
  misc_feature (1076)..(1076): n is a, c, g, or t
  misc_feature (1078)..(1078): n is a, c, g, or t
  misc_feature (1080)..(1081): n is a, c, g, or t
  misc_feature (1083)..(1084): n is a, c, g, or t
  misc_feature (1086)..(1086): n is a, c, g, or t
  misc_feature (1088)..(1088): n is a, c, g, or t
  misc_feature (1091)..(1091): n is a, c, g, or t
  misc_feature (1112)..(1112): n is a, c, g, or t
  misc_feature (1114)..(1114): n is a, c, g, or t
  misc_feature (1121)..(1121): n is a, c, g, or t
  misc_feature (1136)..(1136): n is a, c, g, or t
  misc_feature (1142)..(1142): n is a, c, g, or t
  misc_feature (1145)..(1145): n is a, c, g, or t
  misc_feature (1154)..(1155): n is a, c, g, or t
  misc_feature (1159)..(1159): n is a, c, g, or t
  misc_feature (1161)..(1161): n is a, c, g, or t
  misc_feature (1163)..(1163): n is a, c, g, or t
  misc_feature (1168)..(1168): n is a, c, g, or t
  misc_feature (1185)..(1185): n is a, c, g, or t
  misc_feature (1187)..(1187): n is a, c, g, or t
  misc_feature (1189)..(1189): n is a, c, g, or t
  misc_feature (1192)..(1192): n is a, c, g, or t
  misc_feature (1199)..(1199): n is a, c, g, or t
tagagagaattactatgagaggaggcatcaccatcaccatcacggatcctatttaggtgacacnatagaatcgtcgacccncgcgctccgtggaagactaccaggctgcggaggagactgcttttgttgttgatgaagtgagcaacattgtaaaagaggctatagaaagcgcaattggtggtaacgcttatcaacacagcaaagtgaaccagtggaccacaaatgtagtagaacaaactttaagccaactcaccaagctgggaaaaccatttaaatacatcgtgacctgtgtaattatgcagaagaatggagctggattacacacagcaagttcctgcttctgggacagctctactgacgggagctgcactgtgcgatgggagaataagaccatgtactgcatcgtcagtgccttcggactgtctatttgacctgcagtccagcctatggcctttctccttttgtctctagttcatcctctaaccaccagccatgaattcagtgaactcttttctcattctctttgttttgtggcactttcacaatgtanaggaaaaaaccaaatgaccgcactgtgatgtgaatggcaccgaagtcagatgagtatccctgtaggtcacctgcagcctgcgttgccacttgtcttaactctgaatatttcatttcaaaggtgctaaaatctgaaatctgctagtgtgaaacttgctctactctctgaaatgattcaaaatacactaattttccatactttatactttntgttaaaaataaattattccaattctnaccaaanacanaataaaannannnntcncnnanaaatnaactnnactnaattaannaacnnatttttanatncnattattaatanggggnggncccccccccanagagnngagccnnaaaaaaacntntaatnnnntnaanntggancccccnnnntaaaaaaaacccaaaaatnnnncnncaaaaanccccccngnanntttttnaaaacacctnntggtttnnccccnggcnttttttnttttgggaagaacnccccnccnccngtggcnanattttttnnnggancnangnngnncncntantggcaaaaaaaaccccgtgananaaccccnttaataaatccccanaggccnccnaaaaaaaanntttnangnatttntactcaatttcccaaangncntanaacacanc

SEQ ID NO: 684 - DNA, 1550 bp, Homo Sapiens
  misc_feature (1)..(1): n is a, c, g, or t
  misc_feature (5)..(8): n is a, c, g, or t
  misc_feature (220)..(220): n is a, c, g, or t
  misc_feature (239)..(239): n is a, c, g, or t
  misc_feature (242)..(242): n is a, c, g, or t
  misc_feature (247)..(247): n is a, c, g, or t
  misc_feature (251)..(251): n is a, c, g, or t
  misc_feature (253)..(253): n is a, c, g, or t
  misc_feature (261)..(261): n is a, c, g, or t
  misc_feature (272)..(272): n is a, c, g, or t
  misc_feature (275)..(275): n is a, c, g, or t
  misc_feature (281)..(282): n is a, c, g, or t
  misc_feature (286)..(287): n is a, c, g, or t
  misc_feature (290)..(290): n is a, c, g, or t
  misc_feature (295)..(295): n is a, c, g, or t
  misc_feature (299)..(300): n is a, c, g, or t
  misc_feature (302)..(302): n is a, c, g, or t
  misc_feature (309)..(309): n is a, c, g, or t
  misc_feature (319)..(319): n is a, c, g, or t
  misc_feature (326)..(326): n is a, c, g, or t
  misc_feature (331)..(332): n is a, c, g, or t
  misc_feature (342)..(342): n is a, c, g, or t
  misc_feature (345)..(345): n is a, c, g, or t
  misc_feature (350)..(350): n is a, c, g, or t
  misc_feature (356)..(356): n is a, c, g, or t
  misc_feature (360)..(360): n is a, c, g, or t
  misc_feature (364)..(365): n is a, c, g, or t
  misc_feature (367)..(367): n is a, c, g, or t
  misc_feature (373)..(376): n is a, c, g, or t
  misc_feature (379)..(379): n is a, c, g, or t
  misc_feature (382)..(382): n is a, c, g, or t
  misc_feature (391)..(391): n is a, c, g, or t
  misc_feature (393)..(394): n is a, c, g, or t
  misc_feature (396)..(396): n is a, c, g, or t
  misc_feature (405)..(405): n is a, c, g, or t
  misc_feature (413)..(413): n is a, c, g, or t
  misc_feature (415)..(415): n is a, c, g, or t
  misc_feature (424)..(424): n is a, c, g, or t
  misc_feature (429)..(429): n is a, c, g, or t
  misc_feature (434)..(434): n is a, c, g, or t
  misc_feature (437)..(437): n is a, c, g, or t
  misc_feature (442)..(442): n is a, c, g, or t
  misc_feature (463)..(464): n is a, c, g, or t
  misc_feature (466)..(467): n is a, c, g, or t
  misc_feature (470)..(471): n is a, c, g, or t
  misc_feature (473)..(474): n is a, c, g, or t
  misc_feature (477)..(478): n is a, c, g, or t
  misc_feature (481)..(481): n is a, c, g, or t
  misc_feature (483)..(483): n is a, c, g, or t
  misc_feature (487)..(487): n is a, c, g, or t
  misc_feature (490)..(490): n is a, c, g, or t
  misc_feature (493)..(493): n is a, c, g, or t
  misc_feature (496)..(496): n is a, c, g, or t
  misc_feature (498)..(499): n is a, c, g, or t
  misc_feature (505)..(505): n is a, c, g, or t
  misc_feature (507)..(508): n is a, c, g, or t
  misc_feature (510)..(510): n is a, c, g, or t
  misc_feature (512)..(512): n is a, c, g, or t
  misc_feature (517)..(517): n is a, c, g, or t
  misc_feature (519)..(519): n is a, c, g, or t
  misc_feature (521)..(521): n is a, c, g, or t
  misc_feature (532)..(532): n is a, c, g, or t
  misc_feature (539)..(541): n is a, c, g, or t
  misc_feature (545)..(545): n is a, c, g, or t
  misc_feature (547)..(547): n is a, c, g, or t
  misc_feature (549)..(550): n is a, c, g, or t
  misc_feature (553)..(553): n is a, c, g, or t
  misc_feature (566)..(567): n is a, c, g, or t
  misc_feature (569)..(570): n is a, c, g, or t
  misc_feature (573)..(573): n is a, c, g, or t
  misc_feature (578)..(579): n is a, c, g, or t
  misc_feature (586)..(586): n is a, c, g, or t
  misc_feature (589)..(589): n is a, c, g, or t
  misc_feature (591)..(591): n is a, c, g, or t
  misc_feature (597)..(598): n is a, c, g, or t
  misc_feature (600)..(602): n is a, c, g, or t
  misc_feature (604)..(604): n is a, c, g, or t
  misc_feature (606)..(608): n is a, c, g, or t
  misc_feature (615)..(615): n is a, c, g, or t
  misc_feature (618)..(618): n is a, c, g, or t
  misc_feature (622)..(622): n is a, c, g, or t
  misc_feature (625)..(625): n is a, c, g, or t
  misc_feature (627)..(627): n is a, c, g, or t
  misc_feature (629)..(630): n is a, c, g, or t
  misc_feature (643)..(643): n is a, c, g, or t
  misc_feature (649)..(649): n is a, c, g, or t
  misc_feature (653)..(653): n is a, c, g, or t
  misc_feature (655)..(655): n is a, c, g, or t
  misc_feature (657)..(657): n is a, c, g, or t
  misc_feature (661)..(661): n is a, c, g, or t
  misc_feature (663)..(663): n is a, c, g, or t
  misc_feature (666)..(666): n is a, c, g, or t
  misc_feature (673)..(674): n is a, c, g, or t
  misc_feature (676)..(676): n is a, c, g, or t
  misc_feature (681)..(682): n is a, c, g, or t
  misc_feature (695)..(695): n is a, c, g, or t
  misc_feature (707)..(707): n is a, c, g, or t
  misc_feature (709)..(710): n is a, c, g, or t
  misc_feature (720)..(720): n is a, c, g, or t
  misc_feature (722)..(722): n is a, c, g, or t
  misc_feature (728)..(728): n is a, c, g, or t
  misc_feature (731)..(731): n is a, c, g, or t
  misc_feature (736)..(737): n is a, c, g, or t
  misc_feature (739)..(739): n is a, c, g, or t
  misc_feature (741)..(742): n is a, c, g, or t
  misc_feature (744)..(744): n is a, c, g, or t
  misc_feature (753)..(756): n is a, c, g, or t
  misc_feature (762)..(763): n is a, c, g, or t
  misc_feature (768)..(768): n is a, c, g, or t
  misc_feature (773)..(773): n is a, c, g, or t
  misc_feature (775)..(775): n is a, c, g, or t
  misc_feature (777)..(777): n is a, c, g, or t
  misc_feature (780)..(781): n is a, c, g, or t
  misc_feature (784)..(785): n is a, c, g, or t
  misc_feature (787)..(787): n is a, c, g, or t
  misc_feature (789)..(789): n is a, c, g, or t
  misc_feature (794)..(795): n is a, c, g, or t
  misc_feature (803)..(805): n is a, c, g, or t
  misc_feature (819)..(819): n is a, c, g, or t
  misc_feature (823)..(823): n is a, c, g, or t
  misc_feature (825)..(825): n is a, c, g, or t
  misc_feature (829)..(829): n is a, c, g, or t
  misc_feature (833)..(833): n is a, c, g, or t
  misc_feature (843)..(843): n is a, c, g, or t
  misc_feature (849)..(849): n is a, c, g, or t
  misc_feature (856)..(858): n is a, c, g, or t
  misc_feature (865)..(867): n is a, c, g, or t
  misc_feature (870)..(870): n is a, c, g, or t
  misc_feature (873)..(873): n is a, c, g, or t
  misc_feature (877)..(880): n is a, c, g, or t
  misc_feature (882)..(882): n is a, c, g, or t
  misc_feature (890)..(890): n is a, c, g, or t
  misc_feature (892)..(892): n is a, c, g, or t
  misc_feature (894)..(894): n is a, c, g, or t
  misc_feature (897)..(899): n is a, c, g, or t
  misc_feature (903)..(903): n is a, c, g, or t
  misc_feature (905)..(906): n is a, c, g, or t
  misc_feature (908)..(908): n is a, c, g, or t
  misc_feature (913)..(914): n is a, c, g, or t
  misc_feature (918)..(918): n is a, c, g, or t
  misc_feature (920)..(921): n is a, c, g, or t
  misc_feature (926)..(927): n is a, c, g, or t
  misc_feature (929)..(929): n is a, c, g, or t
  misc_feature (931)..(931): n is a, c, g, or t
  misc_feature (935)..(935): n is a, c, g, or t
  misc_feature (937)..(937): n is a, c, g, or t
  misc_feature (940)..(940): n is a, c, g, or t
  misc_feature (943)..(943): n is a, c, g, or t
  misc_feature (947)..(949): n is a, c, g, or t
  misc_feature (951)..(951): n is a, c, g, or t
  misc_feature (956)..(956): n is a, c, g, or t
  misc_feature (959)..(960): n is a, c, g, or t
  misc_feature (965)..(966): n is a, c, g, or t
  misc_feature (969)..(971): n is a, c, g, or t
  misc_feature (975)..(975): n is a, c, g, or t
  misc_feature (977)..(977): n is a, c, g, or t
  misc_feature (979)..(979): n is a, c, g, or t
  misc_feature (983)..(984): n is a, c, g, or t
  misc_feature (986)..(986): n is a, c, g, or t
  misc_feature (990)..(990): n is a, c, g, or t
  misc_feature (1001)..(1002): n is a, c, g, or t
  misc_feature (1004)..(1005): n is a, c, g, or t
  misc_feature (1007)..(1007): n is a, c, g, or t
  misc_feature (1019)..(1019): n is a, c, g, or t
  misc_feature (1023)..(1026): n is a, c, g, or t
  misc_feature (1029)..(1029): n is a, c, g, or t
  misc_feature (1031)..(1032): n is a, c, g, or t
  misc_feature (1039)..(1039): n is a, c, g, or t
  misc_feature (1046)..(1046): n is a, c, g, or t
  misc_feature (1052)..(1052): n is a, c, g, or t
  misc_feature (1056)..(1056): n is a, c, g, or t
  misc_feature (1064)..(1064): n is a, c, g, or t
  misc_feature (1066)..(1066): n is a, c, g, or t
  misc_feature (1068)..(1068): n is a, c, g, or t
  misc_feature (1070)..(1070): n is a, c, g, or t
  misc_feature (1075)..(1075): n is a, c, g, or t
  misc_feature (1083)..(1083): n is a, c, g, or t
  misc_feature (1085)..(1085): n is a, c, g, or t
  misc_feature (1097)..(1097): n is a, c, g, or t
  misc_feature (1107)..(1107): n is a, c, g, or t
  misc_feature (1109)..(1109): n is a, c, g, or t
  misc_feature (1112)..(1112): n is a, c, g, or t
  misc_feature (1116)..(1116): n is a, c, g, or t
  misc_feature (1125)..(1125): n is a, c, g, or t
  misc_feature (1127)..(1127): n is a, c, g, or t
  misc_feature (1131)..(1131): n is a, c, g, or t
  misc_feature (1133)..(1133): n is a, c, g, or t
  misc_feature (1142)..(1142): n is a, c, g, or t
  misc_feature (1145)..(1145): n is a, c, g, or t
  misc_feature (1150)..(1150): n is a, c, g, or t
  misc_feature (1158)..(1158): n is a, c, g, or t
  misc_feature (1164)..(1164): n is a, c, g, or t
  misc_feature (1174)..(1175): n is a, c, g, or t
  misc_feature (1179)..(1179): n is a, c, g, or t
  misc_feature (1184)..(1184): n is a, c, g, or t
  misc_feature (1188)..(1188): n is a, c, g, or t
  misc_feature (1193)..(1193): n is a, c, g, or t
  misc_feature (1195)..(1195): n is a, c, g, or t
  misc_feature (1199)..(1199): n is a, c, g, or t
  misc_feature (1201)..(1201): n is a, c, g, or t
  misc_feature (1204)..(1204): n is a, c, g, or t
  misc_feature (1207)..(1207): n is a, c, g, or t
  misc_feature (1215)..(1215): n is a, c, g, or t
  misc_feature (1217)..(1217): n is a, c, g, or t
  misc_feature (1220)..(1221): n is a, c, g, or t
  misc_feature (1223)..(1223): n is a, c, g, or t
  misc_feature (1225)..(1225): n is a, c, g, or t
  misc_feature (1229)..(1229): n is a, c, g, or t
  misc_feature (1232)..(1232): n is a, c, g, or t
  misc_feature (1234)..(1234): n is a, c, g, or t
  misc_feature (1238)..(1238): n is a, c, g, or t
  misc_feature (1241)..(1241): n is a, c, g, or t
  misc_feature (1246)..(1246): n is a, c, g, or t
  misc_feature (1248)..(1248): n is a, c, g, or t
  misc_feature (1252)..(1252): n is a, c, g, or t
  misc_feature (1259)..(1259): n is a, c, g, or t
  misc_feature (1267)..(1268): n is a, c, g, or t
  misc_feature (1276)..(1277): n is a, c, g, or t
  misc_feature (1296)..(1296): n is a, c, g, or t
  misc_feature (1299)..(1299): n is a, c, g, or t
  misc_feature (1301)..(1304): n is a, c, g, or t
  misc_feature (1309)..(1309): n is a, c, g, or t
  misc_feature (1323)..(1324): n is a, c, g, or t
  misc_feature (1336)..(1336): n is a, c, g, or t
  misc_feature (1339)..(1339): n is a, c, g, or t
  misc_feature (1342)..(1342): n is a, c, g, or t
  misc_feature (1345)..(1346): n is a, c, g, or t
  misc_feature (1350)..(1353): n is a, c, g, or t
  misc_feature (1359)..(1360): n is a, c, g, or t
  misc_feature (1364)..(1364): n is a, c, g, or t
  misc_feature (1368)..(1368): n is a, c, g, or t
  misc_feature (1371)..(1371): n is a, c, g, or t
  misc_feature (1375)..(1375): n is a, c, g, or t
  misc_feature (1386)..(1386): n is a, c, g, or t
  misc_feature (1388)..(1388): n is a, c, g, or t
  misc_feature (1392)..(1392): n is a, c, g, or t
  misc_feature (1397)..(1398): n is a, c, g, or t
  misc_feature (1404)..(1404): n is a, c, g, or t
  misc_feature (1413)..(1413): n is a, c, g, or t
  misc_feature (1420)..(1421): n is a, c, g, or t
  misc_feature (1425)..(1425): n is a, c, g, or t
  misc_feature (1427)..(1427): n is a, c, g, or t
  misc_feature (1429)..(1430): n is a, c, g, or t
  misc_feature (1432)..(1432): n is a, c, g, or t
  misc_feature (1437)..(1437): n is a, c, g, or t
  misc_feature (1442)..(1442): n is a, c, g, or t
  misc_feature (1449)..(1449): n is a, c, g, or t
  misc_feature (1451)..(1451): n is a, c, g, or t
  misc_feature (1457)..(1457): n is a, c, g, or t
  misc_feature (1459)..(1459): n is a, c, g, or t
  misc_feature (1461)..(1462): n is a, c, g, or t
  misc_feature (1464)..(1464): n is a, c, g, or t
  misc_feature (1466)..(1466): n is a, c, g, or t
  misc_feature (1489)..(1490): n is a, c, g, or t
  misc_feature (1497)..(1497): n is a, c, g, or t
  misc_feature (1503)..(1503): n is a, c, g, or t
  misc_feature (1506)..(1506): n is a, c, g, or t
  misc_feature (1509)..(1509): n is a, c, g, or t
  misc_feature (1514)..(1514): n is a, c, g, or t
  misc_feature (1517)..(1518): n is a, c, g, or t
  misc_feature (1521)..(1521): n is a, c, g, or t
  misc_feature (1532)..(1532): n is a, c, g, or t
  misc_feature (1542)..(1543): n is a, c, g, or t
ncccnnnnccatagagaaattactatggagaggatcgcatcaccatcaccatcacgggatcctatttaggtgacactatagaatcgtcgacccacgcgtccggccgggacagcggcggcgccgcgggcggccccggcctccgctcgcgctccggctgcggccccgactcctgctcggactccggcccgggtcccggctcctccagcggcgctcgccgcancagctccggcggcagctcnagnggtgnctgnanacgcgacntcctcctcctncgncgctgnngccnnctnagccntcgnnancttcaancaatgactgntcagccngcaannagataatatnccnaattntaacangagncccnncnctgggnnnnctnatnaaatgcttnanntngacttatantgaacaangncaatggtcncaaanctagnaantatanttaaaatatttatttataaanntnncanntnntannaangnaatnagnttnagntnnatttcncnntncnaaatntncnttgaaagtagncaatttnnnaaantnannctntttttaaatattnnanntanaaacnntaatatngananaaaaannannncntnnntatttcnganatantantnanntaaaaaaaaatanaaaaantatntntncctntnatntttgtannantattnnatattaaaaattnaaaaaaaatttntnnatctaaatananaaatanatnacatnnantnntnaaatttaannnnaattanntatanttttntnanttnnttnntntnataannataagtannnaattataaataatntatncntaantaantttactcttnattccntaaatgnnngtatatnnnaanaancaannnntnaactaaantntnaannnaaananncnatatnntaananntgttnntnantatnanttnatntttnnntnattcnatnnaattnnttnnnttananantttnntnatanttttaaaaaannanntnatatcttcatanaaannnnttnanncttaaanaatatantaattnaatnaaatattncnancnatatnacctcatntnaaagacaaaaanatttatttcnantantatncatattatntnaatnantcattttanttntcatncaaattcntaattnttttaaatannatanttttnattnatctnanaatncnttnctnaaattatncnctnntntncaanttntncttntancatantnatantatgtanatataaanncataaatnnagattactatattgattanaanannnncattntatttattattcanntattataacatnacnatnctnnaaannnntatttnntatntatnaantatntatattaaatntnagtntatanntaattntagaataantctattnncatntntnnanatttnattanaatattnancatctnanannantnatttctcaaaaattttaagattnnctaaaantattgnatnttntatanaanntantttattaactnattcaattannattatac

SEQ ID NO: 685 - DNA, 1400 bp, Homo Sapiens
  misc_feature (2)..(2): n is a, c, g, or t
  misc_feature (4)..(4): n is a, c, g, or t
  misc_feature (855)..(855): n is a, c, g, or t
  misc_feature (892)..(892): n is a, c, g, or t
  misc_feature (906)..(906): n is a, c, g, or t
  misc_feature (931)..(931): n is a, c, g, or t
  misc_feature (942)..(942): n is a, c, g, or t
  misc_feature (962)..(962): n is a, c, g, or t
  misc_feature (968)..(969): n is a, c, g, or t
  misc_feature (974)..(974): n is a, c, g, or t
  misc_feature (983)..(983): n is a, c, g, or t
  misc_feature (996)..(996): n is a, c, g, or t
  misc_feature (998)..(998): n is a, c, g, or t
  misc_feature (1007)..(1007): n is a, c, g, or t
  misc_feature (1009)..(1009): n is a, c, g, or t
  misc_feature (1038)..(1038): n is a, c, g, or t
  misc_feature (1051)..(1051): n is a, c, g, or t
  misc_feature (1055)..(1055): n is a, c, g, or t
  misc_feature (1062)..(1062): n is a, c, g, or t
  misc_feature (1084)..(1084): n is a, c, g, or t
  misc_feature (1103)..(1103): n is a, c, g, or t
  misc_feature (1119)..(1119): n is a, c, g, or t
  misc_feature (1123)..(1123): n is a, c, g, or t
  misc_feature (1148)..(1148): n is a, c, g, or t
  misc_feature (1155)..(1155): n is a, c, g, or t
  misc_feature (1158)..(1158): n is a, c, g, or t
  misc_feature (1181)..(1181): n is a, c, g, or t
  misc_feature (1185)..(1185): n is a, c, g, or t
  misc_feature (1191)..(1191): n is a, c, g, or t
  misc_feature (1194)..(1194): n is a, c, g, or t
  misc_feature (1197)..(1197): n is a, c, g, or t
  misc_feature (1204)..(1205): n is a, c, g, or t
  misc_feature (1207)..(1207): n is a, c, g, or t
  misc_feature (1210)..(1211): n is a, c, g, or t
  misc_feature (1225)..(1225): n is a, c, g, or t
  misc_feature (1231)..(1232): n is a, c, g, or t
  misc_feature (1238)..(1238): n is a, c, g, or t
  misc_feature (1243)..(1243): n is a, c, g, or t
  misc_feature (1245)..(1246): n is a, c, g, or t
  misc_feature (1248)..(1248): n is a, c, g, or t
  misc_feature (1252)..(1252): n is a, c, g, or t
  misc_feature (1258)..(1258): n is a, c, g, or t
  misc_feature (1260)..(1262): n is a, c, g, or t
  misc_feature (1264)..(1264): n is a, c, g, or t
  misc_feature (1266)..(1267): n is a, c, g, or t
  misc_feature (1269)..(1269): n is a, c, g, or t
  misc_feature (1271)..(1291): n is a, c, g, or t
  misc_feature (1298)..(1298): n is a, c, g, or t
  misc_feature (1305)..(1305): n is a, c, g, or t
  misc_feature (1315)..(1315): n is a, c, g, or t
  misc_feature (1320)..(1320): n is a, c, g, or t
  misc_feature (1323)..(1324): n is a, c, g, or t
  misc_feature (1328)..(1328): n is a, c, g, or t
  misc_feature (1332)..(1332): n is a, c, g, or t
  misc_feature (1349)..(1350): n is a, c, g, or t
  misc_feature (1354)..(1354): n is a, c, g, or t
  misc_feature (1359)..(1360): n is a, c, g, or t
  misc_feature (1368)..(1368): n is a, c, g, or t
  misc_feature (1381)..(1381): n is a, c, g, or t
  misc_feature (1388)..(1388): n is a, c, g, or t
  misc_feature (1391)..(1391): n is a, c, g, or t
cnanagagaaattactatgagaggatcgcatcaccatcaccatcacggatcctatttaggtgacactatagaatcgtcgacccacgcgtccgacactaagcagttgagatttgaagatgtagtaaaccagtcaagtccaaaaaattgtactgtgtactgtggaggaattgcgtctgggttaacagatcagcttatgagacagacattctcaccatttggacaaattatggaaataagagttttcccagaaaagggctattcatttgtcagattttcaacccatgaaagtgcagcccatgccattgtttcggtgaacggtactacgattgaaggacatgtggttaaatgctattggggtaaagaatctcctgatatgactaaaaacttccaacaggtaattcgatttttcatagcattctttaaggtttccatcttacatgtcacataaaagctttggaaactctgtaaaatgaacaataaaataaagcatatagctactttcagttgattgtatttcaaaattgattatttgcggtattaactgaatcttaatactttcttttcacaggtgtcaccaccccaataaacttagacaatgataaataacagagtcctattcacataagggtgcttacttagtttttctcttccttgtctcccactctttcttcatatacggtgtttcttatgtgttccctaaaacaatactttgctttttcctaggttgactatagtcaatggggccaatggagccaagtgtatggaaacccacaacagtatggacagtatatggcaaatgggtggcaagtaccgccttatgggagtatacgggccaaccatggaaatcaacaaggnatttggagtagatcaatcaccttcctgctgcttgganggggtggaattggngctcagccccccccaaggacaagcncctccccctgnaatacctcctcctaacccanccgganntgggnatggcaagntacccaacccagngngccgggacncnaaaaaaaaaattggaattccaggaaaggncttccaatttccngggnacccccngaaaaacctgaaaggtaaaccncggaaaatggaaaaatttntttttaaaattgaaangttnggaaccttttacccaaatttgcttnggggaanaancgggcccccaattccgccctttnaaanttttgntcnggngggaaannancannattttcttttggcnaaaacnnaaaaanggccntnngncccnaaaaanannnanannanannnnnnnnnnnnnnnnnnnnnggggggnccccccnagggggccanaaacnaannccgncggnccccggggaacccaaanncccnccccnngttttttnacccggcgccccnggttttntgngaaaccccc

SEQ ID NO: 686 - DNA, 1188 bp, Homo Sapiens
  misc_feature (1)..(1): n is a, c, g, or t
  misc_feature (910)..(910): n is a, c, g, or t
  misc_feature (913)..(913): n is a, c, g, or t
  misc_feature (951)..(951): n is a, c, g, or t
  misc_feature (962)..(962): n is a, c, g, or t
  misc_feature (967)..(967): n is a, c, g, or t
  misc_feature (977)..(977): n is a, c, g, or t
  misc_feature (1005)..(1005): n is a, c, g, or t
  misc_feature (1019)..(1019): n is a, c, g, or t
  misc_feature (1023)..(1023): n is a, c, g, or t
  misc_feature (1026)..(1026): n is a, c, g, or t
  misc_feature (1046)..(1046): n is a, c, g, or t
  misc_feature (1048)..(1048): n is a, c, g, or t
  misc_feature (1050)..(1050): n is a, c, g, or t
  misc_feature (1054)..(1054): n is a, c, g, or t
  misc_feature (1070)..(1070): n is a, c, g, or t
  misc_feature (1088)..(1088): n is a, c, g, or t
  misc_feature (1092)..(1092): n is a, c, g, or t
  misc_feature (1117)..(1117): n is a, c, g, or t
  misc_feature (1137)..(1137): n is a, c, g, or t
  misc_feature (1165)..(1165): n is a, c, g, or t
  misc_feature (1168)..(1168): n is a, c, g, or t
  misc_feature (1178)..(1178): n is a, c, g, or t
natagagagattactatgagaggatcgcatcaccatcaccatcacggatcctatttaggtgacactatagaatcgtcgacccacgcgtccgtgcccagcctgcccagctacaaagttggggacaagatagccacccgcaaggcctacgggcaggcactggccaagctgggccatgccagtgaccgcatcatcgccctggatggggacaccaaaaattccaccttctcggagatcttcaaaaaggagcacccggaccgcttcatcgagtgctacattgctgagcagaacatggtgagcatcgcggtgggctgtgccacccgcaacaggacggtgcccttctgcagcacttttgcagccttcttcacgcgggcctttgaccagattcgcatggccgccatctccgagagcaacatcaacctctgcggctcccactgcggcgtttccatcggggaagacgggccctcccagatggccctagaagatctggctatgtttcggtcagtccccacatcaactgtcttttacccaagtgatggcgttgctacagagaaggcagtggaactagccgccaatacaaagggtatctgcttcatccggaccagccgcccagaaaatgccatcatctataacaacaatgaggacttccaggtcggacaagccaaggtggtcctgaagagcaaggatgaccaggtgaccgttatcggggctggggtgaccctgcacgaggccttggccgctgccgaactgctgaagaaagaaaagatcaacatccgcgtgctggaccccttcaccatcaagcccctggacagaaaactcattctcgacagcgctcgtgccaccaagggcaggatcctcaccgtggaggaccattattatgaaggtggcattggtgaggctgtgtccagtgcantantgggcgagcctggcatcactgtcacccacctggcagtnaacggggtacnaaaantgggaaaccngctgaactgctgaaaatgtttggtatcnacagggatgccatngcanaanctgtgaggggcctcatcacnangnctanggcgggtatgaaatgnggggcgggggtctatacnttcntgaaatttgggaaagggctcaaaanttactgaaagaggggtaaantttgttttgaaaaaaaaaaaaaaaaaanggnggcccctccntaaatggagt

SEQ ID NO: 687 - DNA, 1200 bp, Homo Sapiens
  misc_feature (717)..(729): n is a, c, g, or t
  misc_feature (731)..(767): n is a, c, g, or t
  misc_feature (769)..(773): n is a, c, g, or t
  misc_feature (797)..(797): n is a, c, g, or t
  misc_feature (806)..(808): n is a, c, g, or t
  misc_feature (823)..(823): n is a, c, g, or t
  misc_feature (828)..(828): n is a, c, g, or t
  misc_feature (840)..(841): n is a, c, g, or t
  misc_feature (846)..(846): n is a, c, g, or t
  misc_feature (848)..(848): n is a, c, g, or t
  misc_feature (853)..(853): n is a, c, g, or t
  misc_feature (858)..(858): n is a, c, g, or t
  misc_feature (871)..(871): n is a, c, g, or t
  misc_feature (875)..(875): n is a, c, g, or t
  misc_feature (877)..(877): n is a, c, g, or t
  misc_feature (884)..(884): n is a, c, g, or t
  misc_feature (887)..(887): n is a, c, g, or t
  misc_feature (896)..(896): n is a, c, g, or t
  misc_feature (933)..(933): n is a, c, g, or t
  misc_feature (943)..(943): n is a, c, g, or t
  misc_feature (950)..(950): n is a, c, g, or t
  misc_feature (967)..(968): n is a, c, g, or t
  misc_feature (970)..(970): n is a, c, g, or t
  misc_feature (972)..(972): n is a, c, g, or t
  misc_feature (977)..(977): n is a, c, g, or t
  misc_feature (983)..(983): n is a, c, g, or t
  misc_feature (987)..(987): n is a, c, g, or t
  misc_feature (996)..(996): n is a, c, g, or t
  misc_feature (1001)..(1001): n is a, c, g, or t
  misc_feature (1004)..(1004): n is a, c, g, or t
  misc_feature (1009)..(1009): n is a, c, g, or t
  misc_feature (1025)..(1025): n is a, c, g, or t
  misc_feature (1030)..(1030): n is a, c, g, or t
  misc_feature (1039)..(1039): n is a, c, g, or t
  misc_feature (1042)..(1042): n is a, c, g, or t
  misc_feature (1062)..(1063): n is a, c, g, or t
  misc_feature (1067)..(1067): n is a, c, g, or t
  misc_feature (1070)..(1070): n is a, c, g, or t
  misc_feature (1073)..(1074): n is a, c, g, or t
  misc_feature (1079)..(1079): n is a, c, g, or t
  misc_feature (1093)..(1093): n is a, c, g, or t
  misc_feature (1100)..(1100): n is a, c, g, or t
  misc_feature (1114)..(1114): n is a, c, g, or t
  misc_feature (1123)..(1123): n is a, c, g, or t
  misc_feature (1125)..(1125): n is a, c, g, or t
  misc_feature (1127)..(1127): n is a, c, g, or t
  misc_feature (1135)..(1135): n is a, c, g, or t
  misc_feature (1140)..(1140): n is a, c, g, or t
  misc_feature (1143)..(1145): n is a, c, g, or t
  misc_feature (1158)..(1158): n is a, c, g, or t
  misc_feature (1161)..(1161): n is a, c, g, or t
  misc_feature (1163)..(1164): n is a, c, g, or t
  misc_feature (1169)..(1169): n is a, c, g, or t
  misc_feature (1174)..(1174): n is a, c, g, or t
  misc_feature (1192)..(1192): n is a, c, g, or t
  misc_feature (1195)..(1195): n is a, c, g, or t
aatagagaaattactatgagaggatcgcatcaccatcaccatcacggatcctatttaggtgacactatagaatcgtcgacccacgcgtccgctaagtctgatcgcattgtgaatgaaactctctatgaaaacacaaagcttttgagcgccacaggggaaagtgaaaaacaattccaggaagccataattgtgtttcaagaagagtttaaatgctgcggtttggtcaatggagctgctgattggggaaataattttcaacactatcctgaattatgtgcctgtctagataagcagagaccatgccaaagctataatggaaaacaagtttacaaagagacctgtatttctttcataaaagacttcttggcaaaaaatttgattatagttattggaatatcatttggactggcagttattgagatactgggtttggtgttttctatggtcctgtattgccagatcgggaacaaatgaatctgtggatgcatcaacctatcgtcagtcaaacccctttaaaatgttgctttggctttgtaaatttaaatatgtaagtgctatataagtcaggagcagctgtctttttaaaatgtctcggctagctagaccacagatatcttctagacatattgaacacatttaagatttgagggatataagggaaaatgatatgaatgtgtatttttactcaaaataaaagtaactgtttacgttaaaaannnnnnnnnnnnnannnnnnnnnnnnnnnnnnnnnnnnnnnnnnnnnnnnnannnnnaaaaaaggggcgccccccccctanagggagccnnnttaaacctaaattanccgancttgggaccccnnttgananatccnaaaangacccccaaaccncccncnggatttnttncaaaacccncggttgccccccgggcgtttttttttgggggaaaaancccaccctancttgggngaaattttccgggaccnnangnaaccnaaaaangggnaaaaaaaanccccnggnaaatnccccccggtgaaaaantcccnaggggcccnccnaaaaaaaaatttttgggggnntttnccnccnngttgncccaaggggccccnaaaaccnaaacccgttccccnggaaatttncngncccttttnaaaanccnnnaaaaaaaaaaaanccnannttttnacccngccctttttcccattttngcnccccc

SEQ ID NO: 688 - DNA, 1386 bp, Homo Sapiens
  misc_feature (1)..(1): n is a, c, g, or t
  misc_feature (3)..(3): n is a, c, g, or t
  misc_feature (856)..(856): n is a, c, g, or t
  misc_feature (869)..(869): n is a, c, g, or t
  misc_feature (894)..(894): n is a, c, g, or t
  misc_feature (901)..(901): n is a, c, g, or t
  misc_feature (951)..(951): n is a, c, g, or t
  misc_feature (954)..(954): n is a, c, g, or t
  misc_feature (977)..(977): n is a, c, g, or t
  misc_feature (981)..(981): n is a, c, g, or t
  misc_feature (983)..(983): n is a, c, g, or t
  misc_feature (1025)..(1025): n is a, c, g, or t
  misc_feature (1038)..(1038): n is a, c, g, or t
  misc_feature (1040)..(1040): n is a, c, g, or t
  misc_feature (1046)..(1046): n is a, c, g, or t
  misc_feature (1050)..(1052): n is a, c, g, or t
  misc_feature (1055)..(1056): n is a, c, g, or t
  misc_feature (1060)..(1060): n is a, c, g, or t
  misc_feature (1073)..(1073): n is a, c, g, or t
  misc_feature (1077)..(1077): n is a, c, g, or t
  misc_feature (1081)..(1081): n is a, c, g, or t
  misc_feature (1087)..(1087): n is a, c, g, or t
  misc_feature (1091)..(1091): n is a, c, g, or t
  misc_feature (1098)..(1099): n is a, c, g, or t
  misc_feature (1104)..(1104): n is a, c, g, or t
  misc_feature (1111)..(1111): n is a, c, g, or t
  misc_feature (1113)..(1113): n is a, c, g, or t
  misc_feature (1118)..(1118): n is a, c, g, or t
  misc_feature (1123)..(1123): n is a, c, g, or t
  misc_feature (1127)..(1127): n is a, c, g, or t
  misc_feature (1141)..(1141): n is a, c, g, or t
  misc_feature (1159)..(1159): n is a, c, g, or t
  misc_feature (1168)..(1168): n is a, c, g, or t
  misc_feature (1172)..(1172): n is a, c, g, or t
  misc_feature (1185)..(1185): n is a, c, g, or t
  misc_feature (1207)..(1207): n is a, c, g, or t
  misc_feature (1212)..(1212): n is a, c, g, or t
  misc_feature (1214)..(1214): n is a, c, g, or t
  misc_feature (1217)..(1217): n is a, c, g, or t
  misc_feature (1219)..(1220): n is a, c, g, or t
  misc_feature (1227)..(1227): n is a, c, g, or t
  misc_feature (1239)..(1239): n is a, c, g, or t
  misc_feature (1243)..(1243): n is a, c, g, or t
  misc_feature (1249)..(1249): n is a, c, g, or t
  misc_feature (1257)..(1257): n is a, c, g, or t
  misc_feature (1266)..(1266): n is a, c, g, or t
  misc_feature (1269)..(1269): n is a, c, g, or t
  misc_feature (1271)..(1271): n is a, c, g, or t
  misc_feature (1279)..(1279): n is a, c, g, or t
  misc_feature (1283)..(1283): n is a, c, g, or t
  misc_feature (1305)..(1305): n is a, c, g, or t
  misc_feature (1313)..(1313): n is a, c, g, or t
  misc_feature (1321)..(1323): n is a, c, g, or t
  misc_feature (1325)..(1325): n is a, c, g, or t
  misc_feature (1330)..(1330): n is a, c, g, or t
  misc_feature (1332)..(1333): n is a, c, g, or t
  misc_feature (1341)..(1342): n is a, c, g, or t
  misc_feature (1344)..(1344): n is a, c, g, or t
  misc_feature (1376)..(1376): n is a, c, g, or t
nantagagaaattactatgagaggatcgcatcaccatcaccatcacggatcctatttaggtgacactatagaatcgtcgacccacgcgtccggccacgatgagatgttctccgacatctacaagatccgggagatcgcggacgggttgtgcctggaggtggaggggaagatggtcagtaggacagaaggtaacattgatgactcgctcattggtggaaatgcctccgctgaaggccccgagggcgaaggtaccgaaagcacagtaatcactggtgtcgatattgtcatgaaccatcacctgcaggaaacaagtttcacaaaagaagcctacaagaagtacatcaaagattacatgaaatcaatcaaagggaaacttgaagaacagagaccagaaagagtaaaaccttttatgacaggggctgcagaacaaatcaagcacatccttgctaatttcaaaaactaccagttctttattggtgaaaacatgaatccagatggcatggttgctctattggactaccgtgaggatggtgtgaccccatatatgattttctttaaggatggtttagaaatggaaaaatgttaacaaatgtggcaattattttggatctatcacctgtcatcataactggcttctgcttgtcatccacacaacaccaggacttaagacaaatgggactgatgtcatcttgagctcttcatttattttgactgtgatttatttggagtggaggcattgtttttaagaaaaacatgtcatgtaggttgtctaaaaataaaatgcatttaaactcaaaaaaaaaaaaaaagggcggccgctccctatagtgagtcgtattaagcttaattagctgancttggactcctgnttgataaatccagtaatgacctcanaactccntctggatttgttcaaaacgctcggttgcccccgggcgtttttttattggnganaatccaagctagcttggcgaaantttncnggacctaaggaagcttaaattggaaaaaaaaatcctgggatntacccccgttgananttcccnatgnnntcnnaaanaaattttgaggcnttcngtcngttgcncaangtacccnnaaccnaaccgtncncttgnaattnccgncctttttaaaaccntaaaaaaaaaaaccccanttttttccnggcntttttccattctngccccccgaagaaggccccccngaatncnttngnnataaaancgggaactgggnaaanggaaangttccccnttttacccnttncngaaaaaanaaanttttccccttggagaaaacccnaaattcgnggttttcnnntnttccnannggggggtnngnaacccccccttccccagggtttaaaaattttncccccccccc

SEQ ID NO: 689 - DNA, 1399 bp, Homo Sapiens
  misc_feature (920)..(920): n is a, c, g, or t
  misc_feature (967)..(967): n is a, c, g, or t
  misc_feature (1000)..(1000): n is a, c, g, or t
  misc_feature (1010)..(1010): n is a, c, g, or t
  misc_feature (1029)..(1030): n is a, c, g, or t
  misc_feature (1033)..(1033): n is a, c, g, or t
  misc_feature (1044)..(1044): n is a, c, g, or t
  misc_feature (1064)..(1064): n is a, c, g, or t
  misc_feature (1068)..(1068): n is a, c, g, or t
  misc_feature (1072)..(1072): n is a, c, g, or t
  misc_feature (1074)..(1074): n is a, c, g, or t
  misc_feature (1080)..(1080): n is a, c, g, or t
  misc_feature (1083)..(1083): n is a, c, g, or t
  misc_feature (1085)..(1085): n is a, c, g, or t
  misc_feature (1088)..(1088): n is a, c, g, or t
  misc_feature (1094)..(1094): n is a, c, g, or t
  misc_feature (1100)..(1100): n is a, c, g, or t
  misc_feature (1102)..(1102): n is a, c, g, or t
  misc_feature (1107)..(1107): n is a, c, g, or t
  misc_feature (1112)..(1112): n is a, c, g, or t
  misc_feature (1117)..(1118): n is a, c, g, or t
  misc_feature (1123)..(1123): n is a, c, g, or t
  misc_feature (1127)..(1127): n is a, c, g, or t
  misc_feature (1145)..(1146): n is a, c, g, or t
  misc_feature (1150)..(1150): n is a, c, g, or t
  misc_feature (1154)..(1154): n is a, c, g, or t
  misc_feature (1162)..(1162): n is a, c, g, or t
  misc_feature (1167)..(1167): n is a, c, g, or t
  misc_feature (1171)..(1171): n is a, c, g, or t
  misc_feature (1173)..(1173): n is a, c, g, or t
  misc_feature (1175)..(1175): n is a, c, g, or t
  misc_feature (1189)..(1190): n is a, c, g, or t
  misc_feature (1193)..(1194): n is a, c, g, or t
  misc_feature (1198)..(1198): n is a, c, g, or t
  misc_feature (1202)..(1202): n is a, c, g, or t
  misc_feature (1215)..(1217): n is a, c, g, or t
  misc_feature (1224)..(1224): n is a, c, g, or t
  misc_feature (1241)..(1241): n is a, c, g, or t
  misc_feature (1252)..(1254): n is a, c, g, or t
  misc_feature (1268)..(1268): n is a, c, g, or t
  misc_feature (1273)..(1273): n is a, c, g, or t
  misc_feature (1280)..(1281): n is a, c, g, or t
  misc_feature (1283)..(1285): n is a, c, g, or t
  misc_feature (1289)..(1289): n is a, c, g, or t
  misc_feature (1300)..(1301): n is a, c, g, or t
  misc_feature (1309)..(1311): n is a, c, g, or t
  misc_feature (1315)..(1315): n is a, c, g, or t
  misc_feature (1330)..(1330): n is a, c, g, or t
  misc_feature (1333)..(1333): n is a, c, g, or t
  misc_feature (1338)..(1338): n is a, c, g, or t
  misc_feature (1345)..(1351): n is a, c, g, or t
  misc_feature (1365)..(1367): n is a, c, g, or t
  misc_feature (1376)..(1380): n is a, c, g, or t
  misc_feature (1389)..(1389): n is a, c, g, or t
gagagattactatgagaggatcgcatcaccatcaccatcacggatcctatttaggtgacactatagaatcgtcgacccacgcgtccggcacctggaaggggaccctgaaagaatacgagagctgccacgaaggccgctgcccgctcatgctgaccgaatgtcccgcgtgcaaaggcctggtccgccttggtgaaaaggagcgccacctggagcacgagtgcccggagagaagcctgagctgccggcattgccgggcaccctgctgcggagcagacgtgaaggcgcaccacgaggtctgccccaagttccccttaacttgtgacggctgcggcaagaagaagatcccccgggagaagtttcaggaccacgtcaagacttgtggcaagtgtcgagtcccttgcagattccacgccatcggctgcctcgagacggtagagggtgagaaacagcaggagcacgaggtgcagtggctgcgggagcacctggccatgctactgagctcggtgctggaggcaaagcccctcttgggagaccagagccacgcggggtcagagctcctgcagaggtgcgagagcctggagaagaagacggccacttttgagaacattgtctgcgtcctgaaccgggaggtggagagggtggccatgactgccgaggcctgcagccggcagcaccggctggaccaagacaagattgaagccctgagtagcaaggtgcagcagctggagaggagcattggcctcaaggacctggcgatggctgacttggagcagaaggtcttggagatggaggcatccacctacgatggggtcttcatctggaagatctcagacttcgccaggaagcgccaggaagctgtggctggccgcatacccgccatcttctccccagccttctacaccagcaggtacggctacaanatgtgtctgcgtatctacctgaacggcgacggcaccgggcgaagaanacacctgtccctcttctttgtggtgatgaaggncccaatgacnccctgctgcggtggccttnnacnaaaaggtgacnttatgctgctcgaccaaaanaccnggancngtgatngancnttnagcccnagtgantnttctnttttnaagcnntcaanaatnaaattgaaggggtgcccnntttngccnttccaaanggggnaaantntntttggggaaagccnnttnnaagncttnggaactaagggtnnntgccctnttgtttgggggtggggncccccaccgtnnnagggcccccttggnggttnttttaannannncccntttccttgagnncccccccnnntttnggggaaacccccccnttnaaaanggggggnnnnnnngggggggggggggnnnccccccccnnnnnggggggggnaaaaaaaaaa

SEQ ID NO: 690 - DNA, 1398 bp, Homo Sapiens
  misc_feature (884)..(884): n is a, c, g, or t
  misc_feature (913)..(913): n is a, c, g, or t
  misc_feature (917)..(917): n is a, c, g, or t
  misc_feature (919)..(919): n is a, c, g, or t
  misc_feature (952)..(952): n is a, c, g, or t
  misc_feature (968)..(968): n is a, c, g, or t
  misc_feature (978)..(978): n is a, c, g, or t
  misc_feature (982)..(982): n is a, c, g, or t
  misc_feature (993)..(993): n is a, c, g, or t
  misc_feature (998)..(998): n is a, c, g, or t
  misc_feature (1009)..(1009): n is a, c, g, or t
  misc_feature (1012)..(1012): n is a, c, g, or t
  misc_feature (1021)..(1021): n is a, c, g, or t
  misc_feature (1028)..(1028): n is a, c, g, or t
  misc_feature (1030)..(1030): n is a, c, g, or t
  misc_feature (1040)..(1040): n is a, c, g, or t
  misc_feature (1052)..(1052): n is a, c, g, or t
  misc_feature (1056)..(1056): n is a, c, g, or t
  misc_feature (1061)..(1061): n is a, c, g, or t
  misc_feature (1063)..(1063): n is a, c, g, or t
  misc_feature (1067)..(1067): n is a, c, g, or t
  misc_feature (1073)..(1073): n is a, c, g, or t
  misc_feature (1076)..(1076): n is a, c, g, or t
  misc_feature (1083)..(1084): n is a, c, g, or t
  misc_feature (1095)..(1096): n is a, c, g, or t
  misc_feature (1098)..(1240): n is a, c, g, or t
  misc_feature (1242)..(1398): n is a, c, g, or t
agagaaattactatgagaggatcgcatcaccatcaccatcacggatcctatttaggtgacactatagaatcgtcgacccacgcgtccgcccacgcgtccggcatctcagatttagctcagcactaccttatgcgggccaatatcacagccatccgcagagtccggaagacagacaataatcgcattgctagagcctgtggggcccggatagtcagccgaccagaggaactgagagaagatgatgttggaacaggagcaggcctgttggaaatcaagaaaattggagatgaatactttactttcatcactgactgcaaagaccccaaggcctgcaccattctcctccggggggctagcaaagagattctctcggaagtagaacgcaacctccaggatgccatgcaagtgtgtcgcaatgttctcctggaccctcagctggtgccagggggtggggcctccgagatggctgtggcccatgccttgacagaaaaatccaaggccatgactggtgtggaacaatggccatacagggctgttgcccaggccctagaggtcattcctcgtaccctgatccagaactgtggggccagcaccatccgtctacttacctcccttcgggccaagcacacccaggagaactgtgagacctggggtgtaaatggtgagacgggtactttggtggacatgaaggaactgggcatatgggagccattggctgtgaagctgcagacttataagacagcagtggagacggcagttctgctactgcgaattgatgacatcgtttcaggccacaaaaagaaaggcgatgaccagagccggcaaggcggggctcctgatgctggccaggagtgagtgctaggcaaggctacttcaatgcacanaaccagcaaaagtctccccttttcctganccanantgccaggaacactgtggacgtctttgttcaaanggatcaggtggggggncagcccccantccnttctgtcccanctcanttttccaaaanacnctgacttgnaattctncnctattggaanggttccatttantttnctccnangatnaaatcnaantcctttnnaaaaaaaaaannannnnnnnnnnnnnnnnnnnnnnnnnnnnnnnnnnnnnnnnnnnnnnnnnnnnnnnnnnnnnnnnnnnnnnnnnnnnnnnnnnnnnnnnnnnnnnnnnnnnnnnnnnnnnnnnnnnnnnnnnnnnnnnnnnnnnnnnnnnnnnntnnnnnnnnnnnnnnnnnnnnnnnnnnnnnnnnnnnnnnnnnnnnnnnnnnnnnnnnnnnnnnnnnnnnnnnnnnnnnnnnnnnnnnnnnnnnnnnnnnnnnnnnnnnnnnnnnnnnnnnnnnnnnnnnnnnnnnnnnnnnnnnnnnnnnnnnnnnnn

SEQ ID NO: 691 - DNA, 1376 bp, Homo Sapiens
  misc_feature (883)..(883): n is a, c, g, or t
  misc_feature (918)..(918): n is a, c, g, or t
  misc_feature (925)..(925): n is a, c, g, or t
  misc_feature (945)..(945): n is a, c, g, or t
  misc_feature (977)..(977): n is a, c, g, or t
  misc_feature (993)..(993): n is a, c, g, or t
  misc_feature (1001)..(1001): n is a, c, g, or t
  misc_feature (1023)..(1023): n is a, c, g, or t
  misc_feature (1032)..(1032): n is a, c, g, or t
  misc_feature (1034)..(1034): n is a, c, g, or t
  misc_feature (1047)..(1047): n is a, c, g, or t
  misc_feature (1052)..(1052): n is a, c, g, or t
  misc_feature (1056)..(1057): n is a, c, g, or t
  misc_feature (1062)..(1062): n is a, c, g, or t
  misc_feature (1071)..(1071): n is a, c, g, or t
  misc_feature (1081)..(1081): n is a, c, g, or t
  misc_feature (1083)..(1083): n is a, c, g, or t
  misc_feature (1111)..(1111): n is a, c, g, or t
  misc_feature (1116)..(1116): n is a, c, g, or t
  misc_feature (1121)..(1121): n is a, c, g, or t
  misc_feature (1124)..(1124): n is a, c, g, or t
  misc_feature (1137)..(1137): n is a, c, g, or t
  misc_feature (1154)..(1154): n is a, c, g, or t
  misc_feature (1157)..(1157): n is a, c, g, or t
  misc_feature (1161)..(1161): n is a, c, g, or t
  misc_feature (1204)..(1204): n is a, c, g, or t
  misc_feature (1211)..(1211): n is a, c, g, or t
  misc_feature (1215)..(1215): n is a, c, g, or t
  misc_feature (1218)..(1218): n is a, c, g, or t
  misc_feature (1231)..(1231): n is a, c, g, or t
  misc_feature (1238)..(1238): n is a, c, g, or t
  misc_feature (1242)..(1242): n is a, c, g, or t
  misc_feature (1247)..(1247): n is a, c, g, or t
  misc_feature (1257)..(1257): n is a, c, g, or t
  misc_feature (1266)..(1266): n is a, c, g, or t
  misc_feature (1269)..(1270): n is a, c, g, or t
  misc_feature (1284)..(1284): n is a, c, g, or t
  misc_feature (1299)..(1299): n is a, c, g, or t
  misc_feature (1301)..(1301): n is a, c, g, or t
  misc_feature (1304)..(1304): n is a, c, g, or t
  misc_feature (1306)..(1306): n is a, c, g, or t
  misc_feature (1313)..(1315): n is a, c, g, or t
  misc_feature (1317)..(1317): n is a, c, g, or t
  misc_feature (1325)..(1326): n is a, c, g, or t
  misc_feature (1331)..(1331): n is a, c, g, or t
  misc_feature (1347)..(1347): n is a, c, g, or t
  misc_feature (1351)..(1351): n is a, c, g, or t
  misc_feature (1356)..(1357): n is a, c, g, or t
  misc_feature (1367)..(1367): n is a, c, g, or t
  misc_feature (1371)..(1371): n is a, c, g, or t
  misc_feature (1373)..(1374): n is a, c, g, or t
tagagaaattactatgagaggatcgcatcaccatcaccatcacggatcctatttaggtgacactatagaatcgtcgacccacgcgtccgccagctctgggtacccggctctgcatcgcgtcgccatgatgggccatcgtccagtgctcgtgctcagccagaacacaaagcgtgaatccggaagaaaagttcaatctggaaacatcaatgctgccaagactattgcagatatcatccgaacatgtttgggacccaagtccatgatgaagatgcttttggacccaatgggaggcattgtgatgaccaatgatggcaatgccattcttcgagagattcaagtccagcatccagcggccaagtccatgatcgaaattagccggacccaggatgaagaggttggagatgggaccacatcagtaattattcttgcaggggaaatgctgtctgtagctgagcacttcctggagcagcagatgcacccaacagtggtgatcagtgcttaccgcaaggcattggatgatatgatcagcaccctaaagaaaataagtatcccagtcgacatcagtgacagtgatatgatgctgaacatcatcaacagctctattactaccaaagccatcagtcggtggtcatctttggcttgcaacattgccctggatgctgtcaagatggtacagtttgaggagaatggtcggaaagagattgacataaaaaaatatgcaagagtggaaaagatacctggaggcatcattgaagactcctgtgtcttgcgtggagtcatgattaacaaggatgtgacccatccacgtatgcggcgctatatcaagaaccctcgcattgtgctgctggattcttctctggaatacaagaaaaggagaaagccngactgacattgagattacccgagaggaggacttcncccgaanttctccagatggaggaagantacatccagcagctctgtgaggacattatccnactgaagcccgatgtnggtcatcnctgaaaagggcatctcaaattnacttcaccncnaccttatgcgggnccaanatcnnagccntccccaaantccggaaaananaaaaataatcccattgcttaaaacccgnggggncccgnaantccccccaccaangaactgaaaaaaaaaanttngaanaagaccaggccttttgaaatcaaaaaattggaaaaaaactttnttttttncctnganggaaaaaccccanggcctgncccnttccnccggggggtnaaaaaaaanttnncccaaaaaaaaccnccccccaaacccttnanggntncaagttnnngnaccccccnnggccngggggggcccccaaanggtngcccnncttaaaaaanccgncnntg

SEQ ID NO: 692 - DNA, 1285 bp, Homo Sapiens
  misc_feature (1)..(1): n is a, c, g, or t
  misc_feature (842)..(842): n is a, c, g, or t
  misc_feature (849)..(849): n is a, c, g, or t
  misc_feature (864)..(864): n is a, c, g, or t
  misc_feature (928)..(928): n is a, c, g, or t
  misc_feature (951)..(951): n is a, c, g, or t
  misc_feature (969)..(969): n is a, c, g, or t
  misc_feature (972)..(972): n is a, c, g, or t
  misc_feature (974)..(974): n is a, c, g, or t
  misc_feature (991)..(991): n is a, c, g, or t
  misc_feature (993)..(993): n is a, c, g, or t
  misc_feature (995)..(995): n is a, c, g, or t
  misc_feature (998)..(998): n is a, c, g, or t
  misc_feature (1012)..(1012): n is a, c, g, or t
  misc_feature (1039)..(1039): n is a, c, g, or t
  misc_feature (1045)..(1045): n is a, c, g, or t
  misc_feature (1047)..(1047): n is a, c, g, or t
  misc_feature (1050)..(1050): n is a, c, g, or t
  misc_feature (1059)..(1060): n is a, c, g, or t
  misc_feature (1065)..(1065): n is a, c, g, or t
  misc_feature (1067)..(1067): n is a, c, g, or t
  misc_feature (1070)..(1070): n is a, c, g, or t
  misc_feature (1072)..(1073): n is a, c, g, or t
  misc_feature (1077)..(1077): n is a, c, g, or t
  misc_feature (1085)..(1085): n is a, c, g, or t
  misc_feature (1089)..(1089): n is a, c, g, or t
  misc_feature (1095)..(1095): n is a, c, g, or t
  misc_feature (1109)..(1109): n is a, c, g, or t
  misc_feature (1111)..(1112): n is a, c, g, or t
  misc_feature (1117)..(1117): n is a, c, g, or t
  misc_feature (1123)..(1123): n is a, c, g, or t
  misc_feature (1125)..(1125): n is a, c, g, or t
  misc_feature (1134)..(1135): n is a, c, g, or t
  misc_feature (1145)..(1145): n is a, c, g, or t
  misc_feature (1155)..(1155): n is a, c, g, or t
  misc_feature (1166)..(1166): n is a, c, g, or t
  misc_feature (1174)..(1174): n is a, c, g, or t
  misc_feature (1176)..(1176): n is a, c, g, or t
  misc_feature (1182)..(1184): n is a, c, g, or t
  misc_feature (1191)..(1191): n is a, c, g, or t
  misc_feature (1194)..(1196): n is a, c, g, or t
  misc_feature (1199)..(1199): n is a, c, g, or t
  misc_feature (1203)..(1203): n is a, c, g, or t
  misc_feature (1206)..(1206): n is a, c, g, or t
  misc_feature (1214)..(1214): n is a, c, g, or t
  misc_feature (1216)..(1216): n is a, c, g, or t
  misc_feature (1224)..(1224): n is a, c, g, or t
  misc_feature (1229)..(1230): n is a, c, g, or t
  misc_feature (1234)..(1235): n is a, c, g, or t
  misc_feature (1239)..(1239): n is a, c, g, or t
  misc_feature (1244)..(1247): n is a, c, g, or t
  misc_feature (1250)..(1250): n is a, c, g, or t
  misc_feature (1256)..(1258): n is a, c, g, or t
  misc_feature (1275)..(1275): n is a, c, g, or t
  misc_feature (1280)..(1280): n is a, c, g, or t
  misc_feature (1284)..(1285): n is a, c, g, or t
naattagagaaattactatgagaggatcgcatcaccatcaccatcacggatcctatttaggtgacactatagaatcgtcgacccacgcgtccggttattgcatgatccaatggcttactggccatcttccttgggaggataatttgaaagatcctaaatatgttagagattccaaaattagatacagagaaaatattgcaagtttgatggacaaatgttttcctgagaaaaacaaaccaggtgaaattgccaaatacatggaaacagtgaaattactagactacactgaaaaacctctttatgaaaatttacgtgacattcttttgcaaggactaaaagctataggaagtaaggatgatggcaaattggacctcagtgttgtggagaatggaggtttgaaagcaaaaacaataacaaagaagcgaaagaaagaaattgaagaaagcaaggaacctggtgttgaagatacggaatggtcaaacacacagacagaggaggccatacagacccgttcaagaaccagaaagagagtccagaagtaattcagatgctgtgaaccagatttccttttctttgttttcttttgacttttttctccttttctatttgaactgttttattttcctgtgagtcttgcgaggtggaagtaatgattaaatactcatgtgttcagaaaacataaactttttttataaaaatattttgtacaattcattaaaggctaatttatgaaatttgaaaaaaaaaaaaaaaaaaaagggcggccgctccctatagtgagtcgtattaagcttaattagctgagcttggactcctgttgatagatccagtaatgacctcanaactccntctggatttgttcanaacgctcggttgccgccgggcgttttttattggtgagaatccaagctagcttggcgagatttcnggagctaaggaagctaaatgganaaaaaatccctggatatnccncngttgaaatatccccatngncntcntaaaaaacattttngaggcatttccgtccgttgccccatgnacctananccnaaccgttcnnctggnanttncnncccntttttaanaacngtaaanaaaaaaaaaccccnannttttntccggncntttttcccnnttcttgcccnccggaagaangccccccccgnaatttccntnggcaannnaaaaacnggnnnccngggnaangggaaaangnttcccccntgttnncccnntttncccgnnnnaancggaannnttttccccccccggggnggaancccnn

SEQ ID NO: 693 - DNA, 1379 bp, Homo Sapiens
  misc_feature (829)..(829): n is a, c, g, or t
  misc_feature (921)..(921): n is a, c, g, or t
  misc_feature (972)..(972): n is a, c, g, or t
  misc_feature (998)..(998): n is a, c, g, or t
  misc_feature (1018)..(1018): n is a, c, g, or t
  misc_feature (1022)..(1022): n is a, c, g, or t
  misc_feature (1026)..(1026): n is a, c, g, or t
  misc_feature (1033)..(1033): n is a, c, g, or t
  misc_feature (1062)..(1062): n is a, c, g, or t
  misc_feature (1065)..(1065): n is a, c, g, or t
  misc_feature (1077)..(1078): n is a, c, g, or t
  misc_feature (1087)..(1087): n is a, c, g, or t
  misc_feature (1091)..(1091): n is a, c, g, or t
  misc_feature (1100)..(1100): n is a, c, g, or t
  misc_feature (1102)..(1102): n is a, c, g, or t
  misc_feature (1109)..(1109): n is a, c, g, or t
  misc_feature (1117)..(1117): n is a, c, g, or t
  misc_feature (1125)..(1125): n is a, c, g, or t
  misc_feature (1133)..(1133): n is a, c, g, or t
  misc_feature (1135)..(1135): n is a, c, g, or t
  misc_feature (1137)..(1137): n is a, c, g, or t
  misc_feature (1153)..(1153): n is a, c, g, or t
  misc_feature (1156)..(1156): n is a, c, g, or t
  misc_feature (1160)..(1160): n is a, c, g, or t
  misc_feature (1163)..(1163): n is a, c, g, or t
  misc_feature (1166)..(1166): n is a, c, g, or t
  misc_feature (1179)..(1179): n is a, c, g, or t
  misc_feature (1183)..(1183): n is a, c, g, or t
  misc_feature (1186)..(1186): n is a, c, g, or t
  misc_feature (1202)..(1203): n is a, c, g, or t
  misc_feature (1213)..(1213): n is a, c, g, or t
  misc_feature (1222)..(1225): n is a, c, g, or t
  misc_feature (1232)..(1232): n is a, c, g, or t
  misc_feature (1234)..(1236): n is a, c, g, or t
  misc_feature (1238)..(1239): n is a, c, g, or t
  misc_feature (1242)..(1242): n is a, c, g, or t
  misc_feature (1246)..(1246): n is a, c, g, or t
  misc_feature (1253)..(1253): n is a, c, g, or t
  misc_feature (1262)..(1263): n is a, c, g, or t
  misc_feature (1266)..(1267): n is a, c, g, or t
  misc_feature (1269)..(1269): n is a, c, g, or t
  misc_feature (1273)..(1274): n is a, c, g, or t
  misc_feature (1276)..(1276): n is a, c, g, or t
  misc_feature (1279)..(1280): n is a, c, g, or t
  misc_feature (1283)..(1283): n is a, c, g, or t
  misc_feature (1288)..(1288): n is a, c, g, or t
  misc_feature (1292)..(1292): n is a, c, g, or t
  misc_feature (1295)..(1295): n is a, c, g, or t
  misc_feature (1298)..(1298): n is a, c, g, or t
  misc_feature (1309)..(1309): n is a, c, g, or t
  misc_feature (1316)..(1317): n is a, c, g, or t
  misc_feature (1319)..(1319): n is a, c, g, or t
  misc_feature (1323)..(1324): n is a, c, g, or t
  misc_feature (1327)..(1331): n is a, c, g, or t
  misc_feature (1341)..(1342): n is a, c, g, or t
  misc_feature (1345)..(1345): n is a, c, g, or t
  misc_feature (1348)..(1349): n is a, c, g, or t
  misc_feature (1355)..(1355): n is a, c, g, or t
  misc_feature (1357)..(1357): n is a, c, g, or t
  misc_feature (1363)..(1363): n is a, c, g, or t
  misc_feature (1366)..(1366): n is a, c, g, or t
  misc_feature (1369)..(1370): n is a, c, g, or t
  misc_feature (1372)..(1374): n is a, c, g, or t
ctatagagaaattactatgagaggatcgcatcaccatcaccatcacggatcctatttaggtgacactatagaatcgtcgacccacgcgtccgctcccatcacctcctgcggcagaacagcacccgtgacccacccagagagcaaggccaggggtcttggtgctccccgacggggcccggcaagttctctttcttctctctgggaaaatgaacgtccaggacacacctgtatcccagagagcaaagtgatgaggagactgagcgtccccagccccacctggcggcatggacacagaaaagctacgccggctggcctctccagaccagttcccaggctgggtctgccgctgggccctggggcggtggggacagatgttgacacaaattatttatgttttcttagtatcagaagaggattctcggcactaacacatagccagtcctaactccgtactctgtgtcagcccatcccctagacaccctctgtttcctttcccggccccacctggccggccctctgcccctgcagagctgaggcagcctggggttgatggggaccacgcggtgcctgcaggtcctagaagtgagctgggcaggggctcttcagaccacacagccctgaccgggccttggaggagagccatggacaggctcctccatgccgtctttccttcttttgaaaatcctatcaatggctgggcgcggtggctcacacctgtaatcccagcactttgggagaccgaggcaggtggatcacctgaggtcaggagttcgagaccagcctggccaacgtggtgaaaccctgtctctactaaaaatacaaaaattanctgggcgtggtggcgtgcacctgtaatcccagctactcaggaggctgaaacaggacacttgcttgaacccgggaggtggaggttgcaatganccaagattgtgccactgtattccaacttgggtgaaaaaacaagactctgtntcaaaaaagaaaagaaaattatatcngcaaatcaaaatatcccccncgtnaggntccagantccttcgttccctcccctcatcctggcanccntccgggcttggnncctccattnaaanaaaaccccntncccctgnaaccagcntgaacccntggaaaangntnccccgggggttcaggnagnggtnaanggncaggaattttttncccnttnaaaaaggaaatttaanncccaaaaggnccaagaacnnnnaaaaccngnnntnnaangggnggtttcnctttttctnnccnncngggnntngannggnaaaantaanagnccnggggggaaaanaatcccnncnttgnnttnnnnncccccccccnnaanccnntggggngncccccnggnttnnannnccacc

SEQ ID NO: 694 - DNA, 1364 bp, Homo Sapiens
  misc_feature (945)..(945): n is a, c, g, or t
  misc_feature (966)..(966): n is a, c, g, or t
  misc_feature (974)..(974): n is a, c, g, or t
  misc_feature (1026)..(1026): n is a, c, g, or t
  misc_feature (1042)..(1042): n is a, c, g, or t
  misc_feature (1045)..(1045): n is a, c, g, or t
  misc_feature (1060)..(1060): n is a, c, g, or t
  misc_feature (1066)..(1066): n is a, c, g, or t
  misc_feature (1068)..(1068): n is a, c, g, or t
  misc_feature (1072)..(1072): n is a, c, g, or t
  misc_feature (1075)..(1075): n is a, c, g, or t
  misc_feature (1082)..(1082): n is a, c, g, or t
  misc_feature (1086)..(1086): n is a, c, g, or t
  misc_feature (1117)..(1118): n is a, c, g, or t
  misc_feature (1123)..(1123): n is a, c, g, or t
  misc_feature (1125)..(1125): n is a, c, g, or t
  misc_feature (1128)..(1128): n is a, c, g, or t
  misc_feature (1132)..(1132): n is a, c, g, or t
  misc_feature (1139)..(1139): n is a, c, g, or t
  misc_feature (1143)..(1143): n is a, c, g, or t
  misc_feature (1145)..(1145): n is a, c, g, or t
  misc_feature (1165)..(1166): n is a, c, g, or t
  misc_feature (1168)..(1168): n is a, c, g, or t
  misc_feature (1171)..(1171): n is a, c, g, or t
  misc_feature (1185)..(1186): n is a, c, g, or t
  misc_feature (1194)..(1194): n is a, c, g, or t
  misc_feature (1196)..(1198): n is a, c, g, or t
  misc_feature (1209)..(1209): n is a, c, g, or t
  misc_feature (1213)..(1213): n is a, c, g, or t
  misc_feature (1224)..(1224): n is a, c, g, or t
  misc_feature (1229)..(1229): n is a, c, g, or t
  misc_feature (1235)..(1235): n is a, c, g, or t
  misc_feature (1238)..(1238): n is a, c, g, or t
  misc_feature (1258)..(1259): n is a, c, g, or t
  misc_feature (1268)..(1268): n is a, c, g, or t
  misc_feature (1302)..(1302): n is a, c, g, or t
  misc_feature (1305)..(1305): n is a, c, g, or t
  misc_feature (1308)..(1309): n is a, c, g, or t
  misc_feature (1312)..(1312): n is a, c, g, or t
  misc_feature (1314)..(1314): n is a, c, g, or t
  misc_feature (1325)..(1325): n is a, c, g, or t
  misc_feature (1332)..(1332): n is a, c, g, or t
  misc_feature (1335)..(1335): n is a, c, g, or t
  misc_feature (1337)..(1337): n is a, c, g, or t
  misc_feature (1344)..(1344): n is a, c, g, or t
  misc_feature (1347)..(1347): n is a, c, g, or t
  misc_feature (1362)..(1362): n is a, c, g, or t
  misc_feature (1364)..(1364): n is a, c, g, or t
gagaaattactatgagaggatcgcatcaccatcaccatcacggatcctatttaggtgacactatagaatcgtcgacccacgcgtccgggaagaagcgaccaaagcgcctgaggaccggcaacatggtgcggtcggggaataaggcagctgttgtgctgtgtatggacgtgggctttaccatgagtaactccattcctggtatagaatccccatttgaacaagcaaagaaggtgataaccatgtttgtacagcgacaggtgtttgctgagaacaaggatgagattgctttagtcctgtttggtacagatggcactgacaatcccctttctggtggggatcagtatcagaacatcacagtgcacagacatctgatgctaccagattttgatttgctggaggacattgaaagcaaaatccaaccaggttctcaacaggctgacttcctggatgcactaatcgtgagcatggatgtgattcaacatgaaacaataggaaagaagtttgagaagaggcatattgaaatattcactgacctcagcagccgattcagcaaaagtcagctggatattataattcatagcttgaagaaatgtgacatctccctgcaattcttcttgcctttctcacttggcaaggaagatggaagtggggacagaggagatggcccctttcgcttaggtggccatgggccttcctttccactaaaaggaattaccgaacagcaaaaagaaggtcttgagatagtgaaaatggtgatgatatctttagaaggtgaagatgggttggatgaaatttattcattcagtgagagtctgagaaaactgtgcgtcttcaagaaaaattgagaggcattccattcactggccctgccgactgaccattggctccaatttgtctataaggattgcagcctataaatcgattctacaggagagagttaaaaanacttggacagttgtggatgcnaaaacccntaaaaaagaagatttccaaaagaaaccgtttatggcttaaatgatgatgatnaactgagttttaaaanagnaattatcagggtccnctaggnantgantantccttcnccangggagagaacaatgaataaaatccgaggganngctcngnttnggantttgaanctcncnggtcaaaaaatctctggaannantcnaggctttccaaaannaaagaccncnnnccttccccganccgnttgaaaaaaanggggncaattnaantttaaaaaaaaaaaccccannggggtttcnctaaaaaaaaaagttttggggccccccttgaaanggnaannttncntaaaaaaaatnccccccntantnttttttnctntttaaaaaaaacccntn

SEQ ID NO: 695 - DNA, 1339 bp, Homo Sapiens
  misc_feature (918)..(918): n is a, c, g, or t
  misc_feature (940)..(940): n is a, c, g, or t
  misc_feature (964)..(964): n is a, c, g, or t
  misc_feature (984)..(984): n is a, c, g, or t
  misc_feature (994)..(994): n is a, c, g, or t
  misc_feature (998)..(998): n is a, c, g, or t
  misc_feature (1000)..(1000): n is a, c, g, or t
  misc_feature (1008)..(1008): n is a, c, g, or t
  misc_feature (1020)..(1020): n is a, c, g, or t
  misc_feature (1024)..(1025): n is a, c, g, or t
  misc_feature (1032)..(1032): n is a, c, g, or t
  misc_feature (1042)..(1042): n is a, c, g, or t
  misc_feature (1060)..(1060): n is a, c, g, or t
  misc_feature (1086)..(1086): n is a, c, g, or t
  misc_feature (1091)..(1091): n is a, c, g, or t
  misc_feature (1097)..(1097): n is a, c, g, or t
  misc_feature (1106)..(1106): n is a, c, g, or t
  misc_feature (1116)..(1116): n is a, c, g, or t
  misc_feature (1119)..(1119): n is a, c, g, or t
  misc_feature (1130)..(1130): n is a, c, g, or t
  misc_feature (1132)..(1132): n is a, c, g, or t
  misc_feature (1135)..(1135): n is a, c, g, or t
  misc_feature (1144)..(1144): n is a, c, g, or t
  misc_feature (1146)..(1146): n is a, c, g, or t
  misc_feature (1161)..(1161): n is a, c, g, or t
  misc_feature (1163)..(1163): n is a, c, g, or t
  misc_feature (1185)..(1185): n is a, c, g, or t
  misc_feature (1202)..(1203): n is a, c, g, or t
  misc_feature (1205)..(1207): n is a, c, g, or t
  misc_feature (1218)..(1219): n is a, c, g, or t
  misc_feature (1222)..(1222): n is a, c, g, or t
  misc_feature (1226)..(1226): n is a, c, g, or t
  misc_feature (1229)..(1229): n is a, c, g, or t
  misc_feature (1234)..(1234): n is a, c, g, or t
  misc_feature (1240)..(1241): n is a, c, g, or t
  misc_feature (1243)..(1243): n is a, c, g, or t
  misc_feature (1253)..(1253): n is a, c, g, or t
  misc_feature (1260)..(1260): n is a, c, g, or t
  misc_feature (1266)..(1266): n is a, c, g, or t
  misc_feature (1276)..(1276): n is a, c, g, or t
  misc_feature (1280)..(1280): n is a, c, g, or t
  misc_feature (1283)..(1283): n is a, c, g, or t
  misc_feature (1303)..(1304): n is a, c, g, or t
  misc_feature (1312)..(1312): n is a, c, g, or t
  misc_feature (1316)..(1316): n is a, c, g, or t
  misc_feature (1324)..(1325): n is a, c, g, or t
  misc_feature (1329)..(1329): n is a, c, g, or t
  misc_feature (1333)..(1333): n is a, c, g, or t
  misc_feature (1337)..(1337): n is a, c, g, or t
  misc_feature (1339)..(1339): n is a, c, g, or t
aatagagaaattactatgagaggatcgcatcaccatcaccatcacggatcctatttaggtgacactatagaatcgtcgacccacgcgtccgcggacgcgtgggcggacgcgtgggaagaagcttttgaaatcagcaaaaaggaaatgcaaccaacacatcctatcagactgggtctggcccttaacttctctgtgttctattatgagattctgaactccccagagaaagcctgctctcttgcaaagacagcttttgatgaagccattgctgaacttgatacattaagtgaagagtcatacaaagacagcacgctaataatgcaattactgagagacaacttgacattgtggacatcggatacccaaggagacgaagctgaagcaggagaaggaggggaaaattaaccggccttccaacttttgtctgcctcattctaaaatttacacagtagaccatttgtcatccatgctgtcccacaaatagttttttgtttacgatttatgacaggtttatgttacttctatttgaatttctatatttcccatgtggtttttatgtttaatattaggggagtagagccagttaacatttagggagttatctgttttcatcttgaggtggccaatatggggatgtggaatttttatacaagttataagtgtttggcatagtacttttggtacattgtggcttcaaaagggccagtgtaaaactgcttccatgtctaagcaaagaaaactgcctacatactggtttgtcctggcggggaataaaagggatcattggttccagtcacaggtgtagtaattgtgggtactttaaggtttggagcacttacaaggctgtggtagaatcataccccatggataccacatattaaaccatgtatatctgtggaatactcaatgtgtacaccnttgactacagctgcagaagtgntcctttaaacaaagttgtgacccnttttactctggaaagggcanaaacggttcncatncnttattggnaagttaccggcngtannttcatanttttgcaccncatttattgaattaaagnttaggcacctaaacaatgtaaagtanatgcnggaaangatgctggnatcctactcnggnatcagcccgcngnaanaaacccggntnactttttagattggntnggatttttttttttgaccgccnaccgggggcgggaaaanntnnnggaaactggannggncctnttngcctnaattcnnancccccttttnaaaccgnttattntgggggaaantttnggnaaaaaaaaaaggggcccccnnggaaaaanaaangggcgggnnaaancccncccntn

SEQ ID NO: 696 - DNA, 1466 bp, Homo Sapiens
  misc_feature (738)..(738): n is a, c, g, or t
  misc_feature (740)..(740): n is a, c, g, or t
  misc_feature (822)..(822): n is a, c, g, or t
  misc_feature (850)..(850): n is a, c, g, or t
  misc_feature (871)..(871): n is a, c, g, or t
  misc_feature (888)..(888): n is a, c, g, or t
  misc_feature (895)..(895): n is a, c, g, or t
  misc_feature (897)..(897): n is a, c, g, or t
  misc_feature (904)..(904): n is a, c, g, or t
  misc_feature (975)..(975): n is a, c, g, or t
  misc_feature (989)..(989): n is a, c, g, or t
  misc_feature (1008)..(1008): n is a, c, g, or t
  misc_feature (1012)..(1012): n is a, c, g, or t
  misc_feature (1014)..(1014): n is a, c, g, or t
  misc_feature (1032)..(1032): n is a, c, g, or t
  misc_feature (1037)..(1037): n is a, c, g, or t
  misc_feature (1039)..(1039): n is a, c, g, or t
  misc_feature (1043)..(1043): n is a, c, g, or t
  misc_feature (1053)..(1053): n is a, c, g, or t
  misc_feature (1058)..(1058): n is a, c, g, or t
  misc_feature (1065)..(1065): n is a, c, g, or t
  misc_feature (1081)..(1081): n is a, c, g, or t
  misc_feature (1093)..(1093): n is a, c, g, or t
  misc_feature (1096)..(1096): n is a, c, g, or t
  misc_feature (1103)..(1103): n is a, c, g, or t
  misc_feature (1108)..(1108): n is a, c, g, or t
  misc_feature (1112)..(1112): n is a, c, g, or t
  misc_feature (1118)..(1118): n is a, c, g, or t
  misc_feature (1122)..(1122): n is a, c, g, or t
  misc_feature (1128)..(1129): n is a, c, g, or t
  misc_feature (1131)..(1131): n is a, c, g, or t
  misc_feature (1135)..(1135): n is a, c, g, or t
  misc_feature (1142)..(1143): n is a, c, g, or t
  misc_feature (1148)..(1148): n is a, c, g, or t
  misc_feature (1151)..(1151): n is a, c, g, or t
  misc_feature (1158)..(1158): n is a, c, g, or t
  misc_feature (1166)..(1166): n is a, c, g, or t
  misc_feature (1177)..(1177): n is a, c, g, or t
  misc_feature (1179)..(1179): n is a, c, g, or t
  misc_feature (1182)..(1182): n is a, c, g, or t
  misc_feature (1184)..(1184): n is a, c, g, or t
  misc_feature (1188)..(1188): n is a, c, g, or t
  misc_feature (1197)..(1197): n is a, c, g, or t
  misc_feature (1199)..(1199): n is a, c, g, or t
  misc_feature (1204)..(1204): n is a, c, g, or t
  misc_feature (1212)..(1212): n is a, c, g, or t
  misc_feature (1216)..(1216): n is a, c, g, or t
  misc_feature (1219)..(1219): n is a, c, g, or t
  misc_feature (1235)..(1235): n is a, c, g, or t
  misc_feature (1241)..(1243): n is a, c, g, or t
  misc_feature (1245)..(1245): n is a, c, g, or t
  misc_feature (1249)..(1249): n is a, c, g, or t
  misc_feature (1251)..(1251): n is a, c, g, or t
  misc_feature (1254)..(1254): n is a, c, g, or t
  misc_feature (1263)..(1263): n is a, c, g, or t
  misc_feature (1268)..(1269): n is a, c, g, or t
  misc_feature (1280)..(1280): n is a, c, g, or t
  misc_feature (1282)..(1282): n is a, c, g, or t
  misc_feature (1284)..(1286): n is a, c, g, or t
  misc_feature (1289)..(1289): n is a, c, g, or t
  misc_feature (1299)..(1299): n is a, c, g, or t
  misc_feature (1304)..(1305): n is a, c, g, or t
  misc_feature (1317)..(1317): n is a, c, g, or t
  misc_feature (1319)..(1319): n is a, c, g, or t
  misc_feature (1325)..(1325): n is a, c, g, or t
  misc_feature (1328)..(1328): n is a, c, g, or t
  misc_feature (1331)..(1332): n is a, c, g, or t
  misc_feature (1341)..(1341): n is a, c, g, or t
  misc_feature (1362)..(1362): n is a, c, g, or t
  misc_feature (1366)..(1366): n is a, c, g, or t
  misc_feature (1368)..(1368): n is a, c, g, or t
  misc_feature (1371)..(1371): n is a, c, g, or t
  misc_feature (1375)..(1376): n is a, c, g, or t
  misc_feature (1378)..(1378): n is a, c, g, or t
  misc_feature (1382)..(1382): n is a, c, g, or t
  misc_feature (1384)..(1384): n is a, c, g, or t
  misc_feature (1386)..(1387): n is a, c, g, or t
  misc_feature (1402)..(1402): n is a, c, g, or t
  misc_feature (1406)..(1406): n is a, c, g, or t
  misc_feature (1414)..(1414): n is a, c, g, or t
  misc_feature (1425)..(1426): n is a, c, g, or t
  misc_feature (1429)..(1429): n is a, c, g, or t
  misc_feature (1434)..(1434): n is a, c, g, or t
  misc_feature (1438)..(1438): n is a, c, g, or t
  misc_feature (1440)..(1440): n is a, c, g, or t
  misc_feature (1442)..(1442): n is a, c, g, or t
  misc_feature (1445)..(1446): n is a, c, g, or t
  misc_feature (1448)..(1448): n is a, c, g, or t
  misc_feature (1452)..(1452): n is a, c, g, or t
  misc_feature (1454)..(1454): n is a, c, g, or t
  misc_feature (1462)..(1462): n is a, c, g, or t
  misc_feature (1464)..(1464): n is a, c, g, or t
aatagagagattactatggagaggatcgcatcaccatcaccatcacggatcctatttaggtgacactatagaatcgtcgacccacgcgtccgctcgccgctgctgccgccgccgccgcccagagactgctgagcccgtccgtccgccgccaccacccactccggacacagaacatccagtcatggataaaaatgagctggttcagaaggccaaactggccgagcaggctgagcgatatgatgacatggcagcctgcatgaagtctgtaactgagcaaggagctgaattatccaatgaggagaggaatcttctctcagttgcttataaaaatgttgtaggagcccgtaggtcatcttggagggtcgtctcaagtattgaacaaaagacggaaggtgctgagaaaaaacagcagatggctcgagaatacagagagaaaattgagacggagctaagagatatctgcaatgatgtactgtctcttttggaaaagttcttgatccccaatgcttcacaagcagagagcaaagtcttctatttgaaaatgaaaggagattactaccgttacttggctgaggttgccgctggtgatgacaagaaagggattgtcgatcagtcacaacaagcataccaagaagcttttgaaatcagcaaaaaggaaatgcaaccaacacatcctatcagactgggtctggcccttaacttctctgtgttctattatgagattctgaactccccaananaaagcctgctctcttgcaaagacagcttttgatgaagccattgctgaaacttgatacattaagtggaagagtcatacaaagnacagcacgctaataatgcaattactganagacaactttgacattgtggnacatcggataccccaangaagacnancctgaancaggagaaaggaagggaaaatttaacccggccctcccaactttttgtctgccccctttccaaaaattaacncagtaaaccatttnttcatccatgcttgtcccnaaananttttttggtttacaattnagacngnttangttaccttcnatttnaatttcnaaattccccatggggntttatgtttaanatngggggantaaancccngtttancttnaggganntntccntttttcnncttanggnggccaanttgggaangggaatttttnantcnantttnaagggttgncnaaaantttggaantttnggngttcaaaaggccccgnaaaacnnntncttntnaanaaaaaaatntccannatttggttttncntnnnggnaaaaaagganctttnncccccccgggananattggngtnttnngttgtaacntaaggggggaaaccccccgcnaccntnaancgtnncngggnancnnggtacctttaacggnaggncttaaaantgctcttctcnnagngaaancctntntntgnncnggtntnttttttcntntt

SEQ ID NO: 697 - DNA, 1316 bp, Homo Sapiens
  misc_feature (1)..(1): n is a, c, g, or t
  misc_feature (905)..(905): n is a, c, g, or t
  misc_feature (926)..(926): n is a, c, g, or t
  misc_feature (934)..(934): n is a, c, g, or t
  misc_feature (966)..(966): n is a, c, g, or t
  misc_feature (981)..(981): n is a, c, g, or t
  misc_feature (987)..(987): n is a, c, g, or t
  misc_feature (995)..(995): n is a, c, g, or t
  misc_feature (1002)..(1002): n is a, c, g, or t
  misc_feature (1010)..(1010): n is a, c, g, or t
  misc_feature (1018)..(1018): n is a, c, g, or t
  misc_feature (1041)..(1041): n is a, c, g, or t
  misc_feature (1048)..(1048): n is a, c, g, or t
  misc_feature (1079)..(1079): n is a, c, g, or t
  misc_feature (1081)..(1081): n is a, c, g, or t
  misc_feature (1090)..(1090): n is a, c, g, or t
  misc_feature (1092)..(1092): n is a, c, g, or t
  misc_feature (1099)..(1099): n is a, c, g, or t
  misc_feature (1103)..(1104): n is a, c, g, or t
  misc_feature (1107)..(1107): n is a, c, g, or t
  misc_feature (1118)..(1118): n is a, c, g, or t
  misc_feature (1132)..(1132): n is a, c, g, or t
  misc_feature (1138)..(1138): n is a, c, g, or t
  misc_feature (1152)..(1152): n is a, c, g, or t
  misc_feature (1160)..(1160): n is a, c, g, or t
  misc_feature (1165)..(1165): n is a, c, g, or t
  misc_feature (1167)..(1167): n is a, c, g, or t
  misc_feature (1174)..(1174): n is a, c, g, or t
  misc_feature (1179)..(1179): n is a, c, g, or t
  misc_feature (1184)..(1184): n is a, c, g, or t
  misc_feature (1186)..(1186): n is a, c, g, or t
  misc_feature (1200)..(1200): n is a, c, g, or t
  misc_feature (1202)..(1202): n is a, c, g, or t
  misc_feature (1206)..(1207): n is a, c, g, or t
  misc_feature (1209)..(1211): n is a, c, g, or t
  misc_feature (1233)..(1233): n is a, c, g, or t
  misc_feature (1240)..(1240): n is a, c, g, or t
  misc_feature (1244)..(1244): n is a, c, g, or t
  misc_feature (1249)..(1249): n is a, c, g, or t
  misc_feature (1255)..(1255): n is a, c, g, or t
  misc_feature (1264)..(1264): n is a, c, g, or t
  misc_feature (1270)..(1271): n is a, c, g, or t
  misc_feature (1278)..(1278): n is a, c, g, or t
  misc_feature (1284)..(1284): n is a, c, g, or t
  misc_feature (1288)..(1288): n is a, c, g, or t
  misc_feature (1290)..(1291): n is a, c, g, or t
  misc_feature (1297)..(1298): n is a, c, g, or t
  misc_feature (1301)..(1302): n is a, c, g, or t
ngagaaattactatgagaggatcgcatcaccatcaccatcacggatcctatttaggtgacactatagaatcgtcgacccacgcgtccgagaaaattcacactggagaaaaaccttttgagtgtaaagattgcgggaaagctttcattcagaagtcaaacctcatcagacaccagagaactcacacaggagagaagccctttgtatgtaaggagtgtggaaaaaccttcagtggcaaatccaaccttactgagcatgagaaaatccatattggagagaagccttttaaatgtagtgaatgtggaacagcctttggccagaagaagtacctcataaaacatcagaacattcacactggagagaaaccctatgaatgtaacgaatgtggaaaagccttctctcagcgaacatcacttattgtacatgtgaggattcattcaggtgataaaccttacgaatgcaatgtttgtggaaaagccttctctcagagctcatctctcactgtgcatgtgagaagccatacaggggagaagccctatggttgtaatgaatgtgggaaagctttctctcagttctcaacccttgctctgcatttgagaatacacacaggtaagaagccttatcagtgcagtgaatgtgggaaagctttcagccagaagtcacaccacattagacaccagaaaattcatactcactaaaaaccccatgaaagccttgaaagtgggaaagctttcattagaaatttgcacctcatcatgccccagaagtaatcctgaagcaaagcaccacgaatgaggttaactttaacaagtactaaaaacttaagggacaccagaaaatttgtactgaagagaaagacatgcatatgattaaaaccctgtgtccaacagaaaaacctgcagcaganataatggtgaaagtttaggcncattttcnctaaaagtgggaacagaaaaatggaggcctgntttttattgctaccnccatanatctgganatcttcnccagtacnaaaaaaanttaagttgtaaatattggaaggnaccgacnaaaatagatgactggtcctccaccactaatntnaaaaccccngnggaatgnttgnnccnaaccaaaaaanttccaaaaaaaccntatgcntttttaaaatttgnaaaagganccagngnccccggnaaggngaaananggaccttttttttnangggnngnnnttttttccccggggggaaaaanacccggnactntcccnaagggnatcccgaanttaaanncaaattnggaaancttntnnaaaggnnttnnccctggaaaaggaa

SEQ ID NO: 698 - DNA, 1321 bp, Homo Sapiens
  misc_feature (1)..(2): n is a, c, g, or t
  misc_feature (4)..(4): n is a, c, g, or t
  misc_feature (914)..(914): n is a, c, g, or t
  misc_feature (938)..(938): n is a, c, g, or t
  misc_feature (944)..(944): n is a, c, g, or t
  misc_feature (967)..(967): n is a, c, g, or t
  misc_feature (1008)..(1008): n is a, c, g, or t
  misc_feature (1022)..(1022): n is a, c, g, or t
  misc_feature (1038)..(1038): n is a, c, g, or t
  misc_feature (1043)..(1043): n is a, c, g, or t
  misc_feature (1049)..(1049): n is a, c, g, or t
  misc_feature (1058)..(1058): n is a, c, g, or t
  misc_feature (1066)..(1066): n is a, c, g, or t
  misc_feature (1072)..(1072): n is a, c, g, or t
  misc_feature (1074)..(1074): n is a, c, g, or t
  misc_feature (1080)..(1080): n is a, c, g, or t
  misc_feature (1094)..(1094): n is a, c, g, or t
  misc_feature (1100)..(1100): n is a, c, g, or t
  misc_feature (1120)..(1120): n is a, c, g, or t
  misc_feature (1140)..(1140): n is a, c, g, or t
  misc_feature (1142)..(1143): n is a, c, g, or t
  misc_feature (1152)..(1152): n is a, c, g, or t
  misc_feature (1157)..(1157): n is a, c, g, or t
  misc_feature (1167)..(1167): n is a, c, g, or t
  misc_feature (1183)..(1183): n is a, c, g, or t
  misc_feature (1187)..(1187): n is a, c, g, or t
  misc_feature (1190)..(1190): n is a, c, g, or t
  misc_feature (1193)..(1193): n is a, c, g, or t
  misc_feature (1197)..(1197): n is a, c, g, or t
  misc_feature (1207)..(1207): n is a, c, g, or t
  misc_feature (1211)..(1211): n is a, c, g, or t
  misc_feature (1213)..(1213): n is a, c, g, or t
  misc_feature (1221)..(1221): n is a, c, g, or t
  misc_feature (1225)..(1225): n is a, c, g, or t
  misc_feature (1243)..(1243): n is a, c, g, or t
  misc_feature (1248)..(1249): n is a, c, g, or t
  misc_feature (1251)..(1251): n is a, c, g, or t
  misc_feature (1257)..(1257): n is a, c, g, or t
  misc_feature (1262)..(1262): n is a, c, g, or t
  misc_feature (1281)..(1281): n is a, c, g, or t
  misc_feature (1283)..(1284): n is a, c, g, or t
  misc_feature (1291)..(1291): n is a, c, g, or t
  misc_feature (1293)..(1293): n is a, c, g, or t
  misc_feature (1295)..(1297): n is a, c, g, or t
  misc_feature (1300)..(1301): n is a, c, g, or t
  misc_feature (1305)..(1305): n is a, c, g, or t
nnantagagaaattactatgagaggatcgcatcaccatcaccatcacggatcctatttaggtgacactatagaatcgtcgacccacgcgtccgggcccgaggggctgggagagtgcgggcgaggccgggagggctgggaccaagaatcgccttcagccctgtctggtgcatccttggcagaaagtgaggaggaaaacacccccattgttctttggcatggacacaagttcagtgggaggattagaattgactgatcagactcctgttttattagggagtacggccatggcaactagtctcacgaatgtaggaaactcatttagtggtccagctaatcctttagtgtctagatctaataagtttcagaactcgtcagtggaagatgatgatgatgttgtttttatcgaacctgtacaacctcccccaccttctgtaccagtggtagctgatcaaagaaccataacatttacatcatcaaaaaaatgaagaactacaaggaaatgattccaaaattactccttcctcaaaagagttggcatctcagaagggaagtgtaagtgagacaattgtcattgatgatgaagaggacatggaaacaaatcaagggcaagagaaaaattcctccaattttattgaacgaagacctcctgagactaaaaacagaaccaatgatgtggatttctccacttccagtttttcaagaagtaagaccaagactggagtaggaccttttaatcctggtagaatgaatgtggcaggagacgtttttcagaatggagaatctgcaactcatcataatcctgattcttggatctcccagtcagcttcatttccccgtaatcagaaacaaccaggggtggactctttatcaccagtggcctcacttcctaacagatttttccagccgtctgtcnaacagcagcctactaaaccagttnaagtcncttgtgcaaactgcaaaaaaccnttacagaagggccagacagcttatcacgaaaggatcgctcncctcttttgttctncactggctttctcctnctccnaaagcntgctcaaanaactctgngtttgngnaaaagnaggttacctttcanaaaatnactaagtgaatttggagtgnaaatttaaaaaaggaacaantnnaaactttgnaactnccttcagccnggggcatggaaaaagnttcngtnggnggcntggattaatnaaangncctaaaanattngcggaccccctggacctngtttnnanaacccnttttncggtaaggaaaaatttttntnnccaaaangngnnnttnngggnaaaaaaaaaaaaaaaa

SEQ ID NO: 699 - DNA, 1414 bp, Homo Sapiens
  misc_feature (750)..(750): n is a, c, g, or t
  misc_feature (809)..(809): n is a, c, g, or t
  misc_feature (833)..(833): n is a, c, g, or t
  misc_feature (840)..(840): n is a, c, g, or t
  misc_feature (848)..(848): n is a, c, g, or t
  misc_feature (857)..(857): n is a, c, g, or t
  misc_feature (862)..(862): n is a, c, g, or t
  misc_feature (886)..(886): n is a, c, g, or t
  misc_feature (895)..(895): n is a, c, g, or t
  misc_feature (899)..(900): n is a, c, g, or t
  misc_feature (908)..(908): n is a, c, g, or t
  misc_feature (910)..(910): n is a, c, g, or t
  misc_feature (912)..(912): n is a, c, g, or t
  misc_feature (922)..(923): n is a, c, g, or t
  misc_feature (931)..(931): n is a, c, g, or t
  misc_feature (938)..(938): n is a, c, g, or t
  misc_feature (945)..(947): n is a, c, g, or t
  misc_feature (949)..(949): n is a, c, g, or t
  misc_feature (955)..(955): n is a, c, g, or t
  misc_feature (970)..(970): n is a, c, g, or t
  misc_feature (976)..(976): n is a, c, g, or t
  misc_feature (981)..(981): n is a, c, g, or t
  misc_feature (992)..(992): n is a, c, g, or t
  misc_feature (1002)..(1002): n is a, c, g, or t
  misc_feature (1009)..(1009): n is a, c, g, or t
  misc_feature (1012)..(1012): n is a, c, g, or t
  misc_feature (1016)..(1016): n is a, c, g, or t
  misc_feature (1023)..(1023): n is a, c, g, or t
  misc_feature (1026)..(1027): n is a, c, g, or t
  misc_feature (1041)..(1041): n is a, c, g, or t
  misc_feature (1043)..(1043): n is a, c, g, or t
  misc_feature (1053)..(1054): n is a, c, g, or t
  misc_feature (1063)..(1063): n is a, c, g, or t
  misc_feature (1076)..(1076): n is a, c, g, or t
  misc_feature (1082)..(1082): n is a, c, g, or t
  misc_feature (1092)..(1092): n is a, c, g, or t
  misc_feature (1094)..(1095): n is a, c, g, or t
  misc_feature (1098)..(1098): n is a, c, g, or t
  misc_feature (1101)..(1101): n is a, c, g, or t
  misc_feature (1106)..(1106): n is a, c, g, or t
  misc_feature (1113)..(1113): n is a, c, g, or t
  misc_feature (1121)..(1123): n is a, c, g, or t
  misc_feature (1127)..(1127): n is a, c, g, or t
  misc_feature (1134)..(1134): n is a, c, g, or t
  misc_feature (1136)..(1136): n is a, c, g, or t
  misc_feature (1142)..(1142): n is a, c, g, or t
  misc_feature (1145)..(1145): n is a, c, g, or t
  misc_feature (1147)..(1147): n is a, c, g, or t
  misc_feature (1157)..(1158): n is a, c, g, or t
  misc_feature (1160)..(1160): n is a, c, g, or t
  misc_feature (1165)..(1165): n is a, c, g, or t
  misc_feature (1176)..(1176): n is a, c, g, or t
  misc_feature (1178)..(1178): n is a, c, g, or t
  misc_feature (1181)..(1181): n is a, c, g, or t
  misc_feature (1195)..(1195): n is a, c, g, or t
  misc_feature (1197)..(1197): n is a, c, g, or t
  misc_feature (1217)..(1217): n is a, c, g, or t
  misc_feature (1227)..(1227): n is a, c, g, or t
  misc_feature (1240)..(1240): n is a, c, g, or t
  misc_feature (1260)..(1260): n is a, c, g, or t
  misc_feature (1263)..(1263): n is a, c, g, or t
  misc_feature (1266)..(1266): n is a, c, g, or t
  misc_feature (1270)..(1270): n is a, c, g, or t
  misc_feature (1272)..(1272): n is a, c, g, or t
  misc_feature (1290)..(1290): n is a, c, g, or t
  misc_feature (1296)..(1296): n is a, c, g, or t
  misc_feature (1304)..(1304): n is a, c, g, or t
  misc_feature (1306)..(1307): n is a, c, g, or t
  misc_feature (1324)..(1325): n is a, c, g, or t
  misc_feature (1331)..(1331): n is a, c, g, or t
  misc_feature (1337)..(1338): n is a, c, g, or t
  misc_feature (1344)..(1344): n is a, c, g, or t
  misc_feature (1346)..(1347): n is a, c, g, or t
  misc_feature (1352)..(1352): n is a, c, g, or t
  misc_feature (1366)..(1367): n is a, c, g, or t
  misc_feature (1369)..(1369): n is a, c, g, or t
  misc_feature (1371)..(1372): n is a, c, g, or t
  misc_feature (1378)..(1378): n is a, c, g, or t
  misc_feature (1380)..(1380): n is a, c, g, or t
  misc_feature (1387)..(1388): n is a, c, g, or t
  misc_feature (1392)..(1392): n is a, c, g, or t
  misc_feature (1395)..(1395): n is a, c, g, or t
  misc_feature (1404)..(1404): n is a, c, g, or t
  misc_feature (1406)..(1406): n is a, c, g, or t
  misc_feature (1408)..(1408): n is a, c, g, or t
  misc_feature (1410)..(1411): n is a, c, g, or t
  misc_feature (1414)..(1414): n is a, c, g, or t
agagagaattactatgagaggatcgcatcaccatcaccatcacggatcctatttaggtgacactatagaatcgtcgacccacgcgtccggggacgcgggtttctgcctcaggccctgccctgctctactctgcgctctctgcccgcgccgccgccgcctcagcctcggccctgcgctgcgcgcccggcccgtgctgccatggcctgccgcccgcgaagcccgccgaggcatcagagccgctgcgacggtgacgccagcccgccgtcccccgcgcgatggagcctgggacggaagcgcagagccgacggcaggcgctggaggcccgaagacgccgaggaggcagagcaccgcggcgccgagcgcagacccgagagctttaccactcctgaaggccctaaaccccgttccagatgctctgactgggcaagtgcagttgaagaagatgaaatgaggaccagagttaacaaagaaatggcaagatataaaaggaaactcctcatcaatgactttggaagagagagaaaatcatcatcaggaagttctgattcaaaggagtctatgtctactgtgccggctgactttgagacagatgaaagtgtcctaatgaggagacagaagcagatcaactatgggaagaacacaattgcctacgatcgttatattaaagaagtcccaagacaccttcgacaacctggcattcatcccaagacccctaataaatttaagaagtatagtcgacgttcatgggancagcaaatcaaactctggaaggtggctctgcattttttgggatcctccagcggaagaangatgtgatttgcaagaaattacanccctgtnaaccttgnatctgcaanaaagnaagctcctaagccccaagaacaancttcttcangaannactttgantntntacttttggnnccacccanccaaggntgaaaannnantggaanagtcaagttggaaanaatganttttnatttgaaaacnttgttttaantgaaccnttnaaanaattttncanncaatgaaacttaantncccccctggnngggccaagnaaaaaaaaaaaancctccncccccaaatnanntgnaanggttnggccaancaccaaannntggngtggggncnttttanctngngggttttttnntnaccantccttttcccncnggncaaattatttttgncntttttctttaaaaaattttnttttttatgntaagggggaatantttctccggtttaaatttgnaanggnggcntnctcccgaaaaattatttnaatctntttttccnanntttttgtttaaaccccnnttcccnccgggnnatacgnannctttnataattgtttttcnngnanntttttntnttttttnngggngantttttatantncncnntan

SEQ ID NO: 700 - DNA, 1348 bp, Homo Sapiens
  misc_feature (723)..(723): n is a, c, g, or t
  misc_feature (725)..(725): n is a, c, g, or t
  misc_feature (873)..(873): n is a, c, g, or t
  misc_feature (878)..(878): n is a, c, g, or t
  misc_feature (897)..(897): n is a, c, g, or t
  misc_feature (900)..(900): n is a, c, g, or t
  misc_feature (902)..(902): n is a, c, g, or t
  misc_feature (908)..(908): n is a, c, g, or t
  misc_feature (936)..(936): n is a, c, g, or t
  misc_feature (939)..(939): n is a, c, g, or t
  misc_feature (951)..(951): n is a, c, g, or t
  misc_feature (954)..(954): n is a, c, g, or t
  misc_feature (973)..(973): n is a, c, g, or t
  misc_feature (976)..(976): n is a, c, g, or t
  misc_feature (980)..(980): n is a, c, g, or t
  misc_feature (985)..(985): n is a, c, g, or t
  misc_feature (987)..(987): n is a, c, g, or t
  misc_feature (991)..(991): n is a, c, g, or t
  misc_feature (999)..(999): n is a, c, g, or t
  misc_feature (1017)..(1017): n is a, c, g, or t
  misc_feature (1054)..(1055): n is a, c, g, or t
  misc_feature (1058)..(1058): n is a, c, g, or t
  misc_feature (1062)..(1062): n is a, c, g, or t
  misc_feature (1066)..(1066): n is a, c, g, or t
  misc_feature (1070)..(1070): n is a, c, g, or t
  misc_feature (1087)..(1087): n is a, c, g, or t
  misc_feature (1093)..(1093): n is a, c, g, or t
  misc_feature (1100)..(1100): n is a, c, g, or t
  misc_feature (1121)..(1121): n is a, c, g, or t
  misc_feature (1134)..(1134): n is a, c, g, or t
  misc_feature (1140)..(1140): n is a, c, g, or t
  misc_feature (1145)..(1145): n is a, c, g, or t
  misc_feature (1153)..(1153): n is a, c, g, or t
  misc_feature (1164)..(1164): n is a, c, g, or t
  misc_feature (1166)..(1166): n is a, c, g, or t
  misc_feature (1175)..(1175): n is a, c, g, or t
  misc_feature (1179)..(1179): n is a, c, g, or t
  misc_feature (1183)..(1184): n is a, c, g, or t
  misc_feature (1189)..(1189): n is a, c, g, or t
  misc_feature (1192)..(1192): n is a, c, g, or t
  misc_feature (1198)..(1198): n is a, c, g, or t
  misc_feature (1207)..(1207): n is a, c, g, or t
  misc_feature (1220)..(1221): n is a, c, g, or t
  misc_feature (1236)..(1236): n is a, c, g, or t
  misc_feature (1243)..(1243): n is a, c, g, or t
  misc_feature (1258)..(1259): n is a, c, g, or t
  misc_feature (1264)..(1264): n is a, c, g, or t
  misc_feature (1272)..(1273): n is a, c, g, or t
  misc_feature (1277)..(1277): n is a, c, g, or t
  misc_feature (1287)..(1291): n is a, c, g, or t
  misc_feature (1297)..(1297): n is a, c, g, or t
  misc_feature (1305)..(1307): n is a, c, g, or t
  misc_feature (1313)..(1314): n is a, c, g, or t
  misc_feature (1316)..(1320): n is a, c, g, or t
  misc_feature (1324)..(1324): n is a, c, g, or t
  misc_feature (1328)..(1330): n is a, c, g, or t
  misc_feature (1348)..(1348): n is a, c, g, or t
tagagagaattactatgagaggatcgcatcaccatcaccatcacggatcctatttaggtgacactatagaatcgtcgacccacgcgtccgcccgggcgacagcggtggcggctcctcggggtgctcggctccctcccacctaggccggccccggcccgactcgccctcagaaactcactgtttggggctgcggactttctcgtcgtgccccacaaaagtaaagcttggggacctggggggagccggaagtatcgcttcgagatccccaaatactatcggggaaacggaagtggccgtcggtggcagagacctgtcggccatggagcctaatgatagtaccagtaccgctgtggaggagcctgacagcttggaggtgttggtgaagaccttggactctcaaactcgtacctttattgtgggggcccagatgaatgtaaaagagtttaaggagcacattgctgcctctgtcagcatcccatctgaaaaacaacggctcatttaccagggacgagttctgcaagatgataagaagcttcaggaatacaatgttgggggaaaggttatccacctggtggaacgggctcctcctcagactcacctcccttctggggcatcttctgggacggggtctgcctcagccactcatggtgggggatccccccctggtactcgggggcctggggcctctgttcatgaccggaatgccaacagctatgtcatggntnggaaccttcaatcttcctagtgacggctctgctgtggatgttcacatcaacatggaacaggccccgattcagagtgagccccggggtacggctggtgatggctcaccacatgatcagggatatacagaccttactatcccgaatggantgtcnaagaaggccccaaccgcancanantcagcngcccccgcagccaccggctgtgaccccnganccagtaaccttnaanctctcaacatcaaaaccanttnaaantgaancncctnccccggancccctggaggcaaaaaantggaagaacgtgccccaacccaaaaaccgggaactcnntcntggnccancccnagggggccaaaaccttnccccgnaaaaaantgcacccaaaccatctttccntggggaaaaattncaaggntctcnagaaactnaccggctgggnantcccccccncccntttnnaaccnaanaaaagntttgggggntgttgccccccgnnataaaaaaaaattcnaagggcnggggaaaaatacccnnttttnaatttttnngggnaaaccccccnnnnngggaancctttttnnntttaanngnnnnnaaangggnnnccccccaaccccttgggn

SEQ ID NO: 701 - DNA, 1364 bp, Homo Sapiens
  misc_feature (840)..(840): n is a, c, g, or t
  misc_feature (872)..(872): n is a, c, g, or t
  misc_feature (900)..(900): n is a, c, g, or t
  misc_feature (925)..(925): n is a, c, g, or t
  misc_feature (928)..(928): n is a, c, g, or t
  misc_feature (936)..(936): n is a, c, g, or t
  misc_feature (956)..(956): n is a, c, g, or t
  misc_feature (965)..(965): n is a, c, g, or t
  misc_feature (976)..(976): n is a, c, g, or t
  misc_feature (980)..(980): n is a, c, g, or t
  misc_feature (994)..(994): n is a, c, g, or t
  misc_feature (997)..(998): n is a, c, g, or t
  misc_feature (1001)..(1001): n is a, c, g, or t
  misc_feature (1006)..(1006): n is a, c, g, or t
  misc_feature (1014)..(1014): n is a, c, g, or t
  misc_feature (1016)..(1016): n is a, c, g, or t
  misc_feature (1019)..(1019): n is a, c, g, or t
  misc_feature (1024)..(1025): n is a, c, g, or t
  misc_feature (1029)..(1029): n is a, c, g, or t
  misc_feature (1037)..(1037): n is a, c, g, or t
  misc_feature (1043)..(1043): n is a, c, g, or t
  misc_feature (1047)..(1047): n is a, c, g, or t
  misc_feature (1049)..(1049): n is a, c, g, or t
  misc_feature (1060)..(1060): n is a, c, g, or t
  misc_feature (1073)..(1073): n is a, c, g, or t
  misc_feature (1077)..(1077): n is a, c, g, or t
  misc_feature (1079)..(1079): n is a, c, g, or t
  misc_feature (1083)..(1083): n is a, c, g, or t
  misc_feature (1085)..(1086): n is a, c, g, or t
  misc_feature (1094)..(1094): n is a, c, g, or t
  misc_feature (1096)..(1097): n is a, c, g, or t
  misc_feature (1099)..(1100): n is a, c, g, or t
  misc_feature (1108)..(1109): n is a, c, g, or t
  misc_feature (1111)..(1111): n is a, c, g, or t
  misc_feature (1115)..(1116): n is a, c, g, or t
  misc_feature (1118)..(1119): n is a, c, g, or t
  misc_feature (1130)..(1130): n is a, c, g, or t
  misc_feature (1134)..(1135): n is a, c, g, or t
  misc_feature (1138)..(1138): n is a, c, g, or t
  misc_feature (1140)..(1140): n is a, c, g, or t
  misc_feature (1144)..(1144): n is a, c, g, or t
  misc_feature (1150)..(1150): n is a, c, g, or t
  misc_feature (1157)..(1159): n is a, c, g, or t
  misc_feature (1161)..(1161): n is a, c, g, or t
  misc_feature (1164)..(1164): n is a, c, g, or t
  misc_feature (1170)..(1170): n is a, c, g, or t
  misc_feature (1174)..(1175): n is a, c, g, or t
  misc_feature (1177)..(1177): n is a, c, g, or t
  misc_feature (1179)..(1179): n is a, c, g, or t
  misc_feature (1187)..(1187): n is a, c, g, or t
  misc_feature (1195)..(1195): n is a, c, g, or t
  misc_feature (1201)..(1201): n is a, c, g, or t
  misc_feature (1205)..(1205): n is a, c, g, or t
  misc_feature (1207)..(1211): n is a, c, g, or t
  misc_feature (1215)..(1218): n is a, c, g, or t
  misc_feature (1221)..(1222): n is a, c, g, or t
  misc_feature (1224)..(1224): n is a, c, g, or t
  misc_feature (1226)..(1226): n is a, c, g, or t
  misc_feature (1228)..(1228): n is a, c, g, or t
  misc_feature (1232)..(1232): n is a, c, g, or t
  misc_feature (1234)..(1234): n is a, c, g, or t
  misc_feature (1239)..(1243): n is a, c, g, or t
  misc_feature (1248)..(1249): n is a, c, g, or t
  misc_feature (1251)..(1251): n is a, c, g, or t
  misc_feature (1257)..(1259): n is a, c, g, or t
  misc_feature (1261)..(1261): n is a, c, g, or t
  misc_feature (1265)..(1265): n is a, c, g, or t
  misc_feature (1267)..(1270): n is a, c, g, or t
  misc_feature (1272)..(1277): n is a, c, g, or t
  misc_feature (1281)..(1283): n is a, c, g, or t
  misc_feature (1289)..(1293): n is a, c, g, or t
  misc_feature (1297)..(1298): n is a, c, g, or t
  misc_feature (1300)..(1300): n is a, c, g, or t
  misc_feature (1309)..(1309): n is a, c, g, or t
  misc_feature (1312)..(1312): n is a, c, g, or t
  misc_feature (1322)..(1322): n is a, c, g, or t
  misc_feature (1326)..(1327): n is a, c, g, or t
  misc_feature (1334)..(1337): n is a, c, g, or t
  misc_feature (1340)..(1345): n is a, c, g, or t
  misc_feature (1347)..(1350): n is a, c, g, or t
  misc_feature (1352)..(1352): n is a, c, g, or t
  misc_feature (1354)..(1363): n is a, c, g, or t
gagaaattactatgagaggatcgcatcaccatcaccatcacggatcctatttaggtgacactatagaatcgtcgacccacgcgtccgcggacgcgtgggccgccccctcgggagccaccatgttggtgataccccccggactgagcgaggaagaggaggctctgcagaagaaattcaacaagctcaagaaaaagaaaaaggcattgctggctctgaagaagcaaagtagcagcagcacaaccagccaaggtggtgtcaaacgctcactatcagagcagcctgtcatggacacagccacagcaacagagcaggcaaagcagctggtgaagtcaggagccatcagtgccatcaaggctgagaccaagaactcaggcttcaagcgttctcgaacccttgaggggaagttaaaggaccccgagaagggaccagtccccactttccagccgttccagaggagcatatctgctgatgatgacctgcaagagtcatccagacgtccccagaggaaatctctgtatgagagctttgtgtcttctagtgatcgacttcgagaactaggaccagatggagaagaggcagagggcccaggggctggtgatggtccccctcgaagctttgactggggctatgaagaacgcagtggtgcccactcctcagcctcccctccccgaagccgcagccgggaccgcagccatgagaggaaccgggacagagaccgagatcgggagcgggatcgagaccgggatcgagacagagacagagagcgggacagggatcgggatcgggatcgagatcgagaccgggaacgggacagggatcgggagcgggatcgagaccganaccgagagggtcctttccgcaggtcggattcnttccctgaacggcgagcccctaggaaanggaaatactctctatgtatatgganaanacatgacncccacccttctccggggggncttctctcntttggaaactncatngacctctcctgganccnnccnaaaantgtgcctncntcnccttnnaaanatggatcncaaatnaggncnttgttgaactnacgggacccaggnggantntgtnanntcaaatcnanntnncccaaaannancccnngnnggatgccctantggnnaantntgtntggggntcccctnnntntcnaaaaancccnnangntttccccnggaaaaangacccnattntnnnnngggnnnnctnncnangnaaancnttggnnnnnttttnngnaaaaannngntttntnnnncnnnnnncccnnngggggnnnnnaaanncnggggggaanttnaaaaaaaaangggnnccccccnnnnggnnnnnntnnnntntnnnnnnnnnnc

SEQ ID NO: 702 - DNA, 1380 bp, Homo Sapiens
  misc_feature (788)..(788): n is a, c, g, or t
  misc_feature (808)..(808): n is a, c, g, or t
  misc_feature (834)..(834): n is a, c, g, or t
  misc_feature (869)..(869): n is a, c, g, or t
  misc_feature (880)..(880): n is a, c, g, or t
  misc_feature (882)..(882): n is a, c, g, or t
  misc_feature (890)..(890): n is a, c, g, or t
  misc_feature (897)..(897): n is a, c, g, or t
  misc_feature (908)..(908): n is a, c, g, or t
  misc_feature (928)..(928): n is a, c, g, or t
  misc_feature (932)..(932): n is a, c, g, or t
  misc_feature (942)..(943): n is a, c, g, or t
  misc_feature (952)..(952): n is a, c, g, or t
  misc_feature (958)..(958): n is a, c, g, or t
  misc_feature (964)..(964): n is a, c, g, or t
  misc_feature (967)..(967): n is a, c, g, or t
  misc_feature (969)..(969): n is a, c, g, or t
  misc_feature (977)..(977): n is a, c, g, or t
  misc_feature (982)..(982): n is a, c, g, or t
  misc_feature (987)..(987): n is a, c, g, or t
  misc_feature (1012)..(1012): n is a, c, g, or t
  misc_feature (1014)..(1014): n is a, c, g, or t
  misc_feature (1016)..(1016): n is a, c, g, or t
  misc_feature (1034)..(1034): n is a, c, g, or t
  misc_feature (1048)..(1048): n is a, c, g, or t
  misc_feature (1050)..(1050): n is a, c, g, or t
  misc_feature (1055)..(1055): n is a, c, g, or t
  misc_feature (1065)..(1065): n is a, c, g, or t
  misc_feature (1074)..(1074): n is a, c, g, or t
  misc_feature (1079)..(1079): n is a, c, g, or t
  misc_feature (1081)..(1081): n is a, c, g, or t
  misc_feature (1083)..(1083): n is a, c, g, or t
  misc_feature (1097)..(1098): n is a, c, g, or t
  misc_feature (1104)..(1104): n is a, c, g, or t
  misc_feature (1106)..(1107): n is a, c, g, or t
  misc_feature (1109)..(1109): n is a, c, g, or t
  misc_feature (1121)..(1121): n is a, c, g, or t
  misc_feature (1129)..(1129): n is a, c, g, or t
  misc_feature (1132)..(1133): n is a, c, g, or t
  misc_feature (1135)..(1136): n is a, c, g, or t
  misc_feature (1140)..(1140): n is a, c, g, or t
  misc_feature (1149)..(1149): n is a, c, g, or t
  misc_feature (1153)..(1153): n is a, c, g, or t
  misc_feature (1155)..(1155): n is a, c, g, or t
  misc_feature (1159)..(1160): n is a, c, g, or t
  misc_feature (1164)..(1164): n is a, c, g, or t
  misc_feature (1168)..(1168): n is a, c, g, or t
  misc_feature (1182)..(1182): n is a, c, g, or t
  misc_feature (1185)..(1186): n is a, c, g, or t
  misc_feature (1189)..(1191): n is a, c, g, or t
  misc_feature (1202)..(1202): n is a, c, g, or t
  misc_feature (1211)..(1211): n is a, c, g, or t
  misc_feature (1215)..(1215): n is a, c, g, or t
  misc_feature (1217)..(1217): n is a, c, g, or t
  misc_feature (1219)..(1220): n is a, c, g, or t
  misc_feature (1224)..(1225): n is a, c, g, or t
  misc_feature (1230)..(1230): n is a, c, g, or t
  misc_feature (1234)..(1236): n is a, c, g, or t
  misc_feature (1239)..(1239): n is a, c, g, or t
  misc_feature (1241)..(1241): n is a, c, g, or t
  misc_feature (1248)..(1250): n is a, c, g, or t
  misc_feature (1253)..(1253): n is a, c, g, or t
  misc_feature (1255)..(1255): n is a, c, g, or t
  misc_feature (1260)..(1299): n is a, c, g, or t
  misc_feature (1301)..(1309): n is a, c, g, or t
  misc_feature (1311)..(1316): n is a, c, g, or t
  misc_feature (1319)..(1320): n is a, c, g, or t
  misc_feature (1322)..(1345): n is a, c, g, or t
  misc_feature (1347)..(1356): n is a, c, g, or t
  misc_feature (1358)..(1366): n is a, c, g, or t
  misc_feature (1368)..(1370): n is a, c, g, or t
  misc_feature (1374)..(1374): n is a, c, g, or t
  misc_feature (1376)..(1376): n is a, c, g, or t
  misc_feature (1379)..(1379): n is a, c, g, or t
aatagagaaattaactatgagaggatcgcatcaccatcaccatcacggatcctatttaggtgacactatagaatcgtcgacccacgcgtccggcacctcctcccgtcaggcgctttctcggacgccttgcccagcgggccgcccgaccccctgcaccatggaccccgctcgccccctggggctgtcgattctgctgcttttcctgacggaggctgcactgggcgatgctgctcaggagccaacaggaaataacgcggagatctgtctcctgcccctagactacggaccctgccgggccctacttctccgttactactacgacaggtacacgcagagctgccgccagttcctgtacgggggctgcgagggcaacgccaacaatttctacacctgggaggcttgcgacgatgcttgctggaggatagaaaaagttcccaaagtttgccggctgcaagtgagtgtggacgaccagtgtgaggggtccacagaaaagtatttctttaatctaagttccatgacatgtgaaaaattcttttccggtgggtgtcaccggaaccggattgagaacaggtttccagatgaagctacttgtatgggcttctgcgcaccaaagaaaattccatcattttgctacagtccaaaagatgagggactgtgctctgccaatgtgactcgctattattttaatccaagatacagaacctgtgatgctttcacctatactggctgtggagggaatgacaataactttgttagcagggaggattgcaaacgtgcatgtgcaaaanctttgaaaaagaaaaagaanatgccaaagcttcgctttgccagtanaatccggaaaattcggaaaaaagcaattttaaaanattcttaatangncatcttgntttggcntttatggcctnatttgccctttaagggttgnaacngaaaaataannatgaaagcntgaagnaaaacnaantntttggggnatttntttcncccagtttttttattaataacaagncncntttttaaaaaaatttggnaattttttttaaananaaaanaacctgctantcaaaatgngaaancnanccatttttaaattnnggttcnanntnttttgggaaaantaaatttnttnncnnggtnaaaaaaaanaaancnaaannaacncccncttttttttggggncannttnnnaattttaaaanaaaattttntttnanannattnnaaaantttnnnttngntttttannntananaaaannnnnnnnnnnnnnnnnnnnnnnnnnnnnnnnnnnnnnnnannnnnnnnnannnnnnaannannnnnnnnnnnnnnnnnnnnnnnnannnnnnnnnntnnnnnnnnntnnnatananaana

SEQ ID NO: 703 - DNA, 1278 bp, Homo Sapiens
  misc_feature (1)..(1): n is a, c, g, or t
  misc_feature (690)..(690): n is a, c, g, or t
  misc_feature (715)..(715): n is a, c, g, or t
  misc_feature (718)..(718): n is a, c, g, or t
  misc_feature (720)..(720): n is a, c, g, or t
  misc_feature (724)..(724): n is a, c, g, or t
  misc_feature (737)..(739): n is a, c, g, or t
  misc_feature (741)..(741): n is a, c, g, or t
  misc_feature (750)..(750): n is a, c, g, or t
  misc_feature (756)..(756): n is a, c, g, or t
  misc_feature (775)..(775): n is a, c, g, or t
  misc_feature (777)..(778): n is a, c, g, or t
  misc_feature (801)..(801): n is a, c, g, or t
  misc_feature (818)..(818): n is a, c, g, or t
  misc_feature (820)..(820): n is a, c, g, or t
  misc_feature (826)..(826): n is a, c, g, or t
  misc_feature (830)..(830): n is a, c, g, or t
  misc_feature (835)..(835): n is a, c, g, or t
  misc_feature (839)..(840): n is a, c, g, or t
  misc_feature (844)..(844): n is a, c, g, or t
  misc_feature (847)..(847): n is a, c, g, or t
  misc_feature (854)..(857): n is a, c, g, or t
  misc_feature (862)..(862): n is a, c, g, or t
  misc_feature (864)..(865): n is a, c, g, or t
  misc_feature (868)..(869): n is a, c, g, or t
  misc_feature (871)..(872): n is a, c, g, or t
  misc_feature (879)..(879): n is a, c, g, or t
  misc_feature (882)..(888): n is a, c, g, or t
  misc_feature (891)..(891): n is a, c, g, or t
  misc_feature (893)..(893): n is a, c, g, or t
  misc_feature (898)..(898): n is a, c, g, or t
  misc_feature (900)..(900): n is a, c, g, or t
  misc_feature (910)..(910): n is a, c, g, or t
  misc_feature (913)..(913): n is a, c, g, or t
  misc_feature (916)..(917): n is a, c, g, or t
  misc_feature (924)..(924): n is a, c, g, or t
  misc_feature (927)..(928): n is a, c, g, or t
  misc_feature (932)..(932): n is a, c, g, or t
  misc_feature (935)..(935): n is a, c, g, or t
  misc_feature (937)..(938): n is a, c, g, or t
  misc_feature (944)..(945): n is a, c, g, or t
  misc_feature (950)..(950): n is a, c, g, or t
  misc_feature (952)..(952): n is a, c, g, or t
  misc_feature (956)..(956): n is a, c, g, or t
  misc_feature (962)..(962): n is a, c, g, or t
  misc_feature (966)..(966): n is a, c, g, or t
  misc_feature (971)..(971): n is a, c, g, or t
  misc_feature (973)..(974): n is a, c, g, or t
  misc_feature (976)..(976): n is a, c, g, or t
  misc_feature (979)..(981): n is a, c, g, or t
  misc_feature (983)..(983): n is a, c, g, or t
  misc_feature (986)..(986): n is a, c, g, or t
  misc_feature (988)..(988): n is a, c, g, or t
  misc_feature (1003)..(1007): n is a, c, g, or t
  misc_feature (1010)..(1013): n is a, c, g, or t
  misc_feature (1018)..(1020): n is a, c, g, or t
  misc_feature (1024)..(1033): n is a, c, g, or t
  misc_feature (1035)..(1035): n is a, c, g, or t
  misc_feature (1039)..(1042): n is a, c, g, or t
  misc_feature (1045)..(1054): n is a, c, g, or t
  misc_feature (1056)..(1057): n is a, c, g, or t
  misc_feature (1060)..(1060): n is a, c, g, or t
  misc_feature (1063)..(1075): n is a, c, g, or t
  misc_feature (1079)..(1081): n is a, c, g, or t
  misc_feature (1083)..(1085): n is a, c, g, or t
  misc_feature (1095)..(1097): n is a, c, g, or t
  misc_feature (1103)..(1105): n is a, c, g, or t
  misc_feature (1107)..(1107): n is a, c, g, or t
  misc_feature (1113)..(1138): n is a, c, g, or t
  misc_feature (1143)..(1148): n is a, c, g, or t
  misc_feature (1154)..(1166): n is a, c, g, or t
  misc_feature (1170)..(1188): n is a, c, g, or t
  misc_feature (1190)..(1190): n is a, c, g, or t
  misc_feature (1193)..(1206): n is a, c, g, or t
  misc_feature (1208)..(1222): n is a, c, g, or t
  misc_feature (1227)..(1244): n is a, c, g, or t
  misc_feature (1247)..(1247): n is a, c, g, or t
  misc_feature (1249)..(1259): n is a, c, g, or t
  misc_feature (1261)..(1268): n is a, c, g, or t
  misc_feature (1270)..(1271): n is a, c, g, or t
  misc_feature (1273)..(1278): n is a, c, g, or t
naattagagaaattactatgagaggatcgcatcaccatcaccatcacggatcctatttaggtgacactatagaatcgtcgacccacgcgtccggccgccggagccgcgaggccaactgtcgcctggttgggcccggaaatgggacgtcgcgctttctcagggagcgtagaagcagccagggcctctccaagccgctgctgtgacagaaagtgagtgagctgccggaggatgtccaccgccacgacagtcgcccccgcggggatcccggcgaccccgggccctgtgaacccaccccccccggaggtctccaaccccagcaagcccggccgcaagaccaaccagctgcagtacatgcagaatgtggtggtgaagacgctctggaaacaccagttcgcctggcccttctaccagcccgtggacgcaatcaaattgaacctgccggattatcataaaataattaaaaacccaatggatatggggactattaagaagagactagaaaataattattattggagtgcaagcgaatgtatgcaggacttcaacaccatgtttacaaattgttacatttataacaagcccacagatgacatagtgctaatggcccaagctttaaagaaaatttttctacaaaaaagtggcccaaatgccccaagaggaagttgaattattacccccctgctcccaaanggcaaaggtcggaaacccggctgcnggnancccnaaaacgcaagtannnancaaagtggngggcgntgttcttttgttttccccnanngaaccccctttttaaaaaggtgncccccccaaccgttttncnaaaaancccngtttntttnnttgnccnccccttnnnncaaancnnttnntnngaaaaanttnnnnnnnggntnccaantnccccccaaanttnggnncccccanttnntttnttngnnaaaaannaattntncccngggggncccntcctnanncnccnnntnttntnaaaaaaaaaaagggnnnnnaannnnaaaannnaaannnnnnnnnntncccnnnnaannnnnnnnnntnnttnttnnnnnnnnnnnnnaaannnannncccccccccnnntttttnnnanaccccnnnnnnnnnnnnnnnnnnnnnnnnnnccccnnnnnnaaaaannnnnnnnnnnnncccnnnnnnnnnnnnnnnnnnnanaannnnnnnnnnnnnnannnnnnnnnnnnnnnccccnnnnnnnnnnnnnnnnnnaanannnnnnnnnnntnnnnnnnnannannnnnn

SEQ ID NO: 704 - DNA, 1355 bp, Homo Sapiens
  misc_feature (1)..(1): n is a, c, g, or t
  misc_feature (99)..(101): n is a, c, g, or t
  misc_feature (104)..(104): n is a, c, g, or t
  misc_feature (108)..(108): n is a, c, g, or t
  misc_feature (111)..(111): n is a, c, g, or t
  misc_feature (117)..(118): n is a, c, g, or t
  misc_feature (126)..(126): n is a, c, g, or t
  misc_feature (168)..(168): n is a, c, g, or t
  misc_feature (171)..(171): n is a, c, g, or t
  misc_feature (174)..(174): n is a, c, g, or t
  misc_feature (180)..(180): n is a, c, g, or t
  misc_feature (184)..(184): n is a, c, g, or t
  misc_feature (186)..(186): n is a, c, g, or t
  misc_feature (190)..(191): n is a, c, g, or t
  misc_feature (197)..(197): n is a, c, g, or t
  misc_feature (206)..(206): n is a, c, g, or t
  misc_feature (211)..(211): n is a, c, g, or t
  misc_feature (213)..(213): n is a, c, g, or t
  misc_feature (222)..(222): n is a, c, g, or t
  misc_feature (225)..(225): n is a, c, g, or t
  misc_feature (228)..(228): n is a, c, g, or t
  misc_feature (230)..(230): n is a, c, g, or t
  misc_feature (234)..(234): n is a, c, g, or t
  misc_feature (237)..(237): n is a, c, g, or t
  misc_feature (270)..(270): n is a, c, g, or t
  misc_feature (306)..(306): n is a, c, g, or t
  misc_feature (315)..(315): n is a, c, g, or t
  misc_feature (319)..(319): n is a, c, g, or t
  misc_feature (323)..(323): n is a, c, g, or t
  misc_feature (325)..(326): n is a, c, g, or t
  misc_feature (341)..(343): n is a, c, g, or t
  misc_feature (348)..(348): n is a, c, g, or t
  misc_feature (360)..(360): n is a, c, g, or t
  misc_feature (368)..(369): n is a, c, g, or t
  misc_feature (377)..(377): n is a, c, g, or t
  misc_feature (385)..(385): n is a, c, g, or t
  misc_feature (393)..(393): n is a, c, g, or t
  misc_feature (406)..(406): n is a, c, g, or t
  misc_feature (414)..(414): n is a, c, g, or t
  misc_feature (420)..(420): n is a, c, g, or t
  misc_feature (428)..(429): n is a, c, g, or t
  misc_feature (434)..(434): n is a, c, g, or t
  misc_feature (441)..(441): n is a, c, g, or t
  misc_feature (444)..(444): n is a, c, g, or t
  misc_feature (449)..(449): n is a, c, g, or t
  misc_feature (455)..(455): n is a, c, g, or t
  misc_feature (469)..(469): n is a, c, g, or t
  misc_feature (472)..(472): n is a, c, g, or t
  misc_feature (479)..(479): n is a, c, g, or t
  misc_feature (482)..(482): n is a, c, g, or t
  misc_feature (484)..(484): n is a, c, g, or t
  misc_feature (494)..(494): n is a, c, g, or t
  misc_feature (498)..(498): n is a, c, g, or t
  misc_feature (501)..(501): n is a, c, g, or t
  misc_feature (510)..(510): n is a, c, g, or t
  misc_feature (514)..(514): n is a, c, g, or t
  misc_feature (520)..(520): n is a, c, g, or t
  misc_feature (529)..(529): n is a, c, g, or t
  misc_feature (538)..(538): n is a, c, g, or t
  misc_feature (573)..(573): n is a, c, g, or t
  misc_feature (577)..(577): n is a, c, g, or t
  misc_feature (582)..(582): n is a, c, g, or t
  misc_feature (591)..(591): n is a, c, g, or t
  misc_feature (594)..(594): n is a, c, g, or t
  misc_feature (598)..(598): n is a, c, g, or t
  misc_feature (611)..(612): n is a, c, g, or t
  misc_feature (619)..(619): n is a, c, g, or t
  misc_feature (636)..(636): n is a, c, g, or t
  misc_feature (641)..(641): n is a, c, g, or t
  misc_feature (647)..(647): n is a, c, g, or t
  misc_feature (665)..(665): n is a, c, g, or t
  misc_feature (710)..(710): n is a, c, g, or t
  misc_feature (725)..(725): n is a, c, g, or t
  misc_feature (739)..(739): n is a, c, g, or t
  misc_feature (746)..(747): n is a, c, g, or t
  misc_feature (764)..(764): n is a, c, g, or t
  misc_feature (771)..(771): n is a, c, g, or t
  misc_feature (811)..(811): n is a, c, g, or t
  misc_feature (827)..(827): n is a, c, g, or t
  misc_feature (834)..(834): n is a, c, g, or t
  misc_feature (853)..(853): n is a, c, g, or t
  misc_feature (858)..(858): n is a, c, g, or t
  misc_feature (897)..(897): n is a, c, g, or t
  misc_feature (903)..(904): n is a, c, g, or t
  misc_feature (917)..(917): n is a, c, g, or t
  misc_feature (941)..(941): n is a, c, g, or t
  misc_feature (943)..(943): n is a, c, g, or t
  misc_feature (945)..(945): n is a, c, g, or t
  misc_feature (948)..(948): n is a, c, g, or t
  misc_feature (962)..(962): n is a, c, g, or t
  misc_feature (979)..(979): n is a, c, g, or t
  misc_feature (989)..(989): n is a, c, g, or t
  misc_feature (995)..(995): n is a, c, g, or t
  misc_feature (998)..(998): n is a, c, g, or t
  misc_feature (1001)..(1001): n is a, c, g, or t
  misc_feature (1016)..(1016): n is a, c, g, or t
  misc_feature (1035)..(1035): n is a, c, g, or t
  misc_feature (1039)..(1039): n is a, c, g, or t
  misc_feature (1052)..(1052): n is a, c, g, or t
  misc_feature (1060)..(1060): n is a, c, g, or t
  misc_feature (1068)..(1070): n is a, c, g, or t
  misc_feature (1072)..(1072): n is a, c, g, or t
  misc_feature (1074)..(1074): n is a, c, g, or t
  misc_feature (1077)..(1077): n is a, c, g, or t
  misc_feature (1084)..(1084): n is a, c, g, or t
  misc_feature (1091)..(1091): n is a, c, g, or t
  misc_feature (1094)..(1094): n is a, c, g, or t
  misc_feature (1096)..(1097): n is a, c, g, or t
  misc_feature (1114)..(1115): n is a, c, g, or t
  misc_feature (1119)..(1119): n is a, c, g, or t
  misc_feature (1132)..(1132): n is a, c, g, or t
  misc_feature (1136)..(1137): n is a, c, g, or t
  misc_feature (1139)..(1141): n is a, c, g, or t
  misc_feature (1145)..(1145): n is a, c, g, or t
  misc_feature (1152)..(1156): n is a, c, g, or t
  misc_feature (1168)..(1168): n is a, c, g, or t
  misc_feature (1183)..(1184): n is a, c, g, or t
  misc_feature (1186)..(1187): n is a, c, g, or t
  misc_feature (1194)..(1194): n is a, c, g, or t
  misc_feature (1198)..(1198): n is a, c, g, or t
  misc_feature (1200)..(1200): n is a, c, g, or t
  misc_feature (1210)..(1210): n is a, c, g, or t
  misc_feature (1212)..(1212): n is a, c, g, or t
  misc_feature (1218)..(1218): n is a, c, g, or t
  misc_feature (1225)..(1226): n is a, c, g, or t
  misc_feature (1234)..(1234): n is a, c, g, or t
  misc_feature (1244)..(1244): n is a, c, g, or t
  misc_feature (1246)..(1246): n is a, c, g, or t
  misc_feature (1249)..(1250): n is a, c, g, or t
  misc_feature (1253)..(1253): n is a, c, g, or t
  misc_feature (1255)..(1255): n is a, c, g, or t
  misc_feature (1258)..(1259): n is a, c, g, or t
  misc_feature (1261)..(1261): n is a, c, g, or t
  misc_feature (1264)..(1264): n is a, c, g, or t
  misc_feature (1271)..(1271): n is a, c, g, or t
  misc_feature (1275)..(1275): n is a, c, g, or t
  misc_feature (1278)..(1278): n is a, c, g, or t
  misc_feature (1288)..(1288): n is a, c, g, or t
  misc_feature (1292)..(1292): n is a, c, g, or t
  misc_feature (1297)..(1297): n is a, c, g, or t
  misc_feature (1299)..(1300): n is a, c, g, or t
  misc_feature (1303)..(1303): n is a, c, g, or t
  misc_feature (1306)..(1306): n is a, c, g, or t
  misc_feature (1308)..(1308): n is a, c, g, or t
  misc_feature (1311)..(1311): n is a, c, g, or t
  misc_feature (1314)..(1314): n is a, c, g, or t
  misc_feature (1316)..(1316): n is a, c, g, or t
  misc_feature (1319)..(1319): n is a, c, g, or t
  misc_feature (1321)..(1321): n is a, c, g, or t
  misc_feature (1329)..(1329): n is a, c, g, or t
  misc_feature (1336)..(1336): n is a, c, g, or t
  misc_feature (1341)..(1342): n is a, c, g, or t
  misc_feature (1346)..(1346): n is a, c, g, or t
  misc_feature (1348)..(1348): n is a, c, g, or t
  misc_feature (1352)..(1352): n is a, c, g, or t
  misc_feature (1355)..(1355): n is a, c, g, or t
naattagagaaattaactatgagaggatcgcatcaccatcaccatcacggatcctatttaggtgacactatagaatcgtcgacccacgcgtccgactgnnntangcantgnaaggtnnacgctgangggaggagagcagccacgtccacgcaccttccaatggctgtntcnacnatgccncacncnttcnngatganataaactgncgacncncggagggantgnggnanggcnatnattatatgctgctcccatcagagtgcgttggcnttacctggtcagctggtatggtctagatgatgcgcngcaaccctntganggcnanngcatacagctgcccnnnatccngaaagtccaagngtacccannacaactgntgcttgtncagcacantgatttgggaaantctcacantgttcncttcagcnntaccnattctantgncctantattgnacacatttcgggancgntttctgntgnanccccaagaanacantcngctttgggncaanaactcnccaaggctntttggatantgttgtatgacacacacatcacggttctcgatgcngccnttganactggacanttnatcntcatggagacccnnaagaaanatggcacttggaccagngcacntctgcntgtcatgaacaacaacgngtcggaagaggatgatgacttcaagggtcagccaagcatctgtgncctcaccaatctggncaacacgtgcttcntgaactnngcactgcagtgcctcancaatgtnccacagctcaccgagtacttcctcaacaattgctacctgnaggaactaaaacttcngcaaccnactgggcatgaagggtganatctnacaggcctatgcagacctggtgaaagcaggtgtggtatngccacnnccgctccattgtnccccatgtggttcaaaaacaaagntngnccntttttgaatcccantttctggggctacaacncatggactcnaagganctnatntcattcctcctggangggctgcattaagaccttnatcnggagaaaaaaaangaaaattntggaactnnncnanttnttttggnggacccnttnannaaggtgtcccaggaagnntggncaaaaccaaaacngggnnannnattntgggtannnnngaaccttttccngggccttttaaatcnnanntgggttncccnantttgggaatntntttggnaaatttnnaccctttnaaaactaaangnttnnggngnttnngnccnaaagggngggnagntttttttttncccnggacncnnccnaananaanttncnggntngttccccnaaaaaanaattnnattngngggnttn

SEQ ID NO: 705 - DNA, 1418 bp, Homo Sapiens
  misc_feature (2)..(2): n is a, c, g, or t
  misc_feature (819)..(819): n is a, c, g, or t
  misc_feature (909)..(909): n is a, c, g, or t
  misc_feature (911)..(911): n is a, c, g, or t
  misc_feature (926)..(927): n is a, c, g, or t
  misc_feature (929)..(929): n is a, c, g, or t
  misc_feature (935)..(935): n is a, c, g, or t
  misc_feature (942)..(942): n is a, c, g, or t
  misc_feature (960)..(960): n is a, c, g, or t
  misc_feature (965)..(965): n is a, c, g, or t
  misc_feature (968)..(968): n is a, c, g, or t
  misc_feature (971)..(971): n is a, c, g, or t
  misc_feature (981)..(981): n is a, c, g, or t
  misc_feature (995)..(995): n is a, c, g, or t
  misc_feature (1000)..(1000): n is a, c, g, or t
  misc_feature (1008)..(1008): n is a, c, g, or t
  misc_feature (1020)..(1021): n is a, c, g, or t
  misc_feature (1027)..(1029): n is a, c, g, or t
  misc_feature (1035)..(1035): n is a, c, g, or t
  misc_feature (1053)..(1053): n is a, c, g, or t
  misc_feature (1063)..(1063): n is a, c, g, or t
  misc_feature (1066)..(1066): n is a, c, g, or t
  misc_feature (1081)..(1081): n is a, c, g, or t
  misc_feature (1083)..(1083): n is a, c, g, or t
  misc_feature (1086)..(1086): n is a, c, g, or t
  misc_feature (1095)..(1095): n is a, c, g, or t
  misc_feature (1101)..(1101): n is a, c, g, or t
  misc_feature (1104)..(1104): n is a, c, g, or t
  misc_feature (1115)..(1115): n is a, c, g, or t
  misc_feature (1121)..(1121): n is a, c, g, or t
  misc_feature (1124)..(1124): n is a, c, g, or t
  misc_feature (1135)..(1135): n is a, c, g, or t
  misc_feature (1141)..(1141): n is a, c, g, or t
  misc_feature (1146)..(1146): n is a, c, g, or t
  misc_feature (1157)..(1157): n is a, c, g, or t
  misc_feature (1164)..(1164): n is a, c, g, or t
  misc_feature (1168)..(1168): n is a, c, g, or t
  misc_feature (1171)..(1171): n is a, c, g, or t
  misc_feature (1180)..(1180): n is a, c, g, or t
  misc_feature (1191)..(1191): n is a, c, g, or t
  misc_feature (1195)..(1195): n is a, c, g, or t
  misc_feature (1198)..(1198): n is a, c, g, or t
  misc_feature (1206)..(1206): n is a, c, g, or t
  misc_feature (1209)..(1209): n is a, c, g, or t
  misc_feature (1211)..(1211): n is a, c, g, or t
  misc_feature (1221)..(1221): n is a, c, g, or t
  misc_feature (1231)..(1231): n is a, c, g, or t
  misc_feature (1239)..(1239): n is a, c, g, or t
  misc_feature (1241)..(1241): n is a, c, g, or t
  misc_feature (1243)..(1244): n is a, c, g, or t
  misc_feature (1246)..(1246): n is a, c, g, or t
  misc_feature (1251)..(1251): n is a, c, g, or t
  misc_feature (1262)..(1262): n is a, c, g, or t
  misc_feature (1268)..(1268): n is a, c, g, or t
  misc_feature (1270)..(1271): n is a, c, g, or t
  misc_feature (1283)..(1284): n is a, c, g, or t
  misc_feature (1290)..(1293): n is a, c, g, or t
  misc_feature (1305)..(1305): n is a, c, g, or t
  misc_feature (1308)..(1309): n is a, c, g, or t
  misc_feature (1319)..(1319): n is a, c, g, or t
  misc_feature (1323)..(1323): n is a, c, g, or t
  misc_feature (1328)..(1328): n is a, c, g, or t
  misc_feature (1331)..(1331): n is a, c, g, or t
  misc_feature (1334)..(1337): n is a, c, g, or t
  misc_feature (1354)..(1359): n is a, c, g, or t
  misc_feature (1371)..(1372): n is a, c, g, or t
  misc_feature (1376)..(1377): n is a, c, g, or t
  misc_feature (1388)..(1388): n is a, c, g, or t
  misc_feature (1399)..(1400): n is a, c, g, or t
  misc_feature (1402)..(1402): n is a, c, g, or t
  misc_feature (1405)..(1405): n is a, c, g, or t
  misc_feature (1407)..(1407): n is a, c, g, or t
  misc_feature (1410)..(1410): n is a, c, g, or t
  misc_feature (1413)..(1413): n is a, c, g, or t
  misc_feature (1418)..(1418): n is a, c, g, or t
antagagaaattactatgagaggatcgcatcaccatcaccatcacggatcctatttaggtgacactatagaatcgtcgacccacgcgtccgcggacgcgtggggccgcggctgcggccactgcgcgctactccatggacagcctgagctccgagcggtactacctccagtcccccggtcctcaggggtcggagctggctgcgccctgctcactcttcccgtaccaggcggcggctggggcgccccacggacctgtgtacccggctcctaacggggcgcgctacccctacggctccatgctgccccccggcggcttccccgcggctgtgtgcccacccgggagggcgcagttcggcccaggagccggtgcgggcagtggcgcgggcggtagcagcggcgggggcggcggcccgggcacctatcagtacagccagggggctccgctctacgggccgtaccctggagccgcagcggcgggatcttgcggaggactggggggcctgggggttccaggttctggcttccgtgcccacgtctacctgtgcaaccggcctctgtggctcaaattccaccgccaccaaactgagatgatcattacgaaacagggcaggcgcatgtttcctttcttgagcttcaacataaacggactcaatcccactgcccactacaatgtgttcgtaaaggtggtgctggcggaccccaaccactggcgcttccaggggggcaaatgggtgacctgtggcaaagccgacaataacatgcagggcaacaaaatgtatgttcacccagagtctcctaatactggttcccactggatganacaggagatttcattcgggaaattaaaactcaccaataacaaaggcgcaaataacaacaacacccagatgatagtcttacaatcctttananaaataccaaaccccnnantgcaanattgttnaaattaaaaaagaatggngttgnaanaanttgaatgaancccttaaaaaaccnaaaantttttacntttttcaaaaanncaattnnnttgcantgactgcctaccaaaaanccgatattantcnaataaaaaattgatntnaancccctttgnaaaagnttncaaaaaaaatnataatnccnttaaacccttnaaaaanaaaangtaaattcttncccccgnaatnccnaaaatccanaaaaattcccngaangcngaaagggnttnantcttttttcnaaaccttttnaaaatttnantnnanccccnaattaaatggnaaaaantnncaaaaaaaaagnntttttnnnnaaaaaaaaaaanggnnacccccccangggnttttnccnttnnnnacttgaaaaaaaaaaannnnnnaaaaaaaaaatnnaaanncccaagaaaantcccccaaaanncnggnanaanaanttttn

SEQ ID NO: 706 - DNA, 1200 bp, Homo Sapiens
  misc_feature (922)..(922): n is a, c, g, or t
  misc_feature (927)..(927): n is a, c, g, or t
  misc_feature (929)..(929): n is a, c, g, or t
  misc_feature (931)..(931): n is a, c, g, or t
  misc_feature (933)..(933): n is a, c, g, or t
  misc_feature (936)..(936): n is a, c, g, or t
  misc_feature (962)..(962): n is a, c, g, or t
  misc_feature (974)..(974): n is a, c, g, or t
  misc_feature (1006)..(1006): n is a, c, g, or t
  misc_feature (1017)..(1017): n is a, c, g, or t
  misc_feature (1044)..(1044): n is a, c, g, or t
  misc_feature (1057)..(1057): n is a, c, g, or t
  misc_feature (1069)..(1069): n is a, c, g, or t
  misc_feature (1071)..(1071): n is a, c, g, or t
  misc_feature (1079)..(1079): n is a, c, g, or t
  misc_feature (1082)..(1082): n is a, c, g, or t
  misc_feature (1089)..(1089): n is a, c, g, or t
  misc_feature (1100)..(1100): n is a, c, g, or t
  misc_feature (1102)..(1102): n is a, c, g, or t
  misc_feature (1121)..(1121): n is a, c, g, or t
  misc_feature (1125)..(1125): n is a, c, g, or t
  misc_feature (1134)..(1134): n is a, c, g, or t
  misc_feature (1137)..(1137): n is a, c, g, or t
  misc_feature (1148)..(1148): n is a, c, g, or t
  misc_feature (1162)..(1163): n is a, c, g, or t
  misc_feature (1165)..(1165): n is a, c, g, or t
  misc_feature (1173)..(1173): n is a, c, g, or t
  misc_feature (1178)..(1179): n is a, c, g, or t
  misc_feature (1187)..(1188): n is a, c, g, or t
  misc_feature (1190)..(1190): n is a, c, g, or t
  misc_feature (1197)..(1197): n is a, c, g, or t
gaatagagagaattactatgagaggatcgcatcaccatcaccatcacggatcctatttaggtgacactatagaatcgtcgacccacgcgtccggagcaaagctccaaagagaattgttttttccagaatgccaatactggggctcagagctccagctacccactttggattttgaagatgttttaagatatgatgaacacgcatacaagtggctctccaccctcaagaaagtaggcatagtaagactcaccggagcatctgacaaaccaggagaagtttcaaaacttgggaaaaggatgggtttcctctatctcacattttatggacatacttggcaagtgcaagacaaaatcgatgcaaacaatgtggcttacacaactgggaagctaagctttcacactgattatccagccctccatcatccacctggggttcagcttcttcactgcataaagcaaacagtcacagggggtgattcagaaattgtagatgggtttaatgtgtgccaaaaactaaagaaaaataatcctcaggcattccagattttgtcctctacctttgtggactttacagacattggagtggattactgtgatttttctgtacaatcaaaacataaaattatagagttagatgataaaggccaagtggttcgcatcaacttcaataacgcaactagggacacaatatttgatgtgcctgttgaaagagttcagcctttttatgctgctctgaaggagtttgttgacctcatgaacagcaaagaatccaagtttaccttcaagatgaatccaggtgatgtgattacttttgataactggcgcttacttcatggccgacgtagctatgaagcaggaactgagatatcccgccatctagaaggagcttatgctgactgggatgtggtcatgtcaaggcttcntatcntnangncanagggtggagaatggaaactgaagtcncctgtagataanttttaataagattccaatgaccatatttttgngagatatggcncattattcccagaccatggatcttggngattacatataanttccttaacaangnacatgtanctnctccccnaaaaaaacccntnactttggaaaccaaaacanggcnactttttanagntttccccctcntttgcaaaaaagcnncnttccgccnggggnnggccgccnnanttttttngcc

SEQ ID NO: 707 - DNA, 1200 bp, Homo Sapiens
  misc_feature (3)..(3): n is a, c, g, or t
  misc_feature (864)..(864): n is a, c, g, or t
  misc_feature (926)..(926): n is a, c, g, or t
  misc_feature (964)..(964): n is a, c, g, or t
  misc_feature (967)..(967): n is a, c, g, or t
  misc_feature (974)..(974): n is a, c, g, or t
  misc_feature (987)..(987): n is a, c, g, or t
  misc_feature (989)..(989): n is a, c, g, or t
  misc_feature (992)..(992): n is a, c, g, or t
  misc_feature (999)..(999): n is a, c, g, or t
  misc_feature (1007)..(1007): n is a, c, g, or t
  misc_feature (1014)..(1014): n is a, c, g, or t
  misc_feature (1016)..(1016): n is a, c, g, or t
  misc_feature (1032)..(1032): n is a, c, g, or t
  misc_feature (1044)..(1044): n is a, c, g, or t
  misc_feature (1058)..(1058): n is a, c, g, or t
  misc_feature (1061)..(1061): n is a, c, g, or t
  misc_feature (1078)..(1078): n is a, c, g, or t
  misc_feature (1091)..(1091): n is a, c, g, or t
  misc_feature (1094)..(1094): n is a, c, g, or t
  misc_feature (1096)..(1096): n is a, c, g, or t
  misc_feature (1110)..(1110): n is a, c, g, or t
  misc_feature (1115)..(1115): n is a, c, g, or t
  misc_feature (1125)..(1126): n is a, c, g, or t
  misc_feature (1129)..(1129): n is a, c, g, or t
  misc_feature (1136)..(1136): n is a, c, g, or t
  misc_feature (1138)..(1138): n is a, c, g, or t
  misc_feature (1148)..(1148): n is a, c, g, or t
  misc_feature (1154)..(1154): n is a, c, g, or t
  misc_feature (1178)..(1178): n is a, c, g, or t
  misc_feature (1187)..(1187): n is a, c, g, or t
  misc_feature (1194)..(1194): n is a, c, g, or t
  misc_feature (1196)..(1197): n is a, c, g, or t
  misc_feature (1200)..(1200): n is a, c, g, or t
gantagagagattactatgagaggatcgcatcaccatcaccatcacggatcctatttaggtgacactatagaatcgtcgacccacgcgtccgaatatgtaaaaactatgttacggaatggttatgctcctgttgaatttttcctcgaagggacaagaagccgctctgccaagacattgactcctaaatttggtcttctgaatattgtgatggagccattttttaaaagagaagtttttgatacctaccttgtcccaattagtatcagttatgataagatcttggaagaaactctttatgtgtatgagcttctaggggttcctaaaccaaaagaatctacaactgggttgctgaaagccagaaagattctctctgaaaattttggaagcatccatgtgtactttggagatcctgtgtcacttcgatctttggcagctgggaggatgagtcggagctcatataacttggttccaagatacattcctcagaaacagtctgaggacatgcatgcctttgtcactgaagttgcctacaaaatggagcttctgcaaattgaaaacatggttttgagcccctggaccctaatagttgctgttctgcttcagaaccggccatccatggactttgatgctctggtggaaaagactttatggctaaaaggcttaacccaggcatttggagggtttctcatttggcctgataataaacctgctgaagaagttgtcccggccagcattcttctgcattccaacattgccagccttgtcaaagaccaggtgattctgaaagtggactccggagactcggaagtggtcgatgggcttatgctccagcacatcactctcctcatgtgctcagcttatanggaaccagctgctcaacatttttgtgcgcccatccttagtagcagtagcattgcaaatgacnccagggttcaggaaagaggatgtctacagttgctttcnctncctacgngatgtttttgcananganttcctcntccttccnggaaacncnctaaaggactttgaanaaggctgttacntgctttgtaaaagnganccctacaagtgactacnaaagacctcctanttncnaaaaaaggaaaacngggtnaaaattttannagnacccttnancctttggggnaagctnccaaaaatttgcagaacctttggnggaaaaaangaccctncnnggn

SEQ ID NO: 708 - DNA, 1437 bp, Homo Sapiens
  misc_feature (2)..(3): n is a, c, g, or t
  misc_feature (5)..(5): n is a, c, g, or t
  misc_feature (10)..(10): n is a, c, g, or t
  misc_feature (835)..(835): n is a, c, g, or t
  misc_feature (896)..(896): n is a, c, g, or t
  misc_feature (900)..(900): n is a, c, g, or t
  misc_feature (916)..(916): n is a, c, g, or t
  misc_feature (920)..(920): n is a, c, g, or t
  misc_feature (944)..(944): n is a, c, g, or t
  misc_feature (947)..(947): n is a, c, g, or t
  misc_feature (953)..(953): n is a, c, g, or t
  misc_feature (990)..(990): n is a, c, g, or t
  misc_feature (999)..(999): n is a, c, g, or t
  misc_feature (1008)..(1008): n is a, c, g, or t
  misc_feature (1015)..(1015): n is a, c, g, or t
  misc_feature (1017)..(1017): n is a, c, g, or t
  misc_feature (1021)..(1022): n is a, c, g, or t
  misc_feature (1036)..(1036): n is a, c, g, or t
  misc_feature (1045)..(1046): n is a, c, g, or t
  misc_feature (1049)..(1049): n is a, c, g, or t
  misc_feature (1051)..(1053): n is a, c, g, or t
  misc_feature (1056)..(1056): n is a, c, g, or t
  misc_feature (1060)..(1060): n is a, c, g, or t
  misc_feature (1085)..(1085): n is a, c, g, or t
  misc_feature (1089)..(1089): n is a, c, g, or t
  misc_feature (1095)..(1095): n is a, c, g, or t
  misc_feature (1104)..(1104): n is a, c, g, or t
  misc_feature (1109)..(1109): n is a, c, g, or t
  misc_feature (1121)..(1121): n is a, c, g, or t
  misc_feature (1123)..(1123): n is a, c, g, or t
  misc_feature (1126)..(1126): n is a, c, g, or t
  misc_feature (1145)..(1145): n is a, c, g, or t
  misc_feature (1166)..(1166): n is a, c, g, or t
  misc_feature (1172)..(1172): n is a, c, g, or t
  misc_feature (1176)..(1178): n is a, c, g, or t
  misc_feature (1180)..(1180): n is a, c, g, or t
  misc_feature (1185)..(1185): n is a, c, g, or t
  misc_feature (1193)..(1194): n is a, c, g, or t
  misc_feature (1212)..(1212): n is a, c, g, or t
  misc_feature (1227)..(1227): n is a, c, g, or t
  misc_feature (1229)..(1229): n is a, c, g, or t
  misc_feature (1263)..(1263): n is a, c, g, or t
  misc_feature (1273)..(1273): n is a, c, g, or t
  misc_feature (1287)..(1287): n is a, c, g, or t
  misc_feature (1297)..(1297): n is a, c, g, or t
  misc_feature (1300)..(1300): n is a, c, g, or t
  misc_feature (1306)..(1307): n is a, c, g, or t
  misc_feature (1310)..(1311): n is a, c, g, or t
  misc_feature (1315)..(1315): n is a, c, g, or t
  misc_feature (1322)..(1322): n is a, c, g, or t
  misc_feature (1333)..(1333): n is a, c, g, or t
  misc_feature (1335)..(1335): n is a, c, g, or t
  misc_feature (1340)..(1341): n is a, c, g, or t
  misc_feature (1364)..(1365): n is a, c, g, or t
  misc_feature (1389)..(1389): n is a, c, g, or t
  misc_feature (1406)..(1408): n is a, c, g, or t
  misc_feature (1412)..(1412): n is a, c, g, or t
  misc_feature (1428)..(1428): n is a, c, g, or t
tnnanagagngattactatggagaggatcgcatcaccatcaccatcacggatcctatttaggtgacactatagaatcgtcgacccacgcgtccgggccggggagacgagttgcatgtgttggttcagctggcgatagcggcgggagcggagccggcggggcctgtgcgaccgcctgggtttgtgaaatggctgctgacatttctgaatccagcggggctgactgcaaaggagacccaaggaacagtgccaagttagatgccgattacccacttcgagtcctttattgtggagtctgttcattaccaacagagtactgtgaatatatgcctgatgttgctaaatgtagacaatggttagagaagaattttccaaatgaatttgcaaaacttactgtagaaaattcacccaaacaagaagctggaattagtgagggtcaaggaacagcaggggaagaagaggagaagaaaaaacagaagagaggtggaaggggtcaaataaaacaaaaaaagaagaccgtaccacaaaaggttactatagccaaaattcccagagcaaagaagaaatatgtgacaagagtatgtggccttgcaacttttgaaattgatcttaaagaagcacaaagattttttgctcaaaaattctcctgtggtgcctcagtaacaggggaggatgaaattatcattcagggagattttacagatgacataattgatgtcattcaggaaaaatggccagaggtagatgatgacagcatcgaagatcttggagaagtaaagaagtgaatttgaaaatttgtctgtatttaatggcctgaactgagagttgatatggccnaagggagagaggccttttaaatatatatatatatacccatatatatgtatatattaccccntatntgtatgtatacacatntacncatgtatatataccatgtgtgtantgntatacntgtatattacctattttccttacccttattttgtatnccctatttnccccctttntggtttncntttnntaccccctttttgntttccctanntantnnntcntccngtaaaacctgtaaaactggcccccncccntggccnttttccctngttcnttaacaaggctncnttntttttttttttgcccaaantccaatttaaccgggaaaccntccccncccnnncntgaanaaaaattnntccaaaaaaaaaatttgnccctttgggaccgancnttccccccccccccccccccttttttttttgacnaaaacccccnctttttcccggccnaaaaaaaggnganatttcnnccnngganccccccncccggttaggntntcccnnccccccccccaaagggataaccnncccccccccccccatttttttttnataaaagggttttcttnnnccgnggtccccccccccggntcccccccc

SEQ ID NO: 709 - DNA, 1157 bp, Homo Sapiens
  misc_feature (1)..(3): n is a, c, g, or t
  misc_feature (738)..(738): n is a, c, g, or t
  misc_feature (741)..(741): n is a, c, g, or t
  misc_feature (747)..(747): n is a, c, g, or t
  misc_feature (770)..(770): n is a, c, g, or t
  misc_feature (777)..(777): n is a, c, g, or t
  misc_feature (851)..(851): n is a, c, g, or t
  misc_feature (879)..(879): n is a, c, g, or t
  misc_feature (895)..(895): n is a, c, g, or t
  misc_feature (897)..(897): n is a, c, g, or t
  misc_feature (912)..(912): n is a, c, g, or t
  misc_feature (919)..(919): n is a, c, g, or t
  misc_feature (938)..(938): n is a, c, g, or t
  misc_feature (978)..(978): n is a, c, g, or t
  misc_feature (991)..(991): n is a, c, g, or t
  misc_feature (994)..(994): n is a, c, g, or t
  misc_feature (1000)..(1000): n is a, c, g, or t
  misc_feature (1003)..(1003): n is a, c, g, or t
  misc_feature (1007)..(1007): n is a, c, g, or t
  misc_feature (1028)..(1029): n is a, c, g, or t
  misc_feature (1034)..(1034): n is a, c, g, or t
  misc_feature (1037)..(1037): n is a, c, g, or t
  misc_feature (1040)..(1041): n is a, c, g, or t
  misc_feature (1056)..(1058): n is a, c, g, or t
  misc_feature (1063)..(1063): n is a, c, g, or t
  misc_feature (1070)..(1070): n is a, c, g, or t
  misc_feature (1091)..(1091): n is a, c, g, or t
  misc_feature (1107)..(1110): n is a, c, g, or t
  misc_feature (1113)..(1157): n is a, c, g, or t
nnnagagaaattactatgagaggatcgcatcaccatcaccatcacggatcctatttaggtgacactatagaatcgtcgacccacgcgtccgaggatgaggaggtggcgtcggacagtgatgagtcctctgagggtggtgagcgtggagacgcgctgtcccagaagaggtctgagaagccgcccgcaggctccatctgcagggctgaacctgaggctggtgaggagcaggcaggtgacgacagggacagtggcggccccgttctccagtttgactacgaggcagttgctaacagactgtttgaaatggccagccgccagagcaccccttctcagaacagaaagcgtctctacaaagtgatccggaagctgcaggacctggcaggaggcattttccctgaagatgagatcccagagaaggcctgcaggcgcctgcttgaagggaggcggcagaagaagacgaagaagcagaagcgtctgctcaggttgcagcaggagagagggaaaggtgagaaggagcccccgagcccgggcatggagaggaagaggagcaggaggaggggtgtaggggccgaccccgaggcgcgggcagaggctggtgagcagccaggcacagctgagcgggccctgctccgagatcagcccaggggccgtggccagagaggggctcgccagagaaggaggacacctcggcccctgaccagtgcccgagcaaaggcggccaatgtccaggagccgganaanaaaaanaaacgcagggagtgatgtggccnggctaangacaggcagggagggaggccaggcctcgcttgcaccgcgggacgaggctgaccgggctgttctgtaaactcagnaccgtggctccaaaaactcctgtgccangcgggaaggaaaggcngnccctggaaaaatggncccatcnttaggggccagcatcccangaactggacctttccccaaaacccccccctgtgggcttgngatgaccctgggnccnaaaagntcnaaantccccaaaactgaaaactctnncctgncancannaactgggcccccccnnncttgnggggggntttaaaaaaaaaaaaagcccnccccacccctttcccnnnnaannnnnnnnnnnnnnnnnnnnnnnnnnnnnnnnnnnnnnnnnnnnn

SEQ ID NO: 710 - DNA, 1416 bp, Homo Sapiens
  misc_feature (2)..(2): n is a, c, g, or t
  misc_feature (15)..(15): n is a, c, g, or t
  misc_feature (613)..(613): n is a, c, g, or t
  misc_feature (616)..(616): n is a, c, g, or t
  misc_feature (698)..(698): n is a, c, g, or t
  misc_feature (740)..(740): n is a, c, g, or t
  misc_feature (768)..(768): n is a, c, g, or t
  misc_feature (779)..(779): n is a, c, g, or t
  misc_feature (793)..(793): n is a, c, g, or t
  misc_feature (799)..(799): n is a, c, g, or t
  misc_feature (856)..(856): n is a, c, g, or t
  misc_feature (885)..(885): n is a, c, g, or t
  misc_feature (906)..(906): n is a, c, g, or t
  misc_feature (912)..(912): n is a, c, g, or t
  misc_feature (919)..(919): n is a, c, g, or t
  misc_feature (921)..(921): n is a, c, g, or t
  misc_feature (929)..(929): n is a, c, g, or t
  misc_feature (936)..(936): n is a, c, g, or t
  misc_feature (947)..(947): n is a, c, g, or t
  misc_feature (950)..(950): n is a, c, g, or t
  misc_feature (954)..(955): n is a, c, g, or t
  misc_feature (957)..(957): n is a, c, g, or t
  misc_feature (988)..(988): n is a, c, g, or t
  misc_feature (1005)..(1008): n is a, c, g, or t
  misc_feature (1010)..(1010): n is a, c, g, or t
  misc_feature (1012)..(1012): n is a, c, g, or t
  misc_feature (1019)..(1021): n is a, c, g, or t
  misc_feature (1025)..(1025): n is a, c, g, or t
  misc_feature (1029)..(1029): n is a, c, g, or t
  misc_feature (1040)..(1040): n is a, c, g, or t
  misc_feature (1050)..(1050): n is a, c, g, or t
  misc_feature (1061)..(1062): n is a, c, g, or t
  misc_feature (1064)..(1064): n is a, c, g, or t
  misc_feature (1076)..(1076): n is a, c, g, or t
  misc_feature (1078)..(1078): n is a, c, g, or t
  misc_feature (1085)..(1087): n is a, c, g, or t
  misc_feature (1089)..(1089): n is a, c, g, or t
  misc_feature (1106)..(1106): n is a, c, g, or t
  misc_feature (1108)..(1108): n is a, c, g, or t
  misc_feature (1110)..(1110): n is a, c, g, or t
  misc_feature (1117)..(1117): n is a, c, g, or t
  misc_feature (1125)..(1125): n is a, c, g, or t
  misc_feature (1130)..(1130): n is a, c, g, or t
  misc_feature (1144)..(1145): n is a, c, g, or t
  misc_feature (1152)..(1154): n is a, c, g, or t
  misc_feature (1156)..(1156): n is a, c, g, or t
  misc_feature (1162)..(1162): n is a, c, g, or t
  misc_feature (1170)..(1171): n is a, c, g, or t
  misc_feature (1176)..(1176): n is a, c, g, or t
  misc_feature (1189)..(1190): n is a, c, g, or t
  misc_feature (1192)..(1192): n is a, c, g, or t
  misc_feature (1194)..(1194): n is a, c, g, or t
  misc_feature (1198)..(1198): n is a, c, g, or t
  misc_feature (1204)..(1204): n is a, c, g, or t
  misc_feature (1207)..(1208): n is a, c, g, or t
  misc_feature (1211)..(1211): n is a, c, g, or t
  misc_feature (1219)..(1219): n is a, c, g, or t
  misc_feature (1222)..(1222): n is a, c, g, or t
  misc_feature (1225)..(1225): n is a, c, g, or t
  misc_feature (1229)..(1229): n is a, c, g, or t
  misc_feature (1238)..(1238): n is a, c, g, or t
  misc_feature (1249)..(1249): n is a, c, g, or t
  misc_feature (1252)..(1252): n is a, c, g, or t
  misc_feature (1255)..(1255): n is a, c, g, or t
  misc_feature (1276)..(1278): n is a, c, g, or t
  misc_feature (1283)..(1283): n is a, c, g, or t
  misc_feature (1289)..(1291): n is a, c, g, or t
  misc_feature (1293)..(1293): n is a, c, g, or t
  misc_feature (1295)..(1298): n is a, c, g, or t
  misc_feature (1302)..(1302): n is a, c, g, or t
  misc_feature (1311)..(1312): n is a, c, g, or t
  misc_feature (1316)..(1316): n is a, c, g, or t
  misc_feature (1319)..(1319): n is a, c, g, or t
  misc_feature (1337)..(1337): n is a, c, g, or t
  misc_feature (1340)..(1340): n is a, c, g, or t
  misc_feature (1351)..(1351): n is a, c, g, or t
  misc_feature (1353)..(1353): n is a, c, g, or t
  misc_feature (1355)..(1355): n is a, c, g, or t
  misc_feature (1360)..(1360): n is a, c, g, or t
  misc_feature (1363)..(1363): n is a, c, g, or t
  misc_feature (1368)..(1368): n is a, c, g, or t
  misc_feature (1370)..(1371): n is a, c, g, or t
  misc_feature (1374)..(1374): n is a, c, g, or t
  misc_feature (1381)..(1381): n is a, c, g, or t
  misc_feature (1388)..(1388): n is a, c, g, or t
  misc_feature (1390)..(1391): n is a, c, g, or t
  misc_feature (1393)..(1393): n is a, c, g, or t
  misc_feature (1407)..(1407): n is a, c, g, or t
  misc_feature (1411)..(1411): n is a, c, g, or t
  misc_feature (1414)..(1414): n is a, c, g, or t
antagagagaattanctatgagaggatcgcatcaccatcaccatcacgagatcctatttaggtgacactatagaatcgtcgacccacgcgtccgggggacgctgcggggggacccgtgctgaggcggcggcggcgacgtgggctgcggcgggcccgcggcgtcgggcggtgcggatgtcgggctgggcggacgagcgcggcggcgagggcgacgggcgcatctacgtggggaaccttccgaccgacgtgcgcgagaaggacttggaggacctgttctacaagtacggccgcatccgcgagatcgagctcaagaaccggcacggcctcgtgcccttcgccttcgtgcgcttcgaggacccccgagatgcagaggatgctatttatggaagaaatggttatgattatggccagtgtcggcttcgtgtggagttccccaggacttatggaggtcggggtgggtggccccgtggtgggaggaatgggcctcctacaagaagatctgatttccgagttcttgtttcaggacttcctccgtcaggcagctggcaggacctgaaggatcacatgcgagaagctggggatgtctgttatgctgatgtgcagaaggatggantgnggatggtcgagtatctcagaaaagaagacatggaatatgccctgcgtaaactggatgacaccaaattccgctctcatgaggntgaaacttcctacatccgagtttatcctgagagaagcaccanctatggctactcacggtctcggtctggntcaaggggccntgactctccatacnaaaacnaagggttcccccacacctacttctctccttttcaggcccctacttgaaacaggtgantgggaaatttttttcttttaatttattanggttaacctgaacttgctttngtgctncaaaaancnacattccnaaatttnaagaatttaantgntctnnangaaaattttttttaatttttttttttttttnaaaaaaaaaaaaaaaannnntntnatttttnnncccngggnccattattaancagtgaaaanattttttaaanncncaaaaaattttngnttttttnnntnccaaaaacaaatttttnananttttttncccccctnaattnatgggaaaaaaaannccatttnnntncttttnggggtttnncctcntttaaggaaaaannananttancgttanatnnaanccgccccnttnttntttnaaaaatatntttttaaaagnttntanaaaaaaaaaaaaaaaaagggnnnccacnccccannngnannnnctanaaaaaatcnnattntanttaaaattggaccccccnttnaaaatcccaanananccccnaanctctncnngantttttanaaaaacncnntntcccccggattttntttncanaa

SEQ ID NO: 711 - DNA, 1448 bp, Homo Sapiens
  misc_feature (1)..(2): n is a, c, g, or t
  misc_feature (110)..(110): n is a, c, g, or t
  misc_feature (116)..(116): n is a, c, g, or t
  misc_feature (155)..(155): n is a, c, g, or t
  misc_feature (409)..(409): n is a, c, g, or t
  misc_feature (427)..(427): n is a, c, g, or t
  misc_feature (531)..(531): n is a, c, g, or t
  misc_feature (657)..(657): n is a, c, g, or t
  misc_feature (685)..(685): n is a, c, g, or t
  misc_feature (699)..(699): n is a, c, g, or t
  misc_feature (723)..(724): n is a, c, g, or t
  misc_feature (744)..(744): n is a, c, g, or t
  misc_feature (771)..(771): n is a, c, g, or t
  misc_feature (797)..(797): n is a, c, g, or t
  misc_feature (799)..(799): n is a, c, g, or t
  misc_feature (804)..(805): n is a, c, g, or t
  misc_feature (819)..(819): n is a, c, g, or t
  misc_feature (822)..(822): n is a, c, g, or t
  misc_feature (834)..(835): n is a, c, g, or t
  misc_feature (847)..(847): n is a, c, g, or t
  misc_feature (850)..(850): n is a, c, g, or t
  misc_feature (857)..(857): n is a, c, g, or t
  misc_feature (865)..(865): n is a, c, g, or t
  misc_feature (870)..(870): n is a, c, g, or t
  misc_feature (872)..(872): n is a, c, g, or t
  misc_feature (894)..(894): n is a, c, g, or t
  misc_feature (906)..(908): n is a, c, g, or t
  misc_feature (910)..(910): n is a, c, g, or t
  misc_feature (916)..(917): n is a, c, g, or t
  misc_feature (924)..(924): n is a, c, g, or t
  misc_feature (931)..(931): n is a, c, g, or t
  misc_feature (941)..(941): n is a, c, g, or t
  misc_feature (945)..(945): n is a, c, g, or t
  misc_feature (967)..(968): n is a, c, g, or t
  misc_feature (971)..(972): n is a, c, g, or t
  misc_feature (974)..(974): n is a, c, g, or t
  misc_feature (981)..(982): n is a, c, g, or t
  misc_feature (1000)..(1000): n is a, c, g, or t
  misc_feature (1004)..(1004): n is a, c, g, or t
  misc_feature (1007)..(1008): n is a, c, g, or t
  misc_feature (1011)..(1011): n is a, c, g, or t
  misc_feature (1017)..(1017): n is a, c, g, or t
  misc_feature (1020)..(1020): n is a, c, g, or t
  misc_feature (1022)..(1022): n is a, c, g, or t
  misc_feature (1025)..(1025): n is a, c, g, or t
  misc_feature (1028)..(1028): n is a, c, g, or t
  misc_feature (1034)..(1034): n is a, c, g, or t
  misc_feature (1038)..(1038): n is a, c, g, or t
  misc_feature (1040)..(1041): n is a, c, g, or t
  misc_feature (1051)..(1051): n is a, c, g, or t
  misc_feature (1058)..(1058): n is a, c, g, or t
  misc_feature (1062)..(1062): n is a, c, g, or t
  misc_feature (1071)..(1071): n is a, c, g, or t
  misc_feature (1078)..(1078): n is a, c, g, or t
  misc_feature (1081)..(1081): n is a, c, g, or t
  misc_feature (1083)..(1083): n is a, c, g, or t
  misc_feature (1090)..(1090): n is a, c, g, or t
  misc_feature (1093)..(1094): n is a, c, g, or t
  misc_feature (1103)..(1103): n is a, c, g, or t
  misc_feature (1111)..(1111): n is a, c, g, or t
  misc_feature (1115)..(1115): n is a, c, g, or t
  misc_feature (1119)..(1119): n is a, c, g, or t
  misc_feature (1125)..(1125): n is a, c, g, or t
  misc_feature (1133)..(1135): n is a, c, g, or t
  misc_feature (1141)..(1141): n is a, c, g, or t
  misc_feature (1144)..(1145): n is a, c, g, or t
  misc_feature (1150)..(1150): n is a, c, g, or t
  misc_feature (1152)..(1152): n is a, c, g, or t
  misc_feature (1155)..(1156): n is a, c, g, or t
  misc_feature (1161)..(1162): n is a, c, g, or t
  misc_feature (1164)..(1165): n is a, c, g, or t
  misc_feature (1183)..(1183): n is a, c, g, or t
  misc_feature (1191)..(1191): n is a, c, g, or t
  misc_feature (1193)..(1194): n is a, c, g, or t
  misc_feature (1199)..(1199): n is a, c, g, or t
  misc_feature (1203)..(1203): n is a, c, g, or t
  misc_feature (1206)..(1207): n is a, c, g, or t
  misc_feature (1213)..(1213): n is a, c, g, or t
  misc_feature (1222)..(1222): n is a, c, g, or t
  misc_feature (1224)..(1225): n is a, c, g, or t
  misc_feature (1227)..(1229): n is a, c, g, or t
  misc_feature (1237)..(1237): n is a, c, g, or t
  misc_feature (1239)..(1239): n is a, c, g, or t
  misc_feature (1241)..(1242): n is a, c, g, or t
  misc_feature (1251)..(1254): n is a, c, g, or t
  misc_feature (1261)..(1263): n is a, c, g, or t
  misc_feature (1268)..(1269): n is a, c, g, or t
  misc_feature (1278)..(1278): n is a, c, g, or t
  misc_feature (1285)..(1285): n is a, c, g, or t
  misc_feature (1287)..(1288): n is a, c, g, or t
  misc_feature (1290)..(1291): n is a, c, g, or t
  misc_feature (1294)..(1295): n is a, c, g, or t
  misc_feature (1297)..(1297): n is a, c, g, or t
  misc_feature (1299)..(1302): n is a, c, g, or t
  misc_feature (1309)..(1309): n is a, c, g, or t
  misc_feature (1312)..(1312): n is a, c, g, or t
  misc_feature (1317)..(1317): n is a, c, g, or t
  misc_feature (1319)..(1319): n is a, c, g, or t
  misc_feature (1321)..(1321): n is a, c, g, or t
  misc_feature (1324)..(1325): n is a, c, g, or t
  misc_feature (1337)..(1337): n is a, c, g, or t
  misc_feature (1340)..(1340): n is a, c, g, or t
  misc_feature (1346)..(1346): n is a, c, g, or t
  misc_feature (1355)..(1355): n is a, c, g, or t
  misc_feature (1362)..(1362): n is a, c, g, or t
  misc_feature (1364)..(1364): n is a, c, g, or t
  misc_feature (1369)..(1369): n is a, c, g, or t
  misc_feature (1378)..(1378): n is a, c, g, or t
  misc_feature (1380)..(1380): n is a, c, g, or t
  misc_feature (1385)..(1388): n is a, c, g, or t
  misc_feature (1396)..(1396): n is a, c, g, or t
  misc_feature (1404)..(1404): n is a, c, g, or t
  misc_feature (1412)..(1414): n is a, c, g, or t
  misc_feature (1423)..(1423): n is a, c, g, or t
  misc_feature (1427)..(1427): n is a, c, g, or t
  misc_feature (1430)..(1430): n is a, c, g, or t
  misc_feature (1432)..(1432): n is a, c, g, or t
  misc_feature (1436)..(1436): n is a, c, g, or t
  misc_feature (1439)..(1441): n is a, c, g, or t
  misc_feature (1444)..(1446): n is a, c, g, or t
  misc_feature (1448)..(1448): n is a, c, g, or t
nntagagagaattactatgagaggatcgcatcaccattcaccatcacgggatcctatttaggtgacactatagaatcgtcgacccacgcgtccggcctggcggtgggtgncctganggagcaggcgggactgctgctgcacgtggccaacctggncaccattctgtgtttcccagcggctgtggtcttactggttgaatctatcactccagtgggctccctgctggcgctgatggcgcacaccatcctcttcctcaagctcttctcctaccgcgacgtcaactcatggtgccgcagggccagggccaaggctgcctctgcagggaagaaggccagcagtgctgctgccccgcacaccgtgagctacccggacaatctgacctaccgcgatctctactacttcctcttcncccccaccttgtgctacnagctcaactttccccgctctccccgcatccggaagcgctttctgctgcgacggatccttgagatgctgttcttcacccagctccaggtggggctgatccagcantggatggtccccaccatccagaactccatgaagcccttcaaggacatggactactcacgcatcatcgagcgcctcctgaagctggcggtccccaatcacctcatctggctcatcttcttctactgnctcttccactcctgcctgaatgccgtgnctgagctcatgcantttggaaaccgggaagttctaccnnggactggttggaactccgangtctgtcacctacttctgggcaaaaantggaaaaatccctgttgcacaagtgnangcatnnaagacaacttctanaanccccattgcttnnacgggggaaaanaanaaattgnaatggccnaggananggggtgttccctggccttcggncctttcttccannnanaccttnnggagcgntccctcngcaaatgttnccancttggggggtatcacgggcatnnaannantcaaaanncaactgggcctgttttcngggnccnnttntttcanggnancanagncaacgnaatntnnggggattttnacttatnattnagaaaaacnaaaaagnccntncttaagntannttcacgaancaataagngtcnaacnaaaaanccccaaannnaaaagnctnnatttntnaannaaggnntnngtttttcaaagtcccccnaaacccgntnnaaaancaanctnncccctnaaagctctnannannngaaaaggnantnnatgaaaacnnnncatcctnnnttctnngaagacttnctgcccntnntnnttnntntnnnncacctanagntaggnanancgnnataaaaataaanatnctcttngtgatatanaaactcncnctcgnaacaaaaananaaaannnnttcttttnaaaaaaanaaacatannntccactctnagantcnanacanttnnnaannngn

SEQ ID NO: 712 - DNA, 1200 bp, Homo Sapiens
  misc_feature (3)..(3): n is a, c, g, or t
  misc_feature (178)..(178): n is a, c, g, or t
  misc_feature (446)..(446): n is a, c, g, or t
  misc_feature (560)..(560): n is a, c, g, or t
  misc_feature (594)..(594): n is a, c, g, or t
  misc_feature (779)..(779): n is a, c, g, or t
  misc_feature (809)..(809): n is a, c, g, or t
  misc_feature (811)..(811): n is a, c, g, or t
  misc_feature (825)..(825): n is a, c, g, or t
  misc_feature (838)..(838): n is a, c, g, or t
  misc_feature (843)..(843): n is a, c, g, or t
  misc_feature (939)..(939): n is a, c, g, or t
  misc_feature (951)..(951): n is a, c, g, or t
  misc_feature (957)..(957): n is a, c, g, or t
  misc_feature (963)..(963): n is a, c, g, or t
  misc_feature (974)..(974): n is a, c, g, or t
  misc_feature (980)..(980): n is a, c, g, or t
  misc_feature (985)..(985): n is a, c, g, or t
  misc_feature (988)..(988): n is a, c, g, or t
  misc_feature (995)..(995): n is a, c, g, or t
  misc_feature (998)..(998): n is a, c, g, or t
  misc_feature (1006)..(1006): n is a, c, g, or t
  misc_feature (1013)..(1013): n is a, c, g, or t
  misc_feature (1021)..(1021): n is a, c, g, or t
  misc_feature (1026)..(1026): n is a, c, g, or t
  misc_feature (1034)..(1035): n is a, c, g, or t
  misc_feature (1042)..(1042): n is a, c, g, or t
  misc_feature (1044)..(1044): n is a, c, g, or t
  misc_feature (1059)..(1059): n is a, c, g, or t
  misc_feature (1063)..(1063): n is a, c, g, or t
  misc_feature (1074)..(1074): n is a, c, g, or t
  misc_feature (1086)..(1086): n is a, c, g, or t
  misc_feature (1091)..(1091): n is a, c, g, or t
  misc_feature (1100)..(1100): n is a, c, g, or t
  misc_feature (1108)..(1108): n is a, c, g, or t
  misc_feature (1115)..(1115): n is a, c, g, or t
  misc_feature (1120)..(1120): n is a, c, g, or t
  misc_feature (1148)..(1148): n is a, c, g, or t
  misc_feature (1153)..(1153): n is a, c, g, or t
  misc_feature (1166)..(1166): n is a, c, g, or t
  misc_feature (1188)..(1188): n is a, c, g, or t
  misc_feature (1191)..(1192): n is a, c, g, or t
  misc_feature (1194)..(1194): n is a, c, g, or t
gantagagaaattactatgagaggatcgcatcaccatcaccatcacggatcctatttaggtgacactatagaatcgtcgacccacgcgtccgcccacgcgtccgctttgtgcctgacagtggttgggtgggccaccagtaactacttcgtgggtgccattcaagagattcctaaagcnaaggagttcatggctaatttccataagaccctcattttggggaagggaaaaactctgactaatgaagcatccacgaagaaggtagaacttgacaactgcccttctgtgtctccttacctcagaggccagagcaagctcattttcaaaccagatctcactttggaagaggtacaggcagaaaatcccaaagtgtccagaggccggtatcgccctcaggaatgtaaagctttacagagggtcgccatcctcgttccccaccgtaacaganagaaacacctgatgtacctgctggaacatctgcatcccttcctgcagaggcagcagctggattatggcatctacgtcatccaccaggctgaaggtaaaaagtttaatcgagccnaactcttgaatgtgggctatctagaagccctcanggaagaaaattgggactgctttatattccacgatgtggacctggtacccgagaatgactttaacctttacaagtgtgaggagcatcccaagcatctggtggttggcaggaacagcactgggtacaggttacgttacagtggatattttgggggtgttactgccctaagcagagagcagtttttcnaggtgaatggattctctaacaactactggngnatggggaggcgaanacgatgacctcanactcngggttgagctccaaagaatgaaaattttcccggccccctgcctgaagtggggtaaatatacaatggtcttccacactaaagacaaaaggcaatganggtgaaacgcanaacggnatgaanctcttacaccnaagtgntcacnagnctggaanaanaaatgggnttgaatnaattgttntttanaaattaannatctggngnaacaaaatccctttnaaanatcaacatccncagtgggaattnctggntttggggcnatgacccngggaatnttttnggggaaagttttggaaaaaactgaattnttttntttgggcaaaaanttttggcccctaaaaacctccnaanntnaacccc

SEQ ID NO: 713 - DNA, 1423 bp, Homo Sapiens
  misc_feature (935)..(935): n is a, c, g, or t
  misc_feature (955)..(955): n is a, c, g, or t
  misc_feature (966)..(966): n is a, c, g, or t
  misc_feature (990)..(990): n is a, c, g, or t
  misc_feature (1022)..(1022): n is a, c, g, or t
  misc_feature (1047)..(1047): n is a, c, g, or t
  misc_feature (1049)..(1049): n is a, c, g, or t
  misc_feature (1073)..(1073): n is a, c, g, or t
  misc_feature (1080)..(1080): n is a, c, g, or t
  misc_feature (1093)..(1093): n is a, c, g, or t
  misc_feature (1131)..(1131): n is a, c, g, or t
  misc_feature (1139)..(1139): n is a, c, g, or t
  misc_feature (1149)..(1149): n is a, c, g, or t
  misc_feature (1188)..(1188): n is a, c, g, or t
  misc_feature (1192)..(1192): n is a, c, g, or t
  misc_feature (1196)..(1196): n is a, c, g, or t
  misc_feature (1205)..(1205): n is a, c, g, or t
  misc_feature (1210)..(1210): n is a, c, g, or t
  misc_feature (1214)..(1214): n is a, c, g, or t
  misc_feature (1224)..(1224): n is a, c, g, or t
  misc_feature (1235)..(1235): n is a, c, g, or t
  misc_feature (1243)..(1243): n is a, c, g, or t
  misc_feature (1250)..(1250): n is a, c, g, or t
  misc_feature (1252)..(1252): n is a, c, g, or t
  misc_feature (1266)..(1266): n is a, c, g, or t
  misc_feature (1275)..(1275): n is a, c, g, or t
  misc_feature (1290)..(1290): n is a, c, g, or t
  misc_feature (1297)..(1297): n is a, c, g, or t
  misc_feature (1302)..(1302): n is a, c, g, or t
  misc_feature (1308)..(1308): n is a, c, g, or t
  misc_feature (1312)..(1315): n is a, c, g, or t
  misc_feature (1318)..(1319): n is a, c, g, or t
  misc_feature (1329)..(1329): n is a, c, g, or t
  misc_feature (1333)..(1333): n is a, c, g, or t
  misc_feature (1337)..(1337): n is a, c, g, or t
  misc_feature (1343)..(1343): n is a, c, g, or t
  misc_feature (1349)..(1350): n is a, c, g, or t
  misc_feature (1356)..(1357): n is a, c, g, or t
  misc_feature (1359)..(1360): n is a, c, g, or t
  misc_feature (1366)..(1366): n is a, c, g, or t
  misc_feature (1374)..(1374): n is a, c, g, or t
  misc_feature (1376)..(1376): n is a, c, g, or t
  misc_feature (1395)..(1395): n is a, c, g, or t
  misc_feature (1406)..(1406): n is a, c, g, or t
  misc_feature (1411)..(1412): n is a, c, g, or t
  misc_feature (1415)..(1415): n is a, c, g, or t
  misc_feature (1419)..(1419): n is a, c, g, or t
  misc_feature (1423)..(1423): n is a, c, g, or t
aatagagagattactatgagaggatcgcatcaccatcaccatcacggatcctatttaggtgacactatagaatcgtcgacccacgcgtccgcggacgcgtgggcggacgcgtgggcgaactgcagccatggagcaggcacctccggaccccgagcggcagctccagccggcgcccttggagccgctgggctccccagacgctgggctgggggctgcggtcggcaaggaagcggagggggccggagaagagagctctggggtcgacacgatgacacacaataatttttggttgaagaagatagaaatcagtgtttcagaagcagaaaaacgaactggaagaaatgccatgaacatgcaagaaacatatactgcttacctcattgaaacaaggtcagttgaacataccgatggtcagagtgtcctaacagactcactatggcggcgatatagtgaatttgagttgttgagaagctaccttttagtttactatccacatattgttgtgccacctctgccagaaaaacgggcagaatttgtttggcataaactctctgctgacaacatggatccagattttgtggagaggcgacggattggtttagaaaactttctcttgaggattgcttcacatcccatcctttgtagagacaaaatcttctatctgtttttaacacaggaaggtaactggaaggagactgtgaatgaaactgggtttcagctgaaggagatttactgaccttaagcactatagtgatgaactgcagtctgtcatctcacatcttcttcgagtcagagctagagtagcagatcgactctatggtgtatataaagtacatgggaattatggtcgagttttcagtgaatggagtgccatagaaaaagaaatgggtgatggactgcagagtgctggtcatcatatggatgtgtatgcatcntctattgatgatattttggnaaaatgaagancattatgcagatcagttaaaagantatcttttttttgcaaaaacattgcggggctntgtgcaggaaacatgaacttatgcnantatgacttggaaatggctgctccngacttancatcccaaaaacncccatgtgaggaactggtaactgggaactttgaaaacnttcctttnaagggaagantaccaaccttttggtcaaaaacccaaacaaaaaaaaccnaaanaagngctaaaaancatantgangaaacacccntagtctaaatntggaggcnaaatttngnaaaccctggctttnttaaccttnaaaaaaaaaccaacntaagggnccccnaacttncccnnnnatnnattggaaagnaatncttngcccgnaaaaannttcaanntnngttttnttttcccngncccccaaaccaaaaaaatncccccaaaaanaaaannttntttntggn

SEQ ID NO: 714 - DNA, 1320 bp, Homo Sapiens
  misc_feature (838)..(838): n is a, c, g, or t
  misc_feature (919)..(919): n is a, c, g, or t
  misc_feature (927)..(927): n is a, c, g, or t
  misc_feature (945)..(945): n is a, c, g, or t
  misc_feature (947)..(947): n is a, c, g, or t
  misc_feature (951)..(951): n is a, c, g, or t
  misc_feature (980)..(980): n is a, c, g, or t
  misc_feature (983)..(983): n is a, c, g, or t
  misc_feature (985)..(985): n is a, c, g, or t
  misc_feature (1002)..(1002): n is a, c, g, or t
  misc_feature (1007)..(1007): n is a, c, g, or t
  misc_feature (1014)..(1014): n is a, c, g, or t
  misc_feature (1021)..(1021): n is a, c, g, or t
  misc_feature (1053)..(1053): n is a, c, g, or t
  misc_feature (1070)..(1070): n is a, c, g, or t
  misc_feature (1072)..(1072): n is a, c, g, or t
  misc_feature (1074)..(1074): n is a, c, g, or t
  misc_feature (1085)..(1085): n is a, c, g, or t
  misc_feature (1092)..(1092): n is a, c, g, or t
  misc_feature (1097)..(1098): n is a, c, g, or t
  misc_feature (1101)..(1101): n is a, c, g, or t
  misc_feature (1116)..(1117): n is a, c, g, or t
  misc_feature (1132)..(1132): n is a, c, g, or t
  misc_feature (1138)..(1138): n is a, c, g, or t
  misc_feature (1146)..(1146): n is a, c, g, or t
  misc_feature (1148)..(1148): n is a, c, g, or t
  misc_feature (1158)..(1159): n is a, c, g, or t
  misc_feature (1172)..(1173): n is a, c, g, or t
  misc_feature (1175)..(1175): n is a, c, g, or t
  misc_feature (1178)..(1180): n is a, c, g, or t
  misc_feature (1182)..(1182): n is a, c, g, or t
  misc_feature (1188)..(1188): n is a, c, g, or t
  misc_feature (1190)..(1190): n is a, c, g, or t
  misc_feature (1194)..(1194): n is a, c, g, or t
  misc_feature (1198)..(1198): n is a, c, g, or t
  misc_feature (1201)..(1206): n is a, c, g, or t
  misc_feature (1208)..(1208): n is a, c, g, or t
  misc_feature (1210)..(1211): n is a, c, g, or t
  misc_feature (1213)..(1213): n is a, c, g, or t
  misc_feature (1217)..(1218): n is a, c, g, or t
  misc_feature (1226)..(1227): n is a, c, g, or t
  misc_feature (1229)..(1229): n is a, c, g, or t
  misc_feature (1233)..(1233): n is a, c, g, or t
  misc_feature (1241)..(1241): n is a, c, g, or t
  misc_feature (1245)..(1245): n is a, c, g, or t
  misc_feature (1251)..(1252): n is a, c, g, or t
  misc_feature (1259)..(1260): n is a, c, g, or t
  misc_feature (1269)..(1269): n is a, c, g, or t
  misc_feature (1274)..(1279): n is a, c, g, or t
  misc_feature (1282)..(1282): n is a, c, g, or t
  misc_feature (1286)..(1286): n is a, c, g, or t
  misc_feature (1293)..(1293): n is a, c, g, or t
  misc_feature (1297)..(1298): n is a, c, g, or t
  misc_feature (1301)..(1302): n is a, c, g, or t
  misc_feature (1304)..(1304): n is a, c, g, or t
  misc_feature (1307)..(1312): n is a, c, g, or t
  misc_feature (1315)..(1316): n is a, c, g, or t
  misc_feature (1320)..(1320): n is a, c, g, or t
agaaattactatgagaggatcgcatcaccatcaccatcacggatcctatttaggtgacactatagaatcgtcgacccacgcgtccggtggcttcctggatgactgcgtcgatccctgctgtgattctttgacctgccagctgaggccaggtgcacagtgtgcatctgacggaccctgttgtcaaaattgccagctgcgcccgtctggctggcagtgtcgtcctaccagaggggattgtgacttgcctgaattctgcccaggagacagctcccagtgtccccctgatgtcagcctaggggatggcgagccctgcgctggcgggcaagctgtgtgcatgcacgggcgttgtgcctcctatgcccagcagtgccagtcactttggggacctggagcccagcccgctgcgccactttgcctccagacagctaatactcggggaaatgcttttgggagctgtgggcgcaaccccagtggcagttatgtgtcctgcacccctagagatgccatttgtgggcagctccagtgccagacaggtaggacccagcctctgctgggctccatccgggatctactctgggagacaatagatgtgaatgggactgagctgaactgcagctgggtgcacctggacctgggcagtgatgtggcccagcccctcctgactctgcctggcacagcctgtggccctggcctggtgtgtatagaccatcgatgccagcgtgtggatctcctgggggcacaggaatgtcgaagcaaatgccatggacatggggtctgtgacagcaacaggcactgctactgtgaggagggctgggcaccccctgactgcaccactcanctcaaagcaaccagctccctgaaccacagggctgctcctcagcctcctggtcttattggtcctggtgatgcttggtgccanctactggnaccgtgcccgcctgcacnancgantctgccaactcaagggacccacctgccantananggcaaccccaatctggntcccnctgaaanggccaanaacctccccaaaaggcccctgctggcacaagnactaaacaaggtaatgntntnaacttcccggnccccccnttcannccnttgcccctgaacctnntttcaaaaaaaatcnaatttnaaggggcnancaaacccccnnccccaaaaaaacnntnccnnncnaacccnanggcngggnccnnnnnngnanntncccnncccagggnntnaaancccccccnaggnaacctnnaaaaaannccccccccnaaaannnnnnccnttantttaaancccnnaanntnccnnnnnnaannaaan

SEQ ID NO: 715 - DNA, 1193 bp, Homo Sapiens
  misc_feature (1)..(1): n is a, c, g, or t
  misc_feature (840)..(840): n is a, c, g, or t
  misc_feature (905)..(905): n is a, c, g, or t
  misc_feature (910)..(910): n is a, c, g, or t
  misc_feature (956)..(956): n is a, c, g, or t
  misc_feature (959)..(959): n is a, c, g, or t
  misc_feature (967)..(967): n is a, c, g, or t
  misc_feature (970)..(970): n is a, c, g, or t
  misc_feature (973)..(973): n is a, c, g, or t
  misc_feature (979)..(979): n is a, c, g, or t
  misc_feature (997)..(997): n is a, c, g, or t
  misc_feature (1005)..(1006): n is a, c, g, or t
  misc_feature (1008)..(1008): n is a, c, g, or t
  misc_feature (1030)..(1030): n is a, c, g, or t
  misc_feature (1033)..(1033): n is a, c, g, or t
  misc_feature (1036)..(1036): n is a, c, g, or t
  misc_feature (1040)..(1040): n is a, c, g, or t
  misc_feature (1043)..(1043): n is a, c, g, or t
  misc_feature (1047)..(1047): n is a, c, g, or t
  misc_feature (1059)..(1059): n is a, c, g, or t
  misc_feature (1066)..(1067): n is a, c, g, or t
  misc_feature (1070)..(1071): n is a, c, g, or t
  misc_feature (1079)..(1079): n is a, c, g, or t
  misc_feature (1082)..(1082): n is a, c, g, or t
  misc_feature (1087)..(1087): n is a, c, g, or t
  misc_feature (1090)..(1090): n is a, c, g, or t
  misc_feature (1106)..(1106): n is a, c, g, or t
  misc_feature (1109)..(1109): n is a, c, g, or t
  misc_feature (1114)..(1114): n is a, c, g, or t
  misc_feature (1118)..(1118): n is a, c, g, or t
  misc_feature (1121)..(1121): n is a, c, g, or t
  misc_feature (1123)..(1123): n is a, c, g, or t
  misc_feature (1127)..(1127): n is a, c, g, or t
  misc_feature (1130)..(1130): n is a, c, g, or t
  misc_feature (1137)..(1137): n is a, c, g, or t
  misc_feature (1145)..(1145): n is a, c, g, or t
  misc_feature (1147)..(1147): n is a, c, g, or t
  misc_feature (1150)..(1150): n is a, c, g, or t
  misc_feature (1153)..(1153): n is a, c, g, or t
  misc_feature (1158)..(1158): n is a, c, g, or t
  misc_feature (1161)..(1161): n is a, c, g, or t
  misc_feature (1163)..(1163): n is a, c, g, or t
  misc_feature (1166)..(1166): n is a, c, g, or t
  misc_feature (1170)..(1170): n is a, c, g, or t
  misc_feature (1173)..(1173): n is a, c, g, or t
  misc_feature (1180)..(1180): n is a, c, g, or t
  misc_feature (1183)..(1183): n is a, c, g, or t
  misc_feature (1189)..(1189): n is a, c, g, or t
  misc_feature (1193)..(1193): n is a, c, g, or t
naattagagaaattaactatgagaggatcgcatcaccatcaccatcacggatcctatttaggtgacactatagaatcgtcgacccacgcgtccgctgtcgcgggcggcgcccggccttgctcaacgcccagcagtccccaccgtcgctgccgccgccaccgccctcggccgctgccgaggcctcctgcagccatcatgtccgccagcgccgtctacgtgctggacctgaagggcaaggtgctcatctgccggaactaccgtggcgacgtggacatgtcagaggtggagcacttcatgcccatcctgatggagaaggaggaggaggggatgctgtcgcccatcctggcccacgggggggtccgtttcatgtggatcaaacacaacaacctgtatctggttgccacatccaagaagaacgcgtgcgtgtcgctggtcttttctttcctctataaggtggtgcaggtgttttccgagtacttcaaggagctggaggaggagagcatccgggacaactttgttatcatctacgagctgctggacgagctcatggacttcggctacccccagaccaccgacagcaagatgcgagtcttcctctcgggcatgcccgagctgcgcctgggcctcaacgacaaggtcctctttgacaacacgggccgcggcaaaagcaaatccgtggagctggaggatgtgaagttccaccagtgtgtgcggctatcacgcttcgagaatgaccgcaccatctccttcatcccacccgacggcgagttcgagctcatgtcctaccgtctcaacacccacgtcaagcctttgatatggatcgagtcggtgatcgaaaancactcccacagccgcatcgagtacatgatcaaggccaaaaagccagttcaagcggcggtcaacanccaanaacgtggaaatccacattcccgtgcccaatgatgccgactcacccnaanttcaaaanaanggngggaancgttaaatgggttccccnaaaaaaannanattgggggggtccatcaagtcnttnccngggnggnaagnaaaaactgaagngggcccnnttnngcctgccnaanggggnagnccaaaaaaagaagggnaanccccnaatnaangncaanttnaaaatcntttatttnanacntcnggatncangnggnctanctnaaaattnttnaaaaangggn

SEQ ID NO: 716 - DNA, 1392 bp, Homo Sapiens
  misc_feature (771)..(771): n is a, c, g, or t
  misc_feature (842)..(842): n is a, c, g, or t
  misc_feature (847)..(847): n is a, c, g, or t
  misc_feature (853)..(853): n is a, c, g, or t
  misc_feature (864)..(864): n is a, c, g, or t
  misc_feature (871)..(871): n is a, c, g, or t
  misc_feature (873)..(873): n is a, c, g, or t
  misc_feature (920)..(920): n is a, c, g, or t
  misc_feature (937)..(937): n is a, c, g, or t
  misc_feature (939)..(939): n is a, c, g, or t
  misc_feature (942)..(942): n is a, c, g, or t
  misc_feature (948)..(948): n is a, c, g, or t
  misc_feature (957)..(957): n is a, c, g, or t
  misc_feature (959)..(959): n is a, c, g, or t
  misc_feature (965)..(966): n is a, c, g, or t
  misc_feature (970)..(970): n is a, c, g, or t
  misc_feature (973)..(973): n is a, c, g, or t
  misc_feature (993)..(993): n is a, c, g, or t
  misc_feature (998)..(998): n is a, c, g, or t
  misc_feature (1005)..(1005): n is a, c, g, or t
  misc_feature (1007)..(1007): n is a, c, g, or t
  misc_feature (1015)..(1015): n is a, c, g, or t
  misc_feature (1019)..(1019): n is a, c, g, or t
  misc_feature (1044)..(1044): n is a, c, g, or t
  misc_feature (1052)..(1052): n is a, c, g, or t
  misc_feature (1056)..(1056): n is a, c, g, or t
  misc_feature (1058)..(1059): n is a, c, g, or t
  misc_feature (1062)..(1062): n is a, c, g, or t
  misc_feature (1070)..(1070): n is a, c, g, or t
  misc_feature (1073)..(1073): n is a, c, g, or t
  misc_feature (1076)..(1077): n is a, c, g, or t
  misc_feature (1080)..(1080): n is a, c, g, or t
  misc_feature (1083)..(1086): n is a, c, g, or t
  misc_feature (1093)..(1094): n is a, c, g, or t
  misc_feature (1099)..(1099): n is a, c, g, or t
  misc_feature (1105)..(1105): n is a, c, g, or t
  misc_feature (1108)..(1108): n is a, c, g, or t
  misc_feature (1110)..(1110): n is a, c, g, or t
  misc_feature (1118)..(1118): n is a, c, g, or t
  misc_feature (1124)..(1124): n is a, c, g, or t
  misc_feature (1127)..(1128): n is a, c, g, or t
  misc_feature (1130)..(1134): n is a, c, g, or t
  misc_feature (1139)..(1139): n is a, c, g, or t
  misc_feature (1143)..(1143): n is a, c, g, or t
  misc_feature (1145)..(1145): n is a, c, g, or t
  misc_feature (1151)..(1151): n is a, c, g, or t
  misc_feature (1155)..(1155): n is a, c, g, or t
  misc_feature (1160)..(1162): n is a, c, g, or t
  misc_feature (1166)..(1166): n is a, c, g, or t
  misc_feature (1170)..(1170): n is a, c, g, or t
  misc_feature (1174)..(1174): n is a, c, g, or t
  misc_feature (1179)..(1180): n is a, c, g, or t
  misc_feature (1183)..(1184): n is a, c, g, or t
  misc_feature (1186)..(1186): n is a, c, g, or t
  misc_feature (1189)..(1189): n is a, c, g, or t
  misc_feature (1191)..(1191): n is a, c, g, or t
  misc_feature (1195)..(1196): n is a, c, g, or t
  misc_feature (1199)..(1203): n is a, c, g, or t
  misc_feature (1214)..(1214): n is a, c, g, or t
  misc_feature (1217)..(1219): n is a, c, g, or t
  misc_feature (1225)..(1226): n is a, c, g, or t
  misc_feature (1231)..(1231): n is a, c, g, or t
  misc_feature (1234)..(1236): n is a, c, g, or t
  misc_feature (1238)..(1239): n is a, c, g, or t
  misc_feature (1243)..(1243): n is a, c, g, or t
  misc_feature (1246)..(1248): n is a, c, g, or t
  misc_feature (1250)..(1255): n is a, c, g, or t
  misc_feature (1259)..(1265): n is a, c, g, or t
  misc_feature (1270)..(1270): n is a, c, g, or t
  misc_feature (1272)..(1272): n is a, c, g, or t
  misc_feature (1279)..(1279): n is a, c, g, or t
  misc_feature (1281)..(1286): n is a, c, g, or t
  misc_feature (1290)..(1292): n is a, c, g, or t
  misc_feature (1294)..(1295): n is a, c, g, or t
  misc_feature (1298)..(1300): n is a, c, g, or t
  misc_feature (1302)..(1304): n is a, c, g, or t
  misc_feature (1306)..(1306): n is a, c, g, or t
  misc_feature (1309)..(1309): n is a, c, g, or t
  misc_feature (1311)..(1313): n is a, c, g, or t
  misc_feature (1318)..(1322): n is a, c, g, or t
  misc_feature (1329)..(1329): n is a, c, g, or t
  misc_feature (1335)..(1338): n is a, c, g, or t
  misc_feature (1341)..(1343): n is a, c, g, or t
  misc_feature (1346)..(1349): n is a, c, g, or t
  misc_feature (1352)..(1356): n is a, c, g, or t
  misc_feature (1358)..(1358): n is a, c, g, or t
  misc_feature (1364)..(1367): n is a, c, g, or t
  misc_feature (1372)..(1373): n is a, c, g, or t
  misc_feature (1375)..(1375): n is a, c, g, or t
  misc_feature (1377)..(1377): n is a, c, g, or t
  misc_feature (1379)..(1380): n is a, c, g, or t
  misc_feature (1382)..(1383): n is a, c, g, or t
  misc_feature (1385)..(1385): n is a, c, g, or t
  misc_feature (1387)..(1387): n is a, c, g, or t
  misc_feature (1391)..(1392): n is a, c, g, or t
attagagaaattactatgagaggatcgcatcaccatcaccatcacggatcctatttaggtgacactatagaatcgtcgacccacgcgtccgacaccctggatcctgcagagcctggcgagaaaaccccggtgaggccggtgacccaggggggctccctgcagtccccaccacgctccccacggcccgccagcgtccgcactcgtaagcataccttcggacagcgctgcgtctccagccggccggcggccccaggcggagaggaggccgaggcctcggacccagccgacgaggaggtcagccacatcaccagctccgcctgcccctggcagcccacagccgagccccatggccccgaagcctctccggtggccggcggcgagcgggacctgcgcaggctctacagcgtggacgctcagggcttcctggacaagccgggccgggcagacgagcagtggcggccctcggcggagctgggcagcggggagcctggggaggcgaaggcctggggccctgaggccgagcccgctctgggtgcgcgcagaaagaagaagatgagccccccctgcatctcggtggaaccccctgcggaggacgagggctctgcgcggccctccgcggcagagggcggcagcaccacactgaggcgcaggaccccgtcctgtgaggccacgcctcacagggactccctggagcccacagagggctcaggcgccgggggggaccctgcagccaagggggagcgctggggccaggcctcctgccgggctgancacctgaccgtccccagctttgcctttgagccgctggacctcggggtccccagtggagacctttcttgganggtanccacantgtgaacccanaatccanancttcctctttaggggccatattgcccctggaaccccaaaattaaaanccttcccatgcccgttngngancccccnaaaaaaaangngggggnntgtnacntcaaaattccccaattttcntttgnaaaaaananggtccccnttancaacccttgccccagggggtggtgnaaaataancccntnntantttggggnttngtnnccnccnnnngtttttnnccctnggtttnggngncccccttnggttgnaanncnnnnnaaaancctngnttggancctnatttnnntccntttnaaanaaaannccnngnaanantaannccnnnnnctttttttttnccnnnaaaaannaaaanttnnngnnccanaannncnnnnnntttnnnnnnnttttncnaattttnannnnnnattnnngnnaannntnnncnccntnnnaaaannnnntttttanaaaaannnnccnnnaannnnaannnnntntttttnnnnttttnnanantnngnntntntttnn

SEQ ID NO: 717 - DNA, 1427 bp, Homo Sapiens
  misc_feature (15)..(15): n is a, c, g, or t
  misc_feature (17)..(17): n is a, c, g, or t
  misc_feature (687)..(687): n is a, c, g, or t
  misc_feature (695)..(695): n is a, c, g, or t
  misc_feature (771)..(771): n is a, c, g, or t
  misc_feature (834)..(834): n is a, c, g, or t
  misc_feature (845)..(845): n is a, c, g, or t
  misc_feature (849)..(849): n is a, c, g, or t
  misc_feature (854)..(854): n is a, c, g, or t
  misc_feature (858)..(858): n is a, c, g, or t
  misc_feature (888)..(888): n is a, c, g, or t
  misc_feature (891)..(891): n is a, c, g, or t
  misc_feature (894)..(894): n is a, c, g, or t
  misc_feature (900)..(900): n is a, c, g, or t
  misc_feature (910)..(910): n is a, c, g, or t
  misc_feature (914)..(914): n is a, c, g, or t
  misc_feature (917)..(917): n is a, c, g, or t
  misc_feature (923)..(923): n is a, c, g, or t
  misc_feature (929)..(929): n is a, c, g, or t
  misc_feature (931)..(931): n is a, c, g, or t
  misc_feature (939)..(939): n is a, c, g, or t
  misc_feature (943)..(943): n is a, c, g, or t
  misc_feature (954)..(954): n is a, c, g, or t
  misc_feature (959)..(959): n is a, c, g, or t
  misc_feature (991)..(991): n is a, c, g, or t
  misc_feature (997)..(997): n is a, c, g, or t
  misc_feature (1004)..(1005): n is a, c, g, or t
  misc_feature (1011)..(1011): n is a, c, g, or t
  misc_feature (1013)..(1013): n is a, c, g, or t
  misc_feature (1027)..(1027): n is a, c, g, or t
  misc_feature (1032)..(1032): n is a, c, g, or t
  misc_feature (1046)..(1046): n is a, c, g, or t
  misc_feature (1054)..(1054): n is a, c, g, or t
  misc_feature (1065)..(1065): n is a, c, g, or t
  misc_feature (1075)..(1076): n is a, c, g, or t
  misc_feature (1083)..(1084): n is a, c, g, or t
  misc_feature (1089)..(1090): n is a, c, g, or t
  misc_feature (1093)..(1093): n is a, c, g, or t
  misc_feature (1099)..(1099): n is a, c, g, or t
  misc_feature (1104)..(1104): n is a, c, g, or t
  misc_feature (1106)..(1107): n is a, c, g, or t
  misc_feature (1109)..(1110): n is a, c, g, or t
  misc_feature (1120)..(1120): n is a, c, g, or t
  misc_feature (1125)..(1125): n is a, c, g, or t
  misc_feature (1128)..(1130): n is a, c, g, or t
  misc_feature (1136)..(1137): n is a, c, g, or t
  misc_feature (1142)..(1142): n is a, c, g, or t
  misc_feature (1146)..(1146): n is a, c, g, or t
  misc_feature (1148)..(1149): n is a, c, g, or t
  misc_feature (1151)..(1151): n is a, c, g, or t
  misc_feature (1171)..(1171): n is a, c, g, or t
  misc_feature (1173)..(1173): n is a, c, g, or t
  misc_feature (1184)..(1184): n is a, c, g, or t
  misc_feature (1187)..(1187): n is a, c, g, or t
  misc_feature (1189)..(1189): n is a, c, g, or t
  misc_feature (1198)..(1198): n is a, c, g, or t
  misc_feature (1202)..(1202): n is a, c, g, or t
  misc_feature (1207)..(1207): n is a, c, g, or t
  misc_feature (1217)..(1217): n is a, c, g, or t
  misc_feature (1223)..(1223): n is a, c, g, or t
  misc_feature (1231)..(1233): n is a, c, g, or t
  misc_feature (1237)..(1238): n is a, c, g, or t
  misc_feature (1246)..(1246): n is a, c, g, or t
  misc_feature (1248)..(1248): n is a, c, g, or t
  misc_feature (1253)..(1253): n is a, c, g, or t
  misc_feature (1277)..(1277): n is a, c, g, or t
  misc_feature (1280)..(1280): n is a, c, g, or t
  misc_feature (1291)..(1291): n is a, c, g, or t
  misc_feature (1306)..(1309): n is a, c, g, or t
  misc_feature (1311)..(1311): n is a, c, g, or t
  misc_feature (1317)..(1317): n is a, c, g, or t
  misc_feature (1333)..(1333): n is a, c, g, or t
  misc_feature (1349)..(1349): n is a, c, g, or t
  misc_feature (1358)..(1358): n is a, c, g, or t
  misc_feature (1360)..(1360): n is a, c, g, or t
  misc_feature (1364)..(1364): n is a, c, g, or t
  misc_feature (1367)..(1367): n is a, c, g, or t
  misc_feature (1369)..(1369): n is a, c, g, or t
  misc_feature (1377)..(1378): n is a, c, g, or t
  misc_feature (1384)..(1384): n is a, c, g, or t
  misc_feature (1408)..(1408): n is a, c, g, or t
  misc_feature (1421)..(1422): n is a, c, g, or t
aaaattagaggaaantnactatgagaggatcgcatcaccatcaccatcacgggatcctatttaggtgacactatagaatcgtcgacccacgcgtccggcttcgtggaggttggccgggtggcctatgtctcctttggacctcatgccggaaaattggtcgcgattgtagatgttattgatcagaacagggctttggtcgatggaccttgcactcaagtgaggagacaggccatgcctttcaagtgcatgcagctcactgatttcatcctcaagtttccgcacagtgcccaccagaagtatgtccgacaagcctggcagaaggcagacatcaatacaaaatgggcagccacacgatgggccaagaagattgaagccagagaaaggaaagccaagatgacagattttgatcgttttaaagttatgaaggcaaagaaaatgaggaacagaataatcaagaatgaagttaagaagcttcaaaaggcagctctcctgaaagcttctccccaaaaagcacctggtactaagggtactgctgctgctgctgctgctgctgctgctgctgctgctgctgctgctgctaaagttccagcaaaaaagatcaccgccgcgagtaaaaaggctccagcccagaaggttcctgcccagaaagccacaggccagaaagcagcgcctgctccaaaagctcanaagggtcnaaaaagctccagcccagaaagcacctgctcccaagggcatctggcaaagaaaagcataagtggcaatcataaaaantaataaaaggttcttttttgacctgtttgaaaaaaaaaaaaaaaaaaaaaaaaaaaaggcggncccctccctanaagngaagncctnattaaaccttaattagctgaacttgggacntcntgnttgaanacattccagnaatngancctccnaaaccncnctcctggntttntttcaaaaacncctcngttggccccccggggggttttttttttggggnaaaaanccaaacnnactttngnccaaaatttttccngggancttaagggaacctnaatatggnaaaaaaaaatnccccggaaannacccccnntttannaantccccnatggnanncnnaaaaaaaaantttgnggnnntttcannccctntgcncnnanggtaccctaaacccaacccntnccgcggggaanttncngcccttttntaanccccnaaaaaaaaanaacccncagttttnnncggnnctttttananttttntccccccgaaaaaggccccccccnaancttctttgggnaaaaaaaaccgaagnnnngnggaatngaaaaattttcccccnttttacccctttttcngggaaaaananaaanttntntcccttgnngaaaanccaaaatatttcggggtttctcantttttccagatgnnggggt

SEQ ID NO: 718 - DNA, 1187 bp, Homo Sapiens
  misc_feature (2)..(2): n is a, c, g, or t
  misc_feature (884)..(884): n is a, c, g, or t
  misc_feature (891)..(891): n is a, c, g, or t
  misc_feature (912)..(912): n is a, c, g, or t
  misc_feature (951)..(951): n is a, c, g, or t
  misc_feature (954)..(954): n is a, c, g, or t
  misc_feature (966)..(966): n is a, c, g, or t
  misc_feature (973)..(973): n is a, c, g, or t
  misc_feature (976)..(976): n is a, c, g, or t
  misc_feature (982)..(982): n is a, c, g, or t
  misc_feature (985)..(985): n is a, c, g, or t
  misc_feature (988)..(988): n is a, c, g, or t
  misc_feature (994)..(994): n is a, c, g, or t
  misc_feature (996)..(996): n is a, c, g, or t
  misc_feature (998)..(998): n is a, c, g, or t
  misc_feature (1007)..(1007): n is a, c, g, or t
  misc_feature (1017)..(1017): n is a, c, g, or t
  misc_feature (1025)..(1025): n is a, c, g, or t
  misc_feature (1028)..(1028): n is a, c, g, or t
  misc_feature (1039)..(1039): n is a, c, g, or t
  misc_feature (1048)..(1048): n is a, c, g, or t
  misc_feature (1068)..(1069): n is a, c, g, or t
  misc_feature (1074)..(1075): n is a, c, g, or t
  misc_feature (1080)..(1080): n is a, c, g, or t
  misc_feature (1085)..(1085): n is a, c, g, or t
  misc_feature (1097)..(1097): n is a, c, g, or t
  misc_feature (1099)..(1100): n is a, c, g, or t
  misc_feature (1102)..(1105): n is a, c, g, or t
  misc_feature (1108)..(1110): n is a, c, g, or t
  misc_feature (1119)..(1119): n is a, c, g, or t
  misc_feature (1121)..(1121): n is a, c, g, or t
  misc_feature (1124)..(1125): n is a, c, g, or t
  misc_feature (1129)..(1131): n is a, c, g, or t
  misc_feature (1134)..(1136): n is a, c, g, or t
  misc_feature (1139)..(1140): n is a, c, g, or t
  misc_feature (1143)..(1143): n is a, c, g, or t
  misc_feature (1153)..(1153): n is a, c, g, or t
  misc_feature (1159)..(1159): n is a, c, g, or t
  misc_feature (1171)..(1173): n is a, c, g, or t
  misc_feature (1175)..(1176): n is a, c, g, or t
  misc_feature (1179)..(1180): n is a, c, g, or t
  misc_feature (1182)..(1182): n is a, c, g, or t
gnattagagagaattactatgagaggatcgcatcaccatcaccatcacggatcctatttaggtgacactatagaatcgtcgacccacgcgtccgcccacgcgtccgctttcttcctaggggtctcctgctgccagctaagtgtgggagaacttgtgcacgtatctcccctccgaatcccaacgatgggtaacgccagctttggctccaaggaacagaagctgctgaagcggttgcggcttctgcccgccctgcttatcctccgcgccttcaagccccacaggaagatcagagattaccgcgtcgtggtagtcggcaccgctggtgtggggaaaagtacgctgctgcacaagtgggcgagcggcaacttccgtcatgagtacctgccgaccattgaaaatacctactgccagttgctgggctgcagccacggtgtgctttccctgcacatcaccgacagcaagagtggcgacggcaaccgcgctctgcagcgccacgttatagcccggggccacgccttcgtcctggtctactcagtcaccaagaaggaaaccctggaagagctgaaggccttctatgagctgatctgcaagatcaaaggtaacaacctgcataagttccccatcgtgctggtgggcaataaaagtgatgacacccaccgggaggtggccctgaatgatggtgccacctgtgcgatggagtggaattgcgccttcatggagatttcagccaagaccgatgtgaatgtgcaggagctgttccacatgctgctgaattacaagaaaaagcccaccaccggcctccaggagcccgagaagaaatcccagatgcccaacaccactgaaaagctgcttgacaagtgcataatcatgtgagccctgggccnttaaaanccagctcttcctatcctgtancgtgtaaaaaacgtggactcatttcactatgttacatgnaanatggttgatttngggctgntgnttggantgnaanatccangntngtcaaaacntaaaccttgnaagggganaanttttttttttnccaggccanaaaattcaaattgttaaaannttggnnttttnaaaangaaaaaaaaaangnnannnngannnattttaagnanggnntttnnnaannnaannaanggaaaaaaangttttnaaaaaaaaaaannntnnaanngnaaaaa

SEQ ID NO: 719 - DNA, 1343 bp, Homo Sapiens
  misc_feature (878)..(878): n is a, c, g, or t
  misc_feature (886)..(886): n is a, c, g, or t
  misc_feature (922)..(922): n is a, c, g, or t
  misc_feature (952)..(952): n is a, c, g, or t
  misc_feature (956)..(956): n is a, c, g, or t
  misc_feature (960)..(960): n is a, c, g, or t
  misc_feature (981)..(982): n is a, c, g, or t
  misc_feature (1012)..(1012): n is a, c, g, or t
  misc_feature (1016)..(1016): n is a, c, g, or t
  misc_feature (1023)..(1023): n is a, c, g, or t
  misc_feature (1030)..(1030): n is a, c, g, or t
  misc_feature (1034)..(1034): n is a, c, g, or t
  misc_feature (1039)..(1039): n is a, c, g, or t
  misc_feature (1046)..(1046): n is a, c, g, or t
  misc_feature (1052)..(1052): n is a, c, g, or t
  misc_feature (1065)..(1065): n is a, c, g, or t
  misc_feature (1077)..(1077): n is a, c, g, or t
  misc_feature (1080)..(1080): n is a, c, g, or t
  misc_feature (1083)..(1083): n is a, c, g, or t
  misc_feature (1092)..(1092): n is a, c, g, or t
  misc_feature (1102)..(1102): n is a, c, g, or t
  misc_feature (1116)..(1116): n is a, c, g, or t
  misc_feature (1126)..(1126): n is a, c, g, or t
  misc_feature (1128)..(1128): n is a, c, g, or t
  misc_feature (1130)..(1130): n is a, c, g, or t
  misc_feature (1133)..(1133): n is a, c, g, or t
  misc_feature (1145)..(1145): n is a, c, g, or t
  misc_feature (1151)..(1151): n is a, c, g, or t
  misc_feature (1162)..(1162): n is a, c, g, or t
  misc_feature (1165)..(1165): n is a, c, g, or t
  misc_feature (1176)..(1176): n is a, c, g, or t
  misc_feature (1182)..(1182): n is a, c, g, or t
  misc_feature (1187)..(1189): n is a, c, g, or t
  misc_feature (1191)..(1191): n is a, c, g, or t
  misc_feature (1194)..(1195): n is a, c, g, or t
  misc_feature (1197)..(1197): n is a, c, g, or t
  misc_feature (1202)..(1202): n is a, c, g, or t
  misc_feature (1208)..(1208): n is a, c, g, or t
  misc_feature (1219)..(1219): n is a, c, g, or t
  misc_feature (1224)..(1224): n is a, c, g, or t
  misc_feature (1227)..(1227): n is a, c, g, or t
  misc_feature (1248)..(1249): n is a, c, g, or t
  misc_feature (1257)..(1257): n is a, c, g, or t
  misc_feature (1260)..(1260): n is a, c, g, or t
  misc_feature (1264)..(1265): n is a, c, g, or t
  misc_feature (1268)..(1268): n is a, c, g, or t
  misc_feature (1281)..(1282): n is a, c, g, or t
  misc_feature (1299)..(1300): n is a, c, g, or t
  misc_feature (1312)..(1315): n is a, c, g, or t
  misc_feature (1328)..(1329): n is a, c, g, or t
  misc_feature (1335)..(1336): n is a, c, g, or t
  misc_feature (1338)..(1338): n is a, c, g, or t
  misc_feature (1341)..(1341): n is a, c, g, or t
aatagagagaattactatgagaggatcgcatcaccatcaccatcacggatcctatttaggtgacactatagaatcgtcgacccacgcgtccggagacaccctgtcaaggacagctggggctcagccctgcgttggtaccgatactactgaaaaccttggagttgctaatggacaaatacttgaatcctcgggtgagggcacagctaccaacggggtggagttgcacaccacggaaagcatagacttggacccaaccaaacccgagagtgcatcacctcctgctgacggcacgggctctgcatcaggcacccttcctgtcagccagcccaagtcctgggccagcctctttcatgattctaagccctcttcctcctcgccggtggcctatgtggaaactaagtattcccctcccgccatatctcccctggtttctgaaaagcaggttgaagtcaaagaagggcttgttccggtttcagaggatcctgtagccataaagattgcagagttgctggagaatgtaaccctaatccataaaccagtgtcgttgcaaccccgtgggctgatcaataaagggaactggtgctacattaatgctacactgcaggcattggttgcttgcccgccgatgtaccacctgatgaagttcattcctctgtattccaaagtgcaaaggccttgtacgtcaacacccatgatagacagctttgttcggctaatgaatgagttcactaatatgccagtacctccaaaaccccgacaagctcttggagataaaatcgtgagggatattcgccctggagctgcctttgagcccacatatatttacagactcctgacagttaacaagtcaagcctgtctgaaaagggtcgacaaaaanatgctgangaatacttaggcttcattctaaatggacttcatgangaaatgttgaacctaaagaagcttctctcnccangtantgaaaaacttacgatttccannggccccaaaacccctcggtcatgaaaaaancagnaaaacangtgaagnaacnagatnatggaanaatggncccccgaaaaaantccgtccccccnggnganttgtcaacncatcccggcntttggggaacatcngtctgggttnancnaantcaaaaattgcncttgcnccttttccgtncantgaatcccccnaaaaanacccnnncnaanncngaaanttgggnaaaaatttccngtttnccnaaaccaaaagttaaaatcaanntctgaaanccncctnncgnccccaaaattttnnaaaaaggggggcaaaannaaaaaaaacggnnnnaaaaaaactcccnnaaaaannanccncc

SEQ ID NO: 720 - DNA, 1200 bp, Homo Sapiens
  misc_feature (963)..(963): n is a, c, g, or t
  misc_feature (1000)..(1000): n is a, c, g, or t
  misc_feature (1002)..(1002): n is a, c, g, or t
  misc_feature (1016)..(1016): n is a, c, g, or t
  misc_feature (1020)..(1020): n is a, c, g, or t
  misc_feature (1057)..(1057): n is a, c, g, or t
  misc_feature (1065)..(1065): n is a, c, g, or t
  misc_feature (1077)..(1077): n is a, c, g, or t
  misc_feature (1084)..(1084): n is a, c, g, or t
  misc_feature (1088)..(1088): n is a, c, g, or t
  misc_feature (1097)..(1097): n is a, c, g, or t
  misc_feature (1108)..(1108): n is a, c, g, or t
  misc_feature (1114)..(1114): n is a, c, g, or t
  misc_feature (1123)..(1123): n is a, c, g, or t
  misc_feature (1127)..(1127): n is a, c, g, or t
  misc_feature (1130)..(1131): n is a, c, g, or t
  misc_feature (1183)..(1183): n is a, c, g, or t
  misc_feature (1186)..(1186): n is a, c, g, or t
  misc_feature (1197)..(1200): n is a, c, g, or t
tagagaaattactatgagaggatcgcatcaccatcaccatcacggatcctatttaggtgacactatagaatcgtcgacccacgcgtccgcgacccttatcgacgaggacgtgtatcgcctctggctcgatggttactcggtgaccgacgcggtggccctgcgggtgcgctcgggaatcctggagcagactggcgccacggcagcggtgctgcagagcgacaccatggaccattaccgcaccttccacatgctcgagcggctgctgcatgcgccgcccaagctactgcaccagctcatcttccagattccgccctcccggcaggcactactcatcgagaggtactatgcctttgatgaggcctttgttcgggaggtgctgggcaagaagctgtccaaaggcaccaagaaagacctggatgacatcagcaccaaaacaggcatcaccctcaagagctgccggagacagtttgacaactttaaacgggtcttcaaggtggtagaggaaatgcggggctccctggtggacaatattcagcaacacttcctcctctctgaccggttggccagggactatgcagccatcgtcttctttgctaacaaccgctttgagacagggaagaaaaaactgcagtatctgagcttcggtgactttgccttctgcgctgagctcatgatccaaaactggacccttggagccgtcgactcacagatggatgacatggacatggacttagacaaggaatttctccaggacttgaaggagctcaaggtgctagtggctgacaaggaccttctggacctgcacaagagcctggtgtgcactgctctccggggaaagctgggcgtcttctctgaaatggaagccaacttcaagaacctgtcccgggggctggtgaacgtggccgccaagctgaccacaataaaatgtcaaaaactgttgtggactcgtggaaaaatttgtgnaacctgccgctccaacactggccactcagcgacgtgngntcttcctgaatcantatncagcgtctgtccctccctcgatggcttccaaaccagncctctggnacgctaatgggnaccctcngggntgctctggnctgtaaaagantgaagngcctccaanctcnccnnctgaaaaaaatttcttgatttgaaaaaaaaaaaagggggcccccccaaaggngcnaaaactaattnnnn

SEQ ID NO: 721 - DNA, 1392 bp, Homo Sapiens
  misc_feature (1)..(1): n is a, c, g, or t
  misc_feature (8)..(8): n is a, c, g, or t
  misc_feature (688)..(688): n is a, c, g, or t
  misc_feature (804)..(804): n is a, c, g, or t
  misc_feature (853)..(853): n is a, c, g, or t
  misc_feature (863)..(863): n is a, c, g, or t
  misc_feature (865)..(865): n is a, c, g, or t
  misc_feature (874)..(874): n is a, c, g, or t
  misc_feature (891)..(891): n is a, c, g, or t
  misc_feature (897)..(897): n is a, c, g, or t
  misc_feature (907)..(907): n is a, c, g, or t
  misc_feature (909)..(909): n is a, c, g, or t
  misc_feature (915)..(915): n is a, c, g, or t
  misc_feature (921)..(921): n is a, c, g, or t
  misc_feature (924)..(925): n is a, c, g, or t
  misc_feature (938)..(938): n is a, c, g, or t
  misc_feature (948)..(948): n is a, c, g, or t
  misc_feature (951)..(951): n is a, c, g, or t
  misc_feature (961)..(961): n is a, c, g, or t
  misc_feature (966)..(966): n is a, c, g, or t
  misc_feature (977)..(977): n is a, c, g, or t
  misc_feature (982)..(982): n is a, c, g, or t
  misc_feature (988)..(988): n is a, c, g, or t
  misc_feature (992)..(992): n is a, c, g, or t
  misc_feature (996)..(996): n is a, c, g, or t
  misc_feature (1008)..(1008): n is a, c, g, or t
  misc_feature (1027)..(1028): n is a, c, g, or t
  misc_feature (1032)..(1032): n is a, c, g, or t
  misc_feature (1035)..(1035): n is a, c, g, or t
  misc_feature (1038)..(1038): n is a, c, g, or t
  misc_feature (1041)..(1041): n is a, c, g, or t
  misc_feature (1054)..(1054): n is a, c, g, or t
  misc_feature (1056)..(1056): n is a, c, g, or t
  misc_feature (1061)..(1061): n is a, c, g, or t
  misc_feature (1063)..(1063): n is a, c, g, or t
  misc_feature (1071)..(1071): n is a, c, g, or t
  misc_feature (1082)..(1082): n is a, c, g, or t
  misc_feature (1085)..(1086): n is a, c, g, or t
  misc_feature (1094)..(1094): n is a, c, g, or t
  misc_feature (1101)..(1101): n is a, c, g, or t
  misc_feature (1107)..(1109): n is a, c, g, or t
  misc_feature (1114)..(1114): n is a, c, g, or t
  misc_feature (1116)..(1116): n is a, c, g, or t
  misc_feature (1119)..(1119): n is a, c, g, or t
  misc_feature (1129)..(1129): n is a, c, g, or t
  misc_feature (1138)..(1138): n is a, c, g, or t
  misc_feature (1143)..(1143): n is a, c, g, or t
  misc_feature (1145)..(1146): n is a, c, g, or t
  misc_feature (1151)..(1151): n is a, c, g, or t
  misc_feature (1154)..(1154): n is a, c, g, or t
  misc_feature (1158)..(1158): n is a, c, g, or t
  misc_feature (1164)..(1164): n is a, c, g, or t
  misc_feature (1166)..(1167): n is a, c, g, or t
  misc_feature (1169)..(1169): n is a, c, g, or t
  misc_feature (1174)..(1174): n is a, c, g, or t
  misc_feature (1181)..(1181): n is a, c, g, or t
  misc_feature (1183)..(1184): n is a, c, g, or t
  misc_feature (1194)..(1194): n is a, c, g, or t
  misc_feature (1200)..(1200): n is a, c, g, or t
  misc_feature (1221)..(1221): n is a, c, g, or t
  misc_feature (1223)..(1224): n is a, c, g, or t
  misc_feature (1226)..(1226): n is a, c, g, or t
  misc_feature (1231)..(1231): n is a, c, g, or t
  misc_feature (1234)..(1234): n is a, c, g, or t
  misc_feature (1246)..(1246): n is a, c, g, or t
  misc_feature (1250)..(1251): n is a, c, g, or t
  misc_feature (1254)..(1254): n is a, c, g, or t
  misc_feature (1256)..(1259): n is a, c, g, or t
  misc_feature (1261)..(1263): n is a, c, g, or t
  misc_feature (1265)..(1265): n is a, c, g, or t
  misc_feature (1267)..(1268): n is a, c, g, or t
  misc_feature (1274)..(1274): n is a, c, g, or t
  misc_feature (1293)..(1293): n is a, c, g, or t
  misc_feature (1295)..(1296): n is a, c, g, or t
  misc_feature (1299)..(1299): n is a, c, g, or t
  misc_feature (1301)..(1301): n is a, c, g, or t
  misc_feature (1308)..(1308): n is a, c, g, or t
  misc_feature (1314)..(1314): n is a, c, g, or t
  misc_feature (1321)..(1322): n is a, c, g, or t
  misc_feature (1326)..(1326): n is a, c, g, or t
  misc_feature (1328)..(1329): n is a, c, g, or t
  misc_feature (1338)..(1339): n is a, c, g, or t
  misc_feature (1350)..(1350): n is a, c, g, or t
  misc_feature (1352)..(1352): n is a, c, g, or t
  misc_feature (1357)..(1357): n is a, c, g, or t
  misc_feature (1360)..(1360): n is a, c, g, or t
  misc_feature (1362)..(1362): n is a, c, g, or t
  misc_feature (1366)..(1366): n is a, c, g, or t
  misc_feature (1374)..(1376): n is a, c, g, or t
  misc_feature (1381)..(1381): n is a, c, g, or t
  misc_feature (1384)..(1385): n is a, c, g, or t
ntagaganattaactatgagaggatcgcatcaccatcaccatcacggatcctatttaggtgacactatagaatcgtcgacccacgcgtccgcccacgcgtccgcccacgcgtccgccaatctgctggtcatagcagccatcgcctccaaccgccgcttccaccagcccatctactacctgctcggcaatctggccgcggctgacctcttcgcgggcgtggcctacctcttcctcatgttccacactggtccccgcacagcccgactttcacttgagggctggttcctgcggcagggcttgctggacacaagcctcactgcgtcggtggccacactgctggccatcgccgtggagcggcaccgcagtgtgatggccgtgcagctgcacagccgcctgccccgtggccgcgtggtcatgctcattgtgggcgtgtgggtggctgccctgggcctggggctgctgcctgcccactcctggcactgcctctgtgccctggaccgctgctcacgcatggcacccctgctcagccgctcctatttggccgtctgggctctgtcgagcctgcttgtcttcctgctcatggtggctgtgtacacccgcattttcttctacgtgcggcggcgagtgcagcgcatggcaaagcatgtcagctgccacccccgctaccgagagaccacgctcagcctgntcaagactgttgtcatcatcctgggggcgttcgtggtctgctggacaccaggccaggtggtactgctcctggatggtttaggctgtgagtcctgcaatgtcctggctgtaaaaaantacttcctactgttggccgaggccaactcactggtcaatgctgctgtgnactcttgccnanatgctgaanatgcgccgaacctttcngccgcntttctttgcngngcgtgnctccgncanntcaacccgcgaantttgtccaantanaaaatccttntgccnagggaaagtgnccagnactcgnaatnatgnttcccgaaaaanggccacccaactgaagaannccanccnttnaanaaacttgaaattnanggggnancggaaaanaaaaaaaaccnaannccctgaanaaattgngggggnnnctggntnaanccaaccaaangaattaatnatggnannaaagnttngaangaaaanannanggcanggctccnannaaaacatttngccagnaaaaggggtttggctttcccntnncnggggnaanaaaaaggggganaaannagntnnnncnnncngnnaagggntgaaaaaaattttttttcngnnatntnaaaaccngaaagntcctggnnaatngnntttaagggnnaaaaaactttncnccctnccnantagnataaaaannnacccnttnnttttttt

SEQ ID NO: 722 - DNA, 1348 bp, Homo Sapiens
  misc_feature (756)..(756): n is a, c, g, or t
  misc_feature (820)..(820): n is a, c, g, or t
  misc_feature (866)..(866): n is a, c, g, or t
  misc_feature (868)..(868): n is a, c, g, or t
  misc_feature (931)..(931): n is a, c, g, or t
  misc_feature (938)..(938): n is a, c, g, or t
  misc_feature (947)..(947): n is a, c, g, or t
  misc_feature (965)..(965): n is a, c, g, or t
  misc_feature (975)..(975): n is a, c, g, or t
  misc_feature (986)..(986): n is a, c, g, or t
  misc_feature (988)..(988): n is a, c, g, or t
  misc_feature (1002)..(1002): n is a, c, g, or t
  misc_feature (1018)..(1018): n is a, c, g, or t
  misc_feature (1020)..(1020): n is a, c, g, or t
  misc_feature (1024)..(1024): n is a, c, g, or t
  misc_feature (1044)..(1044): n is a, c, g, or t
  misc_feature (1063)..(1063): n is a, c, g, or t
  misc_feature (1065)..(1065): n is a, c, g, or t
  misc_feature (1069)..(1069): n is a, c, g, or t
  misc_feature (1075)..(1075): n is a, c, g, or t
  misc_feature (1080)..(1081): n is a, c, g, or t
  misc_feature (1083)..(1083): n is a, c, g, or t
  misc_feature (1087)..(1087): n is a, c, g, or t
  misc_feature (1091)..(1091): n is a, c, g, or t
  misc_feature (1095)..(1095): n is a, c, g, or t
  misc_feature (1099)..(1099): n is a, c, g, or t
  misc_feature (1102)..(1102): n is a, c, g, or t
  misc_feature (1105)..(1105): n is a, c, g, or t
  misc_feature (1119)..(1119): n is a, c, g, or t
  misc_feature (1121)..(1122): n is a, c, g, or t
  misc_feature (1137)..(1137): n is a, c, g, or t
  misc_feature (1151)..(1151): n is a, c, g, or t
  misc_feature (1157)..(1157): n is a, c, g, or t
  misc_feature (1167)..(1169): n is a, c, g, or t
  misc_feature (1171)..(1171): n is a, c, g, or t
  misc_feature (1173)..(1173): n is a, c, g, or t
  misc_feature (1194)..(1194): n is a, c, g, or t
  misc_feature (1198)..(1198): n is a, c, g, or t
  misc_feature (1202)..(1202): n is a, c, g, or t
  misc_feature (1208)..(1208): n is a, c, g, or t
  misc_feature (1220)..(1220): n is a, c, g, or t
  misc_feature (1233)..(1234): n is a, c, g, or t
  misc_feature (1239)..(1239): n is a, c, g, or t
  misc_feature (1251)..(1255): n is a, c, g, or t
  misc_feature (1258)..(1258): n is a, c, g, or t
  misc_feature (1262)..(1262): n is a, c, g, or t
  misc_feature (1264)..(1264): n is a, c, g, or t
  misc_feature (1272)..(1272): n is a, c, g, or t
  misc_feature (1278)..(1278): n is a, c, g, or t
  misc_feature (1281)..(1281): n is a, c, g, or t
  misc_feature (1286)..(1286): n is a, c, g, or t
  misc_feature (1288)..(1288): n is a, c, g, or t
  misc_feature (1294)..(1300): n is a, c, g, or t
  misc_feature (1303)..(1304): n is a, c, g, or t
  misc_feature (1306)..(1306): n is a, c, g, or t
  misc_feature (1310)..(1312): n is a, c, g, or t
  misc_feature (1317)..(1317): n is a, c, g, or t
  misc_feature (1321)..(1322): n is a, c, g, or t
  misc_feature (1327)..(1327): n is a, c, g, or t
  misc_feature (1332)..(1332): n is a, c, g, or t
  misc_feature (1339)..(1339): n is a, c, g, or t
  misc_feature (1346)..(1346): n is a, c, g, or t
  misc_feature (1348)..(1348): n is a, c, g, or t
agagaaattactatgagaggatcgcatcaccatcaccatcacggatcctatttaggtgacactatagaatcgtcgacccacgcgtccgctgaaatcgaagagaccctccaggctgcgatgccccaggtctcctaccgaatgcttgggagaatgttctggagggaagaaaatgcgaaagcagccttattagagctcactggcgctgtagattacgccgcgatccccagggagatgccgggcaaaggaggggtctggaaagtgttatttaagcccccaacttctgatgctgaatttttagaaagattgcacctcttcctagctagagaggggtggaccgtgcaagatgttgcccgtgtccttgggtttcagaaccctactccgaccccgggcccagagatgccagcagagatgctaaactatattttggataatgttattcagcctcttgttgagtccatatggtacaagaggctgacacttttctcggggagggacatcccagggcctggagaggaaacctttgatccctggctggagcacactaatgaggtcctagaggagtggcaggtgtccgatgtagaaaagaggcggcggttgatggagagtcttagaggccccgccgctgatgttattcgcatccttaagtccaacaaccccgcgataaccactgccgaatgcctgaaggcgcttgagcaggtgtttgggagcgttgagagctctagggatgcccagatcaaatttctgaacacttatcanaacccgggagaaaaattgtctgcttatgtcattcgtctggagcctctgctacagaaggtggtanagaagggggccattgataaagataatgtgaaccaggccccgcctananccaggtcattgccggggccaaccacagcggggccatccgaaggcagctgtggcttaccggggnctggggnaagggccanccccaaacctcttttcanttgctggggncaaaatcccgngnaggaggaaacccangaaggaagaaagaagnangctnaaagccccccctttctgcanttaaggccctggaaagggncncttnctgaantgccnngnaaanggcnaccntttnatngcnaaacctaaaatccncnncttaccttttcttgncccctggggggggnccttanaaaatgtgtnnntngnaaaaaaaaaggcctaaccccnggtncggntttggnggtttttgggangggaaaaggttannccggnccggaaattttnnnnnaanattntnaaattggncccccnaanccccngnaaaaannnnnnntgnnangggnnnttgtngggnnaaaanccccnaaaaggnttgttgnan

SEQ ID NO: 723 - DNA, 1438 bp, Homo Sapiens
  misc_feature (7)..(7): n is a, c, g, or t
  misc_feature (166)..(166): n is a, c, g, or t
  misc_feature (169)..(169): n is a, c, g, or t
  misc_feature (207)..(207): n is a, c, g, or t
  misc_feature (220)..(220): n is a, c, g, or t
  misc_feature (232)..(232): n is a, c, g, or t
  misc_feature (240)..(240): n is a, c, g, or t
  misc_feature (255)..(255): n is a, c, g, or t
  misc_feature (261)..(261): n is a, c, g, or t
  misc_feature (289)..(289): n is a, c, g, or t
  misc_feature (292)..(292): n is a, c, g, or t
  misc_feature (305)..(305): n is a, c, g, or t
  misc_feature (339)..(339): n is a, c, g, or t
  misc_feature (354)..(354): n is a, c, g, or t
  misc_feature (356)..(356): n is a, c, g, or t
  misc_feature (363)..(363): n is a, c, g, or t
  misc_feature (366)..(366): n is a, c, g, or t
  misc_feature (375)..(375): n is a, c, g, or t
  misc_feature (384)..(384): n is a, c, g, or t
  misc_feature (388)..(388): n is a, c, g, or t
  misc_feature (410)..(410): n is a, c, g, or t
  misc_feature (415)..(415): n is a, c, g, or t
  misc_feature (425)..(425): n is a, c, g, or t
  misc_feature (439)..(439): n is a, c, g, or t
  misc_feature (459)..(459): n is a, c, g, or t
  misc_feature (496)..(496): n is a, c, g, or t
  misc_feature (499)..(499): n is a, c, g, or t
  misc_feature (542)..(542): n is a, c, g, or t
  misc_feature (545)..(545): n is a, c, g, or t
  misc_feature (559)..(559): n is a, c, g, or t
  misc_feature (568)..(568): n is a, c, g, or t
  misc_feature (573)..(573): n is a, c, g, or t
  misc_feature (586)..(586): n is a, c, g, or t
  misc_feature (599)..(599): n is a, c, g, or t
  misc_feature (604)..(604): n is a, c, g, or t
  misc_feature (615)..(615): n is a, c, g, or t
  misc_feature (629)..(629): n is a, c, g, or t
  misc_feature (639)..(639): n is a, c, g, or t
  misc_feature (647)..(647): n is a, c, g, or t
  misc_feature (659)..(659): n is a, c, g, or t
  misc_feature (664)..(664): n is a, c, g, or t
  misc_feature (696)..(696): n is a, c, g, or t
  misc_feature (746)..(746): n is a, c, g, or t
  misc_feature (777)..(777): n is a, c, g, or t
  misc_feature (782)..(782): n is a, c, g, or t
  misc_feature (810)..(810): n is a, c, g, or t
  misc_feature (859)..(860): n is a, c, g, or t
  misc_feature (865)..(865): n is a, c, g, or t
  misc_feature (868)..(868): n is a, c, g, or t
  misc_feature (873)..(873): n is a, c, g, or t
  misc_feature (904)..(904): n is a, c, g, or t
  misc_feature (911)..(911): n is a, c, g, or t
  misc_feature (913)..(913): n is a, c, g, or t
  misc_feature (918)..(918): n is a, c, g, or t
  misc_feature (922)..(922): n is a, c, g, or t
  misc_feature (933)..(933): n is a, c, g, or t
  misc_feature (937)..(937): n is a, c, g, or t
  misc_feature (941)..(941): n is a, c, g, or t
  misc_feature (946)..(946): n is a, c, g, or t
  misc_feature (953)..(953): n is a, c, g, or t
  misc_feature (955)..(956): n is a, c, g, or t
  misc_feature (962)..(963): n is a, c, g, or t
  misc_feature (974)..(974): n is a, c, g, or t
  misc_feature (981)..(982): n is a, c, g, or t
  misc_feature (984)..(984): n is a, c, g, or t
  misc_feature (988)..(989): n is a, c, g, or t
  misc_feature (995)..(995): n is a, c, g, or t
  misc_feature (998)..(998): n is a, c, g, or t
  misc_feature (1006)..(1007): n is a, c, g, or t
  misc_feature (1013)..(1013): n is a, c, g, or t
  misc_feature (1019)..(1019): n is a, c, g, or t
  misc_feature (1033)..(1033): n is a, c, g, or t
  misc_feature (1040)..(1041): n is a, c, g, or t
  misc_feature (1062)..(1062): n is a, c, g, or t
  misc_feature (1067)..(1067): n is a, c, g, or t
  misc_feature (1080)..(1081): n is a, c, g, or t
  misc_feature (1086)..(1086): n is a, c, g, or t
  misc_feature (1094)..(1094): n is a, c, g, or t
  misc_feature (1105)..(1106): n is a, c, g, or t
  misc_feature (1108)..(1108): n is a, c, g, or t
  misc_feature (1111)..(1112): n is a, c, g, or t
  misc_feature (1119)..(1120): n is a, c, g, or t
  misc_feature (1130)..(1130): n is a, c, g, or t
  misc_feature (1138)..(1138): n is a, c, g, or t
  misc_feature (1142)..(1142): n is a, c, g, or t
  misc_feature (1144)..(1145): n is a, c, g, or t
  misc_feature (1149)..(1150): n is a, c, g, or t
  misc_feature (1163)..(1163): n is a, c, g, or t
  misc_feature (1168)..(1168): n is a, c, g, or t
  misc_feature (1191)..(1191): n is a, c, g, or t
  misc_feature (1199)..(1200): n is a, c, g, or t
  misc_feature (1203)..(1203): n is a, c, g, or t
  misc_feature (1205)..(1205): n is a, c, g, or t
  misc_feature (1212)..(1212): n is a, c, g, or t
  misc_feature (1215)..(1215): n is a, c, g, or t
  misc_feature (1221)..(1221): n is a, c, g, or t
  misc_feature (1230)..(1230): n is a, c, g, or t
  misc_feature (1233)..(1233): n is a, c, g, or t
  misc_feature (1237)..(1237): n is a, c, g, or t
  misc_feature (1239)..(1239): n is a, c, g, or t
  misc_feature (1241)..(1241): n is a, c, g, or t
  misc_feature (1246)..(1247): n is a, c, g, or t
  misc_feature (1251)..(1251): n is a, c, g, or t
  misc_feature (1255)..(1256): n is a, c, g, or t
  misc_feature (1259)..(1259): n is a, c, g, or t
  misc_feature (1262)..(1262): n is a, c, g, or t
  misc_feature (1272)..(1273): n is a, c, g, or t
  misc_feature (1283)..(1284): n is a, c, g, or t
  misc_feature (1294)..(1295): n is a, c, g, or t
  misc_feature (1301)..(1301): n is a, c, g, or t
  misc_feature (1310)..(1310): n is a, c, g, or t
  misc_feature (1318)..(1318): n is a, c, g, or t
  misc_feature (1329)..(1332): n is a, c, g, or t
  misc_feature (1336)..(1336): n is a, c, g, or t
  misc_feature (1343)..(1343): n is a, c, g, or t
  misc_feature (1347)..(1347): n is a, c, g, or t
  misc_feature (1353)..(1353): n is a, c, g, or t
  misc_feature (1356)..(1356): n is a, c, g, or t
  misc_feature (1358)..(1359): n is a, c, g, or t
  misc_feature (1362)..(1363): n is a, c, g, or t
  misc_feature (1372)..(1372): n is a, c, g, or t
  misc_feature (1375)..(1375): n is a, c, g, or t
  misc_feature (1382)..(1382): n is a, c, g, or t
  misc_feature (1386)..(1386): n is a, c, g, or t
  misc_feature (1391)..(1391): n is a, c, g, or t
  misc_feature (1393)..(1394): n is a, c, g, or t
  misc_feature (1396)..(1396): n is a, c, g, or t
  misc_feature (1401)..(1401): n is a, c, g, or t
  misc_feature (1406)..(1406): n is a, c, g, or t
  misc_feature (1416)..(1416): n is a, c, g, or t
  misc_feature (1429)..(1429): n is a, c, g, or t
  misc_feature (1431)..(1431): n is a, c, g, or t
  misc_feature (1436)..(1436): n is a, c, g, or t
atagagnaattactatgagaggatcgcatcaccatcaccatcacggatcctatttaggtgacactatagaatcgtcgacccacgcgtccgaaaaaaaaaaaaaaaaaaaaaaaaaaaaaaaaaaaaaaaaaaaaaaaaaaaaaaaaaaagggcggccgctccctanagngagtcgtattaagcttaattagctgagcttggactccngttgatagatccngtaatgacctcngaactccntctggatttgttcanaacgcncggttgccgccgggcgttttttattggnganaatccaagctagnttggcgagattttcaggagctaaggaagctaaantggagaaaaaaatcncnggatatnccnccgttgatntatcccaanggcntcgtaaagaacattttgaggcntttcngtcagttgcncaatgtacctatanccagaccgttcagctggatnttacggcctttttaaagaccgtaaagaaaaataagcncangttttatccggcctttattcacattcttgcccgcctgatgaangcncatccggaatttcntatggcaangaaanacggtgagctggngatatgggatagngttcncccttgttacnccgttttccatgancaaactgaancgttttcntcgctctggagngaatnccccgacgatttccggcagtttctacacatanattcccaagatggggcgggttacggtgaaaacctggcctatttccctaangggtttattgagaatatgtttttcgtctcanccaanccctgggggagtttccccagttttgganttaaccgtggccaatatgggacaacttcttccccccccggttttctccnngggcnaantattntacccaagggccaaaaaggtggctgatgccncctggcnanttcanggtncatcaaggccntttngtgntgggnttcccangnncgggcnnaatgcctaatngaatttnncncacnncctgcnaangaattggnnagggcngggccnaaaattttttttanggcaatnnattggtgcccctaaacccccnggggnaaagaaccccctnncctgnaggcaccnaaaaaaaaaanngnccnnttccaannaagggggccnttcctttnatcngnngttnnccggagaaacccnccccnagaaaaaaaaccccccctaaaangtcccccnngcntntgggganacnggaaanccttaaccngcntctncnanaaagnncatntttnnttnaangagatgcggnnaaaaaacccnncgggagcccnngggtgnggggggggngcccccancccccccgggnnnngggnttttggnttanttcccnaananntcnnagaccttgnggnaacccancaanaaaangnngngtttnccccnaaagcctccncggggggggaccncnggaanaa

SEQ ID NO: 724 - DNA, 1378 bp, Homo Sapiens
  misc_feature (1)..(1): n is a, c, g, or t
  misc_feature (6)..(6): n is a, c, g, or t
  misc_feature (8)..(14): n is a, c, g, or t
  misc_feature (837)..(837): n is a, c, g, or t
  misc_feature (878)..(878): n is a, c, g, or t
  misc_feature (917)..(917): n is a, c, g, or t
  misc_feature (930)..(930): n is a, c, g, or t
  misc_feature (942)..(942): n is a, c, g, or t
  misc_feature (961)..(962): n is a, c, g, or t
  misc_feature (978)..(978): n is a, c, g, or t
  misc_feature (986)..(986): n is a, c, g, or t
  misc_feature (1027)..(1028): n is a, c, g, or t
  misc_feature (1032)..(1032): n is a, c, g, or t
  misc_feature (1039)..(1039): n is a, c, g, or t
  misc_feature (1044)..(1044): n is a, c, g, or t
  misc_feature (1048)..(1048): n is a, c, g, or t
  misc_feature (1071)..(1071): n is a, c, g, or t
  misc_feature (1080)..(1082): n is a, c, g, or t
  misc_feature (1092)..(1092): n is a, c, g, or t
  misc_feature (1099)..(1099): n is a, c, g, or t
  misc_feature (1103)..(1103): n is a, c, g, or t
  misc_feature (1107)..(1107): n is a, c, g, or t
  misc_feature (1109)..(1109): n is a, c, g, or t
  misc_feature (1119)..(1119): n is a, c, g, or t
  misc_feature (1121)..(1121): n is a, c, g, or t
  misc_feature (1123)..(1123): n is a, c, g, or t
  misc_feature (1127)..(1127): n is a, c, g, or t
  misc_feature (1129)..(1130): n is a, c, g, or t
  misc_feature (1133)..(1133): n is a, c, g, or t
  misc_feature (1135)..(1135): n is a, c, g, or t
  misc_feature (1137)..(1137): n is a, c, g, or t
  misc_feature (1146)..(1146): n is a, c, g, or t
  misc_feature (1150)..(1150): n is a, c, g, or t
  misc_feature (1152)..(1153): n is a, c, g, or t
  misc_feature (1179)..(1181): n is a, c, g, or t
  misc_feature (1183)..(1183): n is a, c, g, or t
  misc_feature (1186)..(1186): n is a, c, g, or t
  misc_feature (1190)..(1190): n is a, c, g, or t
  misc_feature (1203)..(1203): n is a, c, g, or t
  misc_feature (1205)..(1205): n is a, c, g, or t
  misc_feature (1222)..(1223): n is a, c, g, or t
  misc_feature (1228)..(1228): n is a, c, g, or t
  misc_feature (1230)..(1232): n is a, c, g, or t
  misc_feature (1236)..(1236): n is a, c, g, or t
  misc_feature (1240)..(1241): n is a, c, g, or t
  misc_feature (1246)..(1246): n is a, c, g, or t
  misc_feature (1248)..(1248): n is a, c, g, or t
  misc_feature (1255)..(1256): n is a, c, g, or t
  misc_feature (1259)..(1259): n is a, c, g, or t
  misc_feature (1262)..(1262): n is a, c, g, or t
  misc_feature (1264)..(1264): n is a, c, g, or t
  misc_feature (1270)..(1270): n is a, c, g, or t
  misc_feature (1282)..(1285): n is a, c, g, or t
  misc_feature (1287)..(1288): n is a, c, g, or t
  misc_feature (1291)..(1294): n is a, c, g, or t
  misc_feature (1296)..(1300): n is a, c, g, or t
  misc_feature (1302)..(1326): n is a, c, g, or t
  misc_feature (1331)..(1331): n is a, c, g, or t
  misc_feature (1342)..(1342): n is a, c, g, or t
  misc_feature (1346)..(1346): n is a, c, g, or t
  misc_feature (1348)..(1350): n is a, c, g, or t
  misc_feature (1352)..(1352): n is a, c, g, or t
  misc_feature (1354)..(1354): n is a, c, g, or t
  misc_feature (1356)..(1361): n is a, c, g, or t
  misc_feature (1363)..(1363): n is a, c, g, or t
  misc_feature (1366)..(1366): n is a, c, g, or t
  misc_feature (1370)..(1370): n is a, c, g, or t
  misc_feature (1377)..(1377): n is a, c, g, or t
nttttntnnnnnnnaattagaggaaaattacctatgagagggatcgcatcaccattcaccatcacggatcctatttagggtgacactatagaatcgtcgacccacgcgatccggccagaggtcaaatcttcaagtccatcagataattcacactggagagaaaccatttaaatgtgaggaatgtgggaaagaattcagttggagtgctggtctcagtgcccatcagagggtccacacaggagagaaaccctatacgtgtcagcagtgtgggaagggcttcagtcaggcctcacattttcacacacaccagagagtccacactggagagaggccttacatatgtgatgtctgttgtaagggcttcagtcagaggtcacatctcatctaccatcagagagtccacactggagggaatctgtagaaatgagaggtgtggttcagccttcagttagagctcacatctttgtctccgttgggaagtccatgctgatgattgtgaaaagttcctttaaaactagaagcttcaaagaatcttgacaggaaagaagtctctcaaatgctgtgttttagacttggttaggacatgaattctttacaaacgtcatatttcacagatgcgagaaaactttgttctgtaaatatgatcagtgtttatatcagagtaccaggtgtcccggttctcaagatgtaacacagcagaaaagtcttgtcggagtctgcacaggagagaggccttcctttaacaaaagtatgattgacagaaaaaaatggatgtcaactaaaatgtaacctctatgtaaggaggtggtttttcaccactctatctctaccatgtanaattgtgcttggctcataatagggcccagcaattactgaanaagtgaagaaaataccctataattaggacaaatacttgnaaaattctagtcngttttctactcnaaatttatattaatttaanntccaaaaggaatcccngcaagtancccttaaaaacgttagttttcagtaagtactgaaaagtatnntaanactgccntcccntacntaacccaatttgggaaaaaaaanatgaatggnnnccatccttcnaccttanttcntttnanaggggaaccncnanttgngnnaangnanaatttttangggncnntttaaaaacggaaaaatctgtttttnnncnaangggncccgccaatttanangaaaaaatttttggacnnaaacntnnncggnaccnngaaangnttaaagnnttncgnanaaaaantttttaaaaacnnnntnnttnnnnannnnnannnnnnnnnnnnnnnnnnnnnnnnnggggnccccccccaangggncnnnancntnnnnnnanggncccnggaaaanc

SEQ ID NO: 725 - DNA, 1200 bp, Homo Sapiens
  misc_feature (790)..(790): n is a, c, g, or t
  misc_feature (833)..(833): n is a, c, g, or t
  misc_feature (852)..(852): n is a, c, g, or t
  misc_feature (886)..(886): n is a, c, g, or t
  misc_feature (923)..(923): n is a, c, g, or t
  misc_feature (925)..(925): n is a, c, g, or t
  misc_feature (928)..(928): n is a, c, g, or t
  misc_feature (940)..(940): n is a, c, g, or t
  misc_feature (969)..(969): n is a, c, g, or t
  misc_feature (978)..(978): n is a, c, g, or t
  misc_feature (991)..(991): n is a, c, g, or t
  misc_feature (996)..(996): n is a, c, g, or t
  misc_feature (1004)..(1004): n is a, c, g, or t
  misc_feature (1006)..(1007): n is a, c, g, or t
  misc_feature (1012)..(1012): n is a, c, g, or t
  misc_feature (1014)..(1014): n is a, c, g, or t
  misc_feature (1016)..(1016): n is a, c, g, or t
  misc_feature (1019)..(1019): n is a, c, g, or t
  misc_feature (1043)..(1043): n is a, c, g, or t
  misc_feature (1045)..(1045): n is a, c, g, or t
  misc_feature (1059)..(1059): n is a, c, g, or t
  misc_feature (1071)..(1071): n is a, c, g, or t
  misc_feature (1081)..(1081): n is a, c, g, or t
  misc_feature (1086)..(1086): n is a, c, g, or t
  misc_feature (1099)..(1100): n is a, c, g, or t
  misc_feature (1112)..(1112): n is a, c, g, or t
  misc_feature (1114)..(1114): n is a, c, g, or t
  misc_feature (1120)..(1120): n is a, c, g, or t
  misc_feature (1125)..(1125): n is a, c, g, or t
  misc_feature (1128)..(1128): n is a, c, g, or t
  misc_feature (1132)..(1133): n is a, c, g, or t
  misc_feature (1136)..(1137): n is a, c, g, or t
  misc_feature (1152)..(1153): n is a, c, g, or t
  misc_feature (1155)..(1156): n is a, c, g, or t
  misc_feature (1159)..(1159): n is a, c, g, or t
  misc_feature (1169)..(1169): n is a, c, g, or t
  misc_feature (1182)..(1182): n is a, c, g, or t
  misc_feature (1184)..(1184): n is a, c, g, or t
  misc_feature (1190)..(1192): n is a, c, g, or t
  misc_feature (1194)..(1194): n is a, c, g, or t
  misc_feature (1199)..(1199): n is a, c, g, or t
agaaaattactatgaagaggatcgcatcaccatcaccattcacggatcctatttaggtgacactatagaatcgtcgacccacgcgtccgcctggacgtgcccgtggacttgtccaaggtgctgttcatctgcacggccaacgtcacggacaccatccccgagccgctgcgagaccgtatggagatgatcaacgtgtcgggctacgtggcccaggagaagctggccattgcggagcgctacctggtgccccaggctcgcgccctgtgtggcttggatgagagcaaggccaagctgtcatcggacgtgctgacgctgctcatcaagcagtactgccgcgagagcggtgtccgcaacctgcagaagcaagtggagaaggtgttacggaaatcggcctacaagattgtcagcggcgaggccgagtccgtggaggtgacgcccgagaacctgcaggacttcgtggggaagcccgtgttcaccgtggagcgcatgtatgacgtgacaccgcccggcgtggtcatggggctggcctggaccgcaatgggaggctccacgctgtttgtggagacatccctgagacggccacaggacaaggatgccaagggtgacaaggatggcagcctggaggtgacaggccagctgggggaggtgatgaaggagagcgcccgcatagcctacaccttcgccagagccttcctcatgcagcacgcccccgccaatgactacctggtgacctcacacatccacctgcatgtgcccgaaggcgccacccccaaggacggcccaagcgcangctgcaccatcgtcacggccctgctgtccctggccatgggcangcctgtccggcaaaatctngccatgactggcgaaatctcccctcacgggcaanatcctgccttgttggtggcatcaaggaaaaaaaacantngcngccaaacccccnaaggggtgaactggcatccttcctgccancccaaaaanaaaaaagaatttnttaanaacttggnannccttnantnccnaagggccttggaaggtgccccttncntggaaaaactaccngggaaaattttnaaaattcccntttcncgaaaaaaaaaannaaaaaaaccctngnccctgnaaaangtnaaannccnncccccggaaatttcnngnnggngaaatttaangcccttttttggncnaaaaannnanttttng

SEQ ID NO: 726 - DNA, 1411 bp, Homo Sapiens
  misc_feature (1)..(1): n is a, c, g, or t
  misc_feature (3)..(3): n is a, c, g, or t
  misc_feature (884)..(884): n is a, c, g, or t
  misc_feature (930)..(930): n is a, c, g, or t
  misc_feature (938)..(938): n is a, c, g, or t
  misc_feature (953)..(953): n is a, c, g, or t
  misc_feature (968)..(968): n is a, c, g, or t
  misc_feature (973)..(973): n is a, c, g, or t
  misc_feature (985)..(985): n is a, c, g, or t
  misc_feature (1008)..(1008): n is a, c, g, or t
  misc_feature (1016)..(1016): n is a, c, g, or t
  misc_feature (1062)..(1062): n is a, c, g, or t
  misc_feature (1067)..(1067): n is a, c, g, or t
  misc_feature (1076)..(1076): n is a, c, g, or t
  misc_feature (1086)..(1086): n is a, c, g, or t
  misc_feature (1090)..(1090): n is a, c, g, or t
  misc_feature (1093)..(1093): n is a, c, g, or t
  misc_feature (1118)..(1118): n is a, c, g, or t
  misc_feature (1122)..(1123): n is a, c, g, or t
  misc_feature (1125)..(1125): n is a, c, g, or t
  misc_feature (1128)..(1128): n is a, c, g, or t
  misc_feature (1135)..(1135): n is a, c, g, or t
  misc_feature (1137)..(1137): n is a, c, g, or t
  misc_feature (1150)..(1150): n is a, c, g, or t
  misc_feature (1157)..(1158): n is a, c, g, or t
  misc_feature (1165)..(1165): n is a, c, g, or t
  misc_feature (1184)..(1184): n is a, c, g, or t
  misc_feature (1189)..(1189): n is a, c, g, or t
  misc_feature (1191)..(1191): n is a, c, g, or t
  misc_feature (1200)..(1201): n is a, c, g, or t
  misc_feature (1211)..(1211): n is a, c, g, or t
  misc_feature (1213)..(1215): n is a, c, g, or t
  misc_feature (1217)..(1218): n is a, c, g, or t
  misc_feature (1225)..(1225): n is a, c, g, or t
  misc_feature (1234)..(1234): n is a, c, g, or t
  misc_feature (1256)..(1256): n is a, c, g, or t
  misc_feature (1259)..(1259): n is a, c, g, or t
  misc_feature (1267)..(1267): n is a, c, g, or t
  misc_feature (1271)..(1271): n is a, c, g, or t
  misc_feature (1291)..(1292): n is a, c, g, or t
  misc_feature (1295)..(1295): n is a, c, g, or t
  misc_feature (1320)..(1320): n is a, c, g, or t
  misc_feature (1345)..(1346): n is a, c, g, or t
  misc_feature (1352)..(1353): n is a, c, g, or t
  misc_feature (1358)..(1358): n is a, c, g, or t
  misc_feature (1367)..(1369): n is a, c, g, or t
  misc_feature (1374)..(1374): n is a, c, g, or t
  misc_feature (1396)..(1396): n is a, c, g, or t
  misc_feature (1398)..(1399): n is a, c, g, or t
  misc_feature (1401)..(1402): n is a, c, g, or t
nanagattattatgacaggatcgcatcaccatcaccatcgcggatcctatttaggtgacactatagaatcgtcgacccacgcgtccgcccacgcgtccgcagagttgccgctggttccagtcaagcggcagcggcatgagttgctgttgggagcggggtctggcccaggagccgggcagcagcaggcgacgccgggagccttgctgcaagcgggacctccaagatgttcctcccttcaagccccaatcatgctgctctctggacatgaaggggaagtctactgctgcaagttccaccccaacggatccaccttagcatctgcaggatttgaccgactgatattactgtggaatgtctatggtgactgtgataactatgccacactgaagggacacagtggagcagtgatggaattgcattacaacacagatggcagtatgcttttctcagcatccacagataaaaccgtggctgtgtgggatagtgaaacaggtgagagggttaaaaggctaaagggacatacttcctttgtgaattcctgttatccagccaggagaggccctcagcttgtctgcactggcagtgacgatggcacagttaagctttgggacatccggaagaaagcagccatccagacatttcagaacacgtaccaggtgttagctgtgaccttcaatgacacaagtgatcagattatttctggtggaatagacaatgatatcaaggtctgggacctgcgccagaacaagctaacctacaccatgagaggccatgcagattcagtgactggcctgagtttaagttctgaaggctcttatcttttgtccaatgcaatggacaatacagttcgtgtctgggatgtccggccatttgcccccaaaganagatgtgtaaagatatttcagggaatgtgcacaactttgaaaaaancttctganatgttcttggtcacntgatggaagcaaaanacaanctggctcaaccnaaaggtttgtttatgtgtggganaccccaancaggaaaaaattgtaaaacctgcccggccatgctggctccaacaangaagnggctttccnccctgaagancccntcnttatcccccctccaatgaaaaaaantgtnntnggnaaaaatncntgaaaattggacnggaaaannccaggcnctttttttaaaaccccaanggcananggagccaannttggagtccngnnnannccccctnaaaaaaatnttaaaaaaaaaaaaggggggcnatncaaaaacntttntcctttccaaaaaaaaaaannccngggccaaaaccccccaaaaaggggntttttttttttttttttttagggcnngaaaannggggnatttttttnnnggggnatttttttttctttttaaaaananntnnaaaaaaaaa

SEQ ID NO: 727 - DNA, 1200 bp, Homo Sapiens
  misc_feature (13)..(13): n is a, c, g, or t
  misc_feature (944)..(944): n is a, c, g, or t
  misc_feature (951)..(951): n is a, c, g, or t
  misc_feature (967)..(967): n is a, c, g, or t
  misc_feature (969)..(969): n is a, c, g, or t
  misc_feature (975)..(975): n is a, c, g, or t
  misc_feature (984)..(984): n is a, c, g, or t
  misc_feature (988)..(988): n is a, c, g, or t
  misc_feature (990)..(990): n is a, c, g, or t
  misc_feature (1002)..(1002): n is a, c, g, or t
  misc_feature (1005)..(1005): n is a, c, g, or t
  misc_feature (1016)..(1016): n is a, c, g, or t
  misc_feature (1029)..(1030): n is a, c, g, or t
  misc_feature (1054)..(1054): n is a, c, g, or t
  misc_feature (1060)..(1060): n is a, c, g, or t
  misc_feature (1077)..(1077): n is a, c, g, or t
  misc_feature (1096)..(1096): n is a, c, g, or t
  misc_feature (1098)..(1099): n is a, c, g, or t
  misc_feature (1125)..(1125): n is a, c, g, or t
  misc_feature (1130)..(1130): n is a, c, g, or t
  misc_feature (1139)..(1139): n is a, c, g, or t
  misc_feature (1148)..(1148): n is a, c, g, or t
  misc_feature (1155)..(1155): n is a, c, g, or t
  misc_feature (1162)..(1162): n is a, c, g, or t
  misc_feature (1176)..(1176): n is a, c, g, or t
  misc_feature (1186)..(1186): n is a, c, g, or t
  misc_feature (1195)..(1195): n is a, c, g, or t
tagagagaattanctatggagaggatcgcatcaccatcaccatcacggatcctatttaggtgacactatagaatcgtcgacccacgcgtccgctcaagaaacagtccaaagaattcttctagaaccctataaatacttacttcagttaccaggtaaacaagtgagaaccaaactttcacaggcatttaatcattggctgaaagttccagaggacaagctacagattattattgaagtgacagaaatgttgcataatgccagtttactcatcgatgatattgaagacaactcaaaactccgacgtggctttccagtggcccacagcatctatggaatcccatctgtcatcaattctgccaattacgtgtatttccttggcttggagaaagtcttaacccttgatcacccagatgcagtgaagctttttacccgccagcttttggaactccatcagggacaaggcctagatatttactggagggataattacacttgtcccactgaagaagaatataaagctatggtgctgcagaaaacaggtggactgtttggattagcagtaggtctcatgcagttgttctctgattacaaagaagatttaaaaccgctacttaatacacttgggctctttttccaaattagggatgattatgctaatctacactccaaagaatatagtgaaaacaaaagtttttgtgaagatctgacagagggaaagttctcatttcctactattcatgctatttggtcaaggcctgaaagcacccaggtgcagaatatcttgcgccagagaacagaaaacatagatataaaaaaatactgtgtacattatcttgaggatgtaggttcttttgaatacactcgtaatacccttaaagagcttgaagctaaagcctataaacagatggatgcacgtggggggaaccctgacctaatagccttantaaaacnccttaagtaagatgtncnaagaanaaaaaggantaangntaagcccattcntgnatgggaccccnaagctaattttanntaaaccttttttttggcctttaanccctanccccttttaaaaaattngttaattccccccaaaacnannaaaaaggggaaatagggggggggcanggaantcctttttntttaaaaanccccccnggtaagnaaaaccaaatttcnaaggtgaaanaaatccaanccccc

SEQ ID NO: 728 - DNA, 1377 bp, Homo Sapiens
  misc_feature (768)..(768): n is a, c, g, or t
  misc_feature (783)..(783): n is a, c, g, or t
  misc_feature (850)..(850): n is a, c, g, or t
  misc_feature (868)..(868): n is a, c, g, or t
  misc_feature (878)..(878): n is a, c, g, or t
  misc_feature (897)..(897): n is a, c, g, or t
  misc_feature (912)..(912): n is a, c, g, or t
  misc_feature (924)..(924): n is a, c, g, or t
  misc_feature (932)..(932): n is a, c, g, or t
  misc_feature (991)..(991): n is a, c, g, or t
  misc_feature (994)..(994): n is a, c, g, or t
  misc_feature (996)..(996): n is a, c, g, or t
  misc_feature (1003)..(1003): n is a, c, g, or t
  misc_feature (1007)..(1007): n is a, c, g, or t
  misc_feature (1011)..(1011): n is a, c, g, or t
  misc_feature (1018)..(1018): n is a, c, g, or t
  misc_feature (1047)..(1048): n is a, c, g, or t
  misc_feature (1065)..(1065): n is a, c, g, or t
  misc_feature (1082)..(1082): n is a, c, g, or t
  misc_feature (1086)..(1086): n is a, c, g, or t
  misc_feature (1091)..(1091): n is a, c, g, or t
  misc_feature (1094)..(1094): n is a, c, g, or t
  misc_feature (1096)..(1096): n is a, c, g, or t
  misc_feature (1098)..(1099): n is a, c, g, or t
  misc_feature (1110)..(1112): n is a, c, g, or t
  misc_feature (1114)..(1114): n is a, c, g, or t
  misc_feature (1127)..(1127): n is a, c, g, or t
  misc_feature (1141)..(1141): n is a, c, g, or t
  misc_feature (1143)..(1143): n is a, c, g, or t
  misc_feature (1147)..(1147): n is a, c, g, or t
  misc_feature (1157)..(1157): n is a, c, g, or t
  misc_feature (1160)..(1160): n is a, c, g, or t
  misc_feature (1164)..(1164): n is a, c, g, or t
  misc_feature (1167)..(1167): n is a, c, g, or t
  misc_feature (1174)..(1174): n is a, c, g, or t
  misc_feature (1185)..(1185): n is a, c, g, or t
  misc_feature (1193)..(1193): n is a, c, g, or t
  misc_feature (1195)..(1195): n is a, c, g, or t
  misc_feature (1199)..(1199): n is a, c, g, or t
  misc_feature (1204)..(1206): n is a, c, g, or t
  misc_feature (1210)..(1210): n is a, c, g, or t
  misc_feature (1216)..(1216): n is a, c, g, or t
  misc_feature (1222)..(1222): n is a, c, g, or t
  misc_feature (1228)..(1230): n is a, c, g, or t
  misc_feature (1233)..(1233): n is a, c, g, or t
  misc_feature (1235)..(1237): n is a, c, g, or t
  misc_feature (1245)..(1245): n is a, c, g, or t
  misc_feature (1248)..(1248): n is a, c, g, or t
  misc_feature (1267)..(1267): n is a, c, g, or t
  misc_feature (1273)..(1273): n is a, c, g, or t
  misc_feature (1275)..(1275): n is a, c, g, or t
  misc_feature (1304)..(1304): n is a, c, g, or t
  misc_feature (1307)..(1307): n is a, c, g, or t
  misc_feature (1309)..(1309): n is a, c, g, or t
  misc_feature (1316)..(1316): n is a, c, g, or t
  misc_feature (1318)..(1319): n is a, c, g, or t
  misc_feature (1321)..(1321): n is a, c, g, or t
  misc_feature (1326)..(1326): n is a, c, g, or t
  misc_feature (1334)..(1334): n is a, c, g, or t
  misc_feature (1346)..(1346): n is a, c, g, or t
  misc_feature (1352)..(1352): n is a, c, g, or t
  misc_feature (1360)..(1360): n is a, c, g, or t
  misc_feature (1362)..(1362): n is a, c, g, or t
  misc_feature (1366)..(1366): n is a, c, g, or t
  misc_feature (1368)..(1369): n is a, c, g, or t
  misc_feature (1373)..(1373): n is a, c, g, or t
  misc_feature (1376)..(1377): n is a, c, g, or t
aatagagagaattactatgagaggatcgcatcaccatcaccatcacggatcctatttaggtgacactatagaatcgtcgacccacgcgtccgcccacgcgtccggcggccgcgtcgggaccggccgcgatgggaccggaggcggcgcgggcggcggcggcgcagacaaaggggccaaaccagtgctcctgccacctctctggctgccccctagagcctgcccatcccagcctgaccaatgtccacagccagggagcagccaatcttcagcacacgggcgcacgtgttccaaattgacccagccaccaagcgaaactggatcccagcgggcaagcacgcactcactgtctcctatttctacgatgccacccgcaatgtgtaccgcatcatcagcatcggaggcgccaaggccatcatcaacagcactgtcactcccaacatgaccttcaccaaaacttcccagaagttcgggcagtgggccgacagtcgcgccaacacagtctacggcctgggctttgcctctgaacagcatctgacacagtttgccgagaagttccaggaagtgaaggaagcagccaggctggccagggagaaatctcaggatggcggggagctcaccagtccagccctggggctcgcctcccaccaggtgcccccgagccctctcgtcagtgccaacggccccggcgaggaaaaactgttccgcagccagagcgctgatgcccccggccccacagagcgcgagcggctaaagaagatgttgtctganggctccgtgggcgangtacagtgggaggccgagtttttcgcactgcaggacagcaacaacaagctggcaggcgccctgcganaggccaacgccgccgcancccagtggangcagcagctggaggctcancgtgcaaaggccgancggctgcggcancgggtggntgaactggaggctcaggcaacttcaaagtgaccccccccggtgaaaaggagggctgggncangncaattcnctgnaaanctggaanctttggtgcaaaccaaggaccagaaattnnaaacctgaaaattcaantggggggcccccgaagncctngaagntgncnanngtgaagaaatnnncnaaaggggcagacntggaaccccaaagngnaatngaaaaccacnttngggnaangaaccanctgaaaaaacncggcaaangnaacngcccnnnttantggccngaaaanaatttnnnaanannnttttaaantanaattcgaggcctgcccctnttaaantnccccaaacggggttttttaaaaatcccgnaangnccacctngnnanatttncctttctngaaagggggggnaatttnctgggggngngggngnngggnccnn

SEQ ID NO: 729 - DNA, 1415 bp, Homo Sapiens
  misc_feature (834)..(834): n is a, c, g, or t
  misc_feature (888)..(888): n is a, c, g, or t
  misc_feature (949)..(949): n is a, c, g, or t
  misc_feature (956)..(956): n is a, c, g, or t
  misc_feature (1000)..(1000): n is a, c, g, or t
  misc_feature (1009)..(1009): n is a, c, g, or t
  misc_feature (1012)..(1012): n is a, c, g, or t
  misc_feature (1032)..(1032): n is a, c, g, or t
  misc_feature (1039)..(1040): n is a, c, g, or t
  misc_feature (1049)..(1049): n is a, c, g, or t
  misc_feature (1074)..(1074): n is a, c, g, or t
  misc_feature (1081)..(1082): n is a, c, g, or t
  misc_feature (1088)..(1088): n is a, c, g, or t
  misc_feature (1094)..(1094): n is a, c, g, or t
  misc_feature (1097)..(1097): n is a, c, g, or t
  misc_feature (1101)..(1101): n is a, c, g, or t
  misc_feature (1105)..(1106): n is a, c, g, or t
  misc_feature (1129)..(1129): n is a, c, g, or t
  misc_feature (1139)..(1139): n is a, c, g, or t
  misc_feature (1144)..(1145): n is a, c, g, or t
  misc_feature (1148)..(1149): n is a, c, g, or t
  misc_feature (1163)..(1163): n is a, c, g, or t
  misc_feature (1171)..(1171): n is a, c, g, or t
  misc_feature (1174)..(1174): n is a, c, g, or t
  misc_feature (1176)..(1177): n is a, c, g, or t
  misc_feature (1180)..(1181): n is a, c, g, or t
  misc_feature (1183)..(1185): n is a, c, g, or t
  misc_feature (1193)..(1193): n is a, c, g, or t
  misc_feature (1202)..(1202): n is a, c, g, or t
  misc_feature (1211)..(1211): n is a, c, g, or t
  misc_feature (1214)..(1214): n is a, c, g, or t
  misc_feature (1217)..(1217): n is a, c, g, or t
  misc_feature (1221)..(1221): n is a, c, g, or t
  misc_feature (1233)..(1234): n is a, c, g, or t
  misc_feature (1261)..(1263): n is a, c, g, or t
  misc_feature (1265)..(1265): n is a, c, g, or t
  misc_feature (1268)..(1271): n is a, c, g, or t
  misc_feature (1273)..(1273): n is a, c, g, or t
  misc_feature (1281)..(1281): n is a, c, g, or t
  misc_feature (1284)..(1284): n is a, c, g, or t
  misc_feature (1286)..(1287): n is a, c, g, or t
  misc_feature (1290)..(1290): n is a, c, g, or t
  misc_feature (1294)..(1295): n is a, c, g, or t
  misc_feature (1298)..(1300): n is a, c, g, or t
  misc_feature (1311)..(1311): n is a, c, g, or t
  misc_feature (1316)..(1316): n is a, c, g, or t
  misc_feature (1320)..(1320): n is a, c, g, or t
  misc_feature (1324)..(1328): n is a, c, g, or t
  misc_feature (1332)..(1335): n is a, c, g, or t
  misc_feature (1337)..(1338): n is a, c, g, or t
  misc_feature (1340)..(1340): n is a, c, g, or t
  misc_feature (1343)..(1344): n is a, c, g, or t
  misc_feature (1350)..(1351): n is a, c, g, or t
  misc_feature (1355)..(1355): n is a, c, g, or t
  misc_feature (1359)..(1361): n is a, c, g, or t
  misc_feature (1364)..(1364): n is a, c, g, or t
  misc_feature (1370)..(1373): n is a, c, g, or t
  misc_feature (1377)..(1377): n is a, c, g, or t
  misc_feature (1383)..(1386): n is a, c, g, or t
  misc_feature (1389)..(1392): n is a, c, g, or t
  misc_feature (1394)..(1395): n is a, c, g, or t
  misc_feature (1397)..(1397): n is a, c, g, or t
  misc_feature (1400)..(1409): n is a, c, g, or t
  misc_feature (1412)..(1413): n is a, c, g, or t
attagagaaattactatgagaggatcgcatcaccatcaccatcacggatcctatttaggtgacactatagaatcgtcgacccacgcgtccgcccacgcgtccgcggacaccagcgccctgtcctatgactctgtcaagtacacgctggtggtagatgagcatgcacagctggagctggtgagcctgcggccgtgcttcggagactacagtgacgagagtgactctgccaccgtctatgacaactgtgcctccgtctcctcgccctatgagtcggccatcggagaggaatatgaggaggccccgcggccccagccccctgcctgcctctccgaggactccacgcctgatgaacccgacgtccatttctccaagaaattcctgaacgtcttcatgagtggccgctcccgctcctccagtgctgagtccttcgggctgttctcctgcatcatcaacggggaggagcaggagcagacccaccgggccatattcaggtttgtgcctcgacacgaagacgaacttgagctggaagtggatgaccctctgctagtggagctccaggctgaagactactggtacgaggcctacaacatgcgcactggtgcccggggtgtctttcctgcctattacgccatcgaggtcaccaaggagcccgagcacatggcagccctggccaaaaacagtgactgggtggaccagttccgggtgaagttcctgggctcagtccaggttccctatcacaagggcaatgacgtcctctgtgctgctatgcaaaagattgccaccacccgccggctcaccgtgcactttaacccgccctccagctgtgtcctgganatcagcgtgcgggggtgtgaaaataggcgtcaaagggccgatgactcccaggangccaaaggggaataaatgtagccacttttttcagttaaaaaaacatctctttctgcggatntcatccnaaaaaacaacaagtaatttgggttcatcaccaagcaccccgccnaacaccggnttngcctgccacgtctttttgtntgaaaannccaccaaancccttggcaaatccgtgggggaaancattccnncaattntaaaancantttnggannaaacctgccccaaaaaaaaaatntacctggaanaattnnganncccccccttttggntccccaanccntnnggnnannncaaaaaanttgtttttnaaagaattngcnctntttnaaaaggggcccnncccccccaaaaaaaaaaatggggcccnnngnccnnnnanggaagggnggnannggnaaannaannnttttttaaatnggaanattntttnnnnnaaannnncnngnatnnaaaaanntttnaaannnttnaaaaannnntttnaaaaannnnccnnnngnntnccnnnnnnnnnnttnntt

SEQ ID NO: 730 - DNA, 1348 bp, Homo Sapiens
  misc_feature (1)..(1): n is a, c, g, or t
  misc_feature (5)..(13): n is a, c, g, or t
  misc_feature (857)..(857): n is a, c, g, or t
  misc_feature (859)..(859): n is a, c, g, or t
  misc_feature (869)..(869): n is a, c, g, or t
  misc_feature (909)..(909): n is a, c, g, or t
  misc_feature (925)..(925): n is a, c, g, or t
  misc_feature (939)..(939): n is a, c, g, or t
  misc_feature (951)..(951): n is a, c, g, or t
  misc_feature (955)..(955): n is a, c, g, or t
  misc_feature (987)..(987): n is a, c, g, or t
  misc_feature (990)..(991): n is a, c, g, or t
  misc_feature (1026)..(1026): n is a, c, g, or t
  misc_feature (1040)..(1040): n is a, c, g, or t
  misc_feature (1043)..(1043): n is a, c, g, or t
  misc_feature (1046)..(1046): n is a, c, g, or t
  misc_feature (1050)..(1050): n is a, c, g, or t
  misc_feature (1059)..(1059): n is a, c, g, or t
  misc_feature (1078)..(1078): n is a, c, g, or t
  misc_feature (1083)..(1083): n is a, c, g, or t
  misc_feature (1093)..(1093): n is a, c, g, or t
  misc_feature (1097)..(1097): n is a, c, g, or t
  misc_feature (1106)..(1108): n is a, c, g, or t
  misc_feature (1135)..(1135): n is a, c, g, or t
  misc_feature (1138)..(1140): n is a, c, g, or t
  misc_feature (1145)..(1145): n is a, c, g, or t
  misc_feature (1157)..(1157): n is a, c, g, or t
  misc_feature (1159)..(1159): n is a, c, g, or t
  misc_feature (1163)..(1163): n is a, c, g, or t
  misc_feature (1166)..(1166): n is a, c, g, or t
  misc_feature (1170)..(1171): n is a, c, g, or t
  misc_feature (1175)..(1175): n is a, c, g, or t
  misc_feature (1184)..(1184): n is a, c, g, or t
  misc_feature (1193)..(1193): n is a, c, g, or t
  misc_feature (1196)..(1196): n is a, c, g, or t
  misc_feature (1214)..(1214): n is a, c, g, or t
  misc_feature (1217)..(1217): n is a, c, g, or t
  misc_feature (1220)..(1220): n is a, c, g, or t
  misc_feature (1229)..(1231): n is a, c, g, or t
  misc_feature (1235)..(1235): n is a, c, g, or t
  misc_feature (1239)..(1239): n is a, c, g, or t
  misc_feature (1250)..(1250): n is a, c, g, or t
  misc_feature (1258)..(1258): n is a, c, g, or t
  misc_feature (1260)..(1260): n is a, c, g, or t
  misc_feature (1265)..(1265): n is a, c, g, or t
  misc_feature (1274)..(1274): n is a, c, g, or t
  misc_feature (1277)..(1277): n is a, c, g, or t
  misc_feature (1280)..(1281): n is a, c, g, or t
  misc_feature (1288)..(1288): n is a, c, g, or t
  misc_feature (1295)..(1295): n is a, c, g, or t
  misc_feature (1297)..(1298): n is a, c, g, or t
  misc_feature (1303)..(1303): n is a, c, g, or t
  misc_feature (1307)..(1307): n is a, c, g, or t
  misc_feature (1311)..(1312): n is a, c, g, or t
  misc_feature (1319)..(1319): n is a, c, g, or t
  misc_feature (1327)..(1327): n is a, c, g, or t
  misc_feature (1336)..(1336): n is a, c, g, or t
  misc_feature (1341)..(1341): n is a, c, g, or t
nattnnnnnnnnnattagagaaattactatgagaggatcgcatcaccatcaccatcacggatcctatttaggtgacactatagaatcgtcgacccacgcgtccggttccgaggaagccagacccggagccgtggcctgccgggccggcgacatggatcccctgttccagcaaacgcacaagcaggtccacgagatccagtcttgcatgggacgcctggagacggcagacaagcagtctgtgcacatagtagaaaacgaaatccaagcaagcatagaccagatattcagccgtctagaacgtctggagattttgtccagcaaggagccccctaacaaaaggcaaaatgccaaacttcgggttgaccagttaaagtatgatgtccagcacctgcagactgcgctcagaaacttccagcatcggcgccatgcaagggagcagcaggagagacagcgagaagagcttctgtctcgaaccttcaccactaacgactctgacaccaccataccaatggacgaatcactgcagtttaactcctccctccagaaagttcacaacggcatggatgacctcattttagatgggcacaatattttagatggactgaggacccagagactgaccttgaaggggactcagaagaagatccttgacattgccaacatgctgggcttgtccaacacagtgatgcggctcatcgagaagcgggctttccaggacaagtactttatgataggtgggatgctgctgacctgtgtggtcatgttcctcgtggtgcagtacctgacatgagccagccacgctcagtggctgaacagcattcccacagcctgcaagtgtgtgtgtgtgtgaaaaaaanangggggcccanaggccgccttttgaaatgtttgcctgtctgaactgtgaanacacttgggagtgatngtggtctaatttcnaacctgctctgntttnctgtgacatcttggagggggaagctagtgccnccnnccatggcgcgggtgctttaggaaatgaaaaaaatncccggggtctgtcnctntcnctcnccgctctcnctggggggagggaaaaaantggcntttggggggntttntttcacccnnnctgaagccgtgcccctgggaaggggtnccnnngtgancccctgggttgnangaanttncccnncggnttccaaccnttttccccntcnaggccttttttgggttcntgnaanggggggaannnaaantggnaaaggaaaagnaaaaaagncnttttnccccccccnttnatnnaaaaaanagggggnanntcaancccngggnnctgggcncccccccngggcccaanaaaanaaaaaaa

SEQ ID NO: 731 - DNA, 1390 bp, Homo Sapiens
  misc_feature (846)..(846): n is a, c, g, or t
  misc_feature (873)..(873): n is a, c, g, or t
  misc_feature (898)..(898): n is a, c, g, or t
  misc_feature (955)..(955): n is a, c, g, or t
  misc_feature (958)..(958): n is a, c, g, or t
  misc_feature (968)..(968): n is a, c, g, or t
  misc_feature (978)..(978): n is a, c, g, or t
  misc_feature (993)..(993): n is a, c, g, or t
  misc_feature (1011)..(1011): n is a, c, g, or t
  misc_feature (1013)..(1013): n is a, c, g, or t
  misc_feature (1022)..(1022): n is a, c, g, or t
  misc_feature (1035)..(1035): n is a, c, g, or t
  misc_feature (1038)..(1038): n is a, c, g, or t
  misc_feature (1050)..(1050): n is a, c, g, or t
  misc_feature (1052)..(1052): n is a, c, g, or t
  misc_feature (1070)..(1070): n is a, c, g, or t
  misc_feature (1079)..(1080): n is a, c, g, or t
  misc_feature (1084)..(1084): n is a, c, g, or t
  misc_feature (1093)..(1093): n is a, c, g, or t
  misc_feature (1113)..(1113): n is a, c, g, or t
  misc_feature (1116)..(1118): n is a, c, g, or t
  misc_feature (1121)..(1121): n is a, c, g, or t
  misc_feature (1125)..(1125): n is a, c, g, or t
  misc_feature (1127)..(1127): n is a, c, g, or t
  misc_feature (1140)..(1140): n is a, c, g, or t
  misc_feature (1145)..(1145): n is a, c, g, or t
  misc_feature (1151)..(1151): n is a, c, g, or t
  misc_feature (1157)..(1157): n is a, c, g, or t
  misc_feature (1169)..(1169): n is a, c, g, or t
  misc_feature (1181)..(1181): n is a, c, g, or t
  misc_feature (1185)..(1186): n is a, c, g, or t
  misc_feature (1192)..(1192): n is a, c, g, or t
  misc_feature (1199)..(1199): n is a, c, g, or t
  misc_feature (1215)..(1215): n is a, c, g, or t
  misc_feature (1220)..(1220): n is a, c, g, or t
  misc_feature (1223)..(1223): n is a, c, g, or t
  misc_feature (1225)..(1225): n is a, c, g, or t
  misc_feature (1227)..(1229): n is a, c, g, or t
  misc_feature (1235)..(1235): n is a, c, g, or t
  misc_feature (1237)..(1237): n is a, c, g, or t
  misc_feature (1239)..(1239): n is a, c, g, or t
  misc_feature (1248)..(1248): n is a, c, g, or t
  misc_feature (1273)..(1273): n is a, c, g, or t
  misc_feature (1280)..(1280): n is a, c, g, or t
  misc_feature (1290)..(1290): n is a, c, g, or t
  misc_feature (1293)..(1293): n is a, c, g, or t
  misc_feature (1296)..(1297): n is a, c, g, or t
  misc_feature (1300)..(1300): n is a, c, g, or t
  misc_feature (1316)..(1316): n is a, c, g, or t
  misc_feature (1328)..(1328): n is a, c, g, or t
  misc_feature (1346)..(1347): n is a, c, g, or t
  misc_feature (1355)..(1355): n is a, c, g, or t
  misc_feature (1357)..(1357): n is a, c, g, or t
  misc_feature (1364)..(1364): n is a, c, g, or t
  misc_feature (1368)..(1371): n is a, c, g, or t
  misc_feature (1376)..(1376): n is a, c, g, or t
  misc_feature (1382)..(1382): n is a, c, g, or t
tagagaaattactatgagaggatcgcatcaccatcaccatcacggatcctatttaggtgacactatagaatcgtcgacccacgcgtccggtgctggaggggtgcttgcaggagcattgtgtaattctaatccagagctggtgagagcggtgactttggaggcacctttcttggatgttctcaacaccatgatggacactacacttcctctgacattagaagaattagaagaatgggggaatccttcatctgatgaaaaacacaagaactacataaaacgttactgtccctatcaaaatattaaacctcagcattatccttcaattcacataacggcatatgaaaacgatgaacgggtacctctgaaaggaattgtaagttatactgagaaactcaaggaagccatcgcggagcatgctaaggacacaggtgaaggctatcagacccctaatattattctagatattcagcctggaggcaatcatgtaattgaggattctcacaaaaagattacagcccaaattaaattcctgtacgaggaacttggacttgacagcaccagtgttttcgaggatcttaagaaatacctgaaattctgaaacactgcattcaactgggaattggaaacacactgaaatatttcatagtcttacttccaattgagttagcaaaaaaaaattaataacttgagacttttaagttattaattttttaaaatgtgcttctccatctaaattttgcttagtctacatctcacttgcttatactattctctccattgatgcacatgcccattaacctaggaaagtagttttcaaatcatgctccttagaaggatgtggagtanagggaagggaaggattggtgatagcanagctccaggcctcccttccagtcanaacagttgagcagtttacaaattagtgtcctgcctctttgctagcaaatgcttttanacnctgtggcagngagtcatccnctaatttctatgacngcattttaaggggaaaananaaaattctnccccttaaaatcngtnaagtttttgaananctgggggcccaaaggggntccgggccnncccngatggagcnatcggaaaaaagttaaagcnccnnnaanccananttacttttaaacnttttntttttncaaacntttgaaaccttnttaagcggttcntccnnctccanaaaatcnaaaaattttgtttgtncccanccncngnnngaaagnancnttaaaaagntaaacccccggaaggccggtctccncctccangggccccccnggnaanntgntccccccggaaaaggnccttgaaaaacncctcccaaggttggggannaaatctgngntaaaaancccnnnnaaaancttatnttttttgg

SEQ ID NO: 732 - DNA, 1363 bp, Homo Sapiens
  misc_feature (910)..(910): n is a, c, g, or t
  misc_feature (915)..(915): n is a, c, g, or t
  misc_feature (929)..(929): n is a, c, g, or t
  misc_feature (963)..(964): n is a, c, g, or t
  misc_feature (966)..(966): n is a, c, g, or t
  misc_feature (985)..(985): n is a, c, g, or t
  misc_feature (994)..(994): n is a, c, g, or t
  misc_feature (998)..(998): n is a, c, g, or t
  misc_feature (1009)..(1009): n is a, c, g, or t
  misc_feature (1012)..(1012): n is a, c, g, or t
  misc_feature (1018)..(1018): n is a, c, g, or t
  misc_feature (1022)..(1022): n is a, c, g, or t
  misc_feature (1030)..(1030): n is a, c, g, or t
  misc_feature (1035)..(1036): n is a, c, g, or t
  misc_feature (1047)..(1047): n is a, c, g, or t
  misc_feature (1059)..(1059): n is a, c, g, or t
  misc_feature (1064)..(1064): n is a, c, g, or t
  misc_feature (1084)..(1084): n is a, c, g, or t
  misc_feature (1089)..(1089): n is a, c, g, or t
  misc_feature (1110)..(1110): n is a, c, g, or t
  misc_feature (1117)..(1117): n is a, c, g, or t
  misc_feature (1125)..(1125): n is a, c, g, or t
  misc_feature (1130)..(1130): n is a, c, g, or t
  misc_feature (1134)..(1134): n is a, c, g, or t
  misc_feature (1143)..(1144): n is a, c, g, or t
  misc_feature (1146)..(1146): n is a, c, g, or t
  misc_feature (1148)..(1148): n is a, c, g, or t
  misc_feature (1160)..(1160): n is a, c, g, or t
  misc_feature (1162)..(1162): n is a, c, g, or t
  misc_feature (1172)..(1172): n is a, c, g, or t
  misc_feature (1192)..(1192): n is a, c, g, or t
  misc_feature (1195)..(1195): n is a, c, g, or t
  misc_feature (1203)..(1204): n is a, c, g, or t
  misc_feature (1206)..(1207): n is a, c, g, or t
  misc_feature (1209)..(1210): n is a, c, g, or t
  misc_feature (1212)..(1212): n is a, c, g, or t
  misc_feature (1215)..(1215): n is a, c, g, or t
  misc_feature (1219)..(1219): n is a, c, g, or t
  misc_feature (1221)..(1221): n is a, c, g, or t
  misc_feature (1235)..(1235): n is a, c, g, or t
  misc_feature (1242)..(1243): n is a, c, g, or t
  misc_feature (1259)..(1260): n is a, c, g, or t
  misc_feature (1280)..(1280): n is a, c, g, or t
  misc_feature (1292)..(1292): n is a, c, g, or t
  misc_feature (1297)..(1297): n is a, c, g, or t
  misc_feature (1299)..(1299): n is a, c, g, or t
  misc_feature (1301)..(1301): n is a, c, g, or t
  misc_feature (1303)..(1303): n is a, c, g, or t
  misc_feature (1309)..(1310): n is a, c, g, or t
  misc_feature (1313)..(1313): n is a, c, g, or t
  misc_feature (1317)..(1317): n is a, c, g, or t
  misc_feature (1324)..(1324): n is a, c, g, or t
  misc_feature (1327)..(1329): n is a, c, g, or t
  misc_feature (1332)..(1332): n is a, c, g, or t
  misc_feature (1336)..(1340): n is a, c, g, or t
  misc_feature (1345)..(1345): n is a, c, g, or t
  misc_feature (1352)..(1352): n is a, c, g, or t
  misc_feature (1356)..(1357): n is a, c, g, or t
  misc_feature (1362)..(1362): n is a, c, g, or t
ctatagagaaattactatgagaggatcgcatcaccatcaccatcacggatcctatttaggtgacactatagaatcgtcgacccacgcgtccgcccacgcgtccgattttatctcagcagtaagtaacagtggtagagccgactgtgaccagccttcttgtccctcccccagaagctggggaaactgtgccccccgacacctccaagatgctgaaactagcacagcagtgtctggagagggcccagtcgacggccgccaagcttgggaaaacacgcctgaagccaaccatgcctgcagctgctcccatcccccagcctgccggccgacaccgccgtgtatactccgatgaaggaggaaagctctctccttttctgccacccgagatcttccagaagcttcagggggcagagtcacaaagctgtaagaaagagctgacgccactggaggaggcctccctgcagaatcagaagctgaaggctgcgtatgaggcccgaatggcgcggctagaccccagccaggccatgcagaagacatccctgaccctctctctacagcggcagatgatggagaacctagtgattgccaaagcccgggaggagacactccagagaaagatggaggagcgccggctgcggctccaggaggccgccaacaggaggttttgcagccaagtcgccctgaccccggaggaacgggagcagcgggccctttacgccgccatcctggagtacgaacaggaccatgactggccgaagcactggaaggccaagctcaagaggaatccgggggacctgtcactcgtaaccagcctggtctcacacctgctcagcctccccgaccacccgatcgcgcagctcctgaggcggctgcagtgctccgtgtacagcgccctgtatcccgccgtgagcanagcanccgcgccagccccnaggctgctgccccccgaccccaaacccggaagcnnanggctgcggccctcccaaancctcattgnatgntgtccccgccnganccaagngcancccgcggncccannaaagtcccccnaggccccaattnaaacngggcccggggggtctcctcnccctngggggaaaccccattgggatngccaaanaaggaaanctccnttcnagaacttgnnananttctggggaacntntaaacggcanggccggggccctgggttaanccngaaccccnntnncnnanctnaaancncgggggaaaaatcnaaaggcnnaaaaagggggtttccnnaacctttgggctttaaaggnaaaaaattcccnaaaancntncngccgannagnaacnttttttnccnnnggncctnnnnngcctnaaaaagncccnnccggng

SEQ ID NO: 733 - DNA, 1329 bp, Homo Sapiens
  misc_feature (687)..(687): n is a, c, g, or t
  misc_feature (699)..(699): n is a, c, g, or t
  misc_feature (704)..(705): n is a, c, g, or t
  misc_feature (710)..(710): n is a, c, g, or t
  misc_feature (715)..(715): n is a, c, g, or t
  misc_feature (718)..(718): n is a, c, g, or t
  misc_feature (720)..(720): n is a, c, g, or t
  misc_feature (726)..(727): n is a, c, g, or t
  misc_feature (737)..(742): n is a, c, g, or t
  misc_feature (745)..(747): n is a, c, g, or t
  misc_feature (751)..(754): n is a, c, g, or t
  misc_feature (756)..(764): n is a, c, g, or t
  misc_feature (766)..(769): n is a, c, g, or t
  misc_feature (771)..(771): n is a, c, g, or t
  misc_feature (773)..(777): n is a, c, g, or t
  misc_feature (779)..(780): n is a, c, g, or t
  misc_feature (782)..(788): n is a, c, g, or t
  misc_feature (791)..(794): n is a, c, g, or t
  misc_feature (796)..(796): n is a, c, g, or t
  misc_feature (800)..(802): n is a, c, g, or t
  misc_feature (804)..(806): n is a, c, g, or t
  misc_feature (808)..(810): n is a, c, g, or t
  misc_feature (812)..(822): n is a, c, g, or t
  misc_feature (824)..(827): n is a, c, g, or t
  misc_feature (829)..(837): n is a, c, g, or t
  misc_feature (841)..(842): n is a, c, g, or t
  misc_feature (845)..(854): n is a, c, g, or t
  misc_feature (856)..(861): n is a, c, g, or t
  misc_feature (863)..(865): n is a, c, g, or t
  misc_feature (868)..(874): n is a, c, g, or t
  misc_feature (876)..(885): n is a, c, g, or t
  misc_feature (888)..(890): n is a, c, g, or t
  misc_feature (892)..(892): n is a, c, g, or t
  misc_feature (894)..(902): n is a, c, g, or t
  misc_feature (904)..(912): n is a, c, g, or t
  misc_feature (914)..(916): n is a, c, g, or t
  misc_feature (920)..(926): n is a, c, g, or t
  misc_feature (932)..(935): n is a, c, g, or t
  misc_feature (937)..(937): n is a, c, g, or t
  misc_feature (939)..(942): n is a, c, g, or t
  misc_feature (944)..(968): n is a, c, g, or t
  misc_feature (971)..(977): n is a, c, g, or t
  misc_feature (979)..(986): n is a, c, g, or t
  misc_feature (988)..(998): n is a, c, g, or t
  misc_feature (1000)..(1040): n is a, c, g, or t
  misc_feature (1042)..(1049): n is a, c, g, or t
  misc_feature (1052)..(1056): n is a, c, g, or t
  misc_feature (1058)..(1059): n is a, c, g, or t
  misc_feature (1062)..(1063): n is a, c, g, or t
  misc_feature (1066)..(1066): n is a, c, g, or t
  misc_feature (1068)..(1075): n is a, c, g, or t
  misc_feature (1077)..(1082): n is a, c, g, or t
  misc_feature (1084)..(1092): n is a, c, g, or t
  misc_feature (1094)..(1096): n is a, c, g, or t
  misc_feature (1098)..(1098): n is a, c, g, or t
  misc_feature (1100)..(1103): n is a, c, g, or t
  misc_feature (1105)..(1110): n is a, c, g, or t
  misc_feature (1112)..(1115): n is a, c, g, or t
  misc_feature (1117)..(1121): n is a, c, g, or t
  misc_feature (1123)..(1125): n is a, c, g, or t
  misc_feature (1127)..(1133): n is a, c, g, or t
  misc_feature (1136)..(1136): n is a, c, g, or t
  misc_feature (1138)..(1138): n is a, c, g, or t
  misc_feature (1140)..(1141): n is a, c, g, or t
  misc_feature (1143)..(1158): n is a, c, g, or t
  misc_feature (1160)..(1160): n is a, c, g, or t
  misc_feature (1162)..(1162): n is a, c, g, or t
  misc_feature (1165)..(1197): n is a, c, g, or t
  misc_feature (1199)..(1201): n is a, c, g, or t
  misc_feature (1203)..(1219): n is a, c, g, or t
  misc_feature (1221)..(1224): n is a, c, g, or t
  misc_feature (1226)..(1233): n is a, c, g, or t
  misc_feature (1235)..(1236): n is a, c, g, or t
  misc_feature (1238)..(1250): n is a, c, g, or t
  misc_feature (1252)..(1254): n is a, c, g, or t
  misc_feature (1256)..(1262): n is a, c, g, or t
  misc_feature (1264)..(1280): n is a, c, g, or t
  misc_feature (1282)..(1296): n is a, c, g, or t
  misc_feature (1298)..(1304): n is a, c, g, or t
  misc_feature (1306)..(1309): n is a, c, g, or t
  misc_feature (1311)..(1314): n is a, c, g, or t
  misc_feature (1316)..(1319): n is a, c, g, or t
  misc_feature (1321)..(1329): n is a, c, g, or t
ttagagaaattactatgagaggatcgcatcaccatcaccatcacggatcctatttaggtgacactatagaatcgtcgacccacgcgtccggccagccgccagccttcttcagcaagctgaccgagagcaactccgccatggtcaagtccaagaagcaagagatcaacaagaagctgaacacccacaaccggaatgagcctgaatacaatatcagccagcctgggacggagatcttcaatatgcccgccatcaccggaacaggccttatgacctatagaagccaggcggtgcaggaacatgccagcaccaacatggggctggaggccataattagaaaggcactcatgggtggcggcgggaaggccaaggtctctggcagacccagcagccgaaaagccaagtccccggccccgggcctggcatctggggaccggccaccctctgtctcctcagtgcactcggagggagactgcaaccgccggacgccgctcaccaaccgcgtgtgggaggacaggccctcgtccgcaggttccacgccattcccctacaaccccctgatcatgcggctgcaggcgggtgtcatggcttccccacccccaccgggcctccccgcgggcagcgggcccctcgctggcccccaccacgcctgggacgaggagcccaagccactgctctgctcgcattacnagacactctccnacagnnagtgnctcanaananggcggnngggggggggnnnnnnttnnntccnnnnannnnnnnnnannnncntnnnnnannannnnnnnttnnnnanttcnnnannnannnannnnnnnnnnntnnnntnnnnnnnnntttnnttnnnnnnnnnnannnnnntnnnttnnnnnnnannnnnnnnnntannnantnnnnnnnnntnnnnnnnnntnnntttnnnnnnnattttnnnntntnnnntnnnnnnnnnnnnnnnnnnnnnnnnnaannnnnnntnnnnnnnntnnnnnnnnnnnannnnnnnnnnnnnnnnnnnnnnnnnnnnnnnnnnnnnnnnntnnnnnnnnttnnnnntnnttnnttntnnnnnnnntnnnnnntnnnnnnnnntnnntntnnnntnnnnnntnnnnannnnntnnntnnnnnnnatntntnntnnnnnnnnnnnnnnnntntnttnnnnnnnnnnnnnnnnnnnnnnnnnnnnnnnnnannntnnnnnnnnnnnnnnnnntnnnntnnnnnnnntnntnnnnnnnnnnnnntnnntnnnnnnntnnnnnnnnnnnnnnnnnannnnnnnnnnnnnnnannnnnnntnnnntnnnntnnnntnnnnnnnnn

SEQ ID NO: 734 - DNA, 1200 bp, Homo Sapiens
  misc_feature (743)..(743): n is a, c, g, or t
  misc_feature (774)..(774): n is a, c, g, or t
  misc_feature (818)..(818): n is a, c, g, or t
  misc_feature (859)..(859): n is a, c, g, or t
  misc_feature (865)..(865): n is a, c, g, or t
  misc_feature (874)..(874): n is a, c, g, or t
  misc_feature (884)..(884): n is a, c, g, or t
  misc_feature (890)..(890): n is a, c, g, or t
  misc_feature (894)..(894): n is a, c, g, or t
  misc_feature (896)..(896): n is a, c, g, or t
  misc_feature (902)..(902): n is a, c, g, or t
  misc_feature (908)..(908): n is a, c, g, or t
  misc_feature (915)..(915): n is a, c, g, or t
  misc_feature (917)..(917): n is a, c, g, or t
  misc_feature (919)..(919): n is a, c, g, or t
  misc_feature (925)..(925): n is a, c, g, or t
  misc_feature (931)..(931): n is a, c, g, or t
  misc_feature (936)..(936): n is a, c, g, or t
  misc_feature (942)..(942): n is a, c, g, or t
  misc_feature (945)..(946): n is a, c, g, or t
  misc_feature (957)..(957): n is a, c, g, or t
  misc_feature (964)..(964): n is a, c, g, or t
  misc_feature (977)..(977): n is a, c, g, or t
  misc_feature (980)..(980): n is a, c, g, or t
  misc_feature (983)..(984): n is a, c, g, or t
  misc_feature (996)..(998): n is a, c, g, or t
  misc_feature (1000)..(1000): n is a, c, g, or t
  misc_feature (1003)..(1004): n is a, c, g, or t
  misc_feature (1010)..(1011): n is a, c, g, or t
  misc_feature (1013)..(1013): n is a, c, g, or t
  misc_feature (1016)..(1016): n is a, c, g, or t
  misc_feature (1018)..(1018): n is a, c, g, or t
  misc_feature (1020)..(1020): n is a, c, g, or t
  misc_feature (1024)..(1029): n is a, c, g, or t
  misc_feature (1032)..(1032): n is a, c, g, or t
  misc_feature (1037)..(1037): n is a, c, g, or t
  misc_feature (1040)..(1040): n is a, c, g, or t
  misc_feature (1044)..(1044): n is a, c, g, or t
  misc_feature (1046)..(1047): n is a, c, g, or t
  misc_feature (1051)..(1054): n is a, c, g, or t
  misc_feature (1059)..(1059): n is a, c, g, or t
  misc_feature (1063)..(1063): n is a, c, g, or t
  misc_feature (1065)..(1067): n is a, c, g, or t
  misc_feature (1074)..(1074): n is a, c, g, or t
  misc_feature (1076)..(1077): n is a, c, g, or t
  misc_feature (1079)..(1080): n is a, c, g, or t
  misc_feature (1082)..(1082): n is a, c, g, or t
  misc_feature (1086)..(1086): n is a, c, g, or t
  misc_feature (1088)..(1088): n is a, c, g, or t
  misc_feature (1090)..(1091): n is a, c, g, or t
  misc_feature (1096)..(1096): n is a, c, g, or t
  misc_feature (1098)..(1101): n is a, c, g, or t
  misc_feature (1104)..(1104): n is a, c, g, or t
  misc_feature (1112)..(1112): n is a, c, g, or t
  misc_feature (1114)..(1115): n is a, c, g, or t
  misc_feature (1119)..(1119): n is a, c, g, or t
  misc_feature (1122)..(1122): n is a, c, g, or t
  misc_feature (1125)..(1126): n is a, c, g, or t
  misc_feature (1133)..(1135): n is a, c, g, or t
  misc_feature (1139)..(1141): n is a, c, g, or t
  misc_feature (1144)..(1144): n is a, c, g, or t
  misc_feature (1151)..(1155): n is a, c, g, or t
  misc_feature (1160)..(1160): n is a, c, g, or t
  misc_feature (1163)..(1165): n is a, c, g, or t
  misc_feature (1167)..(1167): n is a, c, g, or t
  misc_feature (1169)..(1169): n is a, c, g, or t
  misc_feature (1177)..(1178): n is a, c, g, or t
  misc_feature (1181)..(1185): n is a, c, g, or t
  misc_feature (1192)..(1193): n is a, c, g, or t
  misc_feature (1197)..(1199): n is a, c, g, or t
aatagagaaaattactatgagaggatcgcatcaccatcaccatcacggatcctatttaggtgacactatagaatcgtcgacccacgcgtccgcccacgcgtccgcggacgcgtgggcccagccagtgtcagacacaatcccatgtggatgcacagtctcactccacatgacctgctctcaatgctggagggaaacaggcaggcccttgcctttctcggaaaaagtgtggggccacagcccttttagggcattgcatgcaggtgggcctggcttcacccctacctgcttcctccccaccgcagctggcagagggggaggtttggggccagacccccactagctgggagcctgggggctcctctaaggctgaggaaggaaatttggccccaggttgttggggggtcttgggtctcccaggacggaaggcccagggcagggagggggcatgtggttgggctcctttatctccctgtgtccccttcctgctttgagctagggggctgactctgcctcccaggacacaagtctccaaagtgcctgtgagggcgggccctccgcaccctctgccctctgcctggcaggccaacctcagcccacctgcccagaggccctccctgtggacaccccctcacctatttggccaaacaattctggctgcagcttcaggggccatggctggaagcagcccctgcagatccctcaggccccgaggtcagggtttgagggatgagaccaggtgatantgggggaggggttacttcctttgttacctancaagtagggctatttccatcggtattttaaatgtggggtcacanatcttttggggagggtgtgcttggcagggggcctcttgganccaaanggatgtggngtgaattgcnattggntggnanttaaanccccancccttancnanattccnaaattnaagtnaggaanggnnggttttatttnagggccntttttcaaaatgnccntgnnaacaaatttttnnnanaannaagggnnancgntntntaannnnnnaanggggnaantttncnngggnnnntcccnaaancnnnttttttncnngnntngggntncnnttttncnnnnccnaaaaaccntnntttnaanggnnccaaaannntttnnnaanaaaaccnnnnnggaanccnnncntnaaaaaaannggnnnnnggggggnncccnnna

SEQ ID NO: 735 - DNA, 1367 bp, Homo Sapiens
  misc_feature (366)..(366): n is a, c, g, or t
  misc_feature (889)..(889): n is a, c, g, or t
  misc_feature (923)..(923): n is a, c, g, or t
  misc_feature (951)..(951): n is a, c, g, or t
  misc_feature (958)..(958): n is a, c, g, or t
  misc_feature (964)..(964): n is a, c, g, or t
  misc_feature (977)..(977): n is a, c, g, or t
  misc_feature (985)..(985): n is a, c, g, or t
  misc_feature (992)..(992): n is a, c, g, or t
  misc_feature (1005)..(1005): n is a, c, g, or t
  misc_feature (1009)..(1009): n is a, c, g, or t
  misc_feature (1015)..(1015): n is a, c, g, or t
  misc_feature (1022)..(1022): n is a, c, g, or t
  misc_feature (1030)..(1030): n is a, c, g, or t
  misc_feature (1053)..(1053): n is a, c, g, or t
  misc_feature (1067)..(1067): n is a, c, g, or t
  misc_feature (1069)..(1069): n is a, c, g, or t
  misc_feature (1076)..(1079): n is a, c, g, or t
  misc_feature (1081)..(1081): n is a, c, g, or t
  misc_feature (1083)..(1083): n is a, c, g, or t
  misc_feature (1094)..(1094): n is a, c, g, or t
  misc_feature (1102)..(1103): n is a, c, g, or t
  misc_feature (1107)..(1107): n is a, c, g, or t
  misc_feature (1109)..(1109): n is a, c, g, or t
  misc_feature (1118)..(1118): n is a, c, g, or t
  misc_feature (1122)..(1124): n is a, c, g, or t
  misc_feature (1132)..(1132): n is a, c, g, or t
  misc_feature (1134)..(1134): n is a, c, g, or t
  misc_feature (1139)..(1139): n is a, c, g, or t
  misc_feature (1142)..(1142): n is a, c, g, or t
  misc_feature (1144)..(1144): n is a, c, g, or t
  misc_feature (1147)..(1147): n is a, c, g, or t
  misc_feature (1154)..(1154): n is a, c, g, or t
  misc_feature (1161)..(1162): n is a, c, g, or t
  misc_feature (1164)..(1164): n is a, c, g, or t
  misc_feature (1170)..(1170): n is a, c, g, or t
  misc_feature (1172)..(1173): n is a, c, g, or t
  misc_feature (1189)..(1189): n is a, c, g, or t
  misc_feature (1193)..(1193): n is a, c, g, or t
  misc_feature (1201)..(1202): n is a, c, g, or t
  misc_feature (1211)..(1211): n is a, c, g, or t
  misc_feature (1213)..(1213): n is a, c, g, or t
  misc_feature (1218)..(1219): n is a, c, g, or t
  misc_feature (1226)..(1226): n is a, c, g, or t
  misc_feature (1229)..(1229): n is a, c, g, or t
  misc_feature (1232)..(1232): n is a, c, g, or t
  misc_feature (1236)..(1236): n is a, c, g, or t
  misc_feature (1239)..(1239): n is a, c, g, or t
  misc_feature (1243)..(1243): n is a, c, g, or t
  misc_feature (1255)..(1255): n is a, c, g, or t
  misc_feature (1263)..(1264): n is a, c, g, or t
  misc_feature (1269)..(1269): n is a, c, g, or t
  misc_feature (1273)..(1273): n is a, c, g, or t
  misc_feature (1276)..(1277): n is a, c, g, or t
  misc_feature (1283)..(1283): n is a, c, g, or t
  misc_feature (1287)..(1287): n is a, c, g, or t
  misc_feature (1289)..(1289): n is a, c, g, or t
  misc_feature (1299)..(1299): n is a, c, g, or t
  misc_feature (1301)..(1301): n is a, c, g, or t
  misc_feature (1303)..(1304): n is a, c, g, or t
  misc_feature (1309)..(1315): n is a, c, g, or t
  misc_feature (1319)..(1320): n is a, c, g, or t
  misc_feature (1324)..(1330): n is a, c, g, or t
  misc_feature (1338)..(1338): n is a, c, g, or t
  misc_feature (1341)..(1348): n is a, c, g, or t
  misc_feature (1350)..(1351): n is a, c, g, or t
  misc_feature (1358)..(1358): n is a, c, g, or t
  misc_feature (1363)..(1364): n is a, c, g, or t
gagaaattactatgagaggatcgcatcaccatcaccatcacggatcctatttaggtgacactatagaatcgtcgacccacgcgtccggaaagcgtagacccggggcccagggtctgcccgcccctgcagcctggcctccccgcacaggctgtggcttgcactccagccgctctagtctctcaggaatttgcttgttacttgtactgtgtaaataaagcttcctggttcaatacccaaaaaaaaaaaaaaaaaaaaaaaaagggcggccgctccctatagtgagtcgtattaagcttaattagctgagcttggactcctgttgatagatccagtaatgacctcagaactccatctggatttgttcanaacgctcggttgccgccgggcgttttttattggtgagaatccaagctagcttggcgagattttcaggagctaaggaagctaaaatggagaaaaaaatcactggatataccaccgttgatatatcccaatggcatcgtaaagaacattttgaggcatttcagtcagttgctcaatgtacctataaccagaccgttcagctggatattacggcctttttaaagaccgtaaagaaaaataagcacaagttttatccggcctttattcacattcttgcccgcctgatgaatgctcatccggaatttcgtatggcaatgaaagacggtgagctggtgatatgggatagtgttcacccttgttacaccgttttccatgagcaaactgaaacgttttcatcgctctggagtgaataccacgacgatttccggcagtttctacacatatattcgcaagatgtggcgtgttacggtgaaaacctggcctatttccctaaaagggtttattgaaaatatgtttttcgtctcanccaatccctgggtgagtttcaccagttttgattnaacgtggccaatatggacaacttcttcncccccgnttttcnccatggggcaaanattatacncaaggcnacaaggggctgangccnctggcnaatcagnttcatcangccgttggggaaggccttccagnccgccaaaatgctnangaattannnnantnctgccaataantggcaggnngggncnaattttttnaagnnntttttggngnccctnaancnccnggggaangaccccnnancttgangnncaaaaaaaaaaaaggnccanccaaaaanngggcccttncntttanngggggtnggnggnaaanccncccnaaaaaaaaaaancccccccnnaaaangccnccnnggtttngggnanaagggaaaancncnnaaaannnnnnncccnnaaannnnnnntttttttnaannnnnnnngnnaaaaaanccccnnggg

SEQ ID NO: 736 - DNA, 1384 bp, Homo Sapiens
  misc_feature (861)..(861): n is a, c, g, or t
  misc_feature (867)..(867): n is a, c, g, or t
  misc_feature (875)..(875): n is a, c, g, or t
  misc_feature (882)..(882): n is a, c, g, or t
  misc_feature (902)..(902): n is a, c, g, or t
  misc_feature (919)..(919): n is a, c, g, or t
  misc_feature (958)..(958): n is a, c, g, or t
  misc_feature (996)..(996): n is a, c, g, or t
  misc_feature (1005)..(1005): n is a, c, g, or t
  misc_feature (1017)..(1017): n is a, c, g, or t
  misc_feature (1026)..(1027): n is a, c, g, or t
  misc_feature (1035)..(1035): n is a, c, g, or t
  misc_feature (1045)..(1045): n is a, c, g, or t
  misc_feature (1052)..(1052): n is a, c, g, or t
  misc_feature (1066)..(1067): n is a, c, g, or t
  misc_feature (1074)..(1075): n is a, c, g, or t
  misc_feature (1085)..(1085): n is a, c, g, or t
  misc_feature (1088)..(1089): n is a, c, g, or t
  misc_feature (1091)..(1091): n is a, c, g, or t
  misc_feature (1103)..(1103): n is a, c, g, or t
  misc_feature (1121)..(1121): n is a, c, g, or t
  misc_feature (1139)..(1139): n is a, c, g, or t
  misc_feature (1143)..(1143): n is a, c, g, or t
  misc_feature (1147)..(1147): n is a, c, g, or t
  misc_feature (1152)..(1152): n is a, c, g, or t
  misc_feature (1155)..(1155): n is a, c, g, or t
  misc_feature (1159)..(1159): n is a, c, g, or t
  misc_feature (1168)..(1168): n is a, c, g, or t
  misc_feature (1173)..(1174): n is a, c, g, or t
  misc_feature (1185)..(1185): n is a, c, g, or t
  misc_feature (1194)..(1196): n is a, c, g, or t
  misc_feature (1198)..(1199): n is a, c, g, or t
  misc_feature (1203)..(1203): n is a, c, g, or t
  misc_feature (1205)..(1205): n is a, c, g, or t
  misc_feature (1211)..(1211): n is a, c, g, or t
  misc_feature (1216)..(1216): n is a, c, g, or t
  misc_feature (1220)..(1220): n is a, c, g, or t
  misc_feature (1223)..(1224): n is a, c, g, or t
  misc_feature (1227)..(1227): n is a, c, g, or t
  misc_feature (1230)..(1230): n is a, c, g, or t
  misc_feature (1244)..(1246): n is a, c, g, or t
  misc_feature (1253)..(1253): n is a, c, g, or t
  misc_feature (1256)..(1256): n is a, c, g, or t
  misc_feature (1272)..(1272): n is a, c, g, or t
  misc_feature (1274)..(1275): n is a, c, g, or t
  misc_feature (1277)..(1277): n is a, c, g, or t
  misc_feature (1284)..(1284): n is a, c, g, or t
  misc_feature (1297)..(1298): n is a, c, g, or t
  misc_feature (1302)..(1302): n is a, c, g, or t
  misc_feature (1311)..(1312): n is a, c, g, or t
  misc_feature (1320)..(1321): n is a, c, g, or t
  misc_feature (1323)..(1325): n is a, c, g, or t
  misc_feature (1329)..(1329): n is a, c, g, or t
  misc_feature (1332)..(1334): n is a, c, g, or t
  misc_feature (1337)..(1338): n is a, c, g, or t
  misc_feature (1342)..(1347): n is a, c, g, or t
  misc_feature (1349)..(1350): n is a, c, g, or t
  misc_feature (1353)..(1354): n is a, c, g, or t
  misc_feature (1356)..(1356): n is a, c, g, or t
  misc_feature (1363)..(1365): n is a, c, g, or t
  misc_feature (1372)..(1374): n is a, c, g, or t
  misc_feature (1383)..(1383): n is a, c, g, or t
tagagaaattactatgagaggatcgcatcaccatcaccatcacggatcctatttaggtgacactatagaatcgtcgacccacgcgtccggcagcgttgccatgactcccacctacatggacagcccacgaaaggacggggccttctttatggagtttgtccgcagcccacgcacagcatcgtccgccttctaccctcaggtatctgtggaccaaacagccactcctatgttggacggcaccagtttgggcatatgcacaggccaatccatggacagaggcaacagccagacctttgggaactcccagaacataggagaacagggctactcctccacaaactccagtgacagcagctctcagcagctggtggcaagctccttgacctcatcctctaccctgacagagatcctggaagccatgaagcacccctcgacaggagtccagctgctctctgaacagaagggcctctcaccgtactgcttcatcagcgcggaggtggtacactggttggtgaaccacgtggaggggatccagacacaggcgatggccattgacatcatgcagaaaatgctggaagagcagctcatcacacatgcatctggcgaagcctggcggaccttcatctacggcttctatttctacaagatagtaacggacaaagagcccgaccgagtggccatgcagcagcccgccaccacctggcacacagcaggagtggacgacttcgccagcttccagcgcaagtggtttgaggtggcctttgtggcagaagagctcgtgcactctgagattcctgcctttctcctgccctggctgcctagccggccagcctcctatgcaagtaggcacagctcctttanccgaanttttggangacgganccaggcgggcagcactttanctgccactgtcccaaancaaagactgtgaccctggatgttgacgtgaacaaccccnaaaaccggctggaatggtgccactgttattaccatggnaactttttnctgaatgcaccntttgaaatnnaacttccnttggaatggngggaccncaacaatatttttnnaaaaagnncaaggttggnatnngnaaagccccttcnggggttttgttaatccanttttggaagggcctttgncttnccantactngangggnacccctttnggccnnttttttttccnattaaaaannntnntttntnaagaanggacnaaanccnnttnaanttttaacccaaaannntggatanagnccctttccaaaaactntnnangttggtnttaaaaaaaattnnctcntttttttcnnggaaaaanntnnnttcnttnnnaanntttnnnnnntnnccnnantttgggnnnggggggnnnctccccaana

SEQ ID NO: 737 - DNA, 1404 bp, Homo Sapiens
  misc_feature (102)..(102): n is a, c, g, or t
  misc_feature (120)..(120): n is a, c, g, or t
  misc_feature (122)..(123): n is a, c, g, or t
  misc_feature (126)..(126): n is a, c, g, or t
  misc_feature (136)..(138): n is a, c, g, or t
  misc_feature (149)..(150): n is a, c, g, or t
  misc_feature (154)..(154): n is a, c, g, or t
  misc_feature (157)..(157): n is a, c, g, or t
  misc_feature (160)..(161): n is a, c, g, or t
  misc_feature (169)..(169): n is a, c, g, or t
  misc_feature (171)..(171): n is a, c, g, or t
  misc_feature (179)..(179): n is a, c, g, or t
  misc_feature (181)..(181): n is a, c, g, or t
  misc_feature (210)..(210): n is a, c, g, or t
  misc_feature (229)..(229): n is a, c, g, or t
  misc_feature (235)..(235): n is a, c, g, or t
  misc_feature (244)..(244): n is a, c, g, or t
  misc_feature (249)..(249): n is a, c, g, or t
  misc_feature (259)..(260): n is a, c, g, or t
  misc_feature (268)..(268): n is a, c, g, or t
  misc_feature (285)..(285): n is a, c, g, or t
  misc_feature (292)..(292): n is a, c, g, or t
  misc_feature (294)..(294): n is a, c, g, or t
  misc_feature (308)..(308): n is a, c, g, or t
  misc_feature (312)..(312): n is a, c, g, or t
  misc_feature (315)..(316): n is a, c, g, or t
  misc_feature (321)..(321): n is a, c, g, or t
  misc_feature (327)..(327): n is a, c, g, or t
  misc_feature (334)..(334): n is a, c, g, or t
  misc_feature (340)..(340): n is a, c, g, or t
  misc_feature (342)..(342): n is a, c, g, or t
  misc_feature (345)..(345): n is a, c, g, or t
  misc_feature (362)..(362): n is a, c, g, or t
  misc_feature (368)..(370): n is a, c, g, or t
  misc_feature (374)..(375): n is a, c, g, or t
  misc_feature (377)..(377): n is a, c, g, or t
  misc_feature (381)..(381): n is a, c, g, or t
  misc_feature (392)..(392): n is a, c, g, or t
  misc_feature (398)..(398): n is a, c, g, or t
  misc_feature (416)..(416): n is a, c, g, or t
  misc_feature (436)..(436): n is a, c, g, or t
  misc_feature (439)..(439): n is a, c, g, or t
  misc_feature (448)..(448): n is a, c, g, or t
  misc_feature (463)..(463): n is a, c, g, or t
  misc_feature (502)..(502): n is a, c, g, or t
  misc_feature (543)..(544): n is a, c, g, or t
  misc_feature (547)..(547): n is a, c, g, or t
  misc_feature (554)..(554): n is a, c, g, or t
  misc_feature (570)..(570): n is a, c, g, or t
  misc_feature (577)..(577): n is a, c, g, or t
  misc_feature (579)..(580): n is a, c, g, or t
  misc_feature (590)..(590): n is a, c, g, or t
  misc_feature (604)..(604): n is a, c, g, or t
  misc_feature (608)..(608): n is a, c, g, or t
  misc_feature (642)..(642): n is a, c, g, or t
  misc_feature (655)..(655): n is a, c, g, or t
  misc_feature (671)..(671): n is a, c, g, or t
  misc_feature (674)..(674): n is a, c, g, or t
  misc_feature (676)..(676): n is a, c, g, or t
  misc_feature (680)..(680): n is a, c, g, or t
  misc_feature (696)..(696): n is a, c, g, or t
  misc_feature (710)..(710): n is a, c, g, or t
  misc_feature (715)..(715): n is a, c, g, or t
  misc_feature (722)..(722): n is a, c, g, or t
  misc_feature (725)..(725): n is a, c, g, or t
  misc_feature (738)..(738): n is a, c, g, or t
  misc_feature (746)..(746): n is a, c, g, or t
  misc_feature (764)..(764): n is a, c, g, or t
  misc_feature (776)..(777): n is a, c, g, or t
  misc_feature (789)..(789): n is a, c, g, or t
  misc_feature (795)..(795): n is a, c, g, or t
  misc_feature (812)..(812): n is a, c, g, or t
  misc_feature (827)..(827): n is a, c, g, or t
  misc_feature (862)..(862): n is a, c, g, or t
  misc_feature (881)..(881): n is a, c, g, or t
  misc_feature (885)..(885): n is a, c, g, or t
  misc_feature (891)..(891): n is a, c, g, or t
  misc_feature (895)..(895): n is a, c, g, or t
  misc_feature (905)..(905): n is a, c, g, or t
  misc_feature (931)..(931): n is a, c, g, or t
  misc_feature (941)..(941): n is a, c, g, or t
  misc_feature (944)..(945): n is a, c, g, or t
  misc_feature (951)..(951): n is a, c, g, or t
  misc_feature (954)..(954): n is a, c, g, or t
  misc_feature (971)..(972): n is a, c, g, or t
  misc_feature (974)..(974): n is a, c, g, or t
  misc_feature (981)..(981): n is a, c, g, or t
  misc_feature (995)..(996): n is a, c, g, or t
  misc_feature (1006)..(1006): n is a, c, g, or t
  misc_feature (1021)..(1021): n is a, c, g, or t
  misc_feature (1027)..(1027): n is a, c, g, or t
  misc_feature (1041)..(1042): n is a, c, g, or t
  misc_feature (1048)..(1048): n is a, c, g, or t
  misc_feature (1052)..(1052): n is a, c, g, or t
  misc_feature (1061)..(1061): n is a, c, g, or t
  misc_feature (1063)..(1063): n is a, c, g, or t
  misc_feature (1068)..(1068): n is a, c, g, or t
  misc_feature (1076)..(1076): n is a, c, g, or t
  misc_feature (1086)..(1088): n is a, c, g, or t
  misc_feature (1104)..(1105): n is a, c, g, or t
  misc_feature (1119)..(1119): n is a, c, g, or t
  misc_feature (1125)..(1126): n is a, c, g, or t
  misc_feature (1134)..(1134): n is a, c, g, or t
  misc_feature (1142)..(1142): n is a, c, g, or t
  misc_feature (1148)..(1149): n is a, c, g, or t
  misc_feature (1164)..(1164): n is a, c, g, or t
  misc_feature (1170)..(1170): n is a, c, g, or t
  misc_feature (1186)..(1186): n is a, c, g, or t
  misc_feature (1194)..(1195): n is a, c, g, or t
  misc_feature (1201)..(1201): n is a, c, g, or t
  misc_feature (1203)..(1203): n is a, c, g, or t
  misc_feature (1213)..(1213): n is a, c, g, or t
  misc_feature (1216)..(1216): n is a, c, g, or t
  misc_feature (1221)..(1223): n is a, c, g, or t
  misc_feature (1229)..(1229): n is a, c, g, or t
  misc_feature (1232)..(1232): n is a, c, g, or t
  misc_feature (1241)..(1241): n is a, c, g, or t
  misc_feature (1244)..(1245): n is a, c, g, or t
  misc_feature (1248)..(1248): n is a, c, g, or t
  misc_feature (1250)..(1250): n is a, c, g, or t
  misc_feature (1252)..(1252): n is a, c, g, or t
  misc_feature (1256)..(1256): n is a, c, g, or t
  misc_feature (1259)..(1260): n is a, c, g, or t
  misc_feature (1283)..(1283): n is a, c, g, or t
  misc_feature (1289)..(1289): n is a, c, g, or t
  misc_feature (1307)..(1308): n is a, c, g, or t
  misc_feature (1312)..(1312): n is a, c, g, or t
  misc_feature (1317)..(1317): n is a, c, g, or t
  misc_feature (1322)..(1325): n is a, c, g, or t
  misc_feature (1336)..(1336): n is a, c, g, or t
  misc_feature (1342)..(1344): n is a, c, g, or t
  misc_feature (1349)..(1351): n is a, c, g, or t
  misc_feature (1353)..(1353): n is a, c, g, or t
  misc_feature (1357)..(1358): n is a, c, g, or t
  misc_feature (1360)..(1360): n is a, c, g, or t
  misc_feature (1364)..(1364): n is a, c, g, or t
  misc_feature (1369)..(1369): n is a, c, g, or t
  misc_feature (1378)..(1379): n is a, c, g, or t
  misc_feature (1388)..(1388): n is a, c, g, or t
  misc_feature (1393)..(1393): n is a, c, g, or t
  misc_feature (1395)..(1396): n is a, c, g, or t
  misc_feature (1401)..(1401): n is a, c, g, or t
  misc_feature (1403)..(1404): n is a, c, g, or t
tagagaaattactatgagaggatcgcatcaccatcaccatcacggatcctatttaggtgacactatagaatcgtcgacccacgcgtccgatggacagctggnaattgctgaattagaacngnngangttcctctannncaaggtgaatnnctcnganganncaacagancntcttctgnangttgggctggtttaccatgaacaacctcntccccaatgctgtctatancggtantactgcggncccanagctcctgcnnatctgggngacagctagctctccgnctcttcngnaaagttcggccccntgtnggnngtatntctgtnaacgagnattttnangtnaatgtggtgcctctcancatccnnntganncnccanttcttccacanaatgangggctttttctttcctgnccgaagtgtggaaaatgatnaanttggtgatnaaaatgataattccnaactggtgactactggaataccagctggtgaagcctcgncagctgattgcaacagatgatgcagtaccactgggccctgnnaanggtgtgncacaagatttgactcncagttcngnngtcaaaaggncatttcgcaaatcnccanagcaccctgtggtatgacattgacaagatgaaanagcgagctgccangaacaactccttcatntananaaanattccacaggttccantgtgtgtcagctanaacgntgataanaanagtgtggactgangtgacctnaacctggtgctgccctgnctggagtaccannaccacacatggnacatgnctagacttttgcccatngctgtcaaaaggganagcccgcaaagtcctggttgccccaggtaatcaancagaaactaagggtgaaantctnctacangctntgaaggtccngggaaacctacaaactaaatcggacntgaaatgcancannaggaanaangatgaaaaagccccggnncncattggntttaattgggggcnnaaaaaaaccntggaaaaaaatttcntctttngccagggccaaatnntttggncatnaagggggtngnaaaanaagaattnaaccttggcnnnggttcccgggaacttnngggggggaggggcntccccnntccccaanaaattttngggggnncaaacccaaaggtancttttnaacacctgtttgttanaagggggnngggggnanaaaaggaaanttnccccnnnttattnggntgggccaanggnnttnananccanccnngaggggccgggaaaactttcctngggaanaaaaagttgggaatcccnncccntaaanttttnnnnaaaaattattntttatnnntttcnnnangccnncncccnaaaanggggggatnnctttccccnccctntnnaaaantnn

SEQ ID NO: 738 - DNA, 1417 bp, Homo Sapiens
  misc_feature (9)..(9): n is a, c, g, or t
  misc_feature (764)..(764): n is a, c, g, or t
  misc_feature (836)..(836): n is a, c, g, or t
  misc_feature (859)..(859): n is a, c, g, or t
  misc_feature (917)..(917): n is a, c, g, or t
  misc_feature (944)..(944): n is a, c, g, or t
  misc_feature (952)..(952): n is a, c, g, or t
  misc_feature (962)..(962): n is a, c, g, or t
  misc_feature (964)..(964): n is a, c, g, or t
  misc_feature (968)..(968): n is a, c, g, or t
  misc_feature (974)..(974): n is a, c, g, or t
  misc_feature (985)..(985): n is a, c, g, or t
  misc_feature (990)..(990): n is a, c, g, or t
  misc_feature (993)..(993): n is a, c, g, or t
  misc_feature (996)..(996): n is a, c, g, or t
  misc_feature (1000)..(1000): n is a, c, g, or t
  misc_feature (1007)..(1007): n is a, c, g, or t
  misc_feature (1019)..(1019): n is a, c, g, or t
  misc_feature (1049)..(1049): n is a, c, g, or t
  misc_feature (1052)..(1052): n is a, c, g, or t
  misc_feature (1060)..(1060): n is a, c, g, or t
  misc_feature (1068)..(1068): n is a, c, g, or t
  misc_feature (1079)..(1079): n is a, c, g, or t
  misc_feature (1089)..(1089): n is a, c, g, or t
  misc_feature (1118)..(1120): n is a, c, g, or t
  misc_feature (1124)..(1125): n is a, c, g, or t
  misc_feature (1129)..(1129): n is a, c, g, or t
  misc_feature (1136)..(1136): n is a, c, g, or t
  misc_feature (1140)..(1140): n is a, c, g, or t
  misc_feature (1142)..(1143): n is a, c, g, or t
  misc_feature (1145)..(1145): n is a, c, g, or t
  misc_feature (1154)..(1154): n is a, c, g, or t
  misc_feature (1165)..(1166): n is a, c, g, or t
  misc_feature (1172)..(1172): n is a, c, g, or t
  misc_feature (1180)..(1181): n is a, c, g, or t
  misc_feature (1185)..(1185): n is a, c, g, or t
  misc_feature (1189)..(1189): n is a, c, g, or t
  misc_feature (1194)..(1194): n is a, c, g, or t
  misc_feature (1198)..(1198): n is a, c, g, or t
  misc_feature (1205)..(1206): n is a, c, g, or t
  misc_feature (1213)..(1213): n is a, c, g, or t
  misc_feature (1216)..(1216): n is a, c, g, or t
  misc_feature (1219)..(1219): n is a, c, g, or t
  misc_feature (1222)..(1222): n is a, c, g, or t
  misc_feature (1227)..(1227): n is a, c, g, or t
  misc_feature (1236)..(1236): n is a, c, g, or t
  misc_feature (1243)..(1243): n is a, c, g, or t
  misc_feature (1248)..(1248): n is a, c, g, or t
  misc_feature (1267)..(1267): n is a, c, g, or t
  misc_feature (1269)..(1271): n is a, c, g, or t
  misc_feature (1273)..(1273): n is a, c, g, or t
  misc_feature (1279)..(1280): n is a, c, g, or t
  misc_feature (1289)..(1289): n is a, c, g, or t
  misc_feature (1291)..(1291): n is a, c, g, or t
  misc_feature (1294)..(1294): n is a, c, g, or t
  misc_feature (1296)..(1297): n is a, c, g, or t
  misc_feature (1308)..(1308): n is a, c, g, or t
  misc_feature (1313)..(1313): n is a, c, g, or t
  misc_feature (1315)..(1315): n is a, c, g, or t
  misc_feature (1320)..(1320): n is a, c, g, or t
  misc_feature (1322)..(1323): n is a, c, g, or t
  misc_feature (1328)..(1328): n is a, c, g, or t
  misc_feature (1334)..(1334): n is a, c, g, or t
  misc_feature (1342)..(1342): n is a, c, g, or t
  misc_feature (1347)..(1348): n is a, c, g, or t
  misc_feature (1351)..(1351): n is a, c, g, or t
  misc_feature (1355)..(1355): n is a, c, g, or t
  misc_feature (1357)..(1357): n is a, c, g, or t
  misc_feature (1361)..(1361): n is a, c, g, or t
  misc_feature (1372)..(1372): n is a, c, g, or t
  misc_feature (1382)..(1385): n is a, c, g, or t
  misc_feature (1387)..(1390): n is a, c, g, or t
  misc_feature (1395)..(1395): n is a, c, g, or t
  misc_feature (1400)..(1400): n is a, c, g, or t
  misc_feature (1408)..(1410): n is a, c, g, or t
  misc_feature (1415)..(1415): n is a, c, g, or t
tagagaaanttactatgagaggatcgcatcaccatcaccatcacggatcctatttaggtgacactatagaatcgtcgacccacgcgtccgctcgctgcaaaggctctgagccccaggttgggcccatcccagaggcagcaggtagcagtgagctgcaggttgggcccatcccagaaggaggcagcaacaagccccagcacatggcagaggaggggccggggcaagcagaagtcgagaagctccaggaagaacttaaagtggagcccctggaggaagtggccagggtgaaagaagaggtgtgggaggagaccactgtgaagggggaggagatagagcccaggctggagactgccgagaagggctgccagactgaagccagctctgagcggcccttcagctgcgaggtgtgtggccgatcctacaagcacgccggcagcctcatcaaccaccggcagagccaccagaccggccactttggctgtcaggcctgctccaagggcttctcaaacctcatgtccctcaagaaccaccggcgcatccatgcagatccccgacgtttccgctgcagcgagtgtgggaaggccttccgcctgcggaaacagctggccagccaccagcgggtccacatggaacggcgtgggggtgggggcacccgaaaggcgactcgggaagatcggcccttccgctgtgggcagtgcgggcggacctatcgccacgccggcagcctcctgaaccaccggcgcagccacgagacgggccagtanagctgccccacctgccccaagacctactccaaccgcatggccctgaaggaccaccagaagctgcactcaaanaatcggcggcgacgggcctgganggtccaggcgcacagctgtgcgttgcgccctctgtggccgcaccttccctggccgggnatttttggagcggcccctgcgggaacntgaggganacaaaaaggnanccanccaatngccagggaagncttgnatnggnacancgcccanttgaggcgaacntgattggcaacccagggaataaaaaaccanttngggtgggngcttgaanccattaccccncttttggaanaatggaattccccaagccaaggggaagcnnnaatnnaaanccctttngggnannangtttaaaanccccaaaaacnncttttnctggggtnnaagnaaanaaatngggngcccgtnntgggggnaanggnaanttaanggaagcggntttctcntttcntattagtcaaaaaaccaanannntncccagnnttttccccncnggnannccccttatagnccctncnctaancnntaaangggaanaaaaaaanttttnnttntccngnaccntttttttccgntggaattttnnnntnnnnttttnaaaancaaaaaannnttttntt

SEQ ID NO: 739 - DNA, 1200 bp, Homo Sapiens
  misc_feature (836)..(836): n is a, c, g, or t
  misc_feature (873)..(873): n is a, c, g, or t
  misc_feature (875)..(875): n is a, c, g, or t
  misc_feature (930)..(930): n is a, c, g, or t
  misc_feature (932)..(932): n is a, c, g, or t
  misc_feature (948)..(948): n is a, c, g, or t
  misc_feature (956)..(956): n is a, c, g, or t
  misc_feature (970)..(970): n is a, c, g, or t
  misc_feature (985)..(986): n is a, c, g, or t
  misc_feature (992)..(992): n is a, c, g, or t
  misc_feature (994)..(994): n is a, c, g, or t
  misc_feature (1003)..(1003): n is a, c, g, or t
  misc_feature (1014)..(1014): n is a, c, g, or t
  misc_feature (1018)..(1018): n is a, c, g, or t
  misc_feature (1035)..(1035): n is a, c, g, or t
  misc_feature (1047)..(1047): n is a, c, g, or t
  misc_feature (1069)..(1069): n is a, c, g, or t
  misc_feature (1074)..(1075): n is a, c, g, or t
  misc_feature (1078)..(1078): n is a, c, g, or t
  misc_feature (1088)..(1088): n is a, c, g, or t
  misc_feature (1093)..(1093): n is a, c, g, or t
  misc_feature (1097)..(1097): n is a, c, g, or t
  misc_feature (1099)..(1099): n is a, c, g, or t
  misc_feature (1107)..(1107): n is a, c, g, or t
  misc_feature (1114)..(1114): n is a, c, g, or t
  misc_feature (1124)..(1124): n is a, c, g, or t
  misc_feature (1135)..(1135): n is a, c, g, or t
  misc_feature (1140)..(1141): n is a, c, g, or t
  misc_feature (1148)..(1148): n is a, c, g, or t
  misc_feature (1154)..(1154): n is a, c, g, or t
  misc_feature (1163)..(1163): n is a, c, g, or t
  misc_feature (1175)..(1175): n is a, c, g, or t
  misc_feature (1181)..(1181): n is a, c, g, or t
  misc_feature (1192)..(1192): n is a, c, g, or t
  misc_feature (1195)..(1195): n is a, c, g, or t
  misc_feature (1198)..(1198): n is a, c, g, or t
tagagaaattactatgagaggatcgcatcaccatcaccatcacggatcctatttaggtgacactatagaatcgtcgacccacgcgtccgcacagtctcctggggatggaagtgccttattactacttcacaagaaagcccgaagaagcagacagagaagacgaggtggagcctgggtgccaccacatccctcagatggtgtccaggagacccctgcgagactttgtggggctggaggactgcgacaaggccacccgggacgccatgctccacttcagcttctttgtcaccataggagacatggacgaagccttcaaatccatcaagctcatcaaaagtgaggccgtctgggagaacatggcgcgcatgtgcgtgaagacccagcggctggacgtggccaaggtgtgcctggggaacatgggccatgcccgcggggcccgagcgctgcgtgaggcggagcaggagccggagctagaggcccgcgtggccgtgctggccacgcagctgggcatgctggaggacgccgagcagctgtacaggaagtgcaagcgccacgacctcctgaacaagttctaccaggctgcgggccggtggcaggaggccctccaggtagccgagcaccacgatcgcgtgcacctgcgcagcacctaccaccgctatgccgggcacctggaggccagcgccgactgcagccgggccctcagttactacgagaagtcggacacgcaccgcttcgaggtgcccaggatgctgtcggaggacctgccgtccctggagctctacgtgaataaaatgaaggataagaccctgtggcggtggtgggcgcagtacctgganagccagggcgagatggacgccgcgctgcactactacnanctggcccgggaccacttctccctggtccgcatccactgcttccagggcaatgtcnanaaggctgcgcaaatanccaacganacaggaaacctggnggcctcctaccactnncccgcnantacaaaaanccaagaaagangtcnggcaggcggtgcacttntaaccccgggcnaggcctttcaaaatgccatccncctgnncangaaaaaggcntgaanaacnanctcagaanttggccntgcttaactncccccaagaanttatnnaaggggncccaanaataaaaanaaaaagggctgnaaaagnaaagggggttntgnttnac

SEQ ID NO: 740 - DNA, 1526 bp, Homo Sapiens
  misc_feature (102)..(102): n is a, c, g, or t
  misc_feature (118)..(118): n is a, c, g, or t
  misc_feature (120)..(120): n is a, c, g, or t
  misc_feature (122)..(122): n is a, c, g, or t
  misc_feature (129)..(129): n is a, c, g, or t
  misc_feature (139)..(139): n is a, c, g, or t
  misc_feature (171)..(171): n is a, c, g, or t
  misc_feature (177)..(177): n is a, c, g, or t
  misc_feature (210)..(210): n is a, c, g, or t
  misc_feature (213)..(213): n is a, c, g, or t
  misc_feature (217)..(217): n is a, c, g, or t
  misc_feature (219)..(221): n is a, c, g, or t
  misc_feature (228)..(228): n is a, c, g, or t
  misc_feature (231)..(231): n is a, c, g, or t
  misc_feature (236)..(236): n is a, c, g, or t
  misc_feature (238)..(238): n is a, c, g, or t
  misc_feature (255)..(255): n is a, c, g, or t
  misc_feature (261)..(261): n is a, c, g, or t
  misc_feature (263)..(263): n is a, c, g, or t
  misc_feature (273)..(273): n is a, c, g, or t
  misc_feature (284)..(284): n is a, c, g, or t
  misc_feature (291)..(292): n is a, c, g, or t
  misc_feature (306)..(306): n is a, c, g, or t
  misc_feature (323)..(323): n is a, c, g, or t
  misc_feature (353)..(353): n is a, c, g, or t
  misc_feature (356)..(356): n is a, c, g, or t
  misc_feature (361)..(361): n is a, c, g, or t
  misc_feature (369)..(369): n is a, c, g, or t
  misc_feature (384)..(384): n is a, c, g, or t
  misc_feature (387)..(388): n is a, c, g, or t
  misc_feature (401)..(401): n is a, c, g, or t
  misc_feature (404)..(404): n is a, c, g, or t
  misc_feature (419)..(419): n is a, c, g, or t
  misc_feature (425)..(425): n is a, c, g, or t
  misc_feature (438)..(438): n is a, c, g, or t
  misc_feature (446)..(446): n is a, c, g, or t
  misc_feature (449)..(449): n is a, c, g, or t
  misc_feature (459)..(459): n is a, c, g, or t
  misc_feature (463)..(463): n is a, c, g, or t
  misc_feature (465)..(465): n is a, c, g, or t
  misc_feature (467)..(467): n is a, c, g, or t
  misc_feature (507)..(507): n is a, c, g, or t
  misc_feature (531)..(531): n is a, c, g, or t
  misc_feature (534)..(534): n is a, c, g, or t
  misc_feature (536)..(536): n is a, c, g, or t
  misc_feature (554)..(554): n is a, c, g, or t
  misc_feature (557)..(557): n is a, c, g, or t
  misc_feature (564)..(564): n is a, c, g, or t
  misc_feature (566)..(566): n is a, c, g, or t
  misc_feature (573)..(574): n is a, c, g, or t
  misc_feature (576)..(577): n is a, c, g, or t
  misc_feature (582)..(582): n is a, c, g, or t
  misc_feature (603)..(603): n is a, c, g, or t
  misc_feature (608)..(610): n is a, c, g, or t
  misc_feature (621)..(621): n is a, c, g, or t
  misc_feature (627)..(627): n is a, c, g, or t
  misc_feature (631)..(631): n is a, c, g, or t
  misc_feature (636)..(637): n is a, c, g, or t
  misc_feature (640)..(640): n is a, c, g, or t
  misc_feature (670)..(670): n is a, c, g, or t
  misc_feature (683)..(683): n is a, c, g, or t
  misc_feature (686)..(686): n is a, c, g, or t
  misc_feature (693)..(693): n is a, c, g, or t
  misc_feature (696)..(696): n is a, c, g, or t
  misc_feature (699)..(699): n is a, c, g, or t
  misc_feature (704)..(704): n is a, c, g, or t
  misc_feature (709)..(709): n is a, c, g, or t
  misc_feature (723)..(723): n is a, c, g, or t
  misc_feature (726)..(726): n is a, c, g, or t
  misc_feature (739)..(739): n is a, c, g, or t
  misc_feature (746)..(746): n is a, c, g, or t
  misc_feature (749)..(749): n is a, c, g, or t
  misc_feature (755)..(755): n is a, c, g, or t
  misc_feature (765)..(765): n is a, c, g, or t
  misc_feature (782)..(782): n is a, c, g, or t
  misc_feature (785)..(785): n is a, c, g, or t
  misc_feature (789)..(789): n is a, c, g, or t
  misc_feature (792)..(792): n is a, c, g, or t
  misc_feature (802)..(803): n is a, c, g, or t
  misc_feature (806)..(806): n is a, c, g, or t
  misc_feature (814)..(814): n is a, c, g, or t
  misc_feature (818)..(818): n is a, c, g, or t
  misc_feature (820)..(820): n is a, c, g, or t
  misc_feature (826)..(826): n is a, c, g, or t
  misc_feature (830)..(830): n is a, c, g, or t
  misc_feature (832)..(832): n is a, c, g, or t
  misc_feature (834)..(834): n is a, c, g, or t
  misc_feature (838)..(838): n is a, c, g, or t
  misc_feature (840)..(840): n is a, c, g, or t
  misc_feature (844)..(845): n is a, c, g, or t
  misc_feature (848)..(848): n is a, c, g, or t
  misc_feature (852)..(852): n is a, c, g, or t
  misc_feature (856)..(857): n is a, c, g, or t
  misc_feature (862)..(862): n is a, c, g, or t
  misc_feature (866)..(867): n is a, c, g, or t
  misc_feature (870)..(870): n is a, c, g, or t
  misc_feature (873)..(873): n is a, c, g, or t
  misc_feature (875)..(875): n is a, c, g, or t
  misc_feature (877)..(877): n is a, c, g, or t
  misc_feature (881)..(881): n is a, c, g, or t
  misc_feature (885)..(886): n is a, c, g, or t
  misc_feature (889)..(889): n is a, c, g, or t
  misc_feature (893)..(894): n is a, c, g, or t
  misc_feature (896)..(896): n is a, c, g, or t
  misc_feature (898)..(898): n is a, c, g, or t
  misc_feature (908)..(909): n is a, c, g, or t
  misc_feature (915)..(915): n is a, c, g, or t
  misc_feature (917)..(917): n is a, c, g, or t
  misc_feature (924)..(925): n is a, c, g, or t
  misc_feature (930)..(931): n is a, c, g, or t
  misc_feature (933)..(933): n is a, c, g, or t
  misc_feature (943)..(946): n is a, c, g, or t
  misc_feature (950)..(950): n is a, c, g, or t
  misc_feature (953)..(953): n is a, c, g, or t
  misc_feature (956)..(956): n is a, c, g, or t
  misc_feature (958)..(958): n is a, c, g, or t
  misc_feature (963)..(963): n is a, c, g, or t
  misc_feature (968)..(968): n is a, c, g, or t
  misc_feature (974)..(975): n is a, c, g, or t
  misc_feature (977)..(977): n is a, c, g, or t
  misc_feature (983)..(983): n is a, c, g, or t
  misc_feature (987)..(987): n is a, c, g, or t
  misc_feature (990)..(990): n is a, c, g, or t
  misc_feature (1001)..(1001): n is a, c, g, or t
  misc_feature (1004)..(1004): n is a, c, g, or t
  misc_feature (1006)..(1007): n is a, c, g, or t
  misc_feature (1010)..(1010): n is a, c, g, or t
  misc_feature (1016)..(1016): n is a, c, g, or t
  misc_feature (1018)..(1019): n is a, c, g, or t
  misc_feature (1022)..(1022): n is a, c, g, or t
  misc_feature (1029)..(1029): n is a, c, g, or t
  misc_feature (1035)..(1035): n is a, c, g, or t
  misc_feature (1043)..(1043): n is a, c, g, or t
  misc_feature (1048)..(1048): n is a, c, g, or t
  misc_feature (1057)..(1057): n is a, c, g, or t
  misc_feature (1060)..(1061): n is a, c, g, or t
  misc_feature (1067)..(1067): n is a, c, g, or t
  misc_feature (1070)..(1071): n is a, c, g, or t
  misc_feature (1074)..(1076): n is a, c, g, or t
  misc_feature (1082)..(1082): n is a, c, g, or t
  misc_feature (1084)..(1084): n is a, c, g, or t
  misc_feature (1088)..(1088): n is a, c, g, or t
  misc_feature (1091)..(1091): n is a, c, g, or t
  misc_feature (1095)..(1095): n is a, c, g, or t
  misc_feature (1098)..(1098): n is a, c, g, or t
  misc_feature (1101)..(1102): n is a, c, g, or t
  misc_feature (1105)..(1106): n is a, c, g, or t
  misc_feature (1115)..(1115): n is a, c, g, or t
  misc_feature (1119)..(1119): n is a, c, g, or t
  misc_feature (1134)..(1137): n is a, c, g, or t
  misc_feature (1141)..(1141): n is a, c, g, or t
  misc_feature (1146)..(1148): n is a, c, g, or t
  misc_feature (1163)..(1163): n is a, c, g, or t
  misc_feature (1171)..(1172): n is a, c, g, or t
  misc_feature (1177)..(1179): n is a, c, g, or t
  misc_feature (1182)..(1182): n is a, c, g, or t
  misc_feature (1184)..(1187): n is a, c, g, or t
  misc_feature (1190)..(1194): n is a, c, g, or t
  misc_feature (1198)..(1199): n is a, c, g, or t
  misc_feature (1201)..(1201): n is a, c, g, or t
  misc_feature (1215)..(1216): n is a, c, g, or t
  misc_feature (1218)..(1218): n is a, c, g, or t
  misc_feature (1222)..(1222): n is a, c, g, or t
  misc_feature (1225)..(1226): n is a, c, g, or t
  misc_feature (1230)..(1230): n is a, c, g, or t
  misc_feature (1233)..(1233): n is a, c, g, or t
  misc_feature (1236)..(1236): n is a, c, g, or t
  misc_feature (1238)..(1238): n is a, c, g, or t
  misc_feature (1243)..(1243): n is a, c, g, or t
  misc_feature (1246)..(1246): n is a, c, g, or t
  misc_feature (1251)..(1251): n is a, c, g, or t
  misc_feature (1253)..(1253): n is a, c, g, or t
  misc_feature (1255)..(1255): n is a, c, g, or t
  misc_feature (1257)..(1259): n is a, c, g, or t
  misc_feature (1263)..(1263): n is a, c, g, or t
  misc_feature (1266)..(1266): n is a, c, g, or t
  misc_feature (1272)..(1272): n is a, c, g, or t
  misc_feature (1275)..(1276): n is a, c, g, or t
  misc_feature (1278)..(1278): n is a, c, g, or t
  misc_feature (1287)..(1287): n is a, c, g, or t
  misc_feature (1295)..(1298): n is a, c, g, or t
  misc_feature (1301)..(1302): n is a, c, g, or t
  misc_feature (1305)..(1305): n is a, c, g, or t
  misc_feature (1316)..(1316): n is a, c, g, or t
  misc_feature (1318)..(1319): n is a, c, g, or t
  misc_feature (1323)..(1323): n is a, c, g, or t
  misc_feature (1327)..(1327): n is a, c, g, or t
  misc_feature (1333)..(1334): n is a, c, g, or t
  misc_feature (1348)..(1348): n is a, c, g, or t
  misc_feature (1351)..(1351): n is a, c, g, or t
  misc_feature (1353)..(1354): n is a, c, g, or t
  misc_feature (1359)..(1359): n is a, c, g, or t
  misc_feature (1361)..(1362): n is a, c, g, or t
  misc_feature (1372)..(1372): n is a, c, g, or t
  misc_feature (1378)..(1379): n is a, c, g, or t
  misc_feature (1383)..(1383): n is a, c, g, or t
  misc_feature (1396)..(1396): n is a, c, g, or t
  misc_feature (1399)..(1399): n is a, c, g, or t
  misc_feature (1402)..(1402): n is a, c, g, or t
  misc_feature (1410)..(1411): n is a, c, g, or t
  misc_feature (1414)..(1414): n is a, c, g, or t
  misc_feature (1416)..(1417): n is a, c, g, or t
  misc_feature (1419)..(1419): n is a, c, g, or t
  misc_feature (1436)..(1436): n is a, c, g, or t
  misc_feature (1443)..(1443): n is a, c, g, or t
  misc_feature (1445)..(1446): n is a, c, g, or t
  misc_feature (1448)..(1448): n is a, c, g, or t
  misc_feature (1450)..(1450): n is a, c, g, or t
  misc_feature (1465)..(1465): n is a, c, g, or t
  misc_feature (1477)..(1477): n is a, c, g, or t
  misc_feature (1481)..(1481): n is a, c, g, or t
  misc_feature (1485)..(1485): n is a, c, g, or t
  misc_feature (1487)..(1487): n is a, c, g, or t
  misc_feature (1493)..(1493): n is a, c, g, or t
  misc_feature (1503)..(1504): n is a, c, g, or t
  misc_feature (1506)..(1506): n is a, c, g, or t
  misc_feature (1510)..(1510): n is a, c, g, or t
  misc_feature (1512)..(1512): n is a, c, g, or t
  misc_feature (1516)..(1516): n is a, c, g, or t
  misc_feature (1519)..(1521): n is a, c, g, or t
  misc_feature (1524)..(1524): n is a, c, g, or t
aatagagaaattactatgagaggatcgcatcaccatcaccatcacggatcctatttaggtgacactatagaatcgtcgacccacgcgtccgaatccgcaggntggaggctcccagggnangnaaacgcntgagccctgnccatgccccacgccgcagcatgaccctcctgntgctgncccttctgctggcctctctgtgtcgcgtcctgntcntgtncnnnacccaanaancacangncatggattgaggcatantaccantngcatcggtcntggagaatganaacacgnncctactgaatccancactctttgccttgaanaaggatgccccgctgcgctatgcaggtganatntgcgncttccggntccatgggtctgggntgnnctttgaggctganatncttgacaaggcgacnggagangggctgatccggnccaagganccngtgaactgcnaagncnanaaggaacacaccttcaccatccaggcctatgactgtggcnagggccccgacggggtacaacacnaanangtcccacaaggccactgngcnatgtgcngntcaacgnntnnaaacnagtttgccccatgtgtttgtngaacnnntgtatcgagcngctgtnacgnatgannaanctgtactatcgacatcctgcggatggaatncattgacggttantgntccctcncanaancgccnagatntgctactaagaaantcncacatcccaatanccctttnctnattganaaacgacggnaacgtttgataaacacntantaanccngcagttacgnntgntgaaaaantttntnttaaantttncngntgancncttnnttnactngtgnnctaanaaannccnggngntnccanagannacntganntngnagaattcaanntgaaantncacaatnntaaanncnagccttaaannnngttnganaananaaggnttccncaatanntnacctangtgnctngagagctttcnaantnngtncccttnannccnatcatgnaaaaantttttatnaaccntcttttggnaannatttangtnnacnnnaaagtntnatancancatnttnttnnaannaggcgtttngcanccataataaattttnnnnaaanaagcnnntccttaaaattttanatttttcnncatcnnnggnannnnaannnnnttcnncnttccttgtcccaanngncatnctnncagnatnagntntcttnganttttntngntnnnaaancanatggtnttnntnttttcttgncgccaatnnnnggnnatntctcccttcgnanncccnatgntcacanntgtataattacacngancnnactcngnnatagatcttnctatanngtcngtccacgaaaaantgntgntatatctnnatngnngnatagagacagaaaaaanctctttnanntncngagcacaaagaaacnatcgcctcaccnaaantatnanaacaancaccgattanngngctntntctntgnnngtncc

SEQ ID NO: 741 - DNA, 1200 bp, Homo Sapiens
  misc_feature (968)..(968): n is a, c, g, or t
  misc_feature (974)..(974): n is a, c, g, or t
  misc_feature (997)..(997): n is a, c, g, or t
  misc_feature (1021)..(1021): n is a, c, g, or t
  misc_feature (1034)..(1034): n is a, c, g, or t
  misc_feature (1039)..(1039): n is a, c, g, or t
  misc_feature (1049)..(1050): n is a, c, g, or t
  misc_feature (1053)..(1054): n is a, c, g, or t
  misc_feature (1056)..(1056): n is a, c, g, or t
  misc_feature (1069)..(1069): n is a, c, g, or t
  misc_feature (1071)..(1071): n is a, c, g, or t
  misc_feature (1090)..(1090): n is a, c, g, or t
  misc_feature (1094)..(1094): n is a, c, g, or t
  misc_feature (1096)..(1096): n is a, c, g, or t
  misc_feature (1115)..(1116): n is a, c, g, or t
  misc_feature (1127)..(1127): n is a, c, g, or t
  misc_feature (1139)..(1141): n is a, c, g, or t
  misc_feature (1146)..(1147): n is a, c, g, or t
  misc_feature (1166)..(1167): n is a, c, g, or t
  misc_feature (1183)..(1183): n is a, c, g, or t
  misc_feature (1186)..(1187): n is a, c, g, or t
  misc_feature (1190)..(1190): n is a, c, g, or t
  misc_feature (1194)..(1194): n is a, c, g, or t
  misc_feature (1199)..(1199): n is a, c, g, or t
attagagagattactatgagaggatcgcatcaccatcaccatcacggatcctatttaggtgacactatagaatcgtcgacccacgcgtccgcccacgcgtccgccaaagttcagatctcagaggtggatgccccgccggagggtgaccagatgccaagctccacagactccaggggcctgaagcccctgcaggaggacaccccacagctgatgcgcacacgcagtgatgttggggtgcgtcgccgtggcaatgtgaggacgcctagtgaccagcggcgaatcagacgccaccgcttctccatcaacggccatttctacaaccataagacatccgtgttcacaccagcctatggctctgtcaccaacgtccgcatcaacagcaccatgaccaccccacaggtcctgaagctgctgctcaacaaatttaagattgagaattcagcagaggagtttgccttgtacgtggtccatacgagtggtgagaaacagaagctgaaggccaccgattacccgctgattgcccgaatcctccagggcccatgtgagcagatctccaaagtgttcctaatggagaaggaccaggtggaggaagtcacctacgacgtggcccagtatataaagttcgagatgccggtacttaaaagcttcattcagaagctccaggaggaagaagatcgggaagtaaagaagctgatgcgcaagtaagtgtggcttctggggcactgggtgcacttctcctggggcctcaacagaggggcctctgctgggtcctcgcagggactgtgctgagctgctgcatgggcctgagtctcggctttctttggagggctgcccattgacaaacctggatttcaagtgaggacgtgacagttaagtgtgttcatctacttcttgtgtcagcttctcgtttttgatgtgggacatcaaagtgtctcttgtcctccctcttatggaaagactctgaaaanaaggtnttggtttaaaatttctttggggntctaaaatgcaaaaaatagggaanggggactgttacnctggntttttttaanntanncnattagggctcccnancaggaaaaaaatgctcccntccnangaagggttttttaacgggnnttttaaaaaangggaattttttnnnaaaannttgggccaaaatttggggnnaacctcaagggaaaanggnnatncctnggggnt

SEQ ID NO: 742 - DNA, 1200 bp, Homo Sapiens
  misc_feature (805)..(805): n is a, c, g, or t
  misc_feature (907)..(907): n is a, c, g, or t
  misc_feature (925)..(925): n is a, c, g, or t
  misc_feature (928)..(928): n is a, c, g, or t
  misc_feature (964)..(964): n is a, c, g, or t
  misc_feature (1000)..(1000): n is a, c, g, or t
  misc_feature (1016)..(1016): n is a, c, g, or t
  misc_feature (1024)..(1024): n is a, c, g, or t
  misc_feature (1044)..(1044): n is a, c, g, or t
  misc_feature (1046)..(1046): n is a, c, g, or t
  misc_feature (1063)..(1063): n is a, c, g, or t
  misc_feature (1072)..(1072): n is a, c, g, or t
  misc_feature (1077)..(1077): n is a, c, g, or t
  misc_feature (1080)..(1080): n is a, c, g, or t
  misc_feature (1086)..(1086): n is a, c, g, or t
  misc_feature (1088)..(1088): n is a, c, g, or t
  misc_feature (1092)..(1092): n is a, c, g, or t
  misc_feature (1099)..(1099): n is a, c, g, or t
  misc_feature (1115)..(1115): n is a, c, g, or t
  misc_feature (1118)..(1118): n is a, c, g, or t
  misc_feature (1121)..(1121): n is a, c, g, or t
  misc_feature (1133)..(1133): n is a, c, g, or t
  misc_feature (1141)..(1141): n is a, c, g, or t
  misc_feature (1143)..(1143): n is a, c, g, or t
  misc_feature (1145)..(1145): n is a, c, g, or t
  misc_feature (1151)..(1151): n is a, c, g, or t
  misc_feature (1161)..(1161): n is a, c, g, or t
  misc_feature (1164)..(1164): n is a, c, g, or t
  misc_feature (1180)..(1180): n is a, c, g, or t
  misc_feature (1183)..(1183): n is a, c, g, or t
  misc_feature (1187)..(1187): n is a, c, g, or t
tagagaaattactatgagaggatcgcatcaccatcaccatcacggatcctatttaggtgacactatagaatcgtcgacccacgcgtccgacatgatcagcctcttcattaaagacaccaccaccagcacagagcagatgctgtcccatggcaccgctgatgtggtcttagaggcctgcacagacttctgggacggagctgacatctaccctctctcgggatctgacagaaagaaagtgctggacttctaccagcgagcctgcctgtctgggtattgctctgccttcgcctacaagcccatgaactgcgccctgtcctctcagctcaatggcaagtgcatcgagctggtacaggtgcccggccaaagcagcatcttcaccatgtgcgagctgcccagcaccatccccatcaagcagaacgcccgccgcagcagctggagctctgacgggatcggggaggtgctggagaaggaagactgcatgcaggccctgagcggccagatcttcatgggcatggtgtcctcccagtaccaggcccggctggacatcgtgcgcctcattgatgggcttgtcaacgcctgcatccgctttgtctacttctctttggaggatgagctcaaaagcaaggtgtttgcagaaaaaatgggcctggagacaggctggaactgccacatctccctcacacccaatggtgacatgcctggctccgagatccccccctccagccccagccacgcaggctccctgcatgatgacctgaatcaggtgtcccgagatgatgcagaagggctcctcctcatggaggangagggccactcggacctcatcagcttccagcctacggacagcgacatccccagcttcctggaggactccaaccgggccaagctgccccggggtatccaccangtgcggccccacctgcanaanattgacaacgtgcccctgctagtgccccttttcacngactgcaccccaaaaaccatgtgtgaaatgataaanatcatgcaaaaatacnggggaggngaacctgctgcctgggcagntntgcaacctggggaaaanctgcctttncctcnaancgaatnancatngccctgnatccctgtaccatccngtngcnctgggaaacttnggtacccncnanatcaantggccagccncgnaggcttttccctgganttnaggnaattaaaacctgc

SEQ ID NO: 743 - DNA, 1305 bp, Homo Sapiens
  misc_feature (1)..(1): n is a, c, g, or t
  misc_feature (880)..(880): n is a, c, g, or t
  misc_feature (903)..(903): n is a, c, g, or t
  misc_feature (914)..(914): n is a, c, g, or t
  misc_feature (928)..(928): n is a, c, g, or t
  misc_feature (977)..(977): n is a, c, g, or t
  misc_feature (986)..(986): n is a, c, g, or t
  misc_feature (994)..(994): n is a, c, g, or t
  misc_feature (1001)..(1001): n is a, c, g, or t
  misc_feature (1007)..(1007): n is a, c, g, or t
  misc_feature (1016)..(1016): n is a, c, g, or t
  misc_feature (1040)..(1040): n is a, c, g, or t
  misc_feature (1052)..(1052): n is a, c, g, or t
  misc_feature (1056)..(1056): n is a, c, g, or t
  misc_feature (1059)..(1059): n is a, c, g, or t
  misc_feature (1067)..(1067): n is a, c, g, or t
  misc_feature (1071)..(1071): n is a, c, g, or t
  misc_feature (1077)..(1077): n is a, c, g, or t
  misc_feature (1079)..(1080): n is a, c, g, or t
  misc_feature (1090)..(1090): n is a, c, g, or t
  misc_feature (1108)..(1109): n is a, c, g, or t
  misc_feature (1115)..(1115): n is a, c, g, or t
  misc_feature (1120)..(1120): n is a, c, g, or t
  misc_feature (1124)..(1124): n is a, c, g, or t
  misc_feature (1128)..(1128): n is a, c, g, or t
  misc_feature (1131)..(1131): n is a, c, g, or t
  misc_feature (1139)..(1139): n is a, c, g, or t
  misc_feature (1148)..(1149): n is a, c, g, or t
  misc_feature (1152)..(1152): n is a, c, g, or t
  misc_feature (1155)..(1155): n is a, c, g, or t
  misc_feature (1160)..(1160): n is a, c, g, or t
  misc_feature (1163)..(1163): n is a, c, g, or t
  misc_feature (1178)..(1179): n is a, c, g, or t
  misc_feature (1188)..(1188): n is a, c, g, or t
  misc_feature (1191)..(1192): n is a, c, g, or t
  misc_feature (1203)..(1203): n is a, c, g, or t
  misc_feature (1207)..(1208): n is a, c, g, or t
  misc_feature (1210)..(1210): n is a, c, g, or t
  misc_feature (1212)..(1212): n is a, c, g, or t
  misc_feature (1216)..(1219): n is a, c, g, or t
  misc_feature (1223)..(1223): n is a, c, g, or t
  misc_feature (1231)..(1231): n is a, c, g, or t
  misc_feature (1233)..(1233): n is a, c, g, or t
  misc_feature (1237)..(1237): n is a, c, g, or t
  misc_feature (1250)..(1250): n is a, c, g, or t
  misc_feature (1258)..(1258): n is a, c, g, or t
  misc_feature (1260)..(1260): n is a, c, g, or t
  misc_feature (1262)..(1263): n is a, c, g, or t
  misc_feature (1266)..(1272): n is a, c, g, or t
  misc_feature (1276)..(1276): n is a, c, g, or t
  misc_feature (1279)..(1279): n is a, c, g, or t
  misc_feature (1289)..(1289): n is a, c, g, or t
  misc_feature (1300)..(1302): n is a, c, g, or t
  misc_feature (1304)..(1305): n is a, c, g, or t
naattagagagaattaactatgagaggatcgcatcaccatcaccatcacggatcctatttaggtgacactatagaatcgtcgacccacgcgtccgggcatgagctgaccagaggctgtgttgtaggcggctcacagtctccatcgtgccgtccgccgctgtgccacgctctggaaacagaaagtgctgggccggggcgggaagcctcagcccctggcagccatcgcacccagcaggaaagtgacgtttgagggtcccctttctcaaccgcattgctgctggggctggggatggcacccttgagaccaagaggccacaggcttctcggcctctgggagctctgggccgcctggctgctgaggagccccacaccctggagctgtgagtagcctgtgctcaccttgtcctcgcttccaccctgggcaaaaggttggatggcatagcagggaggaaaacagccctgacgggatgggacgggctggtcacggccttgtcacagctgagctgctgggaaccccctcttctccagccagatcccatccctcccacggcaagagggagagaatggagtgggatttccaaaccctctctcctttgcctgccaaagctcaggaaataggtgtcccctcctctgcaacaccttcctaccctctctcccgtcctgctgacacgatcttttccggagtcatacacgtagttgacaaagggaacaagctcagctcctacccgtgcctgccggcctctcttctgctccatcacagccaagacactggctttttgtcagaagcccctctttcttgtgtgagctggcacctgtccctctgcccacccctactatggtctcctcaaaccctaacctgccctgccccatgctgatgaanctggtggctcccacagcaaccancactacccganagccttgggcctcnggggaaatgtcaggtgggtgcatggggcctgggtcccggtccctgctgngctcctcantgtttgantgacctngatggnatcctgaangtctcaaaagctgctccctgtganatgaacctgggnaacntgnaaaccaangtcnccaggntnnttttgcagtnaaaaaaaaaaaagggggnnaaaaantcccntggngtcnggnaacttttntcgaaatgnnggnaantttanggnccaagccccccccannttaattggnaannttggccccccntttnngnantttnnnncccnaaaaaatngnaaancccaaaaaatttnaaaccccntngnnccnnnnnnncccnggnaaaaaaaccnttttttttttnnnann

SEQ ID NO: 744 - DNA, 1271 bp, Homo Sapiens
  misc_feature (928)..(928): n is a, c, g, or t
  misc_feature (975)..(975): n is a, c, g, or t
  misc_feature (981)..(981): n is a, c, g, or t
  misc_feature (987)..(987): n is a, c, g, or t
  misc_feature (993)..(993): n is a, c, g, or t
  misc_feature (996)..(996): n is a, c, g, or t
  misc_feature (1039)..(1039): n is a, c, g, or t
  misc_feature (1042)..(1042): n is a, c, g, or t
  misc_feature (1065)..(1065): n is a, c, g, or t
  misc_feature (1094)..(1094): n is a, c, g, or t
  misc_feature (1096)..(1096): n is a, c, g, or t
  misc_feature (1106)..(1106): n is a, c, g, or t
  misc_feature (1113)..(1113): n is a, c, g, or t
  misc_feature (1117)..(1117): n is a, c, g, or t
  misc_feature (1131)..(1132): n is a, c, g, or t
  misc_feature (1134)..(1135): n is a, c, g, or t
  misc_feature (1137)..(1137): n is a, c, g, or t
  misc_feature (1141)..(1141): n is a, c, g, or t
  misc_feature (1144)..(1144): n is a, c, g, or t
  misc_feature (1151)..(1151): n is a, c, g, or t
  misc_feature (1165)..(1165): n is a, c, g, or t
  misc_feature (1170)..(1170): n is a, c, g, or t
  misc_feature (1176)..(1176): n is a, c, g, or t
  misc_feature (1181)..(1183): n is a, c, g, or t
  misc_feature (1185)..(1185): n is a, c, g, or t
  misc_feature (1190)..(1190): n is a, c, g, or t
  misc_feature (1201)..(1201): n is a, c, g, or t
  misc_feature (1205)..(1209): n is a, c, g, or t
  misc_feature (1213)..(1213): n is a, c, g, or t
  misc_feature (1222)..(1223): n is a, c, g, or t
  misc_feature (1230)..(1231): n is a, c, g, or t
  misc_feature (1236)..(1236): n is a, c, g, or t
  misc_feature (1239)..(1241): n is a, c, g, or t
  misc_feature (1244)..(1245): n is a, c, g, or t
  misc_feature (1248)..(1248): n is a, c, g, or t
  misc_feature (1258)..(1258): n is a, c, g, or t
  misc_feature (1260)..(1260): n is a, c, g, or t
  misc_feature (1267)..(1267): n is a, c, g, or t
  misc_feature (1271)..(1271): n is a, c, g, or t
attagagaaattactatgagaggatcgcatcaccatcaccatcacggatcctatttaggtgacactatagaatcgtcgacccacgcgtccgattgtcggctttcgccaaatcacaaagtcctgcattacggagacttagaagagagtcctcagggagaagtgccccacgattccttgcaggacaaactgccggtggcagatatcaaagccgtggtgacgggaaaggactgccctcatatgaaagagaaaggtgcccttaaacaaaacaaggaggtgcttgaactcgctttctccatcttgtatgactcaaactgccaactgaacttcatcgctcctgacaagcatgagtactgtatctggacggatggactgaatgcgctactcgggaaggacatgatgagcgacctgacgcggaatgacctggacaccctgctcagcatggaaatcaagctccgcctcctggacctggaaaacatccagatccctgacgcacctccgccgattcccaaggagcccagcaactatgacttcgtctatgactgtaactgaagtggccgggcccagacatgccccttccaaaactggaacacctagctaacaggagagaggaatgaaaacacacccacgccttggaaccgtcctttggtaaagggaagctgtgggtccacattcccttcagcatcacctctagccctggcaactttcagcccctagctggcatcttgctcaccgccctgattctgttcctcggctccactgcttcaggtcacttcccatggctgcagtccactggtgggacaagagcaaagcccactgccagtaagaaggccaaagggcccttccatcctagccctctgcaggcatgcccttccttcccttgggcaggaaagccagcagccccagactgcccaaaaacttgccccaccanaccaagggcagtgccccaagggcccctgtctggaggaaatggcctanctattngatganaaaacnaanccccacatcctcctttcccctctctctaaaatcatctcgcacnccngttacccttgaattaaaatctgngctcaaatctcctccccacctctctcccngntttgccttgnctcggtncccnttgggccccaaaannannancccnaanccccccngggatcctcccaanaaaantttccnaaaannncnaaggncccaggccccntttnnnnncgcnctgggattnnaaaaaannttccnccnnncannaanttgggggttncnccccccncccn

SEQ ID NO: 745 - DNA, 1434 bp, Homo Sapiens
  misc_feature (1)..(1): n is a, c, g, or t
  misc_feature (12)..(12): n is a, c, g, or t
  misc_feature (100)..(101): n is a, c, g, or t
  misc_feature (110)..(110): n is a, c, g, or t
  misc_feature (116)..(116): n is a, c, g, or t
  misc_feature (126)..(126): n is a, c, g, or t
  misc_feature (128)..(128): n is a, c, g, or t
  misc_feature (147)..(147): n is a, c, g, or t
  misc_feature (150)..(150): n is a, c, g, or t
  misc_feature (152)..(152): n is a, c, g, or t
  misc_feature (163)..(163): n is a, c, g, or t
  misc_feature (167)..(174): n is a, c, g, or t
  misc_feature (188)..(188): n is a, c, g, or t
  misc_feature (190)..(190): n is a, c, g, or t
  misc_feature (192)..(192): n is a, c, g, or t
  misc_feature (203)..(203): n is a, c, g, or t
  misc_feature (205)..(207): n is a, c, g, or t
  misc_feature (218)..(218): n is a, c, g, or t
  misc_feature (221)..(221): n is a, c, g, or t
  misc_feature (227)..(227): n is a, c, g, or t
  misc_feature (231)..(232): n is a, c, g, or t
  misc_feature (234)..(235): n is a, c, g, or t
  misc_feature (239)..(239): n is a, c, g, or t
  misc_feature (245)..(245): n is a, c, g, or t
  misc_feature (248)..(248): n is a, c, g, or t
  misc_feature (253)..(254): n is a, c, g, or t
  misc_feature (256)..(257): n is a, c, g, or t
  misc_feature (262)..(262): n is a, c, g, or t
  misc_feature (264)..(264): n is a, c, g, or t
  misc_feature (267)..(267): n is a, c, g, or t
  misc_feature (281)..(281): n is a, c, g, or t
  misc_feature (291)..(291): n is a, c, g, or t
  misc_feature (302)..(304): n is a, c, g, or t
  misc_feature (306)..(307): n is a, c, g, or t
  misc_feature (312)..(315): n is a, c, g, or t
  misc_feature (319)..(319): n is a, c, g, or t
  misc_feature (324)..(327): n is a, c, g, or t
  misc_feature (330)..(330): n is a, c, g, or t
  misc_feature (339)..(339): n is a, c, g, or t
  misc_feature (342)..(342): n is a, c, g, or t
  misc_feature (370)..(370): n is a, c, g, or t
  misc_feature (374)..(374): n is a, c, g, or t
  misc_feature (378)..(380): n is a, c, g, or t
  misc_feature (386)..(387): n is a, c, g, or t
  misc_feature (395)..(396): n is a, c, g, or t
  misc_feature (403)..(403): n is a, c, g, or t
  misc_feature (406)..(406): n is a, c, g, or t
  misc_feature (413)..(413): n is a, c, g, or t
  misc_feature (418)..(418): n is a, c, g, or t
  misc_feature (423)..(423): n is a, c, g, or t
  misc_feature (430)..(430): n is a, c, g, or t
  misc_feature (437)..(437): n is a, c, g, or t
  misc_feature (442)..(442): n is a, c, g, or t
  misc_feature (444)..(444): n is a, c, g, or t
  misc_feature (447)..(447): n is a, c, g, or t
  misc_feature (449)..(449): n is a, c, g, or t
  misc_feature (451)..(451): n is a, c, g, or t
  misc_feature (464)..(466): n is a, c, g, or t
  misc_feature (468)..(468): n is a, c, g, or t
  misc_feature (471)..(471): n is a, c, g, or t
  misc_feature (474)..(475): n is a, c, g, or t
  misc_feature (478)..(478): n is a, c, g, or t
  misc_feature (488)..(488): n is a, c, g, or t
  misc_feature (490)..(491): n is a, c, g, or t
  misc_feature (495)..(496): n is a, c, g, or t
  misc_feature (499)..(499): n is a, c, g, or t
  misc_feature (504)..(506): n is a, c, g, or t
  misc_feature (509)..(509): n is a, c, g, or t
  misc_feature (514)..(514): n is a, c, g, or t
  misc_feature (517)..(518): n is a, c, g, or t
  misc_feature (521)..(521): n is a, c, g, or t
  misc_feature (525)..(526): n is a, c, g, or t
  misc_feature (531)..(531): n is a, c, g, or t
  misc_feature (535)..(535): n is a, c, g, or t
  misc_feature (538)..(538): n is a, c, g, or t
  misc_feature (540)..(540): n is a, c, g, or t
  misc_feature (545)..(545): n is a, c, g, or t
  misc_feature (560)..(560): n is a, c, g, or t
  misc_feature (583)..(583): n is a, c, g, or t
  misc_feature (594)..(594): n is a, c, g, or t
  misc_feature (596)..(596): n is a, c, g, or t
  misc_feature (610)..(610): n is a, c, g, or t
  misc_feature (629)..(629): n is a, c, g, or t
  misc_feature (632)..(632): n is a, c, g, or t
  misc_feature (646)..(648): n is a, c, g, or t
  misc_feature (672)..(672): n is a, c, g, or t
  misc_feature (687)..(688): n is a, c, g, or t
  misc_feature (691)..(691): n is a, c, g, or t
  misc_feature (696)..(696): n is a, c, g, or t
  misc_feature (712)..(712): n is a, c, g, or t
  misc_feature (717)..(717): n is a, c, g, or t
  misc_feature (722)..(723): n is a, c, g, or t
  misc_feature (734)..(734): n is a, c, g, or t
  misc_feature (736)..(736): n is a, c, g, or t
  misc_feature (738)..(738): n is a, c, g, or t
  misc_feature (762)..(762): n is a, c, g, or t
  misc_feature (789)..(790): n is a, c, g, or t
  misc_feature (793)..(796): n is a, c, g, or t
  misc_feature (801)..(801): n is a, c, g, or t
  misc_feature (803)..(803): n is a, c, g, or t
  misc_feature (808)..(808): n is a, c, g, or t
  misc_feature (824)..(824): n is a, c, g, or t
  misc_feature (835)..(835): n is a, c, g, or t
  misc_feature (840)..(840): n is a, c, g, or t
  misc_feature (884)..(884): n is a, c, g, or t
  misc_feature (898)..(898): n is a, c, g, or t
  misc_feature (918)..(918): n is a, c, g, or t
  misc_feature (920)..(921): n is a, c, g, or t
  misc_feature (927)..(927): n is a, c, g, or t
  misc_feature (932)..(932): n is a, c, g, or t
  misc_feature (934)..(934): n is a, c, g, or t
  misc_feature (937)..(937): n is a, c, g, or t
  misc_feature (952)..(952): n is a, c, g, or t
  misc_feature (958)..(958): n is a, c, g, or t
  misc_feature (960)..(960): n is a, c, g, or t
  misc_feature (964)..(964): n is a, c, g, or t
  misc_feature (979)..(979): n is a, c, g, or t
  misc_feature (983)..(983): n is a, c, g, or t
  misc_feature (985)..(985): n is a, c, g, or t
  misc_feature (990)..(990): n is a, c, g, or t
  misc_feature (994)..(994): n is a, c, g, or t
  misc_feature (996)..(996): n is a, c, g, or t
  misc_feature (1001)..(1001): n is a, c, g, or t
  misc_feature (1007)..(1008): n is a, c, g, or t
  misc_feature (1014)..(1015): n is a, c, g, or t
  misc_feature (1018)..(1018): n is a, c, g, or t
  misc_feature (1020)..(1020): n is a, c, g, or t
  misc_feature (1022)..(1022): n is a, c, g, or t
  misc_feature (1024)..(1025): n is a, c, g, or t
  misc_feature (1042)..(1043): n is a, c, g, or t
  misc_feature (1051)..(1051): n is a, c, g, or t
  misc_feature (1054)..(1054): n is a, c, g, or t
  misc_feature (1056)..(1056): n is a, c, g, or t
  misc_feature (1058)..(1058): n is a, c, g, or t
  misc_feature (1070)..(1070): n is a, c, g, or t
  misc_feature (1076)..(1076): n is a, c, g, or t
  misc_feature (1083)..(1083): n is a, c, g, or t
  misc_feature (1090)..(1092): n is a, c, g, or t
  misc_feature (1094)..(1094): n is a, c, g, or t
  misc_feature (1101)..(1101): n is a, c, g, or t
  misc_feature (1105)..(1105): n is a, c, g, or t
  misc_feature (1107)..(1107): n is a, c, g, or t
  misc_feature (1110)..(1111): n is a, c, g, or t
  misc_feature (1113)..(1113): n is a, c, g, or t
  misc_feature (1118)..(1118): n is a, c, g, or t
  misc_feature (1121)..(1122): n is a, c, g, or t
  misc_feature (1130)..(1130): n is a, c, g, or t
  misc_feature (1145)..(1145): n is a, c, g, or t
  misc_feature (1149)..(1149): n is a, c, g, or t
  misc_feature (1163)..(1165): n is a, c, g, or t
  misc_feature (1167)..(1168): n is a, c, g, or t
  misc_feature (1172)..(1172): n is a, c, g, or t
  misc_feature (1181)..(1181): n is a, c, g, or t
  misc_feature (1184)..(1184): n is a, c, g, or t
  misc_feature (1194)..(1194): n is a, c, g, or t
  misc_feature (1204)..(1205): n is a, c, g, or t
  misc_feature (1210)..(1210): n is a, c, g, or t
  misc_feature (1216)..(1217): n is a, c, g, or t
  misc_feature (1222)..(1222): n is a, c, g, or t
  misc_feature (1225)..(1225): n is a, c, g, or t
  misc_feature (1229)..(1230): n is a, c, g, or t
  misc_feature (1233)..(1233): n is a, c, g, or t
  misc_feature (1243)..(1243): n is a, c, g, or t
  misc_feature (1245)..(1245): n is a, c, g, or t
  misc_feature (1253)..(1253): n is a, c, g, or t
  misc_feature (1256)..(1256): n is a, c, g, or t
  misc_feature (1258)..(1260): n is a, c, g, or t
  misc_feature (1262)..(1262): n is a, c, g, or t
  misc_feature (1267)..(1267): n is a, c, g, or t
  misc_feature (1271)..(1271): n is a, c, g, or t
  misc_feature (1273)..(1273): n is a, c, g, or t
  misc_feature (1280)..(1280): n is a, c, g, or t
  misc_feature (1293)..(1293): n is a, c, g, or t
  misc_feature (1296)..(1297): n is a, c, g, or t
  misc_feature (1302)..(1302): n is a, c, g, or t
  misc_feature (1305)..(1306): n is a, c, g, or t
  misc_feature (1313)..(1317): n is a, c, g, or t
  misc_feature (1323)..(1323): n is a, c, g, or t
  misc_feature (1327)..(1328): n is a, c, g, or t
  misc_feature (1332)..(1333): n is a, c, g, or t
  misc_feature (1337)..(1337): n is a, c, g, or t
  misc_feature (1339)..(1339): n is a, c, g, or t
  misc_feature (1343)..(1344): n is a, c, g, or t
  misc_feature (1346)..(1348): n is a, c, g, or t
  misc_feature (1350)..(1350): n is a, c, g, or t
  misc_feature (1354)..(1354): n is a, c, g, or t
  misc_feature (1357)..(1358): n is a, c, g, or t
  misc_feature (1360)..(1361): n is a, c, g, or t
  misc_feature (1369)..(1372): n is a, c, g, or t
  misc_feature (1375)..(1378): n is a, c, g, or t
  misc_feature (1382)..(1382): n is a, c, g, or t
  misc_feature (1384)..(1388): n is a, c, g, or t
  misc_feature (1390)..(1391): n is a, c, g, or t
  misc_feature (1393)..(1393): n is a, c, g, or t
  misc_feature (1397)..(1400): n is a, c, g, or t
  misc_feature (1402)..(1405): n is a, c, g, or t
  misc_feature (1408)..(1412): n is a, c, g, or t
  misc_feature (1414)..(1415): n is a, c, g, or t
  misc_feature (1418)..(1418): n is a, c, g, or t
  misc_feature (1420)..(1422): n is a, c, g, or t
  misc_feature (1424)..(1424): n is a, c, g, or t
  misc_feature (1429)..(1432): n is a, c, g, or t
  misc_feature (1434)..(1434): n is a, c, g, or t
naatagagaganttactatgagaggatcgcatcaccatcaccatcacggatcctatttaggtgacactatagaatcgtcgacccacgcgtccgcgcgatnntggtcagcnaagagnggtggtgacncngccccgtgcactgtcaggncgngntgatgatgcantcgnnnnnnnngatcccccaacgangnanctctggagcangnnncttaagatgangcncggggngtcnncnnctcnctgganggncatgnncnncaccngnccnacaccactgatgcnggtgtgctgnaagcggaacannngnntgtcnnnngganaccannnngcngctgtccanaancaactttcaggatatctgctaataaagntcanaaannntcatgnntggcacannctctggntcntctttancaacntctgnttgttcntctacangaacncntcngnangactacccactgnnnanccnccnnctnctgggctacntnncgannatncccannnatnccganggnntangcanntactntgtnttncngctcnagatcaaatccaacntctacttctatccgggctgagancatgtactcantncaaaggagtcatgnatatgatccacgggtccancanctcactgcggaaannnccccattttgcgagcacgatggcncccagccctccgcanngcnggaantcatggacgagggcancgaanactgnnctctcacctgncnanatttggacgccactaccaattaanctttgtctcacaagacgacctcagacnngannnnacacncngatantcaagtggaagaggtntcactgcaatncccantgggaaccagcttagtggctgacccccctcgtgaacgtctcggnaatgggcttcatcncccccgaaaagaaccaaagncnngtcganccgtntntcnggggcccagtcaaanatgagntnaaantagatggcgtacccnattnantccanttcncnaaaancccttnntttttnntantnanannaggctttttcaatcccnnaggaaacngancngnggcaaaaccccnccaaanctccctnccaaacnnngnccctgcnaagntnggnntnaaacnacnntggcaaanaagggttggaaaaancccngcctccttttggcnnnanntttnaaaaaattngcngcccaaggcnaaatcttccnnggaanccctgnnacccnagntccnnccntaggaaagcncnaattcccnagnannntntcccncccntnaaaaaanccttattccccgnacnnttccnttnnaaaaatnnnnncctttnttannaaanngggnantttnnannntntttnaanntnncccccaannnnaannnnaaangnnnnnanncnaaannnnannnnggnnnnncnnttncnnncnaaacnnnntn

SEQ ID NO: 746 - DNA, 2414 bp, Homo Sapiens
  misc_feature (2)..(2): n is a, c, g, or t
  misc_feature (7)..(8): n is a, c, g, or t
  misc_feature (14)..(14): n is a, c, g, or t
  misc_feature (17)..(17): n is a, c, g, or t
  misc_feature (19)..(19): n is a, c, g, or t
  misc_feature (31)..(31): n is a, c, g, or t
  misc_feature (36)..(36): n is a, c, g, or t
  misc_feature (51)..(51): n is a, c, g, or t
  misc_feature (56)..(56): n is a, c, g, or t
  misc_feature (62)..(62): n is a, c, g, or t
  misc_feature (64)..(64): n is a, c, g, or t
  misc_feature (71)..(71): n is a, c, g, or t
  misc_feature (74)..(74): n is a, c, g, or t
  misc_feature (77)..(77): n is a, c, g, or t
  misc_feature (79)..(79): n is a, c, g, or t
  misc_feature (83)..(83): n is a, c, g, or t
  misc_feature (87)..(88): n is a, c, g, or t
  misc_feature (91)..(91): n is a, c, g, or t
  misc_feature (94)..(95): n is a, c, g, or t
  misc_feature (97)..(97): n is a, c, g, or t
  misc_feature (99)..(100): n is a, c, g, or t
  misc_feature (106)..(106): n is a, c, g, or t
  misc_feature (112)..(113): n is a, c, g, or t
  misc_feature (119)..(119): n is a, c, g, or t
  misc_feature (122)..(122): n is a, c, g, or t
  misc_feature (124)..(124): n is a, c, g, or t
  misc_feature (126)..(127): n is a, c, g, or t
  misc_feature (130)..(130): n is a, c, g, or t
  misc_feature (132)..(132): n is a, c, g, or t
  misc_feature (138)..(140): n is a, c, g, or t
  misc_feature (147)..(148): n is a, c, g, or t
  misc_feature (151)..(152): n is a, c, g, or t
  misc_feature (156)..(156): n is a, c, g, or t
  misc_feature (160)..(160): n is a, c, g, or t
  misc_feature (163)..(163): n is a, c, g, or t
  misc_feature (171)..(174): n is a, c, g, or t
  misc_feature (176)..(176): n is a, c, g, or t
  misc_feature (179)..(182): n is a, c, g, or t
  misc_feature (187)..(187): n is a, c, g, or t
  misc_feature (189)..(190): n is a, c, g, or t
  misc_feature (193)..(194): n is a, c, g, or t
  misc_feature (196)..(196): n is a, c, g, or t
  misc_feature (199)..(199): n is a, c, g, or t
  misc_feature (204)..(204): n is a, c, g, or t
  misc_feature (206)..(207): n is a, c, g, or t
  misc_feature (209)..(210): n is a, c, g, or t
  misc_feature (218)..(218): n is a, c, g, or t
  misc_feature (220)..(220): n is a, c, g, or t
  misc_feature (223)..(225): n is a, c, g, or t
  misc_feature (230)..(231): n is a, c, g, or t
  misc_feature (241)..(241): n is a, c, g, or t
  misc_feature (246)..(247): n is a, c, g, or t
  misc_feature (256)..(256): n is a, c, g, or t
  misc_feature (258)..(258): n is a, c, g, or t
  misc_feature (260)..(260): n is a, c, g, or t
  misc_feature (262)..(262): n is a, c, g, or t
  misc_feature (265)..(266): n is a, c, g, or t
  misc_feature (268)..(271): n is a, c, g, or t
  misc_feature (274)..(274): n is a, c, g, or t
  misc_feature (278)..(278): n is a, c, g, or t
  misc_feature (282)..(282): n is a, c, g, or t
  misc_feature (285)..(285): n is a, c, g, or t
  misc_feature (288)..(289): n is a, c, g, or t
  misc_feature (292)..(292): n is a, c, g, or t
  misc_feature (296)..(297): n is a, c, g, or t
  misc_feature (299)..(299): n is a, c, g, or t
  misc_feature (302)..(302): n is a, c, g, or t
  misc_feature (307)..(307): n is a, c, g, or t
  misc_feature (310)..(310): n is a, c, g, or t
  misc_feature (312)..(312): n is a, c, g, or t
  misc_feature (316)..(316): n is a, c, g, or t
  misc_feature (324)..(325): n is a, c, g, or t
  misc_feature (328)..(328): n is a, c, g, or t
  misc_feature (332)..(334): n is a, c, g, or t
  misc_feature (340)..(342): n is a, c, g, or t
  misc_feature (351)..(351): n is a, c, g, or t
  misc_feature (358)..(358): n is a, c, g, or t
  misc_feature (360)..(360): n is a, c, g, or t
  misc_feature (362)..(362): n is a, c, g, or t
  misc_feature (366)..(366): n is a, c, g, or t
  misc_feature (368)..(368): n is a, c, g, or t
  misc_feature (370)..(371): n is a, c, g, or t
  misc_feature (373)..(374): n is a, c, g, or t
  misc_feature (377)..(378): n is a, c, g, or t
  misc_feature (382)..(382): n is a, c, g, or t
  misc_feature (384)..(384): n is a, c, g, or t
  misc_feature (386)..(386): n is a, c, g, or t
  misc_feature (391)..(392): n is a, c, g, or t
  misc_feature (398)..(399): n is a, c, g, or t
  misc_feature (402)..(403): n is a, c, g, or t
  misc_feature (406)..(406): n is a, c, g, or t
  misc_feature (408)..(408): n is a, c, g, or t
  misc_feature (411)..(412): n is a, c, g, or t
  misc_feature (414)..(414): n is a, c, g, or t
  misc_feature (418)..(418): n is a, c, g, or t
  misc_feature (425)..(425): n is a, c, g, or t
  misc_feature (427)..(428): n is a, c, g, or t
  misc_feature (431)..(431): n is a, c, g, or t
  misc_feature (433)..(433): n is a, c, g, or t
  misc_feature (436)..(441): n is a, c, g, or t
  misc_feature (443)..(445): n is a, c, g, or t
  misc_feature (447)..(447): n is a, c, g, or t
  misc_feature (457)..(457): n is a, c, g, or t
  misc_feature (462)..(462): n is a, c, g, or t
  misc_feature (465)..(466): n is a, c, g, or t
  misc_feature (469)..(471): n is a, c, g, or t
  misc_feature (477)..(477): n is a, c, g, or t
  misc_feature (480)..(480): n is a, c, g, or t
  misc_feature (483)..(483): n is a, c, g, or t
  misc_feature (485)..(486): n is a, c, g, or t
  misc_feature (493)..(494): n is a, c, g, or t
  misc_feature (496)..(496): n is a, c, g, or t
  misc_feature (498)..(499): n is a, c, g, or t
  misc_feature (503)..(504): n is a, c, g, or t
  misc_feature (507)..(507): n is a, c, g, or t
  misc_feature (511)..(511): n is a, c, g, or t
  misc_feature (516)..(518): n is a, c, g, or t
  misc_feature (525)..(525): n is a, c, g, or t
  misc_feature (530)..(530): n is a, c, g, or t
  misc_feature (532)..(533): n is a, c, g, or t
  misc_feature (542)..(542): n is a, c, g, or t
  misc_feature (544)..(548): n is a, c, g, or t
  misc_feature (550)..(550): n is a, c, g, or t
  misc_feature (560)..(560): n is a, c, g, or t
  misc_feature (562)..(565): n is a, c, g, or t
  misc_feature (570)..(570): n is a, c, g, or t
  misc_feature (587)..(587): n is a, c, g, or t
  misc_feature (589)..(591): n is a, c, g, or t
  misc_feature (597)..(597): n is a, c, g, or t
  misc_feature (599)..(601): n is a, c, g, or t
  misc_feature (603)..(604): n is a, c, g, or t
  misc_feature (606)..(606): n is a, c, g, or t
  misc_feature (609)..(613): n is a, c, g, or t
  misc_feature (617)..(618): n is a, c, g, or t
  misc_feature (623)..(623): n is a, c, g, or t
  misc_feature (625)..(629): n is a, c, g, or t
  misc_feature (633)..(633): n is a, c, g, or t
  misc_feature (636)..(639): n is a, c, g, or t
  misc_feature (644)..(644): n is a, c, g, or t
  misc_feature (649)..(649): n is a, c, g, or t
  misc_feature (651)..(651): n is a, c, g, or t
  misc_feature (653)..(653): n is a, c, g, or t
  misc_feature (656)..(659): n is a, c, g, or t
  misc_feature (661)..(661): n is a, c, g, or t
  misc_feature (666)..(666): n is a, c, g, or t
  misc_feature (670)..(671): n is a, c, g, or t
  misc_feature (673)..(673): n is a, c, g, or t
  misc_feature (675)..(677): n is a, c, g, or t
  misc_feature (679)..(679): n is a, c, g, or t
  misc_feature (683)..(683): n is a, c, g, or t
  misc_feature (685)..(685): n is a, c, g, or t
  misc_feature (688)..(688): n is a, c, g, or t
  misc_feature (693)..(694): n is a, c, g, or t
  misc_feature (699)..(701): n is a, c, g, or t
  misc_feature (703)..(703): n is a, c, g, or t
  misc_feature (706)..(709): n is a, c, g, or t
  misc_feature (713)..(713): n is a, c, g, or t
  misc_feature (718)..(718): n is a, c, g, or t
  misc_feature (727)..(727): n is a, c, g, or t
  misc_feature (729)..(730): n is a, c, g, or t
  misc_feature (733)..(733): n is a, c, g, or t
  misc_feature (736)..(736): n is a, c, g, or t
  misc_feature (738)..(739): n is a, c, g, or t
  misc_feature (742)..(742): n is a, c, g, or t
  misc_feature (746)..(746): n is a, c, g, or t
  misc_feature (753)..(754): n is a, c, g, or t
  misc_feature (756)..(758): n is a, c, g, or t
  misc_feature (760)..(761): n is a, c, g, or t
  misc_feature (767)..(768): n is a, c, g, or t
  misc_feature (770)..(770): n is a, c, g, or t
  misc_feature (772)..(772): n is a, c, g, or t
  misc_feature (774)..(774): n is a, c, g, or t
  misc_feature (776)..(776): n is a, c, g, or t
  misc_feature (778)..(779): n is a, c, g, or t
  misc_feature (781)..(781): n is a, c, g, or t
  misc_feature (783)..(783): n is a, c, g, or t
  misc_feature (785)..(785): n is a, c, g, or t
  misc_feature (787)..(787): n is a, c, g, or t
  misc_feature (792)..(795): n is a, c, g, or t
  misc_feature (797)..(798): n is a, c, g, or t
  misc_feature (805)..(805): n is a, c, g, or t
  misc_feature (807)..(807): n is a, c, g, or t
  misc_feature (811)..(811): n is a, c, g, or t
  misc_feature (821)..(821): n is a, c, g, or t
  misc_feature (825)..(826): n is a, c, g, or t
  misc_feature (828)..(831): n is a, c, g, or t
  misc_feature (837)..(837): n is a, c, g, or t
  misc_feature (840)..(840): n is a, c, g, or t
  misc_feature (843)..(843): n is a, c, g, or t
  misc_feature (846)..(846): n is a, c, g, or t
  misc_feature (848)..(848): n is a, c, g, or t
  misc_feature (853)..(853): n is a, c, g, or t
  misc_feature (855)..(856): n is a, c, g, or t
  misc_feature (863)..(863): n is a, c, g, or t
  misc_feature (866)..(866): n is a, c, g, or t
  misc_feature (868)..(870): n is a, c, g, or t
  misc_feature (874)..(874): n is a, c, g, or t
  misc_feature (879)..(881): n is a, c, g, or t
  misc_feature (886)..(886): n is a, c, g, or t
  misc_feature (888)..(889): n is a, c, g, or t
  misc_feature (892)..(892): n is a, c, g, or t
  misc_feature (894)..(894): n is a, c, g, or t
  misc_feature (896)..(896): n is a, c, g, or t
  misc_feature (898)..(898): n is a, c, g, or t
  misc_feature (901)..(901): n is a, c, g, or t
  misc_feature (904)..(906): n is a, c, g, or t
  misc_feature (908)..(908): n is a, c, g, or t
  misc_feature (911)..(911): n is a, c, g, or t
  misc_feature (915)..(915): n is a, c, g, or t
  misc_feature (917)..(919): n is a, c, g, or t
  misc_feature (930)..(930): n is a, c, g, or t
  misc_feature (932)..(933): n is a, c, g, or t
  misc_feature (938)..(938): n is a, c, g, or t
  misc_feature (941)..(942): n is a, c, g, or t
  misc_feature (944)..(944): n is a, c, g, or t
  misc_feature (946)..(946): n is a, c, g, or t
  misc_feature (948)..(948): n is a, c, g, or t
  misc_feature (950)..(951): n is a, c, g, or t
  misc_feature (955)..(956): n is a, c, g, or t
  misc_feature (958)..(958): n is a, c, g, or t
  misc_feature (961)..(963): n is a, c, g, or t
  misc_feature (966)..(967): n is a, c, g, or t
  misc_feature (971)..(971): n is a, c, g, or t
  misc_feature (977)..(977): n is a, c, g, or t
  misc_feature (979)..(979): n is a, c, g, or t
  misc_feature (981)..(981): n is a, c, g, or t
  misc_feature (986)..(987): n is a, c, g, or t
  misc_feature (995)..(995): n is a, c, g, or t
  misc_feature (998)..(998): n is a, c, g, or t
  misc_feature (1000)..(1002): n is a, c, g, or t
  misc_feature (1006)..(1006): n is a, c, g, or t
  misc_feature (1010)..(1010): n is a, c, g, or t
  misc_feature (1012)..(1012): n is a, c, g, or t
  misc_feature (1014)..(1014): n is a, c, g, or t
  misc_feature (1019)..(1019): n is a, c, g, or t
  misc_feature (1023)..(1024): n is a, c, g, or t
  misc_feature (1026)..(1027): n is a, c, g, or t
  misc_feature (1031)..(1031): n is a, c, g, or t
  misc_feature (1037)..(1037): n is a, c, g, or t
  misc_feature (1039)..(1040): n is a, c, g, or t
  misc_feature (1043)..(1044): n is a, c, g, or t
  misc_feature (1046)..(1047): n is a, c, g, or t
  misc_feature (1049)..(1049): n is a, c, g, or t
  misc_feature (1052)..(1057): n is a, c, g, or t
  misc_feature (1063)..(1063): n is a, c, g, or t
  misc_feature (1065)..(1066): n is a, c, g, or t
  misc_feature (1069)..(1069): n is a, c, g, or t
  misc_feature (1076)..(1077): n is a, c, g, or t
  misc_feature (1080)..(1082): n is a, c, g, or t
  misc_feature (1084)..(1084): n is a, c, g, or t
  misc_feature (1087)..(1087): n is a, c, g, or t
  misc_feature (1094)..(1094): n is a, c, g, or t
  misc_feature (1096)..(1096): n is a, c, g, or t
  misc_feature (1101)..(1101): n is a, c, g, or t
  misc_feature (1103)..(1104): n is a, c, g, or t
  misc_feature (1107)..(1111): n is a, c, g, or t
  misc_feature (1115)..(1118): n is a, c, g, or t
  misc_feature (1121)..(1122): n is a, c, g, or t
  misc_feature (1124)..(1124): n is a, c, g, or t
  misc_feature (1130)..(1130): n is a, c, g, or t
  misc_feature (1134)..(1134): n is a, c, g, or t
  misc_feature (1137)..(1140): n is a, c, g, or t
  misc_feature (1142)..(1143): n is a, c, g, or t
  misc_feature (1145)..(1146): n is a, c, g, or t
  misc_feature (1150)..(1150): n is a, c, g, or t
  misc_feature (1155)..(1156): n is a, c, g, or t
  misc_feature (1161)..(1161): n is a, c, g, or t
  misc_feature (1164)..(1164): n is a, c, g, or t
  misc_feature (1167)..(1167): n is a, c, g, or t
  misc_feature (1169)..(1169): n is a, c, g, or t
  misc_feature (1175)..(1175): n is a, c, g, or t
  misc_feature (1179)..(1179): n is a, c, g, or t
  misc_feature (1181)..(1182): n is a, c, g, or t
  misc_feature (1184)..(1186): n is a, c, g, or t
  misc_feature (1189)..(1189): n is a, c, g, or t
  misc_feature (1191)..(1192): n is a, c, g, or t
  misc_feature (1195)..(1195): n is a, c, g, or t
  misc_feature (1197)..(1197): n is a, c, g, or t
  misc_feature (1200)..(1200): n is a, c, g, or t
  misc_feature (1204)..(1205): n is a, c, g, or t
  misc_feature (1207)..(1207): n is a, c, g, or t
  misc_feature (1210)..(1211): n is a, c, g, or t
  misc_feature (1214)..(1215): n is a, c, g, or t
  misc_feature (1217)..(1217): n is a, c, g, or t
  misc_feature (1219)..(1219): n is a, c, g, or t
  misc_feature (1224)..(1227): n is a, c, g, or t
  misc_feature (1229)..(1229): n is a, c, g, or t
  misc_feature (1231)..(1231): n is a, c, g, or t
  misc_feature (1233)..(1236): n is a, c, g, or t
  misc_feature (1241)..(1241): n is a, c, g, or t
  misc_feature (1243)..(1243): n is a, c, g, or t
  misc_feature (1246)..(1246): n is a, c, g, or t
  misc_feature (1248)..(1248): n is a, c, g, or t
  misc_feature (1251)..(1251): n is a, c, g, or t
  misc_feature (1255)..(1255): n is a, c, g, or t
  misc_feature (1257)..(1257): n is a, c, g, or t
  misc_feature (1263)..(1263): n is a, c, g, or t
  misc_feature (1266)..(1266): n is a, c, g, or t
  misc_feature (1269)..(1272): n is a, c, g, or t
  misc_feature (1276)..(1281): n is a, c, g, or t
  misc_feature (1283)..(1283): n is a, c, g, or t
  misc_feature (1285)..(1287): n is a, c, g, or t
  misc_feature (1294)..(1296): n is a, c, g, or t
  misc_feature (1298)..(1299): n is a, c, g, or t
  misc_feature (1305)..(1305): n is a, c, g, or t
  misc_feature (1313)..(1314): n is a, c, g, or t
  misc_feature (1316)..(1318): n is a, c, g, or t
  misc_feature (1320)..(1320): n is a, c, g, or t
  misc_feature (1324)..(1325): n is a, c, g, or t
  misc_feature (1327)..(1327): n is a, c, g, or t
  misc_feature (1333)..(1333): n is a, c, g, or t
  misc_feature (1341)..(1341): n is a, c, g, or t
  misc_feature (1345)..(1345): n is a, c, g, or t
  misc_feature (1350)..(1350): n is a, c, g, or t
  misc_feature (1353)..(1353): n is a, c, g, or t
  misc_feature (1366)..(1366): n is a, c, g, or t
  misc_feature (1369)..(1369): n is a, c, g, or t
  misc_feature (1372)..(1372): n is a, c, g, or t
  misc_feature (1374)..(1374): n is a, c, g, or t
  misc_feature (1384)..(1388): n is a, c, g, or t
  misc_feature (1393)..(1393): n is a, c, g, or t
  misc_feature (1395)..(1395): n is a, c, g, or t
  misc_feature (1397)..(1397): n is a, c, g, or t
  misc_feature (1400)..(1400): n is a, c, g, or t
  misc_feature (1402)..(1403): n is a, c, g, or t
  misc_feature (1411)..(1411): n is a, c, g, or t
  misc_feature (1417)..(1417): n is a, c, g, or t
  misc_feature (1424)..(1426): n is a, c, g, or t
  misc_feature (1429)..(1429): n is a, c, g, or t
  misc_feature (1431)..(1431): n is a, c, g, or t
  misc_feature (1435)..(1435): n is a, c, g, or t
  misc_feature (1438)..(1439): n is a, c, g, or t
  misc_feature (1442)..(1445): n is a, c, g, or t
  misc_feature (1450)..(1450): n is a, c, g, or t
  misc_feature (1452)..(1454): n is a, c, g, or t
  misc_feature (1461)..(1461): n is a, c, g, or t
  misc_feature (1464)..(1464): n is a, c, g, or t
  misc_feature (1467)..(1467): n is a, c, g, or t
  misc_feature (1472)..(1475): n is a, c, g, or t
  misc_feature (1480)..(1480): n is a, c, g, or t
  misc_feature (1482)..(1483): n is a, c, g, or t
  misc_feature (1490)..(1490): n is a, c, g, or t
  misc_feature (1493)..(1493): n is a, c, g, or t
  misc_feature (1502)..(1503): n is a, c, g, or t
  misc_feature (1506)..(1506): n is a, c, g, or t
  misc_feature (1515)..(1515): n is a, c, g, or t
  misc_feature (1528)..(1528): n is a, c, g, or t
  misc_feature (1531)..(1531): n is a, c, g, or t
  misc_feature (1534)..(1537): n is a, c, g, or t
  misc_feature (1539)..(1539): n is a, c, g, or t
  misc_feature (1541)..(1543): n is a, c, g, or t
  misc_feature (1545)..(1546): n is a, c, g, or t
  misc_feature (1549)..(1549): n is a, c, g, or t
  misc_feature (1556)..(1556): n is a, c, g, or t
  misc_feature (1558)..(1560): n is a, c, g, or t
  misc_feature (1566)..(1566): n is a, c, g, or t
  misc_feature (1570)..(1570): n is a, c, g, or t
  misc_feature (1574)..(1574): n is a, c, g, or t
  misc_feature (1580)..(1581): n is a, c, g, or t
  misc_feature (1583)..(1583): n is a, c, g, or t
  misc_feature (1586)..(1587): n is a, c, g, or t
  misc_feature (1592)..(1592): n is a, c, g, or t
  misc_feature (1594)..(1594): n is a, c, g, or t
  misc_feature (1596)..(1596): n is a, c, g, or t
  misc_feature (1602)..(1602): n is a, c, g, or t
  misc_feature (1613)..(1614): n is a, c, g, or t
  misc_feature (1616)..(1616): n is a, c, g, or t
  misc_feature (1621)..(1621): n is a, c, g, or t
  misc_feature (1627)..(1629): n is a, c, g, or t
  misc_feature (1633)..(1634): n is a, c, g, or t
  misc_feature (1636)..(1636): n is a, c, g, or t
  misc_feature (1641)..(1641): n is a, c, g, or t
  misc_feature (1645)..(1645): n is a, c, g, or t
  misc_feature (1651)..(1651): n is a, c, g, or t
  misc_feature (1653)..(1653): n is a, c, g, or t
  misc_feature (1655)..(1655): n is a, c, g, or t
  misc_feature (1661)..(1661): n is a, c, g, or t
  misc_feature (1664)..(1665): n is a, c, g, or t
  misc_feature (1667)..(1667): n is a, c, g, or t
  misc_feature (1669)..(1669): n is a, c, g, or t
  misc_feature (1675)..(1676): n is a, c, g, or t
  misc_feature (1678)..(1678): n is a, c, g, or t
  misc_feature (1685)..(1686): n is a, c, g, or t
  misc_feature (1689)..(1689): n is a, c, g, or t
  misc_feature (1691)..(1691): n is a, c, g, or t
  misc_feature (1701)..(1701): n is a, c, g, or t
  misc_feature (1704)..(1704): n is a, c, g, or t
  misc_feature (1707)..(1707): n is a, c, g, or t
  misc_feature (1715)..(1716): n is a, c, g, or t
  misc_feature (1719)..(1719): n is a, c, g, or t
  misc_feature (1721)..(1721): n is a, c, g, or t
  misc_feature (1730)..(1732): n is a, c, g, or t
  misc_feature (1735)..(1736): n is a, c, g, or t
  misc_feature (1738)..(1738): n is a, c, g, or t
  misc_feature (1742)..(1742): n is a, c, g, or t
  misc_feature (1746)..(1746): n is a, c, g, or t
  misc_feature (1748)..(1748): n is a, c, g, or t
  misc_feature (1750)..(1750): n is a, c, g, or t
  misc_feature (1752)..(1752): n is a, c, g, or t
  misc_feature (1763)..(1763): n is a, c, g, or t
  misc_feature (1765)..(1766): n is a, c, g, or t
  misc_feature (1769)..(1769): n is a, c, g, or t
  misc_feature (1771)..(1772): n is a, c, g, or t
  misc_feature (1775)..(1776): n is a, c, g, or t
  misc_feature (1780)..(1782): n is a, c, g, or t
  misc_feature (1785)..(1785): n is a, c, g, or t
  misc_feature (1787)..(1787): n is a, c, g, or t
  misc_feature (1792)..(1792): n is a, c, g, or t
  misc_feature (1794)..(1794): n is a, c, g, or t
  misc_feature (1797)..(1798): n is a, c, g, or t
  misc_feature (1800)..(1801): n is a, c, g, or t
  misc_feature (1803)..(1804): n is a, c, g, or t
  misc_feature (1807)..(1808): n is a, c, g, or t
  misc_feature (1813)..(1813): n is a, c, g, or t
  misc_feature (1820)..(1820): n is a, c, g, or t
  misc_feature (1822)..(1824): n is a, c, g, or t
  misc_feature (1827)..(1828): n is a, c, g, or t
  misc_feature (1830)..(1833): n is a, c, g, or t
  misc_feature (1839)..(1839): n is a, c, g, or t
  misc_feature (1846)..(1846): n is a, c, g, or t
  misc_feature (1848)..(1848): n is a, c, g, or t
  misc_feature (1851)..(1853): n is a, c, g, or t
  misc_feature (1856)..(1857): n is a, c, g, or t
  misc_feature (1859)..(1859): n is a, c, g, or t
  misc_feature (1862)..(1862): n is a, c, g, or t
  misc_feature (1864)..(1864): n is a, c, g, or t
  misc_feature (1868)..(1870): n is a, c, g, or t
  misc_feature (1877)..(1877): n is a, c, g, or t
  misc_feature (1879)..(1882): n is a, c, g, or t
  misc_feature (1884)..(1884): n is a, c, g, or t
  misc_feature (1886)..(1886): n is a, c, g, or t
  misc_feature (1891)..(1891): n is a, c, g, or t
  misc_feature (1894)..(1894): n is a, c, g, or t
  misc_feature (1898)..(1898): n is a, c, g, or t
  misc_feature (1902)..(1902): n is a, c, g, or t
  misc_feature (1915)..(1915): n is a, c, g, or t
  misc_feature (1918)..(1918): n is a, c, g, or t
  misc_feature (1921)..(1921): n is a, c, g, or t
  misc_feature (1925)..(1925): n is a, c, g, or t
  misc_feature (1928)..(1928): n is a, c, g, or t
  misc_feature (1931)..(1933): n is a, c, g, or t
  misc_feature (1937)..(1937): n is a, c, g, or t
  misc_feature (1940)..(1941): n is a, c, g, or t
  misc_feature (1945)..(1945): n is a, c, g, or t
  misc_feature (1953)..(1954): n is a, c, g, or t
  misc_feature (1957)..(1958): n is a, c, g, or t
  misc_feature (1960)..(1960): n is a, c, g, or t
  misc_feature (1962)..(1963): n is a, c, g, or t
  misc_feature (1967)..(1969): n is a, c, g, or t
  misc_feature (1971)..(1971): n is a, c, g, or t
  misc_feature (1979)..(1979): n is a, c, g, or t
  misc_feature (1981)..(1981): n is a, c, g, or t
  misc_feature (1984)..(1984): n is a, c, g, or t
  misc_feature (1989)..(1989): n is a, c, g, or t
  misc_feature (1991)..(1993): n is a, c, g, or t
  misc_feature (2000)..(2001): n is a, c, g, or t
  misc_feature (2004)..(2005): n is a, c, g, or t
  misc_feature (2007)..(2007): n is a, c, g, or t
  misc_feature (2015)..(2016): n is a, c, g, or t
  misc_feature (2019)..(2019): n is a, c, g, or t
  misc_feature (2021)..(2021): n is a, c, g, or t
  misc_feature (2023)..(2023): n is a, c, g, or t
  misc_feature (2025)..(2025): n is a, c, g, or t
  misc_feature (2030)..(2031): n is a, c, g, or t
  misc_feature (2040)..(2040): n is a, c, g, or t
  misc_feature (2043)..(2044): n is a, c, g, or t
  misc_feature (2046)..(2049): n is a, c, g, or t
  misc_feature (2051)..(2052): n is a, c, g, or t
  misc_feature (2056)..(2057): n is a, c, g, or t
  misc_feature (2062)..(2062): n is a, c, g, or t
  misc_feature (2074)..(2074): n is a, c, g, or t
  misc_feature (2076)..(2076): n is a, c, g, or t
  misc_feature (2080)..(2083): n is a, c, g, or t
  misc_feature (2091)..(2092): n is a, c, g, or t
  misc_feature (2097)..(2098): n is a, c, g, or t
  misc_feature (2100)..(2100): n is a, c, g, or t
  misc_feature (2103)..(2103): n is a, c, g, or t
  misc_feature (2107)..(2107): n is a, c, g, or t
  misc_feature (2109)..(2110): n is a, c, g, or t
  misc_feature (2114)..(2114): n is a, c, g, or t
  misc_feature (2117)..(2117): n is a, c, g, or t
  misc_feature (2119)..(2120): n is a, c, g, or t
  misc_feature (2122)..(2123): n is a, c, g, or t
  misc_feature (2125)..(2125): n is a, c, g, or t
  misc_feature (2129)..(2129): n is a, c, g, or t
  misc_feature (2134)..(2134): n is a, c, g, or t
  misc_feature (2136)..(2136): n is a, c, g, or t
  misc_feature (2143)..(2143): n is a, c, g, or t
  misc_feature (2150)..(2150): n is a, c, g, or t
  misc_feature (2158)..(2158): n is a, c, g, or t
  misc_feature (2160)..(2160): n is a, c, g, or t
  misc_feature (2167)..(2167): n is a, c, g, or t
  misc_feature (2169)..(2171): n is a, c, g, or t
  misc_feature (2179)..(2180): n is a, c, g, or t
  misc_feature (2187)..(2188): n is a, c, g, or t
  misc_feature (2190)..(2190): n is a, c, g, or t
  misc_feature (2194)..(2195): n is a, c, g, or t
  misc_feature (2203)..(2203): n is a, c, g, or t
  misc_feature (2205)..(2205): n is a, c, g, or t
  misc_feature (2208)..(2208): n is a, c, g, or t
  misc_feature (2210)..(2210): n is a, c, g, or t
  misc_feature (2215)..(2216): n is a, c, g, or t
  misc_feature (2218)..(2218): n is a, c, g, or t
  misc_feature (2220)..(2220): n is a, c, g, or t
  misc_feature (2223)..(2223): n is a, c, g, or t
  misc_feature (2226)..(2226): n is a, c, g, or t
  misc_feature (2231)..(2231): n is a, c, g, or t
  misc_feature (2234)..(2234): n is a, c, g, or t
  misc_feature (2237)..(2237): n is a, c, g, or t
  misc_feature (2239)..(2239): n is a, c, g, or t
  misc_feature (2241)..(2241): n is a, c, g, or t
  misc_feature (2244)..(2245): n is a, c, g, or t
  misc_feature (2248)..(2248): n is a, c, g, or t
  misc_feature (2251)..(2251): n is a, c, g, or t
  misc_feature (2253)..(2253): n is a, c, g, or t
  misc_feature (2256)..(2256): n is a, c, g, or t
  misc_feature (2260)..(2260): n is a, c, g, or t
  misc_feature (2262)..(2262): n is a, c, g, or t
  misc_feature (2272)..(2272): n is a, c, g, or t
  misc_feature (2278)..(2278): n is a, c, g, or t
  misc_feature (2281)..(2281): n is a, c, g, or t
  misc_feature (2283)..(2283): n is a, c, g, or t
  misc_feature (2286)..(2286): n is a, c, g, or t
  misc_feature (2290)..(2292): n is a, c, g, or t
  misc_feature (2294)..(2294): n is a, c, g, or t
  misc_feature (2300)..(2300): n is a, c, g, or t
  misc_feature (2302)..(2302): n is a, c, g, or t
  misc_feature (2307)..(2308): n is a, c, g, or t
  misc_feature (2310)..(2310): n is a, c, g, or t
  misc_feature (2313)..(2313): n is a, c, g, or t
  misc_feature (2323)..(2323): n is a, c, g, or t
  misc_feature (2327)..(2327): n is a, c, g, or t
  misc_feature (2329)..(2329): n is a, c, g, or t
  misc_feature (2331)..(2334): n is a, c, g, or t
  misc_feature (2337)..(2337): n is a, c, g, or t
  misc_feature (2340)..(2340): n is a, c, g, or t
  misc_feature (2345)..(2345): n is a, c, g, or t
  misc_feature (2348)..(2348): n is a, c, g, or t
  misc_feature (2351)..(2351): n is a, c, g, or t
  misc_feature (2353)..(2353): n is a, c, g, or t
  misc_feature (2357)..(2357): n is a, c, g, or t
  misc_feature (2360)..(2360): n is a, c, g, or t
  misc_feature (2362)..(2362): n is a, c, g, or t
  misc_feature (2368)..(2368): n is a, c, g, or t
  misc_feature (2374)..(2374): n is a, c, g, or t
  misc_feature (2379)..(2380): n is a, c, g, or t
  misc_feature (2382)..(2384): n is a, c, g, or t
  misc_feature (2386)..(2387): n is a, c, g, or t
  misc_feature (2390)..(2390): n is a, c, g, or t
  misc_feature (2394)..(2394): n is a, c, g, or t
  misc_feature (2396)..(2398): n is a, c, g, or t
  misc_feature (2407)..(2412): n is a, c, g, or t
  misc_feature (2414)..(2414): n is a, c, g, or t
anatagnnaggaanttngnccaaggaggggnggggncccgccccccccccnccctntcgggnanacactcnttntangngggnatgnnccnctnntnanncgtttnaacccnncccacnccngncnnacntncgtgtnnnggggggnnctnnattnacanacntctggtcnnnntnccnnnnctttntnnagnnantantgcantnnannattgtgananccnnnggccnnacgctcatgnagatnnaatgtgctntncntnatnncnnnnacntcangganacntannctnaggnnanggngactnatnanactngatcattnnganatgnnncctatnnnaaatttgcngggacantnanaccncntnncnnctnngctncncncgctnnactacnncannttntncanncngtangatcacngnntcntnttnnnnnngnnncntagtgcttgnactcncgnntannngtactnacngtntnntctatgnntntnngtannccngtcncaccnnngccactntcttncnnagtaacgtnannnnncncataccactngnnnnctgtnctaaactgcttttcttntnnnacttcncnnntnncnttnnnnngtannttacncnnnnnatcntcnnnnccttntctantncnccnnnntncatanaganntntnnntnaacntntantcccnngaagnnnantannnnaaanaatcngatctcacnanntangtntnnccnaggncccaatnnannntnngctctnngnantntncnntntngntnacatnnnncnncagttcntncacncatagctttntcanncnnnntccccntcntanagngntctcnannctcagtnatntnnnaatntcatnnnctatnanncangntncnccncannntnacnccanannnctcgtcattcnanntgtcntcnnanancnanncaanntnacnnnccnngcgntcggtntnanattcnncttcgcantcngnnnctanttanangnaaaantgtnntnntgcnatcgananntcnncnntnagnnnnnncatctncnnatngccccannacnnntnctngaaaaangntcgcntnnaannnnngtannnncanngncgaacnctantcnnnntnncnncacnacacnnccctnccncancnctatcntacntnncnnnctnannctnantancacnnantannctnntnanacctnnnngnancnnnnagcgncntcnantcnactnanaactcngtnccnnnngacnnnnnnantnnnatagctnnnanngtttcngaccaccnntnnntncacnntncgcttngctctcanaaangtagnatnaccaccctattanatnatnanttaaggacgnnnnnatacncncngancnnccccatcnaactcncacacgnnnacntnagcntannatnnnnttatncnnnccacgcnacntancgttnnnnccacnanntctgatncanactctcatnnatngataagtcntaccactcgcttnctnatnnnncntnnncnntgngtgatanannntcgganactncatnctgagnnantcnngaaancncnaacacnttatacatccnntngagtncctacnnnccannanactcntttncatacncngnttatangtnncnanttaccnncngcttatnntancnctcacgtacnagnctncagcatcnncancntcatgacannncannanaaanctcnantntncaccaccacancnncantnnatnntacnnntancnccacncnctnncnncnngcnnccacncaattcntnnntanncnnnnggctcnctatatncntannnagnnanatncnagcnnnaattacngnnnncngnagtgncancaanctcnctcttacttcacnctntcncacntcntgnnnctcnganngaangtggcacnnccnncnanngtcnnngnttagatcnanagngacangnnntgatatnngtnncnctcaaganngtncncncntctcnntcgatctcnacnntnnnntnncccnnacatnatcaagacacananatcnnnnatatttgnngcgcnncnttnccantnncagntcncnnanncncatncaccnancgagacnctatgcncattcatntntagtacngnnngcagatgnnctcatcnntnccanntatctctnanttngnatcannantntanccntcatnttnatncncnatnnatntcncngcntttncntatgtctccncgtatnctnantantctnnnantacacntncatannancanagtcataacntacntnannnnacnagntcttnatntgntnactnacntngatctntattantgatnntnnngnnagncacntnnnacgtatgannnnnncn

SEQ ID NO: 747 - DNA, 1373 bp, Homo Sapiens
  misc_feature (790)..(790): n is a, c, g, or t
  misc_feature (796)..(796): n is a, c, g, or t
  misc_feature (816)..(816): n is a, c, g, or t
  misc_feature (872)..(872): n is a, c, g, or t
  misc_feature (892)..(892): n is a, c, g, or t
  misc_feature (909)..(909): n is a, c, g, or t
  misc_feature (911)..(911): n is a, c, g, or t
  misc_feature (913)..(914): n is a, c, g, or t
  misc_feature (920)..(920): n is a, c, g, or t
  misc_feature (934)..(934): n is a, c, g, or t
  misc_feature (940)..(940): n is a, c, g, or t
  misc_feature (944)..(944): n is a, c, g, or t
  misc_feature (948)..(948): n is a, c, g, or t
  misc_feature (961)..(961): n is a, c, g, or t
  misc_feature (964)..(964): n is a, c, g, or t
  misc_feature (969)..(969): n is a, c, g, or t
  misc_feature (981)..(981): n is a, c, g, or t
  misc_feature (984)..(984): n is a, c, g, or t
  misc_feature (986)..(986): n is a, c, g, or t
  misc_feature (990)..(990): n is a, c, g, or t
  misc_feature (994)..(994): n is a, c, g, or t
  misc_feature (997)..(997): n is a, c, g, or t
  misc_feature (1000)..(1000): n is a, c, g, or t
  misc_feature (1004)..(1004): n is a, c, g, or t
  misc_feature (1007)..(1007): n is a, c, g, or t
  misc_feature (1031)..(1031): n is a, c, g, or t
  misc_feature (1036)..(1036): n is a, c, g, or t
  misc_feature (1040)..(1040): n is a, c, g, or t
  misc_feature (1042)..(1042): n is a, c, g, or t
  misc_feature (1044)..(1044): n is a, c, g, or t
  misc_feature (1046)..(1046): n is a, c, g, or t
  misc_feature (1056)..(1056): n is a, c, g, or t
  misc_feature (1060)..(1060): n is a, c, g, or t
  misc_feature (1064)..(1064): n is a, c, g, or t
  misc_feature (1067)..(1068): n is a, c, g, or t
  misc_feature (1079)..(1080): n is a, c, g, or t
  misc_feature (1084)..(1086): n is a, c, g, or t
  misc_feature (1092)..(1093): n is a, c, g, or t
  misc_feature (1104)..(1104): n is a, c, g, or t
  misc_feature (1110)..(1110): n is a, c, g, or t
  misc_feature (1112)..(1112): n is a, c, g, or t
  misc_feature (1125)..(1125): n is a, c, g, or t
  misc_feature (1132)..(1132): n is a, c, g, or t
  misc_feature (1142)..(1142): n is a, c, g, or t
  misc_feature (1145)..(1145): n is a, c, g, or t
  misc_feature (1151)..(1151): n is a, c, g, or t
  misc_feature (1167)..(1167): n is a, c, g, or t
  misc_feature (1191)..(1191): n is a, c, g, or t
  misc_feature (1193)..(1193): n is a, c, g, or t
  misc_feature (1196)..(1196): n is a, c, g, or t
  misc_feature (1204)..(1204): n is a, c, g, or t
  misc_feature (1218)..(1218): n is a, c, g, or t
  misc_feature (1222)..(1222): n is a, c, g, or t
  misc_feature (1224)..(1224): n is a, c, g, or t
  misc_feature (1232)..(1233): n is a, c, g, or t
  misc_feature (1242)..(1242): n is a, c, g, or t
  misc_feature (1253)..(1253): n is a, c, g, or t
  misc_feature (1256)..(1256): n is a, c, g, or t
  misc_feature (1262)..(1262): n is a, c, g, or t
  misc_feature (1266)..(1266): n is a, c, g, or t
  misc_feature (1273)..(1273): n is a, c, g, or t
  misc_feature (1284)..(1284): n is a, c, g, or t
  misc_feature (1303)..(1303): n is a, c, g, or t
  misc_feature (1307)..(1308): n is a, c, g, or t
  misc_feature (1311)..(1311): n is a, c, g, or t
  misc_feature (1317)..(1317): n is a, c, g, or t
  misc_feature (1329)..(1329): n is a, c, g, or t
  misc_feature (1334)..(1336): n is a, c, g, or t
  misc_feature (1344)..(1344): n is a, c, g, or t
  misc_feature (1349)..(1349): n is a, c, g, or t
  misc_feature (1351)..(1351): n is a, c, g, or t
  misc_feature (1354)..(1355): n is a, c, g, or t
  misc_feature (1360)..(1360): n is a, c, g, or t
  misc_feature (1364)..(1365): n is a, c, g, or t
  misc_feature (1367)..(1367): n is a, c, g, or t
gagaaattactatgagaggatcgcatcaccatcaccatcacggatcctatttaggtgacactatagaatcgtcgacccacgcgtccgcggacgcgtgggtgaagattgggcttgaagtatatatttttgcatttaaaagtatcacctatcatattttccactcgaaaattgacatagtagcattgaggatactctgatctagaaagccaagtatttgagcaacatctatagagatctacttttctcctatgtctcctaggctttccatgataattaggtaatacatttaagaaggatatttatttctgttttgctctattcaaagaaacggaatgggatagttattctgtaaactaagtttgtatataactttatttgggtttaatttccacaactggtatctgcaaatattgccagcattttagccatattttgggagaacttggtgtttgaggtcccaggaaatgaggtctgatcaaatgaaatgcaagcacaatttcttacagccatttaactttctattgggaggatgaattaacaaactcacattgtgcagtccgcttaatccaggcacttttctttgtgcaggtgtagtgagtagttacttctctcccttacacagatgacttgtgaaactcaagctcaccatcttcagtgctggcattttactttgccactacccaaaaacaatgtgagatgtgttcagtggcctctggtactctttgcaggcaagaatcaaacaacatggggactgagggaaggatggggaagtgtagccacagttcttccnaaatgnaaatactttttgtttgttcnagtggtaaaatgcaaatgcaatcccatatttggtaaggatggtcaggtctcatganaaatctatgctatgtgtccngaacttttgaaacagantncnntgggantgggaattagggantgtaanggangccnaaaatgtttttcntcngggcntaaaaaaactgnttncngaantccnacnttngaanaanaaacaggggggggggggttggggnaagancctnangnanaaaccccccngaangaanggnncccaaaaaacnngaannnttgacnngcctggaaaangaaaancnccccaaactgtcngaaaaangggaggggancgnggaccnccccccaccgcccccngggaggggaacttgcccccgcccngnccnggaaaaanacccccccccaaanaaantntttgaatnnatttccggncccccaagggnaangccccntttnccccggngaaaatccccnaaattttaaaaaaaaaaangggnnatncggggnttcccccttggnaaaannntagccccnaaaancnccnnccccntctnntntttccc

SEQ ID NO: 748 - DNA, 1393 bp, Homo Sapiens
  misc_feature (1)..(1): n is a, c, g, or t
  misc_feature (726)..(726): n is a, c, g, or t
  misc_feature (770)..(770): n is a, c, g, or t
  misc_feature (795)..(795): n is a, c, g, or t
  misc_feature (838)..(838): n is a, c, g, or t
  misc_feature (866)..(866): n is a, c, g, or t
  misc_feature (879)..(879): n is a, c, g, or t
  misc_feature (908)..(908): n is a, c, g, or t
  misc_feature (930)..(930): n is a, c, g, or t
  misc_feature (939)..(939): n is a, c, g, or t
  misc_feature (942)..(942): n is a, c, g, or t
  misc_feature (952)..(952): n is a, c, g, or t
  misc_feature (962)..(962): n is a, c, g, or t
  misc_feature (965)..(965): n is a, c, g, or t
  misc_feature (968)..(968): n is a, c, g, or t
  misc_feature (970)..(970): n is a, c, g, or t
  misc_feature (994)..(994): n is a, c, g, or t
  misc_feature (1003)..(1004): n is a, c, g, or t
  misc_feature (1007)..(1007): n is a, c, g, or t
  misc_feature (1014)..(1014): n is a, c, g, or t
  misc_feature (1016)..(1016): n is a, c, g, or t
  misc_feature (1020)..(1020): n is a, c, g, or t
  misc_feature (1023)..(1023): n is a, c, g, or t
  misc_feature (1025)..(1025): n is a, c, g, or t
  misc_feature (1035)..(1035): n is a, c, g, or t
  misc_feature (1039)..(1039): n is a, c, g, or t
  misc_feature (1044)..(1044): n is a, c, g, or t
  misc_feature (1047)..(1048): n is a, c, g, or t
  misc_feature (1050)..(1050): n is a, c, g, or t
  misc_feature (1053)..(1057): n is a, c, g, or t
  misc_feature (1063)..(1063): n is a, c, g, or t
  misc_feature (1066)..(1066): n is a, c, g, or t
  misc_feature (1071)..(1071): n is a, c, g, or t
  misc_feature (1079)..(1079): n is a, c, g, or t
  misc_feature (1081)..(1081): n is a, c, g, or t
  misc_feature (1088)..(1088): n is a, c, g, or t
  misc_feature (1092)..(1092): n is a, c, g, or t
  misc_feature (1095)..(1095): n is a, c, g, or t
  misc_feature (1097)..(1097): n is a, c, g, or t
  misc_feature (1099)..(1100): n is a, c, g, or t
  misc_feature (1102)..(1102): n is a, c, g, or t
  misc_feature (1111)..(1111): n is a, c, g, or t
  misc_feature (1122)..(1122): n is a, c, g, or t
  misc_feature (1125)..(1125): n is a, c, g, or t
  misc_feature (1129)..(1129): n is a, c, g, or t
  misc_feature (1136)..(1136): n is a, c, g, or t
  misc_feature (1138)..(1138): n is a, c, g, or t
  misc_feature (1141)..(1141): n is a, c, g, or t
  misc_feature (1157)..(1157): n is a, c, g, or t
  misc_feature (1160)..(1160): n is a, c, g, or t
  misc_feature (1163)..(1163): n is a, c, g, or t
  misc_feature (1166)..(1167): n is a, c, g, or t
  misc_feature (1173)..(1174): n is a, c, g, or t
  misc_feature (1179)..(1182): n is a, c, g, or t
  misc_feature (1189)..(1191): n is a, c, g, or t
  misc_feature (1194)..(1195): n is a, c, g, or t
  misc_feature (1199)..(1200): n is a, c, g, or t
  misc_feature (1204)..(1206): n is a, c, g, or t
  misc_feature (1208)..(1208): n is a, c, g, or t
  misc_feature (1217)..(1217): n is a, c, g, or t
  misc_feature (1231)..(1233): n is a, c, g, or t
  misc_feature (1235)..(1235): n is a, c, g, or t
  misc_feature (1237)..(1237): n is a, c, g, or t
  misc_feature (1243)..(1243): n is a, c, g, or t
  misc_feature (1245)..(1247): n is a, c, g, or t
  misc_feature (1250)..(1250): n is a, c, g, or t
  misc_feature (1252)..(1252): n is a, c, g, or t
  misc_feature (1254)..(1254): n is a, c, g, or t
  misc_feature (1256)..(1257): n is a, c, g, or t
  misc_feature (1266)..(1271): n is a, c, g, or t
  misc_feature (1276)..(1277): n is a, c, g, or t
  misc_feature (1282)..(1284): n is a, c, g, or t
  misc_feature (1288)..(1289): n is a, c, g, or t
  misc_feature (1298)..(1298): n is a, c, g, or t
  misc_feature (1303)..(1309): n is a, c, g, or t
  misc_feature (1311)..(1312): n is a, c, g, or t
  misc_feature (1314)..(1315): n is a, c, g, or t
  misc_feature (1317)..(1321): n is a, c, g, or t
  misc_feature (1329)..(1329): n is a, c, g, or t
  misc_feature (1334)..(1334): n is a, c, g, or t
  misc_feature (1336)..(1342): n is a, c, g, or t
  misc_feature (1344)..(1345): n is a, c, g, or t
  misc_feature (1352)..(1389): n is a, c, g, or t
  misc_feature (1392)..(1392): n is a, c, g, or t
nagagaaattactatgagaggatcgcatcaccatcaccatcacgggatcctatttaggtgacactatagaatcgtcgacccacgcgtccgaggaaccccagagccgggtgaagtggtcagaggcacagttctcctgtgaacagcaagaggcccagctggtcaccatcacaaaccccttagagcaagcattcatcacagccagcctgcccaatgtgacctttgacctttggattggcctccatgcctcgcagagggacttccagtgggtggagcaggagcctttgatgtatgccaactgggcacctggggagccctctggccctagccctgctcccagtggcaacaaaccgaccagctgtgcggtggtcctgcacagcccctcagcccacttcactggccgctgggacgatcggagctgcacggaggagacccatggcttcatctgccagaagggcacggacccctccctgagcccgtccccagcagcgctgccccccgccccgggcactgagctctcctacctcaacggcaccttccggctgcttcagaagccgctgcgctggcacgatgccctcctgctgtgtgagagccacaatgccagcctggcctacgtgcccgacccctacacccaggccttcctcacgcaggctgcccgagggctgcgcacgccgctctggattgggctggctggcgaggagggctctcggcggtactcctgggtctcanaggagccgctgaactacgtgggctggcaggacggggagccgcancagccggggggctgtacctacgtanatgtggacggggccctggcgcaacaccaactgtgaacaccaanctgcaagggggctgtgtgtggggtttancaatgggcccccntcctccccgaaaaataacctaaccatggncagctgttccccagggactggnaaactcccncgnggaattcccnttccgggaancantgntnttttttttcaaatggaacttgctncttgggccnnaangaaggcncnaaanccntnccaaaaaacngggnggggnccnncntgnnnnntcttgnaanaaaanggaaaaantnttttttntggnaanancnngnaaaaatttnaaggccaaaantcngggnccctggntnggnaataaattttaccccnaanganggnnttttgnnttggnnnnaaaaacnnnttnnaaanntccnnngnggggccccngggtttggccccannntntnaacccnannnttntntngnnttaaaaaannnnnnttatnnccccnnntttnnaaaataaanggggnnnnnnnanntnntnnnnnaaaaaaanttttncnnnnnnntnnaaaaaannnnnnnnnnnnnnnnnnnnnnnnnnnnnnnnnnnnnnttna

SEQ ID NO: 749 - DNA, 1293 bp, Homo Sapiens
  misc_feature (814)..(814): n is a, c, g, or t
  misc_feature (835)..(835): n is a, c, g, or t
  misc_feature (840)..(840): n is a, c, g, or t
  misc_feature (846)..(846): n is a, c, g, or t
  misc_feature (877)..(877): n is a, c, g, or t
  misc_feature (879)..(879): n is a, c, g, or t
  misc_feature (891)..(891): n is a, c, g, or t
  misc_feature (907)..(907): n is a, c, g, or t
  misc_feature (937)..(937): n is a, c, g, or t
  misc_feature (958)..(958): n is a, c, g, or t
  misc_feature (961)..(961): n is a, c, g, or t
  misc_feature (967)..(967): n is a, c, g, or t
  misc_feature (969)..(971): n is a, c, g, or t
  misc_feature (1001)..(1003): n is a, c, g, or t
  misc_feature (1008)..(1009): n is a, c, g, or t
  misc_feature (1029)..(1029): n is a, c, g, or t
  misc_feature (1040)..(1040): n is a, c, g, or t
  misc_feature (1056)..(1057): n is a, c, g, or t
  misc_feature (1060)..(1061): n is a, c, g, or t
  misc_feature (1069)..(1069): n is a, c, g, or t
  misc_feature (1089)..(1089): n is a, c, g, or t
  misc_feature (1094)..(1094): n is a, c, g, or t
  misc_feature (1105)..(1106): n is a, c, g, or t
  misc_feature (1113)..(1113): n is a, c, g, or t
  misc_feature (1117)..(1117): n is a, c, g, or t
  misc_feature (1120)..(1121): n is a, c, g, or t
  misc_feature (1142)..(1142): n is a, c, g, or t
  misc_feature (1146)..(1146): n is a, c, g, or t
  misc_feature (1149)..(1149): n is a, c, g, or t
  misc_feature (1171)..(1172): n is a, c, g, or t
  misc_feature (1180)..(1180): n is a, c, g, or t
  misc_feature (1185)..(1187): n is a, c, g, or t
  misc_feature (1195)..(1195): n is a, c, g, or t
  misc_feature (1197)..(1198): n is a, c, g, or t
  misc_feature (1208)..(1210): n is a, c, g, or t
  misc_feature (1220)..(1220): n is a, c, g, or t
  misc_feature (1228)..(1230): n is a, c, g, or t
  misc_feature (1232)..(1232): n is a, c, g, or t
  misc_feature (1234)..(1234): n is a, c, g, or t
  misc_feature (1240)..(1240): n is a, c, g, or t
  misc_feature (1242)..(1242): n is a, c, g, or t
  misc_feature (1253)..(1255): n is a, c, g, or t
  misc_feature (1257)..(1257): n is a, c, g, or t
  misc_feature (1270)..(1270): n is a, c, g, or t
  misc_feature (1276)..(1277): n is a, c, g, or t
  misc_feature (1287)..(1287): n is a, c, g, or t
gaattagagaaattactatgagaggatcgcatcaccatcaccatcacggatcctatttaggtgacactatagaatcgtcgacccacgcgtccgaccggctgctttgccaccatctggctggcggcgactcgcggcagccggttggtgaagcgcgaatacctgagggtgaatgtggtgaaaacctgcgaggaaatcctcaattacgtgctggtacgagtgcaacccccgcagcccggcctgccgcggccccgcttctccctctatctctcagcccaacttcagatcggtgtgatccgcgtctattctcaacaatgccagtacctcgtggaggacatccagcacatcttggagcgcctccaccgtgcccagctgcagatccgaatagatatggagactgagctacccagcctgctgcttcctaaccacctggccatgatggagaccctagaagatgctccagatcccttttttgggatgatgtctgtggatcccagacttcctagtcctttcgatatccctcagattcgacacctcttagaggctgcaatcccagagagagttgaagagatccctcctgaagttcctacagagcccagggagccagagaggattccggtcactgtgctgccacctgaggccatcacgatcctggaggcagagcccatacggatgctggagattgagggtgaacgggagctcccagaggtcagccgccgagaactggacctgctgatcgcagaggaagaagaagctatcttgttagaaatcccgcggctcccacctccagctcctgcagaggtggaaggaatagganaggcactggggtcctgagganctgangctganaggctgggaacctggggccctactcatggangngaccccccggangaactgcgtctgccanccccacccagcccaaaaaggaaggccccanttccccccaacttcttcgcgncgncggttntnnncgggttactgtttctgggaaaaaggaaaannnaaatnncccccggaaaaaattccagnaaaaaaactgncaaaccaaaaaccccnntgnntgggaaangtccccatgggggaaacccnccccnaaaaagaaacnnccaaaangccntgnnggaaattttttcaaaaacccnaaanttnttctggggggggtaaccccccnnaaaaaaanggggnnnttggaaancnntttgggcccnnncccccccccnaaaacccnnnangnaaaaantncctaaaaaaannncnccccttaaggganaaaggnnaaaaattttnttttcc

SEQ ID NO: 750 - DNA, 1200 bp, Homo Sapiens
  misc_feature (2)..(3): n is a, c, g, or t
  misc_feature (26)..(26): n is a, c, g, or t
  misc_feature (875)..(875): n is a, c, g, or t
  misc_feature (906)..(906): n is a, c, g, or t
  misc_feature (927)..(927): n is a, c, g, or t
  misc_feature (990)..(990): n is a, c, g, or t
  misc_feature (1000)..(1000): n is a, c, g, or t
  misc_feature (1024)..(1024): n is a, c, g, or t
  misc_feature (1043)..(1043): n is a, c, g, or t
  misc_feature (1047)..(1047): n is a, c, g, or t
  misc_feature (1081)..(1081): n is a, c, g, or t
  misc_feature (1083)..(1083): n is a, c, g, or t
  misc_feature (1086)..(1086): n is a, c, g, or t
  misc_feature (1113)..(1113): n is a, c, g, or t
  misc_feature (1134)..(1135): n is a, c, g, or t
  misc_feature (1143)..(1143): n is a, c, g, or t
  misc_feature (1147)..(1147): n is a, c, g, or t
  misc_feature (1150)..(1151): n is a, c, g, or t
  misc_feature (1153)..(1154): n is a, c, g, or t
  misc_feature (1161)..(1161): n is a, c, g, or t
  misc_feature (1177)..(1177): n is a, c, g, or t
  misc_feature (1189)..(1189): n is a, c, g, or t
  misc_feature (1196)..(1196): n is a, c, g, or t
annaaaattagaggaaaattacttangagaggatcgcatcaccatcaccatcacggtatcctatttaggtgacactatataatcgtcgacccacgcgtccgccggcgccatggtggagaaggaggaggctggcggcggcattagcgaggaggaggcggcacagtatgaccggcagatccgcctgtggggactggaggcccagaaacggctgcgggcctctcgggtgcttcttgtcggcttgaaaggacttggggctgaaattgccaagaatctcatcttggcaggagtgaaaggactgaccatgctggatcacgaacaggtaactccagaagatcccggagctcagttcttgattcgtactgggtctgttggccgaaatagggctgaagcctctttggagcgagctcagaatctcaaccccatggtggatgtgaaggtggacactgaggatatagagaagaaaccagagtcatttttcactcaattcgatgctgtgtgtctgacttgctgctccagggatgtcatagttaaagttgaccagatctgtcacaaaaatagcatcaagttctttacaggagatgtttttggctaccatggatacacatttgccaatctaggagagcatgagtttgtagaggagaaaactaaagttgccaaagttagccaaggagtagaagatgggcccgacaccaagagagcaaaacttgattcttctgagacaacgatggtcaaaaagaaggtggtcttctgccctgttaaagaagccctggaggtggactggagcagtgagaaagcaaaggctgctctgaagcgcacgacctccgactactttctccttcaagtgctctttaaagttccgtacagataaaaggaanaagatcccagttctgatacatatgaaggaanattctgaagttgttgctccanataccaaaatgatgtgcttgactccctggggttattaatcctgaacctgccttcctgaagganttttgtccanggaactgccttctcccaaaaatgncccccaatttttttgccgntggntttggaagggaattttgggcacagggaaaattgntnaangccccttgttctttaaccgggaacccncccccaaaaaaaaattttttnntttttttnaaanggnntnnaaggggnaaatggaaatttgggnaagtgccctttngcccccncagg

SEQ ID NO: 751 - DNA, 1414 bp, Homo Sapiens
  misc_feature (677)..(677): n is a, c, g, or t
  misc_feature (782)..(782): n is a, c, g, or t
  misc_feature (811)..(811): n is a, c, g, or t
  misc_feature (839)..(839): n is a, c, g, or t
  misc_feature (845)..(845): n is a, c, g, or t
  misc_feature (849)..(849): n is a, c, g, or t
  misc_feature (870)..(870): n is a, c, g, or t
  misc_feature (878)..(878): n is a, c, g, or t
  misc_feature (883)..(883): n is a, c, g, or t
  misc_feature (910)..(910): n is a, c, g, or t
  misc_feature (913)..(913): n is a, c, g, or t
  misc_feature (917)..(917): n is a, c, g, or t
  misc_feature (919)..(919): n is a, c, g, or t
  misc_feature (953)..(953): n is a, c, g, or t
  misc_feature (978)..(978): n is a, c, g, or t
  misc_feature (994)..(994): n is a, c, g, or t
  misc_feature (1000)..(1000): n is a, c, g, or t
  misc_feature (1011)..(1011): n is a, c, g, or t
  misc_feature (1014)..(1014): n is a, c, g, or t
  misc_feature (1017)..(1017): n is a, c, g, or t
  misc_feature (1024)..(1025): n is a, c, g, or t
  misc_feature (1027)..(1027): n is a, c, g, or t
  misc_feature (1033)..(1033): n is a, c, g, or t
  misc_feature (1050)..(1052): n is a, c, g, or t
  misc_feature (1069)..(1069): n is a, c, g, or t
  misc_feature (1077)..(1078): n is a, c, g, or t
  misc_feature (1091)..(1092): n is a, c, g, or t
  misc_feature (1096)..(1096): n is a, c, g, or t
  misc_feature (1110)..(1110): n is a, c, g, or t
  misc_feature (1119)..(1119): n is a, c, g, or t
  misc_feature (1129)..(1129): n is a, c, g, or t
  misc_feature (1131)..(1131): n is a, c, g, or t
  misc_feature (1134)..(1135): n is a, c, g, or t
  misc_feature (1138)..(1138): n is a, c, g, or t
  misc_feature (1154)..(1154): n is a, c, g, or t
  misc_feature (1156)..(1156): n is a, c, g, or t
  misc_feature (1158)..(1158): n is a, c, g, or t
  misc_feature (1172)..(1172): n is a, c, g, or t
  misc_feature (1199)..(1200): n is a, c, g, or t
  misc_feature (1204)..(1204): n is a, c, g, or t
  misc_feature (1222)..(1222): n is a, c, g, or t
  misc_feature (1226)..(1227): n is a, c, g, or t
  misc_feature (1233)..(1233): n is a, c, g, or t
  misc_feature (1237)..(1237): n is a, c, g, or t
  misc_feature (1239)..(1239): n is a, c, g, or t
  misc_feature (1241)..(1241): n is a, c, g, or t
  misc_feature (1246)..(1246): n is a, c, g, or t
  misc_feature (1250)..(1250): n is a, c, g, or t
  misc_feature (1254)..(1254): n is a, c, g, or t
  misc_feature (1266)..(1267): n is a, c, g, or t
  misc_feature (1273)..(1273): n is a, c, g, or t
  misc_feature (1292)..(1292): n is a, c, g, or t
  misc_feature (1300)..(1300): n is a, c, g, or t
  misc_feature (1312)..(1312): n is a, c, g, or t
  misc_feature (1346)..(1346): n is a, c, g, or t
  misc_feature (1363)..(1363): n is a, c, g, or t
  misc_feature (1365)..(1365): n is a, c, g, or t
  misc_feature (1376)..(1376): n is a, c, g, or t
  misc_feature (1379)..(1379): n is a, c, g, or t
  misc_feature (1382)..(1382): n is a, c, g, or t
  misc_feature (1384)..(1384): n is a, c, g, or t
  misc_feature (1386)..(1386): n is a, c, g, or t
  misc_feature (1392)..(1392): n is a, c, g, or t
  misc_feature (1394)..(1394): n is a, c, g, or t
  misc_feature (1397)..(1397): n is a, c, g, or t
  misc_feature (1400)..(1400): n is a, c, g, or t
atagagaaattactatgagaggatcgcatcaccatcaccatcacggatcctatttaggtgacactatagaatcgtcgacccacgcgtccggctgtggaagccaggcgcacaggatgcaagcagccaggcccagggaggcagcagctgcatcctcagagaggaagccaggatgccccactctgctgggggtactgcaggggtggggctggaggctgcagagcccacagccctgctcaccagggcagagcccccttcagaacccacagagatccgtccacaaaagcggaaaaaggggccagcccccaaaatgctggggaacgagctatgcagcgtgtgtggggacaaggcctcgggcttccactacaatgttctgagctgcgagggctgcaagggattcttccgccgcagcgtcatcaagggagcgcactacatctgccacagtggcggccactgccccatggacacctacatgcgtcgcaagtgccaggagtgtcggcttcgcaaatgccgtcaggctggcatgcgggaggagtgtgtcctgtcagaagaacagatccgcctgaagaaactgaagcggcaagaggaggaacaggctcatgccacatccttgccccccagggcttcctcacccccccaaatcctgccccagctcagcccggaacaactgggcatgatcnagaagctcgtcgctgcccagcaacagtgtaaccggcgctccttttctgaccggcttcgagtcacgccttggcccatggcaccagatccccatagccgggaggccngtcagcagcgctttgcccacttcactganctggccatcgtctctgtgcaggaaatantttgantttnctaaaaagctacccggctttntgcaactnaaccnggaagaacaaaattgcccctgcttaanaantctncnattcaaggtggctggaaaaaggcaagggattaanggaaaaacaaaatgggaattttttntggggaggggccttcnaaaatncaagcttgggnaanccnaaatttnntnggaaancaaggaataaaaaaaannngccctcctttaaaaaangcattttnncaaaaaaaacccnnctanttccccttttaaanttttcctcnttttttccangnaannttntgaaaaatttccgaanananaaccttgggaatanaaattaccctttctaaggatttttttnnaccnggaaaaattttcaaaaangttnntttttncccnantnaaaangggngttnaaatatggtaannaccccnacttttgggtaaaaattcntttaaaanggggaaaaaggnaaccccccccctaaaaaaaattttttttttttanaaaatttttttcccccngnaaaaaaaaaanttnccncncncccccnanaanatncctccccaaaagaa

SEQ ID NO: 752 - DNA, 1200 bp, Homo Sapiens
  misc_feature (1)..(1): n is a, c, g, or t
  misc_feature (3)..(3): n is a, c, g, or t
  misc_feature (485)..(485): n is a, c, g, or t
  misc_feature (494)..(494): n is a, c, g, or t
  misc_feature (497)..(497): n is a, c, g, or t
  misc_feature (505)..(508): n is a, c, g, or t
  misc_feature (510)..(510): n is a, c, g, or t
  misc_feature (512)..(512): n is a, c, g, or t
  misc_feature (515)..(517): n is a, c, g, or t
  misc_feature (519)..(520): n is a, c, g, or t
  misc_feature (522)..(522): n is a, c, g, or t
  misc_feature (524)..(524): n is a, c, g, or t
  misc_feature (529)..(529): n is a, c, g, or t
  misc_feature (531)..(531): n is a, c, g, or t
  misc_feature (536)..(538): n is a, c, g, or t
  misc_feature (546)..(546): n is a, c, g, or t
  misc_feature (550)..(550): n is a, c, g, or t
  misc_feature (554)..(554): n is a, c, g, or t
  misc_feature (565)..(565): n is a, c, g, or t
  misc_feature (570)..(570): n is a, c, g, or t
  misc_feature (572)..(573): n is a, c, g, or t
  misc_feature (575)..(575): n is a, c, g, or t
  misc_feature (589)..(592): n is a, c, g, or t
  misc_feature (594)..(594): n is a, c, g, or t
  misc_feature (596)..(597): n is a, c, g, or t
  misc_feature (602)..(602): n is a, c, g, or t
  misc_feature (606)..(606): n is a, c, g, or t
  misc_feature (616)..(616): n is a, c, g, or t
  misc_feature (620)..(620): n is a, c, g, or t
  misc_feature (627)..(627): n is a, c, g, or t
  misc_feature (631)..(631): n is a, c, g, or t
  misc_feature (637)..(637): n is a, c, g, or t
  misc_feature (640)..(640): n is a, c, g, or t
  misc_feature (643)..(643): n is a, c, g, or t
  misc_feature (649)..(649): n is a, c, g, or t
  misc_feature (653)..(653): n is a, c, g, or t
  misc_feature (658)..(658): n is a, c, g, or t
  misc_feature (660)..(660): n is a, c, g, or t
  misc_feature (662)..(662): n is a, c, g, or t
  misc_feature (666)..(666): n is a, c, g, or t
  misc_feature (668)..(669): n is a, c, g, or t
  misc_feature (681)..(681): n is a, c, g, or t
  misc_feature (685)..(685): n is a, c, g, or t
  misc_feature (688)..(688): n is a, c, g, or t
  misc_feature (698)..(698): n is a, c, g, or t
  misc_feature (701)..(702): n is a, c, g, or t
  misc_feature (712)..(712): n is a, c, g, or t
  misc_feature (717)..(722): n is a, c, g, or t
  misc_feature (731)..(731): n is a, c, g, or t
  misc_feature (736)..(736): n is a, c, g, or t
  misc_feature (738)..(738): n is a, c, g, or t
  misc_feature (741)..(741): n is a, c, g, or t
  misc_feature (746)..(752): n is a, c, g, or t
  misc_feature (754)..(754): n is a, c, g, or t
  misc_feature (756)..(756): n is a, c, g, or t
  misc_feature (758)..(760): n is a, c, g, or t
  misc_feature (763)..(763): n is a, c, g, or t
  misc_feature (766)..(766): n is a, c, g, or t
  misc_feature (768)..(768): n is a, c, g, or t
  misc_feature (783)..(785): n is a, c, g, or t
  misc_feature (788)..(788): n is a, c, g, or t
  misc_feature (790)..(791): n is a, c, g, or t
  misc_feature (795)..(796): n is a, c, g, or t
  misc_feature (799)..(799): n is a, c, g, or t
  misc_feature (804)..(804): n is a, c, g, or t
  misc_feature (808)..(808): n is a, c, g, or t
  misc_feature (812)..(813): n is a, c, g, or t
  misc_feature (822)..(824): n is a, c, g, or t
  misc_feature (829)..(830): n is a, c, g, or t
  misc_feature (839)..(840): n is a, c, g, or t
  misc_feature (846)..(847): n is a, c, g, or t
  misc_feature (850)..(850): n is a, c, g, or t
  misc_feature (864)..(866): n is a, c, g, or t
  misc_feature (872)..(876): n is a, c, g, or t
  misc_feature (882)..(882): n is a, c, g, or t
  misc_feature (892)..(892): n is a, c, g, or t
  misc_feature (896)..(898): n is a, c, g, or t
  misc_feature (908)..(915): n is a, c, g, or t
  misc_feature (917)..(921): n is a, c, g, or t
  misc_feature (924)..(925): n is a, c, g, or t
  misc_feature (929)..(929): n is a, c, g, or t
  misc_feature (935)..(935): n is a, c, g, or t
  misc_feature (950)..(950): n is a, c, g, or t
  misc_feature (962)..(963): n is a, c, g, or t
  misc_feature (965)..(965): n is a, c, g, or t
  misc_feature (986)..(991): n is a, c, g, or t
  misc_feature (994)..(994): n is a, c, g, or t
  misc_feature (996)..(996): n is a, c, g, or t
  misc_feature (1006)..(1006): n is a, c, g, or t
  misc_feature (1008)..(1009): n is a, c, g, or t
  misc_feature (1014)..(1014): n is a, c, g, or t
  misc_feature (1019)..(1020): n is a, c, g, or t
  misc_feature (1024)..(1025): n is a, c, g, or t
  misc_feature (1030)..(1030): n is a, c, g, or t
  misc_feature (1034)..(1034): n is a, c, g, or t
  misc_feature (1039)..(1039): n is a, c, g, or t
  misc_feature (1042)..(1042): n is a, c, g, or t
  misc_feature (1044)..(1044): n is a, c, g, or t
  misc_feature (1049)..(1050): n is a, c, g, or t
  misc_feature (1058)..(1059): n is a, c, g, or t
  misc_feature (1061)..(1061): n is a, c, g, or t
  misc_feature (1063)..(1064): n is a, c, g, or t
  misc_feature (1072)..(1072): n is a, c, g, or t
  misc_feature (1074)..(1079): n is a, c, g, or t
  misc_feature (1081)..(1081): n is a, c, g, or t
  misc_feature (1087)..(1087): n is a, c, g, or t
  misc_feature (1090)..(1090): n is a, c, g, or t
  misc_feature (1093)..(1093): n is a, c, g, or t
  misc_feature (1099)..(1099): n is a, c, g, or t
  misc_feature (1101)..(1102): n is a, c, g, or t
  misc_feature (1120)..(1121): n is a, c, g, or t
  misc_feature (1125)..(1127): n is a, c, g, or t
  misc_feature (1132)..(1132): n is a, c, g, or t
  misc_feature (1137)..(1137): n is a, c, g, or t
  misc_feature (1154)..(1154): n is a, c, g, or t
  misc_feature (1156)..(1156): n is a, c, g, or t
  misc_feature (1159)..(1160): n is a, c, g, or t
  misc_feature (1164)..(1164): n is a, c, g, or t
  misc_feature (1170)..(1172): n is a, c, g, or t
  misc_feature (1176)..(1176): n is a, c, g, or t
  misc_feature (1181)..(1181): n is a, c, g, or t
  misc_feature (1187)..(1187): n is a, c, g, or t
  misc_feature (1193)..(1193): n is a, c, g, or t
  misc_feature (1195)..(1195): n is a, c, g, or t
  misc_feature (1200)..(1200): n is a, c, g, or t
nantagagaaattactatgagaggatcgcatcaccatcaccatcacggatcctatttaggtgacactatagaatcgtcgacccacgcgtccgaccgcggggaggctcacctcgagctgaacgccttccgcaggaagcatgattgtgccctggtcatctcgggagacttcctggaggtttgcctcaagtactatgagtacgagttcatggagctggcctgccagtgcccggccgtagtctgctgccgatgtgcccccacccagaaggcccagatcgtgcgcctgcttcaggagcgcacgggcaagctcacctgtgcactcagtaaaacgcagtgattcaaaaaaaaaaaaaaaaaaaaaaaaaaaaaaaaaaaaaaaaaaaaaaaaaaaaaaaaaaaaaaaaaaaaaaaaaaaaaaaaaaaaaaaaaaaaaaaaaaaaaaaaaaaaaaaaaaaaaaaaaaaaaaaaaaaaaaaaaaaagggggggnccccccccnaangggggccnnnntnanttnnntnncngnacttngnccccnnnttaaaaancccnaaanggcccccaaanccccntnngntttttttaaaaacnnnngntnnccccngggntttttttttngggnaaaaccnaacntttttnggnaantttttngggntttangnantttntnngggaaaaaaaancccnggnaaaacccccnttnnaaattccccnggggnnnnnnaaaaaaaanttttngnggnttttnnnnnnntntncnnnggnccntnaaaccaaccctttcnnnggnannttcnnccnttttnaaancccnnaaaaaaatnnnccccnntttttttcnngctttnnttntttttttgcccccnnnaaaaannnnncccccnaatttttttngggnnnaaaaaaaaannnnnnnntnnnnntanntggnaaaaantttcccccttttttncccccttttttnnanaaaaaaaaaaaaatttttttnnnnnnttngnaaaaaaaaancnnaaaantttcnngggnnttttnaaanaattnttncnaaaanngggggggnntntnngaaaaaancnnnnnntnttttcnccnaanggtttntnnaaaaattttttttttttnncccnnnccccnggggnatttccccctttttttntnaanngggnccaaannnaaanttttncccccntttttncnggggn

SEQ ID NO: 753 - DNA, 1421 bp, Homo Sapiens
  misc_feature (753)..(753): n is a, c, g, or t
  misc_feature (759)..(759): n is a, c, g, or t
  misc_feature (825)..(825): n is a, c, g, or t
  misc_feature (854)..(854): n is a, c, g, or t
  misc_feature (885)..(885): n is a, c, g, or t
  misc_feature (888)..(888): n is a, c, g, or t
  misc_feature (910)..(910): n is a, c, g, or t
  misc_feature (958)..(958): n is a, c, g, or t
  misc_feature (969)..(969): n is a, c, g, or t
  misc_feature (972)..(972): n is a, c, g, or t
  misc_feature (976)..(976): n is a, c, g, or t
  misc_feature (997)..(999): n is a, c, g, or t
  misc_feature (1005)..(1005): n is a, c, g, or t
  misc_feature (1026)..(1026): n is a, c, g, or t
  misc_feature (1028)..(1028): n is a, c, g, or t
  misc_feature (1038)..(1039): n is a, c, g, or t
  misc_feature (1041)..(1041): n is a, c, g, or t
  misc_feature (1047)..(1047): n is a, c, g, or t
  misc_feature (1052)..(1052): n is a, c, g, or t
  misc_feature (1063)..(1064): n is a, c, g, or t
  misc_feature (1069)..(1069): n is a, c, g, or t
  misc_feature (1072)..(1073): n is a, c, g, or t
  misc_feature (1078)..(1078): n is a, c, g, or t
  misc_feature (1081)..(1081): n is a, c, g, or t
  misc_feature (1093)..(1093): n is a, c, g, or t
  misc_feature (1105)..(1105): n is a, c, g, or t
  misc_feature (1107)..(1108): n is a, c, g, or t
  misc_feature (1110)..(1110): n is a, c, g, or t
  misc_feature (1112)..(1113): n is a, c, g, or t
  misc_feature (1122)..(1122): n is a, c, g, or t
  misc_feature (1127)..(1127): n is a, c, g, or t
  misc_feature (1132)..(1132): n is a, c, g, or t
  misc_feature (1139)..(1140): n is a, c, g, or t
  misc_feature (1142)..(1142): n is a, c, g, or t
  misc_feature (1155)..(1155): n is a, c, g, or t
  misc_feature (1165)..(1165): n is a, c, g, or t
  misc_feature (1171)..(1171): n is a, c, g, or t
  misc_feature (1174)..(1174): n is a, c, g, or t
  misc_feature (1188)..(1188): n is a, c, g, or t
  misc_feature (1192)..(1192): n is a, c, g, or t
  misc_feature (1195)..(1195): n is a, c, g, or t
  misc_feature (1211)..(1211): n is a, c, g, or t
  misc_feature (1216)..(1216): n is a, c, g, or t
  misc_feature (1223)..(1223): n is a, c, g, or t
  misc_feature (1234)..(1234): n is a, c, g, or t
  misc_feature (1247)..(1247): n is a, c, g, or t
  misc_feature (1250)..(1252): n is a, c, g, or t
  misc_feature (1256)..(1257): n is a, c, g, or t
  misc_feature (1261)..(1262): n is a, c, g, or t
  misc_feature (1267)..(1269): n is a, c, g, or t
  misc_feature (1272)..(1272): n is a, c, g, or t
  misc_feature (1274)..(1274): n is a, c, g, or t
  misc_feature (1276)..(1276): n is a, c, g, or t
  misc_feature (1278)..(1278): n is a, c, g, or t
  misc_feature (1281)..(1281): n is a, c, g, or t
  misc_feature (1284)..(1284): n is a, c, g, or t
  misc_feature (1287)..(1287): n is a, c, g, or t
  misc_feature (1290)..(1290): n is a, c, g, or t
  misc_feature (1299)..(1299): n is a, c, g, or t
  misc_feature (1301)..(1302): n is a, c, g, or t
  misc_feature (1306)..(1306): n is a, c, g, or t
  misc_feature (1308)..(1309): n is a, c, g, or t
  misc_feature (1317)..(1317): n is a, c, g, or t
  misc_feature (1325)..(1325): n is a, c, g, or t
  misc_feature (1340)..(1340): n is a, c, g, or t
  misc_feature (1350)..(1350): n is a, c, g, or t
  misc_feature (1353)..(1353): n is a, c, g, or t
  misc_feature (1363)..(1363): n is a, c, g, or t
  misc_feature (1374)..(1374): n is a, c, g, or t
  misc_feature (1384)..(1386): n is a, c, g, or t
  misc_feature (1402)..(1402): n is a, c, g, or t
  misc_feature (1405)..(1405): n is a, c, g, or t
  misc_feature (1410)..(1410): n is a, c, g, or t
  misc_feature (1419)..(1419): n is a, c, g, or t
aatagagagattactatgagaggatcgcatcaccatcaccatcacggatcctatttaggtgacactatagaatcgtcgacccacgcgtccgggcggacgcagggcaggatgtacacgctgctgtcgggcttgtacaagtacatgtttcagaaggacgagtactgcatcctgatcctgggcctggacaatgctgggaagacgaccttcctggagcagtcgaaaacccgatttaacaagaactacaaggggatgagtctatccaaaatcaccaccaccgtgggcctaaacatcggcactgtggatgtgggaaaggctcggctcatgttctgggacttaggagggcaggaagagctgcagtctttgtgggacaagtattatgcggagtgtcacggcgtcatctacgtcattgactccaccgacgaggagaggctggctgagtccaagcaggcgtttgagaaggtggtgaccagcgaggcgctgtgcggtgtccccgtcttggtgctggccaacaagcaggatgtggagacgtgcctctcaatccctgacatcaagacggccttcagcgactgcaccagcaagatcggcaggcgagattgcctgacccaggcctgctcggccctcacaggcaaaggggtgcgcgagggcatcgagtggatggtgaagtgtgtcgtgcggaatgtgcaccggccgccgcggcagagggacatcacgtaggcgcagccgcgctgccgtcgggacggctggtccccctgntgctgnaggagtggcctcctgttggctcccatgctgctgatctgggggggtgggtttgctttgctttggggnttctcctatttactttggtttccccgaanacaaactttcctctatgtctgaaaaaccgtnagncatccggaggctttggaagggnagtctggcaacccgggctggcccaaggccctgcaagcggcagcctttnccacaagggcncanccgncggcctttccaaggccctttnnngggggntctgaaggaaaacctggtttngnaattgggggnncnagtgcnccagnttggcttgggnntgcanaannaaaanccnttgggaacctcnggaaaacccctngnntntnntcccccccntccangaaanaagcccnncnaccaggggtgccntctgggtttnggcccnggnaaccccggaacccngaanccngaaaagggtctgggcnttatnttccttngaaaaacccancccttttcccaangcnnngggnnccgnntttannnccncngnanagnttnaanctnggggaaaantnncccncnnggggtttncccccctncccgagagaaaaaanaaaaaaaagnccnggagtttttntcccccccatnaggtttgggnnncccccccaaaaaaccnagnttttnccccccccnaa

SEQ ID NO: 754 - DNA, 1731 bp, Homo Sapiens
  misc_feature (1)..(1): n is a, c, g, or t
  misc_feature (3)..(3): n is a, c, g, or t
  misc_feature (6)..(7): n is a, c, g, or t
  misc_feature (18)..(18): n is a, c, g, or t
  misc_feature (22)..(23): n is a, c, g, or t
  misc_feature (27)..(27): n is a, c, g, or t
  misc_feature (30)..(31): n is a, c, g, or t
  misc_feature (34)..(34): n is a, c, g, or t
  misc_feature (37)..(37): n is a, c, g, or t
  misc_feature (44)..(44): n is a, c, g, or t
  misc_feature (47)..(47): n is a, c, g, or t
  misc_feature (50)..(50): n is a, c, g, or t
  misc_feature (54)..(54): n is a, c, g, or t
  misc_feature (64)..(64): n is a, c, g, or t
  misc_feature (67)..(67): n is a, c, g, or t
  misc_feature (73)..(73): n is a, c, g, or t
  misc_feature (80)..(81): n is a, c, g, or t
  misc_feature (103)..(103): n is a, c, g, or t
  misc_feature (113)..(114): n is a, c, g, or t
  misc_feature (119)..(119): n is a, c, g, or t
  misc_feature (127)..(128): n is a, c, g, or t
  misc_feature (136)..(137): n is a, c, g, or t
  misc_feature (139)..(139): n is a, c, g, or t
  misc_feature (146)..(146): n is a, c, g, or t
  misc_feature (151)..(151): n is a, c, g, or t
  misc_feature (156)..(156): n is a, c, g, or t
  misc_feature (163)..(164): n is a, c, g, or t
  misc_feature (167)..(167): n is a, c, g, or t
  misc_feature (171)..(172): n is a, c, g, or t
  misc_feature (181)..(183): n is a, c, g, or t
  misc_feature (192)..(192): n is a, c, g, or t
  misc_feature (199)..(199): n is a, c, g, or t
  misc_feature (201)..(201): n is a, c, g, or t
  misc_feature (204)..(204): n is a, c, g, or t
  misc_feature (216)..(216): n is a, c, g, or t
  misc_feature (219)..(219): n is a, c, g, or t
  misc_feature (225)..(225): n is a, c, g, or t
  misc_feature (228)..(228): n is a, c, g, or t
  misc_feature (230)..(230): n is a, c, g, or t
  misc_feature (241)..(242): n is a, c, g, or t
  misc_feature (247)..(247): n is a, c, g, or t
  misc_feature (251)..(251): n is a, c, g, or t
  misc_feature (258)..(259): n is a, c, g, or t
  misc_feature (264)..(264): n is a, c, g, or t
  misc_feature (279)..(279): n is a, c, g, or t
  misc_feature (289)..(289): n is a, c, g, or t
  misc_feature (294)..(295): n is a, c, g, or t
  misc_feature (304)..(304): n is a, c, g, or t
  misc_feature (307)..(307): n is a, c, g, or t
  misc_feature (310)..(312): n is a, c, g, or t
  misc_feature (314)..(314): n is a, c, g, or t
  misc_feature (318)..(318): n is a, c, g, or t
  misc_feature (330)..(330): n is a, c, g, or t
  misc_feature (333)..(334): n is a, c, g, or t
  misc_feature (337)..(337): n is a, c, g, or t
  misc_feature (341)..(341): n is a, c, g, or t
  misc_feature (345)..(345): n is a, c, g, or t
  misc_feature (350)..(351): n is a, c, g, or t
  misc_feature (355)..(356): n is a, c, g, or t
  misc_feature (361)..(363): n is a, c, g, or t
  misc_feature (366)..(366): n is a, c, g, or t
  misc_feature (378)..(378): n is a, c, g, or t
  misc_feature (383)..(383): n is a, c, g, or t
  misc_feature (385)..(385): n is a, c, g, or t
  misc_feature (387)..(387): n is a, c, g, or t
  misc_feature (393)..(394): n is a, c, g, or t
  misc_feature (399)..(399): n is a, c, g, or t
  misc_feature (401)..(401): n is a, c, g, or t
  misc_feature (406)..(406): n is a, c, g, or t
  misc_feature (414)..(415): n is a, c, g, or t
  misc_feature (420)..(422): n is a, c, g, or t
  misc_feature (424)..(425): n is a, c, g, or t
  misc_feature (427)..(427): n is a, c, g, or t
  misc_feature (434)..(435): n is a, c, g, or t
  misc_feature (438)..(438): n is a, c, g, or t
  misc_feature (441)..(441): n is a, c, g, or t
  misc_feature (443)..(443): n is a, c, g, or t
  misc_feature (445)..(445): n is a, c, g, or t
  misc_feature (450)..(450): n is a, c, g, or t
  misc_feature (454)..(456): n is a, c, g, or t
  misc_feature (459)..(459): n is a, c, g, or t
  misc_feature (475)..(475): n is a, c, g, or t
  misc_feature (478)..(478): n is a, c, g, or t
  misc_feature (480)..(480): n is a, c, g, or t
  misc_feature (483)..(483): n is a, c, g, or t
  misc_feature (488)..(488): n is a, c, g, or t
  misc_feature (490)..(490): n is a, c, g, or t
  misc_feature (492)..(493): n is a, c, g, or t
  misc_feature (496)..(496): n is a, c, g, or t
  misc_feature (500)..(500): n is a, c, g, or t
  misc_feature (506)..(506): n is a, c, g, or t
  misc_feature (519)..(519): n is a, c, g, or t
  misc_feature (521)..(521): n is a, c, g, or t
  misc_feature (525)..(525): n is a, c, g, or t
  misc_feature (527)..(528): n is a, c, g, or t
  misc_feature (533)..(533): n is a, c, g, or t
  misc_feature (537)..(538): n is a, c, g, or t
  misc_feature (540)..(540): n is a, c, g, or t
  misc_feature (542)..(543): n is a, c, g, or t
  misc_feature (550)..(550): n is a, c, g, or t
  misc_feature (552)..(552): n is a, c, g, or t
  misc_feature (558)..(560): n is a, c, g, or t
  misc_feature (562)..(562): n is a, c, g, or t
  misc_feature (570)..(570): n is a, c, g, or t
  misc_feature (575)..(576): n is a, c, g, or t
  misc_feature (578)..(579): n is a, c, g, or t
  misc_feature (587)..(587): n is a, c, g, or t
  misc_feature (589)..(589): n is a, c, g, or t
  misc_feature (594)..(594): n is a, c, g, or t
  misc_feature (598)..(598): n is a, c, g, or t
  misc_feature (602)..(602): n is a, c, g, or t
  misc_feature (611)..(611): n is a, c, g, or t
  misc_feature (614)..(615): n is a, c, g, or t
  misc_feature (620)..(621): n is a, c, g, or t
  misc_feature (625)..(625): n is a, c, g, or t
  misc_feature (629)..(631): n is a, c, g, or t
  misc_feature (635)..(637): n is a, c, g, or t
  misc_feature (640)..(640): n is a, c, g, or t
  misc_feature (643)..(643): n is a, c, g, or t
  misc_feature (652)..(652): n is a, c, g, or t
  misc_feature (654)..(654): n is a, c, g, or t
  misc_feature (656)..(656): n is a, c, g, or t
  misc_feature (658)..(658): n is a, c, g, or t
  misc_feature (661)..(661): n is a, c, g, or t
  misc_feature (663)..(663): n is a, c, g, or t
  misc_feature (667)..(667): n is a, c, g, or t
  misc_feature (669)..(669): n is a, c, g, or t
  misc_feature (671)..(672): n is a, c, g, or t
  misc_feature (675)..(675): n is a, c, g, or t
  misc_feature (678)..(679): n is a, c, g, or t
  misc_feature (681)..(681): n is a, c, g, or t
  misc_feature (684)..(684): n is a, c, g, or t
  misc_feature (691)..(692): n is a, c, g, or t
  misc_feature (695)..(695): n is a, c, g, or t
  misc_feature (699)..(699): n is a, c, g, or t
  misc_feature (706)..(707): n is a, c, g, or t
  misc_feature (710)..(711): n is a, c, g, or t
  misc_feature (717)..(718): n is a, c, g, or t
  misc_feature (724)..(724): n is a, c, g, or t
  misc_feature (727)..(727): n is a, c, g, or t
  misc_feature (730)..(731): n is a, c, g, or t
  misc_feature (733)..(733): n is a, c, g, or t
  misc_feature (738)..(738): n is a, c, g, or t
  misc_feature (742)..(742): n is a, c, g, or t
  misc_feature (752)..(752): n is a, c, g, or t
  misc_feature (758)..(758): n is a, c, g, or t
  misc_feature (775)..(775): n is a, c, g, or t
  misc_feature (777)..(777): n is a, c, g, or t
  misc_feature (780)..(781): n is a, c, g, or t
  misc_feature (785)..(785): n is a, c, g, or t
  misc_feature (790)..(790): n is a, c, g, or t
  misc_feature (795)..(797): n is a, c, g, or t
  misc_feature (800)..(801): n is a, c, g, or t
  misc_feature (806)..(806): n is a, c, g, or t
  misc_feature (809)..(809): n is a, c, g, or t
  misc_feature (812)..(812): n is a, c, g, or t
  misc_feature (817)..(817): n is a, c, g, or t
  misc_feature (819)..(819): n is a, c, g, or t
  misc_feature (825)..(826): n is a, c, g, or t
  misc_feature (829)..(831): n is a, c, g, or t
  misc_feature (834)..(834): n is a, c, g, or t
  misc_feature (845)..(845): n is a, c, g, or t
  misc_feature (848)..(850): n is a, c, g, or t
  misc_feature (853)..(853): n is a, c, g, or t
  misc_feature (856)..(859): n is a, c, g, or t
  misc_feature (863)..(863): n is a, c, g, or t
  misc_feature (866)..(868): n is a, c, g, or t
  misc_feature (870)..(870): n is a, c, g, or t
  misc_feature (873)..(873): n is a, c, g, or t
  misc_feature (875)..(875): n is a, c, g, or t
  misc_feature (882)..(882): n is a, c, g, or t
  misc_feature (884)..(884): n is a, c, g, or t
  misc_feature (893)..(893): n is a, c, g, or t
  misc_feature (899)..(900): n is a, c, g, or t
  misc_feature (904)..(904): n is a, c, g, or t
  misc_feature (907)..(907): n is a, c, g, or t
  misc_feature (912)..(915): n is a, c, g, or t
  misc_feature (926)..(926): n is a, c, g, or t
  misc_feature (932)..(935): n is a, c, g, or t
  misc_feature (938)..(939): n is a, c, g, or t
  misc_feature (942)..(943): n is a, c, g, or t
  misc_feature (945)..(947): n is a, c, g, or t
  misc_feature (950)..(952): n is a, c, g, or t
  misc_feature (954)..(954): n is a, c, g, or t
  misc_feature (962)..(962): n is a, c, g, or t
  misc_feature (967)..(967): n is a, c, g, or t
  misc_feature (970)..(973): n is a, c, g, or t
  misc_feature (975)..(976): n is a, c, g, or t
  misc_feature (978)..(978): n is a, c, g, or t
  misc_feature (980)..(980): n is a, c, g, or t
  misc_feature (984)..(987): n is a, c, g, or t
  misc_feature (991)..(994): n is a, c, g, or t
  misc_feature (996)..(996): n is a, c, g, or t
  misc_feature (1001)..(1002): n is a, c, g, or t
  misc_feature (1013)..(1014): n is a, c, g, or t
  misc_feature (1016)..(1016): n is a, c, g, or t
  misc_feature (1019)..(1019): n is a, c, g, or t
  misc_feature (1021)..(1022): n is a, c, g, or t
  misc_feature (1025)..(1025): n is a, c, g, or t
  misc_feature (1027)..(1027): n is a, c, g, or t
  misc_feature (1030)..(1030): n is a, c, g, or t
  misc_feature (1033)..(1035): n is a, c, g, or t
  misc_feature (1046)..(1046): n is a, c, g, or t
  misc_feature (1051)..(1051): n is a, c, g, or t
  misc_feature (1054)..(1054): n is a, c, g, or t
  misc_feature (1056)..(1058): n is a, c, g, or t
  misc_feature (1061)..(1063): n is a, c, g, or t
  misc_feature (1065)..(1066): n is a, c, g, or t
  misc_feature (1069)..(1069): n is a, c, g, or t
  misc_feature (1076)..(1076): n is a, c, g, or t
  misc_feature (1085)..(1085): n is a, c, g, or t
  misc_feature (1087)..(1087): n is a, c, g, or t
  misc_feature (1092)..(1092): n is a, c, g, or t
  misc_feature (1098)..(1100): n is a, c, g, or t
  misc_feature (1104)..(1104): n is a, c, g, or t
  misc_feature (1108)..(1109): n is a, c, g, or t
  misc_feature (1115)..(1115): n is a, c, g, or t
  misc_feature (1117)..(1117): n is a, c, g, or t
  misc_feature (1119)..(1120): n is a, c, g, or t
  misc_feature (1123)..(1123): n is a, c, g, or t
  misc_feature (1127)..(1129): n is a, c, g, or t
  misc_feature (1131)..(1131): n is a, c, g, or t
  misc_feature (1135)..(1135): n is a, c, g, or t
  misc_feature (1142)..(1146): n is a, c, g, or t
  misc_feature (1148)..(1149): n is a, c, g, or t
  misc_feature (1152)..(1152): n is a, c, g, or t
  misc_feature (1154)..(1157): n is a, c, g, or t
  misc_feature (1160)..(1161): n is a, c, g, or t
  misc_feature (1165)..(1165): n is a, c, g, or t
  misc_feature (1168)..(1168): n is a, c, g, or t
  misc_feature (1173)..(1173): n is a, c, g, or t
  misc_feature (1176)..(1177): n is a, c, g, or t
  misc_feature (1180)..(1181): n is a, c, g, or t
  misc_feature (1184)..(1184): n is a, c, g, or t
  misc_feature (1186)..(1186): n is a, c, g, or t
  misc_feature (1189)..(1190): n is a, c, g, or t
  misc_feature (1196)..(1196): n is a, c, g, or t
  misc_feature (1199)..(1199): n is a, c, g, or t
  misc_feature (1203)..(1203): n is a, c, g, or t
  misc_feature (1205)..(1205): n is a, c, g, or t
  misc_feature (1207)..(1209): n is a, c, g, or t
  misc_feature (1213)..(1214): n is a, c, g, or t
  misc_feature (1220)..(1221): n is a, c, g, or t
  misc_feature (1224)..(1224): n is a, c, g, or t
  misc_feature (1226)..(1226): n is a, c, g, or t
  misc_feature (1232)..(1232): n is a, c, g, or t
  misc_feature (1237)..(1238): n is a, c, g, or t
  misc_feature (1240)..(1240): n is a, c, g, or t
  misc_feature (1242)..(1242): n is a, c, g, or t
  misc_feature (1245)..(1245): n is a, c, g, or t
  misc_feature (1247)..(1247): n is a, c, g, or t
  misc_feature (1249)..(1249): n is a, c, g, or t
  misc_feature (1251)..(1253): n is a, c, g, or t
  misc_feature (1256)..(1256): n is a, c, g, or t
  misc_feature (1258)..(1260): n is a, c, g, or t
  misc_feature (1263)..(1263): n is a, c, g, or t
  misc_feature (1267)..(1270): n is a, c, g, or t
  misc_feature (1273)..(1273): n is a, c, g, or t
  misc_feature (1276)..(1278): n is a, c, g, or t
  misc_feature (1287)..(1288): n is a, c, g, or t
  misc_feature (1292)..(1292): n is a, c, g, or t
  misc_feature (1294)..(1295): n is a, c, g, or t
  misc_feature (1298)..(1299): n is a, c, g, or t
  misc_feature (1301)..(1302): n is a, c, g, or t
  misc_feature (1307)..(1307): n is a, c, g, or t
  misc_feature (1318)..(1319): n is a, c, g, or t
  misc_feature (1321)..(1321): n is a, c, g, or t
  misc_feature (1323)..(1323): n is a, c, g, or t
  misc_feature (1328)..(1330): n is a, c, g, or t
  misc_feature (1333)..(1333): n is a, c, g, or t
  misc_feature (1345)..(1345): n is a, c, g, or t
  misc_feature (1347)..(1347): n is a, c, g, or t
  misc_feature (1351)..(1352): n is a, c, g, or t
  misc_feature (1361)..(1361): n is a, c, g, or t
  misc_feature (1365)..(1365): n is a, c, g, or t
  misc_feature (1369)..(1370): n is a, c, g, or t
  misc_feature (1377)..(1377): n is a, c, g, or t
  misc_feature (1393)..(1394): n is a, c, g, or t
  misc_feature (1396)..(1400): n is a, c, g, or t
  misc_feature (1402)..(1404): n is a, c, g, or t
  misc_feature (1406)..(1406): n is a, c, g, or t
  misc_feature (1415)..(1415): n is a, c, g, or t
  misc_feature (1421)..(1421): n is a, c, g, or t
  misc_feature (1429)..(1429): n is a, c, g, or t
  misc_feature (1435)..(1435): n is a, c, g, or t
  misc_feature (1437)..(1437): n is a, c, g, or t
  misc_feature (1439)..(1439): n is a, c, g, or t
  misc_feature (1445)..(1445): n is a, c, g, or t
  misc_feature (1447)..(1447): n is a, c, g, or t
  misc_feature (1449)..(1449): n is a, c, g, or t
  misc_feature (1452)..(1452): n is a, c, g, or t
  misc_feature (1454)..(1454): n is a, c, g, or t
  misc_feature (1456)..(1456): n is a, c, g, or t
  misc_feature (1466)..(1466): n is a, c, g, or t
  misc_feature (1470)..(1470): n is a, c, g, or t
  misc_feature (1480)..(1481): n is a, c, g, or t
  misc_feature (1488)..(1488): n is a, c, g, or t
  misc_feature (1491)..(1491): n is a, c, g, or t
  misc_feature (1496)..(1496): n is a, c, g, or t
  misc_feature (1498)..(1498): n is a, c, g, or t
  misc_feature (1501)..(1501): n is a, c, g, or t
  misc_feature (1503)..(1503): n is a, c, g, or t
  misc_feature (1508)..(1508): n is a, c, g, or t
  misc_feature (1517)..(1517): n is a, c, g, or t
  misc_feature (1519)..(1520): n is a, c, g, or t
  misc_feature (1523)..(1523): n is a, c, g, or t
  misc_feature (1526)..(1526): n is a, c, g, or t
  misc_feature (1529)..(1529): n is a, c, g, or t
  misc_feature (1534)..(1535): n is a, c, g, or t
  misc_feature (1539)..(1539): n is a, c, g, or t
  misc_feature (1545)..(1545): n is a, c, g, or t
  misc_feature (1550)..(1550): n is a, c, g, or t
  misc_feature (1553)..(1553): n is a, c, g, or t
  misc_feature (1555)..(1556): n is a, c, g, or t
  misc_feature (1559)..(1560): n is a, c, g, or t
  misc_feature (1563)..(1563): n is a, c, g, or t
  misc_feature (1570)..(1572): n is a, c, g, or t
  misc_feature (1576)..(1577): n is a, c, g, or t
  misc_feature (1579)..(1581): n is a, c, g, or t
  misc_feature (1591)..(1591): n is a, c, g, or t
  misc_feature (1595)..(1595): n is a, c, g, or t
  misc_feature (1602)..(1602): n is a, c, g, or t
  misc_feature (1607)..(1607): n is a, c, g, or t
  misc_feature (1612)..(1612): n is a, c, g, or t
  misc_feature (1619)..(1619): n is a, c, g, or t
  misc_feature (1625)..(1625): n is a, c, g, or t
  misc_feature (1627)..(1627): n is a, c, g, or t
  misc_feature (1632)..(1632): n is a, c, g, or t
  misc_feature (1634)..(1635): n is a, c, g, or t
  misc_feature (1641)..(1641): n is a, c, g, or t
  misc_feature (1644)..(1644): n is a, c, g, or t
  misc_feature (1650)..(1650): n is a, c, g, or t
  misc_feature (1656)..(1656): n is a, c, g, or t
  misc_feature (1658)..(1658): n is a, c, g, or t
  misc_feature (1663)..(1663): n is a, c, g, or t
  misc_feature (1667)..(1670): n is a, c, g, or t
  misc_feature (1674)..(1674): n is a, c, g, or t
  misc_feature (1677)..(1677): n is a, c, g, or t
  misc_feature (1684)..(1685): n is a, c, g, or t
  misc_feature (1688)..(1689): n is a, c, g, or t
  misc_feature (1696)..(1696): n is a, c, g, or t
  misc_feature (1699)..(1699): n is a, c, g, or t
  misc_feature (1703)..(1703): n is a, c, g, or t
  misc_feature (1708)..(1708): n is a, c, g, or t
  misc_feature (1710)..(1710): n is a, c, g, or t
  misc_feature (1718)..(1718): n is a, c, g, or t
  misc_feature (1723)..(1723): n is a, c, g, or t
  misc_feature (1726)..(1726): n is a, c, g, or t
ncnttnnggaaataattntgannggtnggnntcnccntcccctnccnggnttcntttttttggnganacaaanagaaatnntcaacccaccccgccggtgacnacatgatgtnntgccntgaaaagnngaggacannanatgatcngcgcnatganacgcgcnnccnatgnncgtgctgannnaggggatancctgatncnggngattccaggagngcngggaantcntnactcctggtcnngatanatgnggaatgnngcttntgctgagctgcaggnggcctgccantcggnngaagcttgnacnagnnngntgtnacgccgtcgtanccnncantcantttncatgnntctnnctggnnncanttcctgaagcgnatccngngnggtganncaaananatccncctgtatnnatgannngnnantggcacnncanatncntntgcancatnnntcnccggcttctttctccntgnancangtccnantnngtngggncccctnctcggcctcctcncncgcntnnatgcntctnncncnncaacacnanttgatnnngngatccagntctgnnannctccatcncngacantcanccgnagctggacnccnngtctnncccntggnnntccnnncanagngaccgatantncnanaantncccncnanntanatnntnccntgactcnngtnatcnaagggannaannaaattnncagctnccnctnncnaattncctngagtctacanggaatntcgaagcacatcgtttncnccnntttntttcncgtgnnnaannccctntcnttngtccncncgctanncgnnnatnaattgtaattncannnctnttnnnnaatnagnnnanttntnacacccntntctcccctnaagagnngccnttnacgcnnnntttaaagggtngccttnnnncgnncanntnnntgnnncnttgaactntactntcnnnncnntntnttcnnnncgannnnantatannacagtgaaatnncncantnngancnggngtnnntaataacaaanggaantcnannngtnnncnnctnttggtcncactaaaananttctntacatnnntggnacannttaggngnanncanaccnnnantctntacccannnnntnnatntnnnntgnnacantanaaatnccnntgnnagncnccnnataatnttnaacncntnnnaccnntcgtcnnatncntcctantctcnntntncantncngnnncanannnatnccannnnacngtnnnaccccaatnntcancnnganntnntcacntgtagttcatnntnangtttnnntcntagccaaaatangnctcnntcctcggtntatncttnnaacttantctggttgcacatctnncnnnnntnnntnctcatttcnctcttnagtgcacnctgcgntnantctccntnanacntntntcttaactantatntgatcatgtnnatagacncancctcntncgntnttatncgtatctcngnngtnatnatntactnnggtnatgatntcacntcnanncanngtnatctacnnnactnnannntctccacatnaagncgttacntattntatgnataactncgagantnatatntnngaatanctncatacntatttntncatcnatannnngtgntgntttctcnntgnntgacttnagnttgntacantnttcatttntaaantcnacatg

SEQ ID NO: 755 - DNA, 1393 bp, Homo Sapiens
  misc_feature (1)..(1): n is a, c, g, or t
  misc_feature (15)..(15): n is a, c, g, or t
  misc_feature (828)..(828): n is a, c, g, or t
  misc_feature (908)..(908): n is a, c, g, or t
  misc_feature (927)..(927): n is a, c, g, or t
  misc_feature (942)..(942): n is a, c, g, or t
  misc_feature (986)..(986): n is a, c, g, or t
  misc_feature (1013)..(1013): n is a, c, g, or t
  misc_feature (1016)..(1016): n is a, c, g, or t
  misc_feature (1041)..(1041): n is a, c, g, or t
  misc_feature (1052)..(1052): n is a, c, g, or t
  misc_feature (1057)..(1058): n is a, c, g, or t
  misc_feature (1061)..(1061): n is a, c, g, or t
  misc_feature (1065)..(1065): n is a, c, g, or t
  misc_feature (1073)..(1073): n is a, c, g, or t
  misc_feature (1078)..(1078): n is a, c, g, or t
  misc_feature (1088)..(1088): n is a, c, g, or t
  misc_feature (1097)..(1097): n is a, c, g, or t
  misc_feature (1109)..(1110): n is a, c, g, or t
  misc_feature (1126)..(1126): n is a, c, g, or t
  misc_feature (1128)..(1129): n is a, c, g, or t
  misc_feature (1135)..(1135): n is a, c, g, or t
  misc_feature (1140)..(1140): n is a, c, g, or t
  misc_feature (1151)..(1151): n is a, c, g, or t
  misc_feature (1155)..(1156): n is a, c, g, or t
  misc_feature (1164)..(1164): n is a, c, g, or t
  misc_feature (1166)..(1166): n is a, c, g, or t
  misc_feature (1174)..(1174): n is a, c, g, or t
  misc_feature (1185)..(1185): n is a, c, g, or t
  misc_feature (1190)..(1190): n is a, c, g, or t
  misc_feature (1193)..(1193): n is a, c, g, or t
  misc_feature (1200)..(1200): n is a, c, g, or t
  misc_feature (1209)..(1209): n is a, c, g, or t
  misc_feature (1213)..(1214): n is a, c, g, or t
  misc_feature (1220)..(1220): n is a, c, g, or t
  misc_feature (1240)..(1240): n is a, c, g, or t
  misc_feature (1249)..(1249): n is a, c, g, or t
  misc_feature (1255)..(1255): n is a, c, g, or t
  misc_feature (1259)..(1259): n is a, c, g, or t
  misc_feature (1284)..(1284): n is a, c, g, or t
  misc_feature (1286)..(1286): n is a, c, g, or t
  misc_feature (1288)..(1288): n is a, c, g, or t
  misc_feature (1310)..(1310): n is a, c, g, or t
  misc_feature (1312)..(1312): n is a, c, g, or t
  misc_feature (1320)..(1320): n is a, c, g, or t
  misc_feature (1323)..(1323): n is a, c, g, or t
  misc_feature (1325)..(1325): n is a, c, g, or t
  misc_feature (1333)..(1336): n is a, c, g, or t
  misc_feature (1338)..(1339): n is a, c, g, or t
  misc_feature (1344)..(1345): n is a, c, g, or t
  misc_feature (1347)..(1347): n is a, c, g, or t
  misc_feature (1356)..(1357): n is a, c, g, or t
  misc_feature (1362)..(1362): n is a, c, g, or t
  misc_feature (1367)..(1367): n is a, c, g, or t
  misc_feature (1370)..(1370): n is a, c, g, or t
  misc_feature (1375)..(1375): n is a, c, g, or t
  misc_feature (1380)..(1381): n is a, c, g, or t
  misc_feature (1385)..(1385): n is a, c, g, or t
  misc_feature (1388)..(1388): n is a, c, g, or t
naatagagagattanctatgagaggatcgcatcaccatcaccatcacggatcctatttaggtgacactatagaatcgtcgacccacgcgtccgggaatcgggctgattcatcgccggtttgcagactgagccgcgtcgggtgtgcgccgctgctgctgttgcctctgtcttcgcgtcaccacagaggcaagacaagggtccatatcgcggcatccggctcccgcccgtcttcaggagagaaagaaaaaataaaatatacttggggaagttgtacctgccagaattagcaagagctttctttaagaagacatttgtcaaactcaacaaattgaaggttaacaccttaagagttgtagttactgaccagaaatatggacagacttcttagacttggaggaggtatgcctggactgggccaggggccacctacagatgctcctgcagtggacacagcagaacaagtctatatctcttccctggcactgttaaaaatgttaaaacatggccgtgctggagttccaatggaagttatgggtttgatgcttggagaatttgttgatgattataccgtcagagtgattgatgtgtttgctatgccacagtcaggaacaggtgtcagtgtggaggcagttgatccagtgttccaagctaaaatgttggatatgttgaagcagacaggaaggccggagatggttgttggttggtatcacagtcaccctggctttggttgttggctttctggtgtggatatcaacactcagcagagctttgaagccttgtcggagagagctgtggcagtggttgtggatcccattcagagtgtaaaangaaaggttgttattgatgccttcagattgatcaatgctaatatgatggtcttaggacatgaaccaagacaaacaacttcnaatctgggtcacttaaacnagccatctatccagncattaattcatggactaaacagacattattactccattactatnaactatcggaaaaatgaactggaacanaanagttgctaatttgccataaaaaaantggatggaagnttgannctnccgnactacggngaacnttgtaacccnatgaatccntggtaaaaaaannttggaattacccaaantnnaaaaangctgnaaaaaaaaaanaaannaccctaancnctggcaanaaaaaagttgncaacnggnccccacncctttgganaaanngggganacttaaaacccaaatttccnggttaaccnttttgnaccncccttttaaaaccccaaacccttangngnccccgggaattcctgtgtccangncaaaaagnccntnagggtttnnnnannaaaanngncttttcccnnaaccnccccnggnaattnttttnnaggnttnaaaaa

SEQ ID NO: 756 - DNA, 1328 bp, Homo Sapiens
  misc_feature (1)..(1): n is a, c, g, or t
  misc_feature (4)..(4): n is a, c, g, or t
  misc_feature (155)..(155): n is a, c, g, or t
  misc_feature (161)..(161): n is a, c, g, or t
  misc_feature (166)..(166): n is a, c, g, or t
  misc_feature (169)..(169): n is a, c, g, or t
  misc_feature (171)..(171): n is a, c, g, or t
  misc_feature (174)..(177): n is a, c, g, or t
  misc_feature (179)..(179): n is a, c, g, or t
  misc_feature (201)..(201): n is a, c, g, or t
  misc_feature (208)..(208): n is a, c, g, or t
  misc_feature (232)..(233): n is a, c, g, or t
  misc_feature (239)..(239): n is a, c, g, or t
  misc_feature (241)..(242): n is a, c, g, or t
  misc_feature (244)..(244): n is a, c, g, or t
  misc_feature (252)..(252): n is a, c, g, or t
  misc_feature (256)..(256): n is a, c, g, or t
  misc_feature (259)..(259): n is a, c, g, or t
  misc_feature (262)..(262): n is a, c, g, or t
  misc_feature (266)..(267): n is a, c, g, or t
  misc_feature (271)..(271): n is a, c, g, or t
  misc_feature (276)..(278): n is a, c, g, or t
  misc_feature (280)..(280): n is a, c, g, or t
  misc_feature (282)..(282): n is a, c, g, or t
  misc_feature (288)..(288): n is a, c, g, or t
  misc_feature (290)..(290): n is a, c, g, or t
  misc_feature (297)..(297): n is a, c, g, or t
  misc_feature (304)..(304): n is a, c, g, or t
  misc_feature (307)..(308): n is a, c, g, or t
  misc_feature (311)..(311): n is a, c, g, or t
  misc_feature (321)..(321): n is a, c, g, or t
  misc_feature (332)..(332): n is a, c, g, or t
  misc_feature (334)..(334): n is a, c, g, or t
  misc_feature (336)..(336): n is a, c, g, or t
  misc_feature (338)..(338): n is a, c, g, or t
  misc_feature (343)..(345): n is a, c, g, or t
  misc_feature (348)..(349): n is a, c, g, or t
  misc_feature (368)..(368): n is a, c, g, or t
  misc_feature (370)..(370): n is a, c, g, or t
  misc_feature (373)..(373): n is a, c, g, or t
  misc_feature (383)..(383): n is a, c, g, or t
  misc_feature (385)..(385): n is a, c, g, or t
  misc_feature (388)..(388): n is a, c, g, or t
  misc_feature (391)..(391): n is a, c, g, or t
  misc_feature (393)..(394): n is a, c, g, or t
  misc_feature (399)..(401): n is a, c, g, or t
  misc_feature (407)..(409): n is a, c, g, or t
  misc_feature (414)..(414): n is a, c, g, or t
  misc_feature (420)..(420): n is a, c, g, or t
  misc_feature (422)..(422): n is a, c, g, or t
  misc_feature (425)..(425): n is a, c, g, or t
  misc_feature (430)..(430): n is a, c, g, or t
  misc_feature (436)..(436): n is a, c, g, or t
  misc_feature (438)..(438): n is a, c, g, or t
  misc_feature (440)..(440): n is a, c, g, or t
  misc_feature (452)..(454): n is a, c, g, or t
  misc_feature (461)..(461): n is a, c, g, or t
  misc_feature (464)..(464): n is a, c, g, or t
  misc_feature (482)..(483): n is a, c, g, or t
  misc_feature (490)..(491): n is a, c, g, or t
  misc_feature (494)..(494): n is a, c, g, or t
  misc_feature (501)..(501): n is a, c, g, or t
  misc_feature (505)..(505): n is a, c, g, or t
  misc_feature (511)..(512): n is a, c, g, or t
  misc_feature (516)..(516): n is a, c, g, or t
  misc_feature (518)..(518): n is a, c, g, or t
  misc_feature (525)..(525): n is a, c, g, or t
  misc_feature (529)..(529): n is a, c, g, or t
  misc_feature (531)..(531): n is a, c, g, or t
  misc_feature (541)..(541): n is a, c, g, or t
  misc_feature (550)..(550): n is a, c, g, or t
  misc_feature (568)..(570): n is a, c, g, or t
  misc_feature (577)..(578): n is a, c, g, or t
  misc_feature (583)..(583): n is a, c, g, or t
  misc_feature (588)..(588): n is a, c, g, or t
  misc_feature (595)..(595): n is a, c, g, or t
  misc_feature (625)..(626): n is a, c, g, or t
  misc_feature (633)..(634): n is a, c, g, or t
  misc_feature (639)..(639): n is a, c, g, or t
  misc_feature (651)..(654): n is a, c, g, or t
  misc_feature (656)..(656): n is a, c, g, or t
  misc_feature (658)..(658): n is a, c, g, or t
  misc_feature (669)..(670): n is a, c, g, or t
  misc_feature (675)..(677): n is a, c, g, or t
  misc_feature (680)..(680): n is a, c, g, or t
  misc_feature (684)..(684): n is a, c, g, or t
  misc_feature (686)..(686): n is a, c, g, or t
  misc_feature (693)..(693): n is a, c, g, or t
  misc_feature (700)..(700): n is a, c, g, or t
  misc_feature (703)..(703): n is a, c, g, or t
  misc_feature (706)..(706): n is a, c, g, or t
  misc_feature (710)..(710): n is a, c, g, or t
  misc_feature (712)..(712): n is a, c, g, or t
  misc_feature (716)..(716): n is a, c, g, or t
  misc_feature (719)..(719): n is a, c, g, or t
  misc_feature (721)..(721): n is a, c, g, or t
  misc_feature (725)..(725): n is a, c, g, or t
  misc_feature (744)..(744): n is a, c, g, or t
  misc_feature (750)..(754): n is a, c, g, or t
  misc_feature (758)..(758): n is a, c, g, or t
  misc_feature (770)..(770): n is a, c, g, or t
  misc_feature (775)..(775): n is a, c, g, or t
  misc_feature (780)..(780): n is a, c, g, or t
  misc_feature (783)..(783): n is a, c, g, or t
  misc_feature (786)..(786): n is a, c, g, or t
  misc_feature (792)..(793): n is a, c, g, or t
  misc_feature (800)..(800): n is a, c, g, or t
  misc_feature (805)..(805): n is a, c, g, or t
  misc_feature (809)..(809): n is a, c, g, or t
  misc_feature (815)..(817): n is a, c, g, or t
  misc_feature (819)..(819): n is a, c, g, or t
  misc_feature (824)..(827): n is a, c, g, or t
  misc_feature (830)..(831): n is a, c, g, or t
  misc_feature (835)..(836): n is a, c, g, or t
  misc_feature (839)..(840): n is a, c, g, or t
  misc_feature (842)..(843): n is a, c, g, or t
  misc_feature (847)..(848): n is a, c, g, or t
  misc_feature (850)..(850): n is a, c, g, or t
  misc_feature (853)..(853): n is a, c, g, or t
  misc_feature (855)..(855): n is a, c, g, or t
  misc_feature (857)..(858): n is a, c, g, or t
  misc_feature (863)..(863): n is a, c, g, or t
  misc_feature (866)..(866): n is a, c, g, or t
  misc_feature (868)..(869): n is a, c, g, or t
  misc_feature (872)..(872): n is a, c, g, or t
  misc_feature (877)..(877): n is a, c, g, or t
  misc_feature (879)..(879): n is a, c, g, or t
  misc_feature (883)..(886): n is a, c, g, or t
  misc_feature (892)..(892): n is a, c, g, or t
  misc_feature (897)..(900): n is a, c, g, or t
  misc_feature (902)..(902): n is a, c, g, or t
  misc_feature (904)..(904): n is a, c, g, or t
  misc_feature (907)..(909): n is a, c, g, or t
  misc_feature (922)..(922): n is a, c, g, or t
  misc_feature (925)..(925): n is a, c, g, or t
  misc_feature (931)..(931): n is a, c, g, or t
  misc_feature (936)..(937): n is a, c, g, or t
  misc_feature (939)..(940): n is a, c, g, or t
  misc_feature (943)..(943): n is a, c, g, or t
  misc_feature (945)..(945): n is a, c, g, or t
  misc_feature (954)..(954): n is a, c, g, or t
  misc_feature (957)..(957): n is a, c, g, or t
  misc_feature (959)..(962): n is a, c, g, or t
  misc_feature (965)..(965): n is a, c, g, or t
  misc_feature (969)..(969): n is a, c, g, or t
  misc_feature (972)..(972): n is a, c, g, or t
  misc_feature (975)..(976): n is a, c, g, or t
  misc_feature (979)..(982): n is a, c, g, or t
  misc_feature (986)..(986): n is a, c, g, or t
  misc_feature (988)..(992): n is a, c, g, or t
  misc_feature (995)..(999): n is a, c, g, or t
  misc_feature (1001)..(1003): n is a, c, g, or t
  misc_feature (1006)..(1006): n is a, c, g, or t
  misc_feature (1010)..(1013): n is a, c, g, or t
  misc_feature (1015)..(1015): n is a, c, g, or t
  misc_feature (1021)..(1022): n is a, c, g, or t
  misc_feature (1026)..(1026): n is a, c, g, or t
  misc_feature (1028)..(1032): n is a, c, g, or t
  misc_feature (1037)..(1037): n is a, c, g, or t
  misc_feature (1040)..(1041): n is a, c, g, or t
  misc_feature (1044)..(1045): n is a, c, g, or t
  misc_feature (1049)..(1051): n is a, c, g, or t
  misc_feature (1053)..(1053): n is a, c, g, or t
  misc_feature (1055)..(1055): n is a, c, g, or t
  misc_feature (1062)..(1066): n is a, c, g, or t
  misc_feature (1069)..(1069): n is a, c, g, or t
  misc_feature (1072)..(1077): n is a, c, g, or t
  misc_feature (1079)..(1080): n is a, c, g, or t
  misc_feature (1082)..(1082): n is a, c, g, or t
  misc_feature (1085)..(1085): n is a, c, g, or t
  misc_feature (1089)..(1090): n is a, c, g, or t
  misc_feature (1092)..(1097): n is a, c, g, or t
  misc_feature (1099)..(1099): n is a, c, g, or t
  misc_feature (1106)..(1106): n is a, c, g, or t
  misc_feature (1115)..(1115): n is a, c, g, or t
  misc_feature (1119)..(1119): n is a, c, g, or t
  misc_feature (1123)..(1124): n is a, c, g, or t
  misc_feature (1127)..(1127): n is a, c, g, or t
  misc_feature (1134)..(1134): n is a, c, g, or t
  misc_feature (1136)..(1136): n is a, c, g, or t
  misc_feature (1138)..(1138): n is a, c, g, or t
  misc_feature (1143)..(1144): n is a, c, g, or t
  misc_feature (1146)..(1150): n is a, c, g, or t
  misc_feature (1152)..(1153): n is a, c, g, or t
  misc_feature (1155)..(1158): n is a, c, g, or t
  misc_feature (1161)..(1163): n is a, c, g, or t
  misc_feature (1166)..(1169): n is a, c, g, or t
  misc_feature (1171)..(1171): n is a, c, g, or t
  misc_feature (1173)..(1176): n is a, c, g, or t
  misc_feature (1179)..(1179): n is a, c, g, or t
  misc_feature (1181)..(1183): n is a, c, g, or t
  misc_feature (1185)..(1185): n is a, c, g, or t
  misc_feature (1188)..(1188): n is a, c, g, or t
  misc_feature (1190)..(1190): n is a, c, g, or t
  misc_feature (1192)..(1192): n is a, c, g, or t
  misc_feature (1194)..(1199): n is a, c, g, or t
  misc_feature (1201)..(1204): n is a, c, g, or t
  misc_feature (1207)..(1207): n is a, c, g, or t
  misc_feature (1209)..(1209): n is a, c, g, or t
  misc_feature (1211)..(1222): n is a, c, g, or t
  misc_feature (1224)..(1224): n is a, c, g, or t
  misc_feature (1228)..(1228): n is a, c, g, or t
  misc_feature (1230)..(1230): n is a, c, g, or t
  misc_feature (1233)..(1238): n is a, c, g, or t
  misc_feature (1240)..(1242): n is a, c, g, or t
  misc_feature (1244)..(1249): n is a, c, g, or t
  misc_feature (1251)..(1251): n is a, c, g, or t
  misc_feature (1253)..(1253): n is a, c, g, or t
  misc_feature (1256)..(1260): n is a, c, g, or t
  misc_feature (1262)..(1270): n is a, c, g, or t
  misc_feature (1272)..(1272): n is a, c, g, or t
  misc_feature (1276)..(1278): n is a, c, g, or t
  misc_feature (1280)..(1280): n is a, c, g, or t
  misc_feature (1282)..(1289): n is a, c, g, or t
  misc_feature (1291)..(1298): n is a, c, g, or t
  misc_feature (1300)..(1304): n is a, c, g, or t
  misc_feature (1306)..(1311): n is a, c, g, or t
  misc_feature (1313)..(1316): n is a, c, g, or t
  misc_feature (1320)..(1321): n is a, c, g, or t
  misc_feature (1323)..(1324): n is a, c, g, or t
  misc_feature (1326)..(1328): n is a, c, g, or t
naantagagagaattactatgagaggatcgcatcaccatcaccatcacggatcctatttaggtgacactatagaatcgtcgacccacgcgtccggtggaaggccaggagaagctgcaccagatgtggctcagctggaaccagaagcagctccagngccccnagaangancngcnnnngncagagcaggtcgagtcccgagngctcacnatgttgcgggacattgcctctcanntggagncnncntgtgcctncacnttntcngttnntgcngctgnnntngnacgaangngaccacntgtgcanccnnagnatgtggggangcgtgtccacntntncntccgnnntgnncaggtggttgtccacccantnctncaacttctgnancancgngnngaccnnnatcaannncatcnggcccnancgnaagcncttgancnantggacgccgccnnncactacngantttgtcttgtccaccccnntctacanntgngcgggcntcgngtccanngccncngacaatngcgngngcaccgtgtncttgttgcnagacaccatctcttgggnnnccgacannttatnctacntgagctncttggtgacagccaggatcttctccgagtnntgctgcnngatgnggaggttttccnnnnantngtccaaccccnngtggnnntantcanangattgangcaatcnggntcnccancnttgnaanangatnggctgaaccccccttgacngcagcnnnnntganagtcctcactcncttcnatgcngcntgnagaaanncttgacngaggnaaantcttcnnngntggannnnatnncagnnaanncnnaatnnangtngnanntaatnaangnntgntgggnanttcnnnnaccaantgggnnnntngnacnnnttttttcccatgnaanataaantgatnncnntancntaagccccntcnannnnaanattntcntannaannnnaccncnnnnntannnnnannncanaaannnnanttactnncatnannnnncctanaannttnntaannnancngaacccnnnnnaanttnnnnnnannanctnaaanncnnnnnnanttttttnaaaactctntttncaannganttttttntnanaaaannannnnntnntnnnnaannntannnnanannnntanannnanaanantntnnnnnnannnnttnantnnnnnnnnnnnnanaaanantannnnnntnnntnnnnnntntnatnnnnnannnnnnnnnantttnnntnannnnnnnnannnnnnnnannnnnannnnnntnnnnaaannannannn

SEQ ID NO: 757 - DNA, 1186 bp, Homo Sapiens
  misc_feature (793)..(793): n is a, c, g, or t
  misc_feature (798)..(798): n is a, c, g, or t
  misc_feature (863)..(863): n is a, c, g, or t
  misc_feature (941)..(941): n is a, c, g, or t
  misc_feature (971)..(971): n is a, c, g, or t
  misc_feature (975)..(975): n is a, c, g, or t
  misc_feature (987)..(987): n is a, c, g, or t
  misc_feature (990)..(991): n is a, c, g, or t
  misc_feature (995)..(996): n is a, c, g, or t
  misc_feature (1001)..(1001): n is a, c, g, or t
  misc_feature (1003)..(1003): n is a, c, g, or t
  misc_feature (1007)..(1008): n is a, c, g, or t
  misc_feature (1012)..(1012): n is a, c, g, or t
  misc_feature (1018)..(1018): n is a, c, g, or t
  misc_feature (1022)..(1022): n is a, c, g, or t
  misc_feature (1046)..(1046): n is a, c, g, or t
  misc_feature (1053)..(1053): n is a, c, g, or t
  misc_feature (1060)..(1060): n is a, c, g, or t
  misc_feature (1072)..(1072): n is a, c, g, or t
  misc_feature (1078)..(1078): n is a, c, g, or t
  misc_feature (1082)..(1082): n is a, c, g, or t
  misc_feature (1084)..(1084): n is a, c, g, or t
  misc_feature (1089)..(1091): n is a, c, g, or t
  misc_feature (1093)..(1093): n is a, c, g, or t
  misc_feature (1097)..(1098): n is a, c, g, or t
  misc_feature (1102)..(1102): n is a, c, g, or t
  misc_feature (1111)..(1111): n is a, c, g, or t
  misc_feature (1117)..(1117): n is a, c, g, or t
  misc_feature (1120)..(1121): n is a, c, g, or t
  misc_feature (1126)..(1126): n is a, c, g, or t
  misc_feature (1132)..(1133): n is a, c, g, or t
  misc_feature (1139)..(1139): n is a, c, g, or t
  misc_feature (1142)..(1142): n is a, c, g, or t
  misc_feature (1147)..(1147): n is a, c, g, or t
  misc_feature (1149)..(1150): n is a, c, g, or t
  misc_feature (1154)..(1154): n is a, c, g, or t
  misc_feature (1158)..(1160): n is a, c, g, or t
  misc_feature (1174)..(1175): n is a, c, g, or t
  misc_feature (1177)..(1181): n is a, c, g, or t
aatagagaaattactatgagaggatcgcatcaccatcaccatcacggatcctatttaggtgacactatagaatcgtcgacccacgcgtccgctcgcctctggcccgcagtcaaggcatggcggtcattggggtggccttctcactgggcttcaccctgggccctatgctcggagcctccctgcccctggaaatggcaccctggtttgccctgctcttcgcagcctccgacctgctgttcatcttctgcttcctgccagagacgctgcccctggagaaacgggcgccctctatcgccctggggttccgtgatgcggctgatctgctcagccccctggccctgctgcgcttctcggctgtcgctcgtggccaggacccaccctctggagacaggctcagcagcctgcgccgcctgggcctagtctacttcctctacctcttcctgttctcgggcctggagtacacgctgagcttcctcacacaccagcgcttccagttcagtagcctacagcaggggaagatgtttttcctcatcggcctcaccatggccaccatccagggtgcctatgcccggcggatccaccctggcggggaagttgctgccgtgaagcgggccctcctgctgctggtgcccgccttcctcctcatcggctggggacgttctctgcccgtgctgggcctggggctgctgctctactcctttgccgccgccgttgtggtgccctgcctgtcctccgtggtcgctggctatggctcaccagggcagaagggcacggtcatgggtacactgcgcancctangtgctctggccagggccgcggggcccctggtggccgcttcagtgtactggctggccggggcccangcctgcttcaccacgtggtccgggctctctttgctccccttcttcctcctgcaaaaactgaattacccggcaaaaaangctcaaggctgaataactgaaccactgtgnccangctgtgggcacnagnnaaannggaancnaagnnaggnccctgnccantggctgaacccaaccccccgcaantcaaggnaaaaccnggggggggggcnggcccnaaanangaaannnangganntccncaaaattantaatcnttnnggaanccaaanngaaaantcnaaggntnnaggntttnnnttttttttaaaaanngnnnnngtttt

SEQ ID NO: 758 - DNA, 1200 bp, Homo Sapiens
  misc_feature (5)..(13): n is a, c, g, or t
  misc_feature (17)..(17): n is a, c, g, or t
  misc_feature (30)..(30): n is a, c, g, or t
  misc_feature (884)..(884): n is a, c, g, or t
  misc_feature (940)..(940): n is a, c, g, or t
  misc_feature (945)..(945): n is a, c, g, or t
  misc_feature (967)..(967): n is a, c, g, or t
  misc_feature (973)..(973): n is a, c, g, or t
  misc_feature (1005)..(1005): n is a, c, g, or t
  misc_feature (1016)..(1016): n is a, c, g, or t
  misc_feature (1059)..(1059): n is a, c, g, or t
  misc_feature (1062)..(1062): n is a, c, g, or t
  misc_feature (1070)..(1070): n is a, c, g, or t
  misc_feature (1083)..(1083): n is a, c, g, or t
  misc_feature (1106)..(1106): n is a, c, g, or t
  misc_feature (1110)..(1110): n is a, c, g, or t
  misc_feature (1119)..(1119): n is a, c, g, or t
  misc_feature (1121)..(1121): n is a, c, g, or t
  misc_feature (1124)..(1124): n is a, c, g, or t
  misc_feature (1127)..(1128): n is a, c, g, or t
  misc_feature (1139)..(1139): n is a, c, g, or t
  misc_feature (1145)..(1145): n is a, c, g, or t
  misc_feature (1163)..(1163): n is a, c, g, or t
  misc_feature (1167)..(1168): n is a, c, g, or t
  misc_feature (1183)..(1183): n is a, c, g, or t
  misc_feature (1187)..(1188): n is a, c, g, or t
  misc_feature (1193)..(1193): n is a, c, g, or t
  misc_feature (1195)..(1195): n is a, c, g, or t
gcttnnnnnnnnngatngagaaattactangagaggatcgcatcaccatcaccatcacggatcctatttaggtgacactatagaatcgtcgacccacgcgtccgcccacgcgtccgatgcagagctgcagtcaaaactgaaggatttatttaatgtggatgcttttaagctggaatcattagaagcaaaaaacagagcattgaatgaacagattgcaagattggaacaagaaagagaaaaagaaccgaatcgtctagagtcgttgagaaaactgaaggcttccttacaaggagatgttcaaaagtatcaggcatacatgagcaatttggagtctcattcagccattcttgaccagaaattaaatggtctcaatgaggaaattgctagagtagaactagaatgtgaaacaataaaacaggagaacactcgactacagaatatcattgacaaccagaagtactcagttgcagacattgagcgaataaatcatgaaagaaatgaattgcagcagactattaataaattaaccaaggacctggaagctgaacaacagaagttgtggaatgaggagttaaaatatgccagaggcaaagaagcggtatgtcataccatttccagagtggcaactcatcatagctgacctttctgaaggtctgtcccaattaagaagaagtcagtgggtagagtaaattggcttaagagattgaaacacaattagcagagtatcacaaattggctagaaaattaaaacttattcctaaaggtgctgagaattccaaaggttatgactttgaaattaagtttaatcccgaggctggtgccaactgccttgtcaaatacaggggctcaagtttatgtacctcttaaggaactcctgaatgaanctgaagaaaaaattaataaagcccctaaataaaaaaaatgggtttgggaggatacntttanaaacaattggaatggccattgnataacngaaagccaggagaaagtggggaaaacctctgnaaaaaaaaaanttccaaaagcctggggatggatctttttccccacccaaaaaanttnaggggaancccaaaggaaaanggatggaaaaaatggggccccgngganctttggatncnttnggnnaaaacccccancccccntgccttaaaagttacggnttanncccgggggcctccgnggannccttngnaatgg

SEQ ID NO: 759 - DNA, 1440 bp, Homo Sapiens
  misc_feature (7)..(7): n is a, c, g, or t
  misc_feature (737)..(737): n is a, c, g, or t
  misc_feature (870)..(870): n is a, c, g, or t
  misc_feature (879)..(879): n is a, c, g, or t
  misc_feature (906)..(906): n is a, c, g, or t
  misc_feature (923)..(923): n is a, c, g, or t
  misc_feature (934)..(934): n is a, c, g, or t
  misc_feature (939)..(939): n is a, c, g, or t
  misc_feature (947)..(947): n is a, c, g, or t
  misc_feature (959)..(959): n is a, c, g, or t
  misc_feature (969)..(969): n is a, c, g, or t
  misc_feature (972)..(972): n is a, c, g, or t
  misc_feature (987)..(987): n is a, c, g, or t
  misc_feature (990)..(990): n is a, c, g, or t
  misc_feature (1039)..(1039): n is a, c, g, or t
  misc_feature (1044)..(1044): n is a, c, g, or t
  misc_feature (1055)..(1055): n is a, c, g, or t
  misc_feature (1061)..(1061): n is a, c, g, or t
  misc_feature (1074)..(1074): n is a, c, g, or t
  misc_feature (1080)..(1080): n is a, c, g, or t
  misc_feature (1091)..(1091): n is a, c, g, or t
  misc_feature (1095)..(1095): n is a, c, g, or t
  misc_feature (1104)..(1104): n is a, c, g, or t
  misc_feature (1113)..(1113): n is a, c, g, or t
  misc_feature (1121)..(1121): n is a, c, g, or t
  misc_feature (1136)..(1136): n is a, c, g, or t
  misc_feature (1141)..(1141): n is a, c, g, or t
  misc_feature (1144)..(1144): n is a, c, g, or t
  misc_feature (1149)..(1149): n is a, c, g, or t
  misc_feature (1161)..(1161): n is a, c, g, or t
  misc_feature (1165)..(1165): n is a, c, g, or t
  misc_feature (1167)..(1167): n is a, c, g, or t
  misc_feature (1169)..(1169): n is a, c, g, or t
  misc_feature (1178)..(1178): n is a, c, g, or t
  misc_feature (1182)..(1182): n is a, c, g, or t
  misc_feature (1196)..(1196): n is a, c, g, or t
  misc_feature (1199)..(1199): n is a, c, g, or t
  misc_feature (1203)..(1203): n is a, c, g, or t
  misc_feature (1205)..(1205): n is a, c, g, or t
  misc_feature (1208)..(1208): n is a, c, g, or t
  misc_feature (1218)..(1219): n is a, c, g, or t
  misc_feature (1222)..(1222): n is a, c, g, or t
  misc_feature (1225)..(1225): n is a, c, g, or t
  misc_feature (1229)..(1229): n is a, c, g, or t
  misc_feature (1232)..(1232): n is a, c, g, or t
  misc_feature (1238)..(1238): n is a, c, g, or t
  misc_feature (1250)..(1250): n is a, c, g, or t
  misc_feature (1267)..(1267): n is a, c, g, or t
  misc_feature (1272)..(1273): n is a, c, g, or t
  misc_feature (1287)..(1287): n is a, c, g, or t
  misc_feature (1295)..(1295): n is a, c, g, or t
  misc_feature (1299)..(1299): n is a, c, g, or t
  misc_feature (1306)..(1306): n is a, c, g, or t
  misc_feature (1308)..(1308): n is a, c, g, or t
  misc_feature (1312)..(1312): n is a, c, g, or t
  misc_feature (1317)..(1318): n is a, c, g, or t
  misc_feature (1320)..(1320): n is a, c, g, or t
  misc_feature (1338)..(1338): n is a, c, g, or t
  misc_feature (1346)..(1346): n is a, c, g, or t
  misc_feature (1349)..(1349): n is a, c, g, or t
  misc_feature (1363)..(1363): n is a, c, g, or t
  misc_feature (1365)..(1366): n is a, c, g, or t
  misc_feature (1368)..(1373): n is a, c, g, or t
  misc_feature (1383)..(1384): n is a, c, g, or t
  misc_feature (1389)..(1389): n is a, c, g, or t
  misc_feature (1392)..(1392): n is a, c, g, or t
  misc_feature (1399)..(1399): n is a, c, g, or t
  misc_feature (1401)..(1401): n is a, c, g, or t
  misc_feature (1409)..(1409): n is a, c, g, or t
  misc_feature (1413)..(1414): n is a, c, g, or t
  misc_feature (1417)..(1418): n is a, c, g, or t
  misc_feature (1421)..(1421): n is a, c, g, or t
  misc_feature (1423)..(1423): n is a, c, g, or t
  misc_feature (1428)..(1428): n is a, c, g, or t
  misc_feature (1430)..(1430): n is a, c, g, or t
  misc_feature (1432)..(1432): n is a, c, g, or t
gagagantaactatgagaggatcgcatcaccatcaccatcacggatcctatttaggtgacactatagaatcgtcgacccacgcgtccggacagatggggctttgtggccctgggggtgcttctgcagccttgaaaaagttgcccttacctcctagggtcacctctgctgccattctgaggaacatctccaaggaacaggagggactttggctagagcctcctgcctccccatcttctctctgcccagaggctcctgggcctggcttggctgtcccctacctgtgtccccgggctgcaccccttcctcttctctttctctgtacagtctcagttgcttgctcttgtgcctcctgggcaagggctgaaggaggccactccatctcacctcggggggctgccctcaatgtgggagtgaccccagccagatctgaaggacatttgggagagggatgcccaggaacgcctcatctcagcagcctgggctcggcattccgaagctgactttctataggcaattttgtacctttgtggagaaatgtgtcacctcccccaacccgattcactcttttctcctgttttgtaaaaaataaaaataaataataacaataatacgggggaaaggaacgaaaggaaaaaaaaaaaaaaaaaaaaaagggcggccgctccctatagtgagtcgtattaagcttaattagctgagcttggactcctgttgatagatccagtaatgacctcanaactccatctggatttgttcagaacgctcggttgccgccgggcgttttttattggtgagaatccaagctagcttggcgagatttttcaggagctaaggaagctaaaatggagaaaaaaatcactggatatacnaccgttganatatccccaatggcatcgtaaaagaanattttgaggcatttcantcagttgctcnaatgnaacctaanaaccaaaaccgntcaactgganatnacggcctttttaaanacngtaaagaaaaaaaagcacaagttttatccggcctttaattcaaattctngcccncctgaaaaaangccatncggaaattcctanggcaanaaaaaaacggnaacntggggaaantggaaaaangttccccnttgttaaaccgtttnccaanaanaaatnaaaagttttctncccncngnaagaaaaancaanaaaaattccggcanttntaananatnttccaaaaannggnggntaanggnaaaacngcccaattcccnaagggttttgaaaaagnttttnncccccaccccgggnaattcccntttnaataaangncaanaaaanntntccccctttcccgggaanaaaaaagnaangggggagcggggananncnnnnnnggggttcctnnaaaanaanaaaaggnangggggggntttnnaannccncngggantncnaaaaaaaa

SEQ ID NO: 760 - DNA, 1668 bp, Homo Sapiens
  misc_feature (3)..(5): n is a, c, g, or t
  misc_feature (14)..(14): n is a, c, g, or t
  misc_feature (19)..(19): n is a, c, g, or t
  misc_feature (22)..(22): n is a, c, g, or t
  misc_feature (32)..(32): n is a, c, g, or t
  misc_feature (34)..(35): n is a, c, g, or t
  misc_feature (43)..(43): n is a, c, g, or t
  misc_feature (51)..(53): n is a, c, g, or t
  misc_feature (61)..(61): n is a, c, g, or t
  misc_feature (70)..(70): n is a, c, g, or t
  misc_feature (86)..(86): n is a, c, g, or t
  misc_feature (88)..(88): n is a, c, g, or t
  misc_feature (94)..(95): n is a, c, g, or t
  misc_feature (97)..(97): n is a, c, g, or t
  misc_feature (100)..(100): n is a, c, g, or t
  misc_feature (105)..(105): n is a, c, g, or t
  misc_feature (109)..(109): n is a, c, g, or t
  misc_feature (111)..(111): n is a, c, g, or t
  misc_feature (116)..(116): n is a, c, g, or t
  misc_feature (120)..(120): n is a, c, g, or t
  misc_feature (127)..(127): n is a, c, g, or t
  misc_feature (131)..(131): n is a, c, g, or t
  misc_feature (136)..(136): n is a, c, g, or t
  misc_feature (140)..(140): n is a, c, g, or t
  misc_feature (143)..(144): n is a, c, g, or t
  misc_feature (148)..(148): n is a, c, g, or t
  misc_feature (151)..(151): n is a, c, g, or t
  misc_feature (157)..(158): n is a, c, g, or t
  misc_feature (162)..(162): n is a, c, g, or t
  misc_feature (165)..(165): n is a, c, g, or t
  misc_feature (168)..(168): n is a, c, g, or t
  misc_feature (170)..(174): n is a, c, g, or t
  misc_feature (181)..(181): n is a, c, g, or t
  misc_feature (185)..(186): n is a, c, g, or t
  misc_feature (194)..(194): n is a, c, g, or t
  misc_feature (197)..(197): n is a, c, g, or t
  misc_feature (199)..(200): n is a, c, g, or t
  misc_feature (205)..(205): n is a, c, g, or t
  misc_feature (209)..(209): n is a, c, g, or t
  misc_feature (211)..(211): n is a, c, g, or t
  misc_feature (219)..(220): n is a, c, g, or t
  misc_feature (222)..(222): n is a, c, g, or t
  misc_feature (235)..(235): n is a, c, g, or t
  misc_feature (240)..(240): n is a, c, g, or t
  misc_feature (243)..(243): n is a, c, g, or t
  misc_feature (245)..(247): n is a, c, g, or t
  misc_feature (249)..(249): n is a, c, g, or t
  misc_feature (254)..(254): n is a, c, g, or t
  misc_feature (256)..(256): n is a, c, g, or t
  misc_feature (259)..(259): n is a, c, g, or t
  misc_feature (272)..(272): n is a, c, g, or t
  misc_feature (274)..(274): n is a, c, g, or t
  misc_feature (279)..(279): n is a, c, g, or t
  misc_feature (283)..(283): n is a, c, g, or t
  misc_feature (287)..(287): n is a, c, g, or t
  misc_feature (289)..(289): n is a, c, g, or t
  misc_feature (292)..(292): n is a, c, g, or t
  misc_feature (294)..(294): n is a, c, g, or t
  misc_feature (297)..(298): n is a, c, g, or t
  misc_feature (301)..(301): n is a, c, g, or t
  misc_feature (303)..(303): n is a, c, g, or t
  misc_feature (315)..(318): n is a, c, g, or t
  misc_feature (320)..(323): n is a, c, g, or t
  misc_feature (327)..(327): n is a, c, g, or t
  misc_feature (330)..(330): n is a, c, g, or t
  misc_feature (335)..(335): n is a, c, g, or t
  misc_feature (338)..(339): n is a, c, g, or t
  misc_feature (342)..(343): n is a, c, g, or t
  misc_feature (345)..(345): n is a, c, g, or t
  misc_feature (348)..(348): n is a, c, g, or t
  misc_feature (363)..(363): n is a, c, g, or t
  misc_feature (365)..(365): n is a, c, g, or t
  misc_feature (367)..(367): n is a, c, g, or t
  misc_feature (369)..(369): n is a, c, g, or t
  misc_feature (371)..(373): n is a, c, g, or t
  misc_feature (376)..(377): n is a, c, g, or t
  misc_feature (379)..(379): n is a, c, g, or t
  misc_feature (382)..(382): n is a, c, g, or t
  misc_feature (385)..(391): n is a, c, g, or t
  misc_feature (393)..(394): n is a, c, g, or t
  misc_feature (396)..(399): n is a, c, g, or t
  misc_feature (401)..(401): n is a, c, g, or t
  misc_feature (404)..(404): n is a, c, g, or t
  misc_feature (409)..(411): n is a, c, g, or t
  misc_feature (415)..(416): n is a, c, g, or t
  misc_feature (419)..(419): n is a, c, g, or t
  misc_feature (421)..(423): n is a, c, g, or t
  misc_feature (425)..(425): n is a, c, g, or t
  misc_feature (428)..(430): n is a, c, g, or t
  misc_feature (433)..(434): n is a, c, g, or t
  misc_feature (437)..(438): n is a, c, g, or t
  misc_feature (446)..(447): n is a, c, g, or t
  misc_feature (450)..(451): n is a, c, g, or t
  misc_feature (461)..(462): n is a, c, g, or t
  misc_feature (464)..(465): n is a, c, g, or t
  misc_feature (467)..(468): n is a, c, g, or t
  misc_feature (470)..(472): n is a, c, g, or t
  misc_feature (474)..(474): n is a, c, g, or t
  misc_feature (478)..(479): n is a, c, g, or t
  misc_feature (482)..(482): n is a, c, g, or t
  misc_feature (484)..(484): n is a, c, g, or t
  misc_feature (487)..(487): n is a, c, g, or t
  misc_feature (493)..(494): n is a, c, g, or t
  misc_feature (499)..(500): n is a, c, g, or t
  misc_feature (504)..(505): n is a, c, g, or t
  misc_feature (507)..(507): n is a, c, g, or t
  misc_feature (511)..(511): n is a, c, g, or t
  misc_feature (513)..(513): n is a, c, g, or t
  misc_feature (516)..(516): n is a, c, g, or t
  misc_feature (518)..(520): n is a, c, g, or t
  misc_feature (523)..(524): n is a, c, g, or t
  misc_feature (530)..(530): n is a, c, g, or t
  misc_feature (534)..(534): n is a, c, g, or t
  misc_feature (537)..(537): n is a, c, g, or t
  misc_feature (541)..(541): n is a, c, g, or t
  misc_feature (543)..(543): n is a, c, g, or t
  misc_feature (550)..(550): n is a, c, g, or t
  misc_feature (554)..(554): n is a, c, g, or t
  misc_feature (556)..(556): n is a, c, g, or t
  misc_feature (566)..(567): n is a, c, g, or t
  misc_feature (570)..(570): n is a, c, g, or t
  misc_feature (575)..(575): n is a, c, g, or t
  misc_feature (578)..(578): n is a, c, g, or t
  misc_feature (580)..(580): n is a, c, g, or t
  misc_feature (584)..(584): n is a, c, g, or t
  misc_feature (588)..(589): n is a, c, g, or t
  misc_feature (592)..(593): n is a, c, g, or t
  misc_feature (595)..(599): n is a, c, g, or t
  misc_feature (606)..(607): n is a, c, g, or t
  misc_feature (612)..(612): n is a, c, g, or t
  misc_feature (615)..(616): n is a, c, g, or t
  misc_feature (618)..(618): n is a, c, g, or t
  misc_feature (621)..(621): n is a, c, g, or t
  misc_feature (625)..(625): n is a, c, g, or t
  misc_feature (630)..(630): n is a, c, g, or t
  misc_feature (634)..(638): n is a, c, g, or t
  misc_feature (642)..(642): n is a, c, g, or t
  misc_feature (644)..(645): n is a, c, g, or t
  misc_feature (647)..(647): n is a, c, g, or t
  misc_feature (651)..(651): n is a, c, g, or t
  misc_feature (656)..(656): n is a, c, g, or t
  misc_feature (659)..(660): n is a, c, g, or t
  misc_feature (665)..(665): n is a, c, g, or t
  misc_feature (667)..(667): n is a, c, g, or t
  misc_feature (672)..(674): n is a, c, g, or t
  misc_feature (678)..(680): n is a, c, g, or t
  misc_feature (682)..(683): n is a, c, g, or t
  misc_feature (687)..(689): n is a, c, g, or t
  misc_feature (692)..(692): n is a, c, g, or t
  misc_feature (700)..(700): n is a, c, g, or t
  misc_feature (704)..(705): n is a, c, g, or t
  misc_feature (709)..(709): n is a, c, g, or t
  misc_feature (712)..(712): n is a, c, g, or t
  misc_feature (715)..(717): n is a, c, g, or t
  misc_feature (719)..(719): n is a, c, g, or t
  misc_feature (721)..(721): n is a, c, g, or t
  misc_feature (725)..(726): n is a, c, g, or t
  misc_feature (728)..(729): n is a, c, g, or t
  misc_feature (732)..(734): n is a, c, g, or t
  misc_feature (736)..(736): n is a, c, g, or t
  misc_feature (739)..(740): n is a, c, g, or t
  misc_feature (743)..(743): n is a, c, g, or t
  misc_feature (745)..(749): n is a, c, g, or t
  misc_feature (751)..(751): n is a, c, g, or t
  misc_feature (753)..(753): n is a, c, g, or t
  misc_feature (755)..(755): n is a, c, g, or t
  misc_feature (757)..(757): n is a, c, g, or t
  misc_feature (760)..(764): n is a, c, g, or t
  misc_feature (767)..(767): n is a, c, g, or t
  misc_feature (772)..(773): n is a, c, g, or t
  misc_feature (775)..(780): n is a, c, g, or t
  misc_feature (786)..(786): n is a, c, g, or t
  misc_feature (790)..(793): n is a, c, g, or t
  misc_feature (795)..(795): n is a, c, g, or t
  misc_feature (798)..(798): n is a, c, g, or t
  misc_feature (802)..(802): n is a, c, g, or t
  misc_feature (805)..(805): n is a, c, g, or t
  misc_feature (808)..(809): n is a, c, g, or t
  misc_feature (811)..(812): n is a, c, g, or t
  misc_feature (816)..(818): n is a, c, g, or t
  misc_feature (826)..(826): n is a, c, g, or t
  misc_feature (833)..(834): n is a, c, g, or t
  misc_feature (836)..(836): n is a, c, g, or t
  misc_feature (839)..(840): n is a, c, g, or t
  misc_feature (844)..(846): n is a, c, g, or t
  misc_feature (848)..(848): n is a, c, g, or t
  misc_feature (851)..(852): n is a, c, g, or t
  misc_feature (856)..(856): n is a, c, g, or t
  misc_feature (858)..(858): n is a, c, g, or t
  misc_feature (862)..(862): n is a, c, g, or t
  misc_feature (870)..(870): n is a, c, g, or t
  misc_feature (875)..(876): n is a, c, g, or t
  misc_feature (880)..(881): n is a, c, g, or t
  misc_feature (883)..(884): n is a, c, g, or t
  misc_feature (890)..(890): n is a, c, g, or t
  misc_feature (900)..(900): n is a, c, g, or t
  misc_feature (902)..(903): n is a, c, g, or t
  misc_feature (910)..(910): n is a, c, g, or t
  misc_feature (912)..(913): n is a, c, g, or t
  misc_feature (917)..(918): n is a, c, g, or t
  misc_feature (920)..(921): n is a, c, g, or t
  misc_feature (923)..(924): n is a, c, g, or t
  misc_feature (928)..(932): n is a, c, g, or t
  misc_feature (938)..(939): n is a, c, g, or t
  misc_feature (941)..(941): n is a, c, g, or t
  misc_feature (944)..(944): n is a, c, g, or t
  misc_feature (946)..(947): n is a, c, g, or t
  misc_feature (949)..(951): n is a, c, g, or t
  misc_feature (953)..(957): n is a, c, g, or t
  misc_feature (959)..(959): n is a, c, g, or t
  misc_feature (962)..(963): n is a, c, g, or t
  misc_feature (965)..(967): n is a, c, g, or t
  misc_feature (970)..(970): n is a, c, g, or t
  misc_feature (972)..(972): n is a, c, g, or t
  misc_feature (974)..(974): n is a, c, g, or t
  misc_feature (976)..(977): n is a, c, g, or t
  misc_feature (979)..(979): n is a, c, g, or t
  misc_feature (982)..(983): n is a, c, g, or t
  misc_feature (985)..(985): n is a, c, g, or t
  misc_feature (987)..(988): n is a, c, g, or t
  misc_feature (991)..(991): n is a, c, g, or t
  misc_feature (997)..(998): n is a, c, g, or t
  misc_feature (1000)..(1000): n is a, c, g, or t
  misc_feature (1007)..(1011): n is a, c, g, or t
  misc_feature (1013)..(1014): n is a, c, g, or t
  misc_feature (1017)..(1018): n is a, c, g, or t
  misc_feature (1021)..(1021): n is a, c, g, or t
  misc_feature (1023)..(1024): n is a, c, g, or t
  misc_feature (1026)..(1027): n is a, c, g, or t
  misc_feature (1030)..(1030): n is a, c, g, or t
  misc_feature (1034)..(1035): n is a, c, g, or t
  misc_feature (1037)..(1037): n is a, c, g, or t
  misc_feature (1039)..(1039): n is a, c, g, or t
  misc_feature (1042)..(1042): n is a, c, g, or t
  misc_feature (1045)..(1047): n is a, c, g, or t
  misc_feature (1053)..(1055): n is a, c, g, or t
  misc_feature (1058)..(1061): n is a, c, g, or t
  misc_feature (1063)..(1063): n is a, c, g, or t
  misc_feature (1065)..(1065): n is a, c, g, or t
  misc_feature (1068)..(1076): n is a, c, g, or t
  misc_feature (1081)..(1081): n is a, c, g, or t
  misc_feature (1083)..(1083): n is a, c, g, or t
  misc_feature (1090)..(1090): n is a, c, g, or t
  misc_feature (1092)..(1094): n is a, c, g, or t
  misc_feature (1098)..(1098): n is a, c, g, or t
  misc_feature (1100)..(1100): n is a, c, g, or t
  misc_feature (1102)..(1102): n is a, c, g, or t
  misc_feature (1105)..(1109): n is a, c, g, or t
  misc_feature (1112)..(1112): n is a, c, g, or t
  misc_feature (1115)..(1115): n is a, c, g, or t
  misc_feature (1117)..(1118): n is a, c, g, or t
  misc_feature (1120)..(1121): n is a, c, g, or t
  misc_feature (1123)..(1126): n is a, c, g, or t
  misc_feature (1130)..(1131): n is a, c, g, or t
  misc_feature (1133)..(1135): n is a, c, g, or t
  misc_feature (1141)..(1142): n is a, c, g, or t
  misc_feature (1150)..(1150): n is a, c, g, or t
  misc_feature (1152)..(1153): n is a, c, g, or t
  misc_feature (1158)..(1160): n is a, c, g, or t
  misc_feature (1162)..(1162): n is a, c, g, or t
  misc_feature (1164)..(1165): n is a, c, g, or t
  misc_feature (1167)..(1173): n is a, c, g, or t
  misc_feature (1175)..(1175): n is a, c, g, or t
  misc_feature (1180)..(1180): n is a, c, g, or t
  misc_feature (1182)..(1182): n is a, c, g, or t
  misc_feature (1185)..(1185): n is a, c, g, or t
  misc_feature (1187)..(1188): n is a, c, g, or t
  misc_feature (1193)..(1193): n is a, c, g, or t
  misc_feature (1195)..(1195): n is a, c, g, or t
  misc_feature (1198)..(1198): n is a, c, g, or t
  misc_feature (1201)..(1201): n is a, c, g, or t
  misc_feature (1204)..(1204): n is a, c, g, or t
  misc_feature (1206)..(1206): n is a, c, g, or t
  misc_feature (1208)..(1208): n is a, c, g, or t
  misc_feature (1210)..(1213): n is a, c, g, or t
  misc_feature (1218)..(1218): n is a, c, g, or t
  misc_feature (1220)..(1223): n is a, c, g, or t
  misc_feature (1225)..(1227): n is a, c, g, or t
  misc_feature (1231)..(1232): n is a, c, g, or t
  misc_feature (1236)..(1236): n is a, c, g, or t
  misc_feature (1240)..(1240): n is a, c, g, or t
  misc_feature (1243)..(1243): n is a, c, g, or t
  misc_feature (1245)..(1247): n is a, c, g, or t
  misc_feature (1256)..(1256): n is a, c, g, or t
  misc_feature (1260)..(1260): n is a, c, g, or t
  misc_feature (1263)..(1263): n is a, c, g, or t
  misc_feature (1265)..(1265): n is a, c, g, or t
  misc_feature (1267)..(1271): n is a, c, g, or t
  misc_feature (1275)..(1275): n is a, c, g, or t
  misc_feature (1281)..(1281): n is a, c, g, or t
  misc_feature (1283)..(1283): n is a, c, g, or t
  misc_feature (1288)..(1289): n is a, c, g, or t
  misc_feature (1294)..(1294): n is a, c, g, or t
  misc_feature (1296)..(1296): n is a, c, g, or t
  misc_feature (1298)..(1300): n is a, c, g, or t
  misc_feature (1303)..(1303): n is a, c, g, or t
  misc_feature (1305)..(1306): n is a, c, g, or t
  misc_feature (1309)..(1311): n is a, c, g, or t
  misc_feature (1315)..(1316): n is a, c, g, or t
  misc_feature (1322)..(1322): n is a, c, g, or t
  misc_feature (1329)..(1330): n is a, c, g, or t
  misc_feature (1332)..(1334): n is a, c, g, or t
  misc_feature (1340)..(1343): n is a, c, g, or t
  misc_feature (1349)..(1350): n is a, c, g, or t
  misc_feature (1352)..(1353): n is a, c, g, or t
  misc_feature (1360)..(1361): n is a, c, g, or t
  misc_feature (1363)..(1364): n is a, c, g, or t
  misc_feature (1367)..(1367): n is a, c, g, or t
  misc_feature (1370)..(1371): n is a, c, g, or t
  misc_feature (1376)..(1377): n is a, c, g, or t
  misc_feature (1381)..(1381): n is a, c, g, or t
  misc_feature (1384)..(1387): n is a, c, g, or t
  misc_feature (1391)..(1391): n is a, c, g, or t
  misc_feature (1393)..(1393): n is a, c, g, or t
  misc_feature (1397)..(1397): n is a, c, g, or t
  misc_feature (1399)..(1402): n is a, c, g, or t
  misc_feature (1405)..(1406): n is a, c, g, or t
  misc_feature (1411)..(1412): n is a, c, g, or t
  misc_feature (1416)..(1416): n is a, c, g, or t
  misc_feature (1420)..(1420): n is a, c, g, or t
  misc_feature (1424)..(1424): n is a, c, g, or t
  misc_feature (1426)..(1426): n is a, c, g, or t
  misc_feature (1429)..(1429): n is a, c, g, or t
  misc_feature (1432)..(1434): n is a, c, g, or t
  misc_feature (1439)..(1440): n is a, c, g, or t
  misc_feature (1445)..(1447): n is a, c, g, or t
  misc_feature (1449)..(1449): n is a, c, g, or t
  misc_feature (1451)..(1451): n is a, c, g, or t
  misc_feature (1456)..(1457): n is a, c, g, or t
  misc_feature (1459)..(1461): n is a, c, g, or t
  misc_feature (1463)..(1464): n is a, c, g, or t
  misc_feature (1466)..(1466): n is a, c, g, or t
  misc_feature (1469)..(1469): n is a, c, g, or t
  misc_feature (1475)..(1476): n is a, c, g, or t
  misc_feature (1480)..(1482): n is a, c, g, or t
  misc_feature (1484)..(1484): n is a, c, g, or t
  misc_feature (1489)..(1489): n is a, c, g, or t
  misc_feature (1493)..(1493): n is a, c, g, or t
  misc_feature (1496)..(1496): n is a, c, g, or t
  misc_feature (1500)..(1502): n is a, c, g, or t
  misc_feature (1510)..(1510): n is a, c, g, or t
  misc_feature (1513)..(1513): n is a, c, g, or t
  misc_feature (1516)..(1519): n is a, c, g, or t
  misc_feature (1521)..(1521): n is a, c, g, or t
  misc_feature (1524)..(1524): n is a, c, g, or t
  misc_feature (1533)..(1533): n is a, c, g, or t
  misc_feature (1535)..(1537): n is a, c, g, or t
  misc_feature (1539)..(1539): n is a, c, g, or t
  misc_feature (1541)..(1542): n is a, c, g, or t
  misc_feature (1546)..(1546): n is a, c, g, or t
  misc_feature (1555)..(1555): n is a, c, g, or t
  misc_feature (1561)..(1561): n is a, c, g, or t
  misc_feature (1563)..(1566): n is a, c, g, or t
  misc_feature (1570)..(1571): n is a, c, g, or t
  misc_feature (1573)..(1573): n is a, c, g, or t
  misc_feature (1578)..(1579): n is a, c, g, or t
  misc_feature (1583)..(1583): n is a, c, g, or t
  misc_feature (1587)..(1587): n is a, c, g, or t
  misc_feature (1591)..(1591): n is a, c, g, or t
  misc_feature (1593)..(1593): n is a, c, g, or t
  misc_feature (1595)..(1595): n is a, c, g, or t
  misc_feature (1605)..(1605): n is a, c, g, or t
  misc_feature (1607)..(1609): n is a, c, g, or t
  misc_feature (1611)..(1612): n is a, c, g, or t
  misc_feature (1617)..(1617): n is a, c, g, or t
  misc_feature (1621)..(1621): n is a, c, g, or t
  misc_feature (1627)..(1628): n is a, c, g, or t
  misc_feature (1632)..(1632): n is a, c, g, or t
  misc_feature (1641)..(1641): n is a, c, g, or t
  misc_feature (1643)..(1643): n is a, c, g, or t
  misc_feature (1645)..(1645): n is a, c, g, or t
  misc_feature (1652)..(1652): n is a, c, g, or t
  misc_feature (1656)..(1657): n is a, c, g, or t
  misc_feature (1660)..(1660): n is a, c, g, or t
  misc_feature (1663)..(1663): n is a, c, g, or t
  misc_feature (1665)..(1665): n is a, c, g, or t
gannnggggggaantatcnttngaggggggcncnncccccccnccactctnnngggattcncttttttgngtgtaacctatgaatnancttccnnanccncggcntctncncgccntgcngggactngtcnacgangtcncgnngccnctnccctanngtgngcnttnannnnngaaaccnggtnnatcggcgnacntnntgggncctncngcactggnngnaaatcaatcactnatgtngancnnntngcacncncanttttcccacatcnancaagnggancctncngangnagnngcnantaacttctgtgnnnngnnnncggnggnatganatnncanngnatngaaatcattcccagngntngncnnntgnncntantannnnnnngnntnnnncnggnggatnnngggnnganannnanaannnaannatnnctccttcnngannaggcaatcannannanntnnntngcannaantngtngatacnntcgcnnggtnnangtcnanaantnnngcnnccatcnatanctngagncntttaacnttcngnacttcagttnnttngagtnaangncagnatanntanntnnnnngttactnntcccnctnncncantttngcatntatnnnnnaggncnncnatanttatntcnncttcngncattnnngtcnnncnngaannntgnagaagtcntcannaatntcntgnnngncnaganntnnttnnnantanntangnnnnncncngncnacnnnnntcnttatnntnnnnnncgtaancctnnnntnttncccngcngtnntnncgtnnngtcttaanagttatnnanttnnagtnnntnganntttnanaggngaggagangtatnnttcnnanntatcanaagttacgancnngtatccngnnttgnntnntnntacnnnnncgctcnnantcngnntnnnannnnnanaannannnagntngntnnancgnnantnntanacaagnncnaggtatnnnnnanncanntcntnntnnagnctgnngncntancannnttattnnngcnnnncngnttnnnnnnnnntcaananctaaatntnnntcangntnctnnnnnaanagnannanntnnnnaaannannntaagtnncactatangnngtcannnananncnnnnnnntntcacncnctnanncattncncangantcncnantnnnntaatnannnngnnnatannacgngatnaancnnnacaattaantttnctnanannnnnctcncacatnanctgcnntgtgntntnnnttntnnctnnntcgnnccgccncttatcnncnnncgtgannnngttatnngnntgaatannanngcngtnncagtnncttnttnnnntaangntcanannnntannagatnngctnttanctananctnatnnncttcnntactnnntncntgtcnnannntnntntgngaccanntatnnncntatancttnttngtannnacgatctnccntannnntnatncacaacatntnnntnannaccngtgcattantatgtncnnnntgtnnanctctnnatcngaantacncnangttcgcaaancnnnannatagntgtnactcannttcnctcgtctcncncntacgtcnatanngtnatntnctg

SEQ ID NO: 761 - DNA, 1376 bp, Homo Sapiens
  misc_feature (800)..(800): n is a, c, g, or t
  misc_feature (807)..(915): n is a, c, g, or t
  misc_feature (920)..(920): n is a, c, g, or t
  misc_feature (928)..(928): n is a, c, g, or t
  misc_feature (935)..(935): n is a, c, g, or t
  misc_feature (937)..(937): n is a, c, g, or t
  misc_feature (943)..(945): n is a, c, g, or t
  misc_feature (947)..(947): n is a, c, g, or t
  misc_feature (951)..(952): n is a, c, g, or t
  misc_feature (956)..(956): n is a, c, g, or t
  misc_feature (958)..(958): n is a, c, g, or t
  misc_feature (966)..(967): n is a, c, g, or t
  misc_feature (969)..(970): n is a, c, g, or t
  misc_feature (972)..(972): n is a, c, g, or t
  misc_feature (977)..(979): n is a, c, g, or t
  misc_feature (981)..(981): n is a, c, g, or t
  misc_feature (987)..(987): n is a, c, g, or t
  misc_feature (990)..(991): n is a, c, g, or t
  misc_feature (1008)..(1008): n is a, c, g, or t
  misc_feature (1012)..(1012): n is a, c, g, or t
  misc_feature (1028)..(1031): n is a, c, g, or t
  misc_feature (1037)..(1038): n is a, c, g, or t
  misc_feature (1042)..(1042): n is a, c, g, or t
  misc_feature (1058)..(1062): n is a, c, g, or t
  misc_feature (1064)..(1065): n is a, c, g, or t
  misc_feature (1072)..(1072): n is a, c, g, or t
  misc_feature (1079)..(1079): n is a, c, g, or t
  misc_feature (1082)..(1086): n is a, c, g, or t
  misc_feature (1089)..(1089): n is a, c, g, or t
  misc_feature (1095)..(1096): n is a, c, g, or t
  misc_feature (1105)..(1105): n is a, c, g, or t
  misc_feature (1107)..(1108): n is a, c, g, or t
  misc_feature (1112)..(1112): n is a, c, g, or t
  misc_feature (1114)..(1114): n is a, c, g, or t
  misc_feature (1119)..(1120): n is a, c, g, or t
  misc_feature (1131)..(1131): n is a, c, g, or t
  misc_feature (1135)..(1135): n is a, c, g, or t
  misc_feature (1152)..(1152): n is a, c, g, or t
  misc_feature (1156)..(1160): n is a, c, g, or t
  misc_feature (1162)..(1162): n is a, c, g, or t
  misc_feature (1165)..(1166): n is a, c, g, or t
  misc_feature (1168)..(1168): n is a, c, g, or t
  misc_feature (1170)..(1171): n is a, c, g, or t
  misc_feature (1178)..(1178): n is a, c, g, or t
  misc_feature (1182)..(1187): n is a, c, g, or t
  misc_feature (1189)..(1189): n is a, c, g, or t
  misc_feature (1191)..(1192): n is a, c, g, or t
  misc_feature (1197)..(1198): n is a, c, g, or t
  misc_feature (1200)..(1200): n is a, c, g, or t
  misc_feature (1204)..(1204): n is a, c, g, or t
  misc_feature (1208)..(1209): n is a, c, g, or t
  misc_feature (1222)..(1223): n is a, c, g, or t
  misc_feature (1225)..(1225): n is a, c, g, or t
  misc_feature (1230)..(1230): n is a, c, g, or t
  misc_feature (1233)..(1233): n is a, c, g, or t
  misc_feature (1237)..(1237): n is a, c, g, or t
  misc_feature (1239)..(1240): n is a, c, g, or t
  misc_feature (1243)..(1243): n is a, c, g, or t
  misc_feature (1247)..(1248): n is a, c, g, or t
  misc_feature (1251)..(1251): n is a, c, g, or t
  misc_feature (1261)..(1261): n is a, c, g, or t
  misc_feature (1268)..(1269): n is a, c, g, or t
  misc_feature (1277)..(1277): n is a, c, g, or t
  misc_feature (1279)..(1280): n is a, c, g, or t
  misc_feature (1283)..(1283): n is a, c, g, or t
  misc_feature (1290)..(1290): n is a, c, g, or t
  misc_feature (1292)..(1292): n is a, c, g, or t
  misc_feature (1298)..(1298): n is a, c, g, or t
  misc_feature (1301)..(1301): n is a, c, g, or t
  misc_feature (1318)..(1319): n is a, c, g, or t
  misc_feature (1334)..(1334): n is a, c, g, or t
  misc_feature (1337)..(1338): n is a, c, g, or t
  misc_feature (1340)..(1340): n is a, c, g, or t
  misc_feature (1342)..(1342): n is a, c, g, or t
  misc_feature (1344)..(1344): n is a, c, g, or t
  misc_feature (1354)..(1354): n is a, c, g, or t
  misc_feature (1356)..(1356): n is a, c, g, or t
  misc_feature (1364)..(1364): n is a, c, g, or t
tagagagattactatgagaggatcgcatcaccatcaccatcacggatcctatttaggtgacactatagaatcgtcgacccacgcgtccggttgtgttgtgccaatggtggagaagaaaacttcggttcgctcccaggaccccgggcagcggcgggtgctggaccgggctgcccggcagcgtcgcatcaaccggcagctggaggccctggagaatgacaacttccaggatgacccccacgcgggactccctcagctcggcaagagactgcctcagtttgatgacgatgcggacactggaaagaaaaagaagaaaacccgaggtgatcattttaaacttcgcttccgaaaaaactttcaggccctgttggaggagcagaacttgagtgtggccgagggccctaactacctgacggcctgtgcgggacccccatcgcggccccagcgccccttctgtgctgtctgtggcttcccatccccctacacctgtgtcagctgcggtgcccggtactgcactgtgcgctgtctggggacccaccaggagaccaggtgtctgaagtggactgtgtgagcctgggcattcccagagaggaagggccgctgtgcactgcccggccttcagaaagacagaatttcatcacccaatgcagggggagctcttcctggaccaagggaggagccgctcattcacccaacaaaactgtgtcttatctgccaggaaagaccagcctcactcctgggaactgtctggcaggtaggctgggccccccagtgctgttagaataaaaagcctcgtgccgganaaaaaannnnnnnnnnnnnnnnnnnnnnnnnnnnnnnnnnnnnnnnnnnnnnnnnnnnnnnnnnnnnnnnnnnnnnnnnnnnnnnnnnnnnnnnnnnnnnnnnnnnnnnnnnnnnaaaangggccccncccccanangggggnnnantaanntttnantagggaanntnngnccccnnngnaaaaanccnnaaacccccaaaaccccnttgntttttttaaaaaactnnnnttggcnngggnttttttttggggaaannnnncnntttgggnatttttnggnnnnnggntttaanngaaaaaaancnngggntnccccnnttaattccccngggnccaaaaaaattttgggntttnnnnntnttnnangnnaaaaaanaaannnnnngngnnaatanncntttnaaannaaaaaaaaaaacnnanttttncgntttntnnttncccnnaanagttccccanttttttnnaaaaaagngnnggnaaaaaantncccttnacnttttaaaaaaaaatttnntggaaaaaaaaaggnttnnantnangggggggaancnttcccggnaaatttcccccc

SEQ ID NO: 762 - DNA, 1301 bp, Homo Sapiens
  misc_feature (3)..(5): n is a, c, g, or t
  misc_feature (7)..(11): n is a, c, g, or t
  misc_feature (986)..(986): n is a, c, g, or t
  misc_feature (1028)..(1028): n is a, c, g, or t
  misc_feature (1030)..(1030): n is a, c, g, or t
  misc_feature (1048)..(1048): n is a, c, g, or t
  misc_feature (1070)..(1070): n is a, c, g, or t
  misc_feature (1075)..(1075): n is a, c, g, or t
  misc_feature (1097)..(1097): n is a, c, g, or t
  misc_feature (1105)..(1105): n is a, c, g, or t
  misc_feature (1107)..(1107): n is a, c, g, or t
  misc_feature (1111)..(1111): n is a, c, g, or t
  misc_feature (1122)..(1122): n is a, c, g, or t
  misc_feature (1131)..(1131): n is a, c, g, or t
  misc_feature (1138)..(1138): n is a, c, g, or t
  misc_feature (1145)..(1145): n is a, c, g, or t
  misc_feature (1147)..(1147): n is a, c, g, or t
  misc_feature (1162)..(1162): n is a, c, g, or t
  misc_feature (1169)..(1169): n is a, c, g, or t
  misc_feature (1174)..(1174): n is a, c, g, or t
  misc_feature (1180)..(1180): n is a, c, g, or t
  misc_feature (1183)..(1183): n is a, c, g, or t
  misc_feature (1199)..(1199): n is a, c, g, or t
  misc_feature (1204)..(1204): n is a, c, g, or t
  misc_feature (1209)..(1209): n is a, c, g, or t
  misc_feature (1212)..(1213): n is a, c, g, or t
  misc_feature (1223)..(1223): n is a, c, g, or t
  misc_feature (1227)..(1227): n is a, c, g, or t
  misc_feature (1233)..(1233): n is a, c, g, or t
  misc_feature (1237)..(1237): n is a, c, g, or t
  misc_feature (1249)..(1249): n is a, c, g, or t
  misc_feature (1256)..(1256): n is a, c, g, or t
  misc_feature (1258)..(1258): n is a, c, g, or t
  misc_feature (1264)..(1264): n is a, c, g, or t
  misc_feature (1270)..(1271): n is a, c, g, or t
  misc_feature (1273)..(1274): n is a, c, g, or t
  misc_feature (1276)..(1277): n is a, c, g, or t
  misc_feature (1283)..(1284): n is a, c, g, or t
  misc_feature (1287)..(1287): n is a, c, g, or t
  misc_feature (1297)..(1297): n is a, c, g, or t
  misc_feature (1301)..(1301): n is a, c, g, or t
ttnnngnnnnngaatagagaaattactatgagaggatcgcatcaccatcaccatcacggatcctatttaggtgacactatagaatcgtcgacccacgcgtccgcccacgcgtccgagtgtcttcagcgtcatttgaccaagtgtgacctacgacatcctccaggcaatgagatttaccgcaagggcaccatctccttctttgagattgatggacgtaagaacaagagttattcccagaacctgtgtcttttggccaagtgtttccttgaccataagacactgtactatgacacagaccctttcctcttctacgtcatgacagagtatgactgtaagggcttccacatcgtgggctacttctccaaggagaaagaatcaacggaagactacaatgtggcctgcatcctaaccctgcctccctaccagcgccggggctacggcaagctgctgatcgagttcagtgagtatgtgtgctgcggccagggggtagtggacccactatcggtgcctcacaggcagatgggccaggctactgtgattctcaaccctggctgtgcagcccagcctctaggggagccagccagaaataacagtggcactctcccggggttctctccgttcaggctgactgccctgcttatctggggtaggttctcagccccccagtttgctccttggccagggttctaagtgccactcagctttccccaaatctgacttacgtgctcctgcctggagccatgggcagaaggttagtgagccgctggtgctgatgtatctggtaacgtgtgccatgatacgagtactggggcaaggaccagtggctaatgtccccagttgtcccctgagccttgcaggcaggtatccaaaatgctgtcagcagatagacgtaagcatgttgtccctcgctccttgtgtccagtgaggtcagtctcttaaagccagaagggactctgaacttcatcacacatggggctcttcagtgnccctcccccaaccctgaaggccccttcttcccagcctcttantnccccatcaccccccattntggtctgtctcaccactccttnggaanaaccaagctctgacctgaaaanaaggaggnanttcnagctgttgacnggggaaaanaaaaagnctttacngnatcaagggttagggnccattcnaaaantttatnggntaaaggaggcccaaanggggncaatnccnnaaaattcccncccnggaaancaanggggaggcttgnaaaaacncncttggnacctcnnanncnntggaannggngggggggggnaccn

SEQ ID NO: 763 - DNA, 1292 bp, Homo Sapiens
  misc_feature (949)..(949): n is a, c, g, or t
  misc_feature (972)..(972): n is a, c, g, or t
  misc_feature (979)..(979): n is a, c, g, or t
  misc_feature (984)..(984): n is a, c, g, or t
  misc_feature (987)..(987): n is a, c, g, or t
  misc_feature (990)..(990): n is a, c, g, or t
  misc_feature (999)..(1000): n is a, c, g, or t
  misc_feature (1007)..(1007): n is a, c, g, or t
  misc_feature (1019)..(1019): n is a, c, g, or t
  misc_feature (1032)..(1032): n is a, c, g, or t
  misc_feature (1034)..(1034): n is a, c, g, or t
  misc_feature (1040)..(1040): n is a, c, g, or t
  misc_feature (1051)..(1051): n is a, c, g, or t
  misc_feature (1054)..(1054): n is a, c, g, or t
  misc_feature (1060)..(1060): n is a, c, g, or t
  misc_feature (1062)..(1062): n is a, c, g, or t
  misc_feature (1068)..(1068): n is a, c, g, or t
  misc_feature (1083)..(1083): n is a, c, g, or t
  misc_feature (1090)..(1090): n is a, c, g, or t
  misc_feature (1093)..(1093): n is a, c, g, or t
  misc_feature (1096)..(1096): n is a, c, g, or t
  misc_feature (1099)..(1099): n is a, c, g, or t
  misc_feature (1104)..(1104): n is a, c, g, or t
  misc_feature (1125)..(1125): n is a, c, g, or t
  misc_feature (1135)..(1137): n is a, c, g, or t
  misc_feature (1165)..(1165): n is a, c, g, or t
  misc_feature (1167)..(1167): n is a, c, g, or t
  misc_feature (1169)..(1169): n is a, c, g, or t
  misc_feature (1182)..(1182): n is a, c, g, or t
  misc_feature (1191)..(1191): n is a, c, g, or t
  misc_feature (1195)..(1196): n is a, c, g, or t
  misc_feature (1198)..(1198): n is a, c, g, or t
  misc_feature (1205)..(1205): n is a, c, g, or t
  misc_feature (1211)..(1211): n is a, c, g, or t
  misc_feature (1219)..(1219): n is a, c, g, or t
  misc_feature (1221)..(1221): n is a, c, g, or t
  misc_feature (1224)..(1224): n is a, c, g, or t
  misc_feature (1228)..(1229): n is a, c, g, or t
  misc_feature (1234)..(1238): n is a, c, g, or t
  misc_feature (1249)..(1250): n is a, c, g, or t
  misc_feature (1259)..(1259): n is a, c, g, or t
  misc_feature (1261)..(1262): n is a, c, g, or t
  misc_feature (1265)..(1266): n is a, c, g, or t
  misc_feature (1278)..(1279): n is a, c, g, or t
  misc_feature (1281)..(1281): n is a, c, g, or t
  misc_feature (1285)..(1285): n is a, c, g, or t
  misc_feature (1290)..(1290): n is a, c, g, or t
tagagaaattaactatgagaggatcgcatcaccatcaccatcacggatcctatttaggtgacactatagaatcgtcgacccacgcgtccgcccacgcgtccgctgctctattaccagaccaactacctggtggtggctgccatgatgatttccattgtggggtttctgagtcccttcaacatgatcctgggaggaatcgtggtggtgctggtgttcacagggtttgtgtgggcagcccacaataaagacgtccttcgccggatgaagaagcgctaccccacgacgttcgttatggtggtcatgttggcgagctatttccttatctccatgtttggaggagtcatggtctttgtgtttggcattacttttcctttgctgttgatgtttatccatgcatcgttgagacttcggaacctcaagaacaaactggagaataaaatggaaggaataggtttgaagaggacaccgatgggcattgtcctggatgccctagaacagcaggaagaaggcatcaacagactcactgactatatcagcaaagtgaaggaataaacataacttacctgagctagggttgcagcagaaattgagttgcagcttgcccttgtccagacctatgttctgcttgcgtttttgaaacaggaggtgcacgtaccacccaattatctatggcagcatgcatgtataggccgaactattatcagctctgatgtttcagagagaagacctcagaaaccgaaagaaaaccaccaccctcctattgtgtctgaagtttcacgtgtgtttatgaaatctaatgggaaatggatcacacgatttctttaagggaattaaaaaaaataaaagaattacggcttttacagcaacaatacgattatcttataggaaaaaaaaaatcattgtaaaagtatcaagacatacgagtaaatgaaaaggctgttaaagtaangacatcatgggtaacctgttccnaatcccnaaaantgnaanggggggaannaaaatantttttatattcncttaaaatcaaanangatccnatcccttgccnccngttgangngcaggnaaactggttaacccnttgtccnacntcnttnaaaanaaaaaaaaaaccggtttaagnaaatttgtannnttttggaaaattttgaaaagccaaaaangngntttccccccaaanatttggtgnaaanntnaaggccntttccntaaaaggntnccncttnnaaccnnnnnttttcgggggnntttttaaancnnccnnccaaaaaaaacnnantttnttttnaa

SEQ ID NO: 764 - DNA, 1295 bp, Homo Sapiens
  misc_feature (3)..(3): n is a, c, g, or t
  misc_feature (16)..(17): n is a, c, g, or t
  misc_feature (19)..(19): n is a, c, g, or t
  misc_feature (39)..(39): n is a, c, g, or t
  misc_feature (46)..(46): n is a, c, g, or t
  misc_feature (53)..(53): n is a, c, g, or t
  misc_feature (83)..(83): n is a, c, g, or t
  misc_feature (96)..(96): n is a, c, g, or t
  misc_feature (890)..(890): n is a, c, g, or t
  misc_feature (957)..(957): n is a, c, g, or t
  misc_feature (989)..(989): n is a, c, g, or t
  misc_feature (1027)..(1027): n is a, c, g, or t
  misc_feature (1034)..(1034): n is a, c, g, or t
  misc_feature (1046)..(1046): n is a, c, g, or t
  misc_feature (1049)..(1049): n is a, c, g, or t
  misc_feature (1075)..(1075): n is a, c, g, or t
  misc_feature (1083)..(1083): n is a, c, g, or t
  misc_feature (1088)..(1088): n is a, c, g, or t
  misc_feature (1092)..(1092): n is a, c, g, or t
  misc_feature (1095)..(1095): n is a, c, g, or t
  misc_feature (1103)..(1103): n is a, c, g, or t
  misc_feature (1107)..(1107): n is a, c, g, or t
  misc_feature (1114)..(1114): n is a, c, g, or t
  misc_feature (1146)..(1147): n is a, c, g, or t
  misc_feature (1150)..(1150): n is a, c, g, or t
  misc_feature (1164)..(1164): n is a, c, g, or t
  misc_feature (1176)..(1177): n is a, c, g, or t
  misc_feature (1180)..(1181): n is a, c, g, or t
  misc_feature (1184)..(1184): n is a, c, g, or t
  misc_feature (1190)..(1190): n is a, c, g, or t
  misc_feature (1195)..(1196): n is a, c, g, or t
  misc_feature (1199)..(1199): n is a, c, g, or t
  misc_feature (1204)..(1204): n is a, c, g, or t
  misc_feature (1208)..(1208): n is a, c, g, or t
  misc_feature (1233)..(1233): n is a, c, g, or t
  misc_feature (1266)..(1266): n is a, c, g, or t
  misc_feature (1268)..(1268): n is a, c, g, or t
  misc_feature (1274)..(1274): n is a, c, g, or t
  misc_feature (1276)..(1276): n is a, c, g, or t
  misc_feature (1280)..(1280): n is a, c, g, or t
  misc_feature (1288)..(1289): n is a, c, g, or t
  misc_feature (1292)..(1293): n is a, c, g, or t
  misc_feature (1295)..(1295): n is a, c, g, or t
ttngaggaaaattacnnangagagggatcgcatcaccantcaccantcacggnatcctatttagggtgacactatagaatcgntcgacccacgcgntccggcccgcgcccgacggagcctgttcgcgtcgactgcccagagtccgcgaatcctccgctccgagcccgtccggactcccccgatcccagctttctctcctttgaaaacactaagaataatgtcactgcatcagtttttactagagccaatcacctgtcatgcctggaacagggatcgtactcagattgccctcagtcccaataatcacgaagtgcacatctataagaagaacgggagccagtgggtgaaagctcatgaactcaaggagcacaacggacacatcacaggtattgactgggctcccaagagcgaccgcattgtcacttgtggggcagaccgcaatgcctatgtctggagtcagaaagatggtgtttggaagccaaccctggtgatcctgagaattaatcgcgcagctacttttgtgaagtggtcccccctagagaacaaatttgctgtgggaagtggagcacgactcatttctgtttgttactttgagtctgaaaatgactgagtgttttctgcctacattaaagaagtggatgaaaagccagccagcacgccctggggcagcaagatgccttttgggcagctgatgtcagagtttggtggcagtggcactggtggctgggtccacggggtaagcttctctgccagtgggagccgcctggcctgggtcagccacgacagcaccgtgtctgttgctgatgcctcaaaaagtgtgcagtgagtatttgcctttcatttggaaggtggggaacaaggggtgggatctctcaccagctgaaccaggnactgccctttcctgggggtgttagcacagggcacaaacataaaaaccttaatcaggccaggcgtggnggctcacgcctgtatcccacacttttgggagncgaggtgggtggatcacaaggtcagcagttcagaacancctggcnaaaatgggaaanccntgtctctactaaaaaataaaaaaaanttatcccnggtgngggnggnaaggggcntgtncctcccnacttattcggaaagggtgaaggcaaaaaattnnttngaaccctgggaagncaaagttttaannggnnccnaaattntgccnntgntttcncccnggggaaaaaaaaaaaacccccttcnaaaaaaaaaaaaaaaaaagggggcccccccctnanggggcnanaaancttaattnnggnntn

SEQ ID NO: 765 - DNA, 1200 bp, Homo Sapiens
  misc_feature (939)..(939): n is a, c, g, or t
  misc_feature (943)..(943): n is a, c, g, or t
  misc_feature (964)..(964): n is a, c, g, or t
  misc_feature (973)..(973): n is a, c, g, or t
  misc_feature (997)..(997): n is a, c, g, or t
  misc_feature (1006)..(1006): n is a, c, g, or t
  misc_feature (1008)..(1008): n is a, c, g, or t
  misc_feature (1012)..(1012): n is a, c, g, or t
  misc_feature (1016)..(1016): n is a, c, g, or t
  misc_feature (1042)..(1042): n is a, c, g, or t
  misc_feature (1094)..(1095): n is a, c, g, or t
  misc_feature (1108)..(1108): n is a, c, g, or t
  misc_feature (1122)..(1122): n is a, c, g, or t
  misc_feature (1129)..(1129): n is a, c, g, or t
  misc_feature (1133)..(1133): n is a, c, g, or t
  misc_feature (1135)..(1136): n is a, c, g, or t
  misc_feature (1145)..(1146): n is a, c, g, or t
  misc_feature (1153)..(1153): n is a, c, g, or t
  misc_feature (1155)..(1155): n is a, c, g, or t
  misc_feature (1159)..(1159): n is a, c, g, or t
  misc_feature (1167)..(1168): n is a, c, g, or t
  misc_feature (1175)..(1175): n is a, c, g, or t
  misc_feature (1179)..(1179): n is a, c, g, or t
  misc_feature (1191)..(1192): n is a, c, g, or t
  misc_feature (1197)..(1197): n is a, c, g, or t
aatagagaaattactatgagaggatcgcatcaccatcaccatcacggatcctatttaggtgacactatagaatcgtcgacccacgcgtccgccgtgaagaaggcagataaagtggagcagaggaagctgctggaaaagtgtgccatgaccgctctgagctccaagctgatctcccagcagaaagctttctttgctaagatggtggtggatgcagtgatgatgctcgatgatttgctgcagcttaaaatgattggaatcaagaaggtacagggtggagccctcgaggattctcagctggtagctggtgttgcattcaagaagactttctcttacgctgggtttgaaatgcaacccaaaaagtaccacaatcccaagattgcccttttgaatgtcgagctcgagttgaaagctgagaaagacaatgctgagataagagtccacacagttgaggattatcaggcaattgttgatgctgagtggaacattctctatgacaagttagagaagatccatcattctggagccaaagttgtcttgtccaaactccccattggggatgtggccacccagtactttgctgacagggacatgttctgtgctggccgagtacctgaggaggatctgaagaggacaatgatggcctgtggaggctcaatccagaccagtgtgaatgctctgtcagcagatgtgctgggtcgatgccaggtgtttgaagagacccagattggaggcgagaggtacaatttttttactggctgccccaaggccaagacatgcaccttcattctccgtggcggcgccgagcagtttatggaggagacagagcggtctctgcatgatgccatcatgatcgtcaggagggccatcaagaatgattcagtggtggctggtggcggggccattgagatggaactctccaagtacctgcgggattactcnaggnactattccaggaaaacagcanctgttgatnggggcatatgccaaggccttgganattatcccncnccanctgngtgacaatgctggctttgatgccccnaacattctcaaaagctgcgggctcggcatgcccaggggggtacatggtatgnntaaacttcacacnaggacttgctgacnctttgancttncnnggggacccnnttggggngnatantgcctganncaccccngagntgcggcctgatnngtcgnaaa

SEQ ID NO: 766 - DNA, 1200 bp, Homo Sapiens
  misc_feature (797)..(797): n is a, c, g, or t
  misc_feature (824)..(824): n is a, c, g, or t
  misc_feature (947)..(947): n is a, c, g, or t
  misc_feature (954)..(954): n is a, c, g, or t
  misc_feature (990)..(990): n is a, c, g, or t
  misc_feature (994)..(994): n is a, c, g, or t
  misc_feature (996)..(996): n is a, c, g, or t
  misc_feature (1011)..(1011): n is a, c, g, or t
  misc_feature (1020)..(1020): n is a, c, g, or t
  misc_feature (1040)..(1040): n is a, c, g, or t
  misc_feature (1048)..(1048): n is a, c, g, or t
  misc_feature (1065)..(1065): n is a, c, g, or t
  misc_feature (1069)..(1069): n is a, c, g, or t
  misc_feature (1076)..(1076): n is a, c, g, or t
  misc_feature (1079)..(1079): n is a, c, g, or t
  misc_feature (1085)..(1085): n is a, c, g, or t
  misc_feature (1087)..(1087): n is a, c, g, or t
  misc_feature (1089)..(1089): n is a, c, g, or t
  misc_feature (1092)..(1092): n is a, c, g, or t
  misc_feature (1098)..(1099): n is a, c, g, or t
  misc_feature (1106)..(1106): n is a, c, g, or t
  misc_feature (1122)..(1122): n is a, c, g, or t
  misc_feature (1128)..(1128): n is a, c, g, or t
  misc_feature (1135)..(1135): n is a, c, g, or t
  misc_feature (1139)..(1139): n is a, c, g, or t
  misc_feature (1146)..(1147): n is a, c, g, or t
  misc_feature (1152)..(1152): n is a, c, g, or t
  misc_feature (1167)..(1167): n is a, c, g, or t
  misc_feature (1180)..(1180): n is a, c, g, or t
tagagaaattactatgagaggatcgcatcaccatcaccatcacggatcctatttaggtgacactatagaatcgtcgacccacgcgtccgcaaaagaagtctacgaattgttagacagtccaggaaaagtcctcctgcagtccaaggaccagattacagcaggaaatgcagctagaaaaaaccacctggaaggaaaagctgcaatctcaaataaaatcaccagttgtatttttcagttattacaggaagcaggtattaaaactgccttcaccagaaaatgtggggagacagctttcattgcaccgcagtgtgaaatgattccaattgaatgggtttgcagaagaatagcaactggttcttttctcaaaagaaatcctggtgtcaaggaaggatataagttttacccacctaaagtggagttgtttttcaaggatgatgccaataatgacccacagtggtctgaggaacagctgattgctgcaaaattttgctttgctggacttcttataggccagactgaagtggatatcatgagtcatgctacacaggctatatttgaaatactggagaaatcctggttgccccagaattgtacactggttgatatgaagattgaatttggtgttgatgtaaccaccaaagaaattgttcttgctgatgttattgacaatgattcctggagactctggccatcaggagatcgaagccaacagaaagacaaacagtcttatcgggacctcaaagaagtaactcctgaagggctccaaatggtaaagaaaaactttgagtgggttgcanagagagtagagttgcttttgaaatcanaaagtcagtgcagggttgtagtgttgatgggctctacttctgatcttggtcactgtgaaaaatcaagaaggcctgtggaaattttggcattcctgtgaacttcgagtaacatctgcccataanggaccanatgaaactctgaggataaagctgaatatgaaggganggcntnccactgtatttgtgncatggcagncaaaataatggttgggaccntgatgtcngggaacctgcatatccngttntcactgnccncccccncncnaantggggnntcaggangggggccttccctccnctaccnggggctngggnttcaccnnacttnccccaaagaaccccncatttgcggcccnaaatttgggtaaaccccctt

SEQ ID NO: 767 - DNA, 1363 bp, Homo Sapiens
  misc_feature (812)..(812): n is a, c, g, or t
  misc_feature (839)..(839): n is a, c, g, or t
  misc_feature (890)..(890): n is a, c, g, or t
  misc_feature (921)..(921): n is a, c, g, or t
  misc_feature (923)..(923): n is a, c, g, or t
  misc_feature (931)..(931): n is a, c, g, or t
  misc_feature (946)..(946): n is a, c, g, or t
  misc_feature (949)..(949): n is a, c, g, or t
  misc_feature (951)..(951): n is a, c, g, or t
  misc_feature (958)..(958): n is a, c, g, or t
  misc_feature (965)..(965): n is a, c, g, or t
  misc_feature (968)..(968): n is a, c, g, or t
  misc_feature (1006)..(1006): n is a, c, g, or t
  misc_feature (1011)..(1011): n is a, c, g, or t
  misc_feature (1023)..(1023): n is a, c, g, or t
  misc_feature (1027)..(1027): n is a, c, g, or t
  misc_feature (1029)..(1029): n is a, c, g, or t
  misc_feature (1046)..(1046): n is a, c, g, or t
  misc_feature (1063)..(1063): n is a, c, g, or t
  misc_feature (1068)..(1068): n is a, c, g, or t
  misc_feature (1102)..(1102): n is a, c, g, or t
  misc_feature (1116)..(1116): n is a, c, g, or t
  misc_feature (1121)..(1121): n is a, c, g, or t
  misc_feature (1125)..(1125): n is a, c, g, or t
  misc_feature (1141)..(1141): n is a, c, g, or t
  misc_feature (1144)..(1144): n is a, c, g, or t
  misc_feature (1146)..(1146): n is a, c, g, or t
  misc_feature (1148)..(1148): n is a, c, g, or t
  misc_feature (1158)..(1160): n is a, c, g, or t
  misc_feature (1167)..(1167): n is a, c, g, or t
  misc_feature (1175)..(1175): n is a, c, g, or t
  misc_feature (1180)..(1180): n is a, c, g, or t
  misc_feature (1190)..(1190): n is a, c, g, or t
  misc_feature (1198)..(1198): n is a, c, g, or t
  misc_feature (1201)..(1201): n is a, c, g, or t
  misc_feature (1224)..(1224): n is a, c, g, or t
  misc_feature (1229)..(1229): n is a, c, g, or t
  misc_feature (1233)..(1233): n is a, c, g, or t
  misc_feature (1235)..(1238): n is a, c, g, or t
  misc_feature (1251)..(1251): n is a, c, g, or t
  misc_feature (1255)..(1258): n is a, c, g, or t
  misc_feature (1262)..(1262): n is a, c, g, or t
  misc_feature (1264)..(1264): n is a, c, g, or t
  misc_feature (1266)..(1266): n is a, c, g, or t
  misc_feature (1269)..(1269): n is a, c, g, or t
  misc_feature (1272)..(1272): n is a, c, g, or t
  misc_feature (1278)..(1278): n is a, c, g, or t
  misc_feature (1281)..(1281): n is a, c, g, or t
  misc_feature (1288)..(1288): n is a, c, g, or t
  misc_feature (1293)..(1293): n is a, c, g, or t
  misc_feature (1296)..(1296): n is a, c, g, or t
  misc_feature (1303)..(1303): n is a, c, g, or t
  misc_feature (1307)..(1307): n is a, c, g, or t
  misc_feature (1310)..(1310): n is a, c, g, or t
  misc_feature (1326)..(1333): n is a, c, g, or t
  misc_feature (1335)..(1336): n is a, c, g, or t
  misc_feature (1338)..(1341): n is a, c, g, or t
  misc_feature (1349)..(1351): n is a, c, g, or t
  misc_feature (1354)..(1355): n is a, c, g, or t
  misc_feature (1357)..(1357): n is a, c, g, or t
  misc_feature (1359)..(1363): n is a, c, g, or t
tagagaaattactatgagaggatcgcatcaccatcaccatcacggatcctatttaggtgacactatagaatcgtcgacccacgcgtccgcccacgcgtccggcgcatcatggcgtggcaagagccttcgggttcagaagatcaggccttctatcctgggctgcaacatccttcgagttgaatattccttactgatctatgttagcgttcctggatccaagaaggtcatccttgacctgcccctggtaattggcagcagatcaggtctaagcagcagaacatccagcatggccagccgaaccagctctgagatgagttgggtagatctgaacatccctgataccccagaagctcctccctgctatatggatgtcattcctgaagatcaccgattggagagcccaaccactcctctgctagatgacatggatggctctcaagacagccctatctttatgtatgcccctgagttcaagttcatgccaccaccgacttatactgaggtggatccctgcatcctcaacaacaatgtgcagtgagcatgtggaagaaaagaagcagctttacctacttgtttctttttgtctctcttcctggacactcactttttcagagactcaacagtctctgcaatggagtgtgggtccaccttagcctctgacttcctaatgtaggaggtggtcagcaggcaatctcctgggccttaaaggatgcggactcatcctcagccagcgcccatgttgtgatacaggggtgtttgttggatgggtttaaaaataactagaaaaactcaggcccatccatttttctcanatctccttgaaaattgaggccttttcnatagtttcgggtcaggtaaaaatggcctcctggcgtaagctttttcaaggnttttttggaggcttttttgtaaaattgtganangaactttnggacctttgaacttnacntnatcatgnggaaaanaanccattttaacaaactaggaaaatgaaaagggaaattgnggccnaaacctttgggnaaangnaggttcttgaaaatcanggtttcccctttgggcnctttnaaaaaaaaaaaaaaaaaagggggccccccccccnaaggggagccgaanaaacnttantaactgaacttggacnccngntnaaaaaacccnnnaggaccnccaaaacnccctnggattttttnaaaacctnggnttcccccggggttttttttgggnaaaanccancnnnnttggggaattttngggnnnnggancntnaanggnaaaaanccngggaatnccccngtnaaacccngggnccnaaaaattttgggtttnnnnnnnncnngnnnnaaaaaaannnttnngntnnnnn

SEQ ID NO: 768 - DNA, 1396 bp, Homo Sapiens
  misc_feature (796)..(796): n is a, c, g, or t
  misc_feature (816)..(816): n is a, c, g, or t
  misc_feature (826)..(826): n is a, c, g, or t
  misc_feature (832)..(832): n is a, c, g, or t
  misc_feature (853)..(853): n is a, c, g, or t
  misc_feature (868)..(868): n is a, c, g, or t
  misc_feature (874)..(874): n is a, c, g, or t
  misc_feature (884)..(884): n is a, c, g, or t
  misc_feature (923)..(923): n is a, c, g, or t
  misc_feature (944)..(944): n is a, c, g, or t
  misc_feature (948)..(948): n is a, c, g, or t
  misc_feature (952)..(952): n is a, c, g, or t
  misc_feature (961)..(961): n is a, c, g, or t
  misc_feature (973)..(974): n is a, c, g, or t
  misc_feature (977)..(977): n is a, c, g, or t
  misc_feature (982)..(982): n is a, c, g, or t
  misc_feature (997)..(998): n is a, c, g, or t
  misc_feature (1000)..(1000): n is a, c, g, or t
  misc_feature (1007)..(1007): n is a, c, g, or t
  misc_feature (1011)..(1011): n is a, c, g, or t
  misc_feature (1030)..(1030): n is a, c, g, or t
  misc_feature (1034)..(1034): n is a, c, g, or t
  misc_feature (1036)..(1036): n is a, c, g, or t
  misc_feature (1041)..(1041): n is a, c, g, or t
  misc_feature (1043)..(1043): n is a, c, g, or t
  misc_feature (1052)..(1053): n is a, c, g, or t
  misc_feature (1064)..(1065): n is a, c, g, or t
  misc_feature (1069)..(1070): n is a, c, g, or t
  misc_feature (1089)..(1091): n is a, c, g, or t
  misc_feature (1103)..(1103): n is a, c, g, or t
  misc_feature (1105)..(1105): n is a, c, g, or t
  misc_feature (1118)..(1118): n is a, c, g, or t
  misc_feature (1138)..(1138): n is a, c, g, or t
  misc_feature (1151)..(1151): n is a, c, g, or t
  misc_feature (1153)..(1153): n is a, c, g, or t
  misc_feature (1155)..(1155): n is a, c, g, or t
  misc_feature (1161)..(1161): n is a, c, g, or t
  misc_feature (1163)..(1163): n is a, c, g, or t
  misc_feature (1169)..(1169): n is a, c, g, or t
  misc_feature (1171)..(1171): n is a, c, g, or t
  misc_feature (1176)..(1176): n is a, c, g, or t
  misc_feature (1180)..(1181): n is a, c, g, or t
  misc_feature (1184)..(1185): n is a, c, g, or t
  misc_feature (1187)..(1187): n is a, c, g, or t
  misc_feature (1197)..(1198): n is a, c, g, or t
  misc_feature (1207)..(1207): n is a, c, g, or t
  misc_feature (1210)..(1211): n is a, c, g, or t
  misc_feature (1216)..(1216): n is a, c, g, or t
  misc_feature (1218)..(1218): n is a, c, g, or t
  misc_feature (1229)..(1229): n is a, c, g, or t
  misc_feature (1231)..(1231): n is a, c, g, or t
  misc_feature (1236)..(1236): n is a, c, g, or t
  misc_feature (1239)..(1241): n is a, c, g, or t
  misc_feature (1254)..(1254): n is a, c, g, or t
  misc_feature (1266)..(1266): n is a, c, g, or t
  misc_feature (1276)..(1276): n is a, c, g, or t
  misc_feature (1282)..(1282): n is a, c, g, or t
  misc_feature (1291)..(1291): n is a, c, g, or t
  misc_feature (1299)..(1299): n is a, c, g, or t
  misc_feature (1305)..(1306): n is a, c, g, or t
  misc_feature (1314)..(1314): n is a, c, g, or t
  misc_feature (1321)..(1326): n is a, c, g, or t
  misc_feature (1329)..(1329): n is a, c, g, or t
  misc_feature (1333)..(1333): n is a, c, g, or t
  misc_feature (1335)..(1336): n is a, c, g, or t
  misc_feature (1339)..(1341): n is a, c, g, or t
  misc_feature (1343)..(1343): n is a, c, g, or t
  misc_feature (1346)..(1346): n is a, c, g, or t
  misc_feature (1348)..(1348): n is a, c, g, or t
  misc_feature (1362)..(1363): n is a, c, g, or t
  misc_feature (1371)..(1371): n is a, c, g, or t
  misc_feature (1376)..(1376): n is a, c, g, or t
  misc_feature (1380)..(1381): n is a, c, g, or t
  misc_feature (1386)..(1386): n is a, c, g, or t
  misc_feature (1390)..(1390): n is a, c, g, or t
  misc_feature (1392)..(1396): n is a, c, g, or t
atagagaaattactatgagaggatcgcatcaccatcaccatcacggatcctatttaggtgacactatagaatcgtcgacccacgcgtccgcccacgcgtccgagcagagtattggtgctgctggaagccagaaggaaggtccagagggagccaacctgttcatctaccacctgccccaggagtttggtgatcaggacctgctgcagatgtttatgccctttgggaatgtcgtgtctgccaaggttttcatagacaagcagacaaacctgagcaagtgttttggttttgtaagttacgacaatcctgtttcggcccaagctgccatccagtccatgaacggctttcagattggcatgaagcggcttaaagtgcagctcaaacgttcgaagaatgacagcaagccctactgagcgtgctcccctctgagactggagtgagagggtcttctggtaagtgggggaggagcacccttaatgattcgaagccctgaggctgtgtgttgacagccctggaccctgatccctgccactctcgcaggcacagcttgccctgaagactcggctactgccttctgtgggagtttcgcttcgtacagaggacaagtttgtgctttggtttccagtgttttactttggagtttaggtgccatatcctgaggttttttttgtttttgtttttgtttctcctttatttaaagtttgctgtgtttgtaaccagtgtgtgttgagaaggaccaacaccaaaccaccctggggaagggggacagggaaacatttaacacagacgatgatcaggnatttgccccaaaccaccccnagaaaaaagnactgantggaacaaaaaagtgaccccnaaaacctcctcttantgtganggtgggttanaatgaaaactgacccctgggaacctgtggggaacaaaancggcctttgggggaaaaaatnggantgancaaaacccntaatgccctggnnagntgganaactcaaactcctgnnanagctacntttngggaaaaaattttttgaancccnanttttncnaaatctttnnccggaaatttnnggcnngcccttttcaaaaaaaggnnntttaacaattcncnggaaaaaaaacancctgttaaccccgaaataancaaaaaaaggggngnancccccntntaaaantnccccncccnnaannanaattggattnncctttcccnggnnggggncnttttggaaaananccccnaannnttatttttttccncccaattaaacnggcccttttnaagggnccttttaancccccaanaaaaannccgggttnttttttnnnnnnccncaanannaannncnccncncccccctttttttnnaaaaaacnaaaantttnnttttntaangnnnnn

SEQ ID NO: 769 - DNA, 1513 bp, Homo Sapiens
  misc_feature (258)..(258): n is a, c, g, or t
  misc_feature (500)..(500): n is a, c, g, or t
  misc_feature (653)..(653): n is a, c, g, or t
  misc_feature (667)..(667): n is a, c, g, or t
  misc_feature (674)..(674): n is a, c, g, or t
  misc_feature (681)..(681): n is a, c, g, or t
  misc_feature (690)..(690): n is a, c, g, or t
  misc_feature (694)..(694): n is a, c, g, or t
  misc_feature (709)..(710): n is a, c, g, or t
  misc_feature (714)..(714): n is a, c, g, or t
  misc_feature (720)..(720): n is a, c, g, or t
  misc_feature (728)..(728): n is a, c, g, or t
  misc_feature (740)..(740): n is a, c, g, or t
  misc_feature (743)..(745): n is a, c, g, or t
  misc_feature (761)..(761): n is a, c, g, or t
  misc_feature (771)..(773): n is a, c, g, or t
  misc_feature (793)..(793): n is a, c, g, or t
  misc_feature (795)..(795): n is a, c, g, or t
  misc_feature (802)..(802): n is a, c, g, or t
  misc_feature (804)..(805): n is a, c, g, or t
  misc_feature (809)..(809): n is a, c, g, or t
  misc_feature (811)..(811): n is a, c, g, or t
  misc_feature (817)..(817): n is a, c, g, or t
  misc_feature (825)..(825): n is a, c, g, or t
  misc_feature (829)..(830): n is a, c, g, or t
  misc_feature (832)..(832): n is a, c, g, or t
  misc_feature (837)..(838): n is a, c, g, or t
  misc_feature (841)..(841): n is a, c, g, or t
  misc_feature (854)..(854): n is a, c, g, or t
  misc_feature (858)..(858): n is a, c, g, or t
  misc_feature (870)..(870): n is a, c, g, or t
  misc_feature (875)..(875): n is a, c, g, or t
  misc_feature (883)..(883): n is a, c, g, or t
  misc_feature (885)..(885): n is a, c, g, or t
  misc_feature (892)..(892): n is a, c, g, or t
  misc_feature (896)..(896): n is a, c, g, or t
  misc_feature (905)..(905): n is a, c, g, or t
  misc_feature (908)..(908): n is a, c, g, or t
  misc_feature (910)..(913): n is a, c, g, or t
  misc_feature (924)..(925): n is a, c, g, or t
  misc_feature (927)..(927): n is a, c, g, or t
  misc_feature (936)..(936): n is a, c, g, or t
  misc_feature (940)..(943): n is a, c, g, or t
  misc_feature (954)..(954): n is a, c, g, or t
  misc_feature (957)..(957): n is a, c, g, or t
  misc_feature (964)..(964): n is a, c, g, or t
  misc_feature (970)..(970): n is a, c, g, or t
  misc_feature (973)..(973): n is a, c, g, or t
  misc_feature (975)..(975): n is a, c, g, or t
  misc_feature (980)..(981): n is a, c, g, or t
  misc_feature (984)..(985): n is a, c, g, or t
  misc_feature (991)..(991): n is a, c, g, or t
  misc_feature (994)..(994): n is a, c, g, or t
  misc_feature (998)..(998): n is a, c, g, or t
  misc_feature (1000)..(1001): n is a, c, g, or t
  misc_feature (1008)..(1008): n is a, c, g, or t
  misc_feature (1013)..(1020): n is a, c, g, or t
  misc_feature (1025)..(1026): n is a, c, g, or t
  misc_feature (1030)..(1030): n is a, c, g, or t
  misc_feature (1034)..(1034): n is a, c, g, or t
  misc_feature (1037)..(1037): n is a, c, g, or t
  misc_feature (1039)..(1041): n is a, c, g, or t
  misc_feature (1049)..(1049): n is a, c, g, or t
  misc_feature (1057)..(1058): n is a, c, g, or t
  misc_feature (1061)..(1061): n is a, c, g, or t
  misc_feature (1064)..(1065): n is a, c, g, or t
  misc_feature (1070)..(1071): n is a, c, g, or t
  misc_feature (1076)..(1076): n is a, c, g, or t
  misc_feature (1078)..(1078): n is a, c, g, or t
  misc_feature (1080)..(1080): n is a, c, g, or t
  misc_feature (1092)..(1092): n is a, c, g, or t
  misc_feature (1100)..(1100): n is a, c, g, or t
  misc_feature (1102)..(1102): n is a, c, g, or t
  misc_feature (1104)..(1105): n is a, c, g, or t
  misc_feature (1107)..(1107): n is a, c, g, or t
  misc_feature (1111)..(1111): n is a, c, g, or t
  misc_feature (1113)..(1113): n is a, c, g, or t
  misc_feature (1118)..(1119): n is a, c, g, or t
  misc_feature (1121)..(1121): n is a, c, g, or t
  misc_feature (1123)..(1124): n is a, c, g, or t
  misc_feature (1129)..(1130): n is a, c, g, or t
  misc_feature (1132)..(1132): n is a, c, g, or t
  misc_feature (1136)..(1137): n is a, c, g, or t
  misc_feature (1144)..(1146): n is a, c, g, or t
  misc_feature (1151)..(1151): n is a, c, g, or t
  misc_feature (1155)..(1155): n is a, c, g, or t
  misc_feature (1160)..(1160): n is a, c, g, or t
  misc_feature (1164)..(1164): n is a, c, g, or t
  misc_feature (1168)..(1169): n is a, c, g, or t
  misc_feature (1172)..(1172): n is a, c, g, or t
  misc_feature (1174)..(1177): n is a, c, g, or t
  misc_feature (1179)..(1179): n is a, c, g, or t
  misc_feature (1182)..(1182): n is a, c, g, or t
  misc_feature (1187)..(1187): n is a, c, g, or t
  misc_feature (1189)..(1189): n is a, c, g, or t
  misc_feature (1197)..(1197): n is a, c, g, or t
  misc_feature (1200)..(1202): n is a, c, g, or t
  misc_feature (1205)..(1205): n is a, c, g, or t
  misc_feature (1215)..(1215): n is a, c, g, or t
  misc_feature (1224)..(1225): n is a, c, g, or t
  misc_feature (1228)..(1228): n is a, c, g, or t
  misc_feature (1230)..(1230): n is a, c, g, or t
  misc_feature (1232)..(1232): n is a, c, g, or t
  misc_feature (1235)..(1235): n is a, c, g, or t
  misc_feature (1243)..(1243): n is a, c, g, or t
  misc_feature (1250)..(1250): n is a, c, g, or t
  misc_feature (1253)..(1254): n is a, c, g, or t
  misc_feature (1259)..(1259): n is a, c, g, or t
  misc_feature (1264)..(1264): n is a, c, g, or t
  misc_feature (1267)..(1267): n is a, c, g, or t
  misc_feature (1276)..(1276): n is a, c, g, or t
  misc_feature (1279)..(1280): n is a, c, g, or t
  misc_feature (1282)..(1282): n is a, c, g, or t
  misc_feature (1285)..(1285): n is a, c, g, or t
  misc_feature (1290)..(1290): n is a, c, g, or t
  misc_feature (1292)..(1292): n is a, c, g, or t
  misc_feature (1294)..(1294): n is a, c, g, or t
  misc_feature (1296)..(1296): n is a, c, g, or t
  misc_feature (1302)..(1303): n is a, c, g, or t
  misc_feature (1306)..(1306): n is a, c, g, or t
  misc_feature (1313)..(1313): n is a, c, g, or t
  misc_feature (1317)..(1317): n is a, c, g, or t
  misc_feature (1322)..(1322): n is a, c, g, or t
  misc_feature (1333)..(1333): n is a, c, g, or t
  misc_feature (1341)..(1341): n is a, c, g, or t
  misc_feature (1349)..(1349): n is a, c, g, or t
  misc_feature (1361)..(1361): n is a, c, g, or t
  misc_feature (1364)..(1365): n is a, c, g, or t
  misc_feature (1367)..(1367): n is a, c, g, or t
  misc_feature (1374)..(1374): n is a, c, g, or t
  misc_feature (1378)..(1378): n is a, c, g, or t
  misc_feature (1381)..(1381): n is a, c, g, or t
  misc_feature (1386)..(1387): n is a, c, g, or t
  misc_feature (1389)..(1389): n is a, c, g, or t
  misc_feature (1396)..(1396): n is a, c, g, or t
  misc_feature (1398)..(1398): n is a, c, g, or t
  misc_feature (1402)..(1402): n is a, c, g, or t
  misc_feature (1407)..(1408): n is a, c, g, or t
  misc_feature (1410)..(1410): n is a, c, g, or t
  misc_feature (1412)..(1413): n is a, c, g, or t
  misc_feature (1421)..(1422): n is a, c, g, or t
  misc_feature (1425)..(1426): n is a, c, g, or t
  misc_feature (1429)..(1429): n is a, c, g, or t
  misc_feature (1435)..(1435): n is a, c, g, or t
  misc_feature (1443)..(1443): n is a, c, g, or t
  misc_feature (1446)..(1446): n is a, c, g, or t
  misc_feature (1464)..(1464): n is a, c, g, or t
  misc_feature (1473)..(1473): n is a, c, g, or t
  misc_feature (1477)..(1477): n is a, c, g, or t
  misc_feature (1505)..(1505): n is a, c, g, or t
  misc_feature (1512)..(1513): n is a, c, g, or t
tagagagaatactatgagaggatcgcatcaccatcaccatcacggatcctatttaggtgacactatagaatcgtcgacccacgcgtccgcggacgcgatgggtggcgaagcggtgctgcctccagcccagagatgccgccaagatgcccgagagcgcttggaagtttctcttctacctgggcagctggagctacagtgcctacctgctgtttggcaccgactaccccttcttccatgacccaccatctgtcttctacnactggacgccgggcatggcagtgccacgggacattgcagccgcctacctgctccagggaagcttctatggccactccatctacgctacgctatacatggacacctggcgcaaggactcggtggtcatgctgctccaccacgtggtcactctcatcctcatcgtctcctcctacgccttccggtaccacaatgtgggcatccttgtgctcttcctgcacgatatcagtgacgtgcagcttganttcaccaagctcaacatttacttcaagtcccgcggcggctcctaccatcggctgcatgccttggcagcagacttgggctgcctcagcttcggcttcagctggttctggttccgcctctactggttcccgctcaaggtcctgtatgccaccagncactgcaatctgcncacggtngcctganatccccttntaanttcttcttcaatgcnntccnagctgntgctccanccttttattaanctnnnaatgggttccttgtanattccagggnnntttgaaaccaaaagatgttnanaggccangnntgcnanaaactnaaagaacntgcnngnaatanntantcaatcccaaggncccnaaatcctgaaancccanacataatncngaaaaanccantgaagaaancgncnnnnttaaagaaagnncntttttaaancccnnnngggccaagccnccnttgaaancgaaanaancnaaaanncannggtcanagnatanannatttttngtagnnnnnnnnaccannatantatnatntnnnataatganacacaatnntanatnntaagnnaaaanancntcgttaaataanagaaaatntnanntngaantntaganntnannccttnncnatgnnaaaagcnnntacantacnaaaanaaanaaannaanannnnantanataangnaaatactnttnnncanatggattaantaataaaannttnanantgnttattttnataaatncannattantcatnaantatgtcacntanncntgnaaaantntncncttaannatnaaatagncccnatcanacttatatatntattaagncataacanaacctataatgnacnntncaattgntgantcnctcannangattctnantatnagcanntnanntataccannaanntanttaacnacattcanttntatatcacacaataatanatgcatcangtantatttaattatttgtttaatgtatcatnaaacatnn

SEQ ID NO: 770 - DNA, 1307 bp, Homo Sapiens
  misc_feature (888)..(888): n is a, c, g, or t
  misc_feature (919)..(919): n is a, c, g, or t
  misc_feature (922)..(922): n is a, c, g, or t
  misc_feature (941)..(941): n is a, c, g, or t
  misc_feature (945)..(945): n is a, c, g, or t
  misc_feature (951)..(951): n is a, c, g, or t
  misc_feature (976)..(976): n is a, c, g, or t
  misc_feature (991)..(991): n is a, c, g, or t
  misc_feature (1001)..(1001): n is a, c, g, or t
  misc_feature (1004)..(1004): n is a, c, g, or t
  misc_feature (1028)..(1028): n is a, c, g, or t
  misc_feature (1036)..(1036): n is a, c, g, or t
  misc_feature (1051)..(1053): n is a, c, g, or t
  misc_feature (1055)..(1055): n is a, c, g, or t
  misc_feature (1057)..(1057): n is a, c, g, or t
  misc_feature (1062)..(1062): n is a, c, g, or t
  misc_feature (1072)..(1072): n is a, c, g, or t
  misc_feature (1074)..(1074): n is a, c, g, or t
  misc_feature (1084)..(1084): n is a, c, g, or t
  misc_feature (1086)..(1087): n is a, c, g, or t
  misc_feature (1089)..(1089): n is a, c, g, or t
  misc_feature (1116)..(1116): n is a, c, g, or t
  misc_feature (1119)..(1119): n is a, c, g, or t
  misc_feature (1127)..(1127): n is a, c, g, or t
  misc_feature (1133)..(1134): n is a, c, g, or t
  misc_feature (1136)..(1137): n is a, c, g, or t
  misc_feature (1142)..(1142): n is a, c, g, or t
  misc_feature (1149)..(1150): n is a, c, g, or t
  misc_feature (1159)..(1159): n is a, c, g, or t
  misc_feature (1164)..(1166): n is a, c, g, or t
  misc_feature (1169)..(1169): n is a, c, g, or t
  misc_feature (1172)..(1175): n is a, c, g, or t
  misc_feature (1178)..(1178): n is a, c, g, or t
  misc_feature (1182)..(1182): n is a, c, g, or t
  misc_feature (1186)..(1186): n is a, c, g, or t
  misc_feature (1188)..(1188): n is a, c, g, or t
  misc_feature (1192)..(1192): n is a, c, g, or t
  misc_feature (1194)..(1194): n is a, c, g, or t
  misc_feature (1200)..(1201): n is a, c, g, or t
  misc_feature (1209)..(1209): n is a, c, g, or t
  misc_feature (1220)..(1220): n is a, c, g, or t
  misc_feature (1223)..(1223): n is a, c, g, or t
  misc_feature (1229)..(1229): n is a, c, g, or t
  misc_feature (1243)..(1244): n is a, c, g, or t
  misc_feature (1246)..(1247): n is a, c, g, or t
  misc_feature (1250)..(1250): n is a, c, g, or t
  misc_feature (1258)..(1259): n is a, c, g, or t
  misc_feature (1265)..(1265): n is a, c, g, or t
  misc_feature (1272)..(1274): n is a, c, g, or t
  misc_feature (1277)..(1278): n is a, c, g, or t
  misc_feature (1288)..(1288): n is a, c, g, or t
  misc_feature (1292)..(1292): n is a, c, g, or t
  misc_feature (1298)..(1298): n is a, c, g, or t
  misc_feature (1305)..(1306): n is a, c, g, or t
tagagaaaattactatgagaggatcgcatcaccatcaccatcacggatcctatttaggtgacactatagaatcgtcgacccacgcgtccgggaagcagagaaagttaaaggagcccttgccaaatggaaagaaaaaaagcaccaaattagagagtctgagtgacctggagagagctttaactgaaagcaaggagactgcttcagctatggcaactcttggggaagctcgcctaagggaaatggaagccttgcagtctctcagactcgccaatgaagggaaattgctgtcgcctctccaagatgtggatataaaaatctgcctatgtcagaaggccccagctgcccctatgattcaatgtgaactctgcagggatgctttccacaccagttgtgtggcggtacccagtatttcacagggcctgcgaatctggctttgtccccattgtcggaggtcagagaaacctccattagagaaaattctgcccctgctcgcctcccttcagcgtatccgagttcgccttcctgagggagatgcacttcgatatatgattgaaagaaccgtgaactggcagcacagagcccagcaactgctttcgtcagggaatcttaaatttgtgcaagatcgagtgggctcaggactgttatatagcagatggcaagcctcagcaggacaggtgtcagacacaaacaaggtatctcaacctcctggcacaacatcattttctttgcctgatgactgggacaacagaacctcatatttgcactcccccttctcaactggacgaagttgtatccccctccatggtgttagtccagaagtgaatgaactattgatggaagcccagctgctccaggtatcccttcctgaaattcaggaacttttaccanacttttacttgcaaagccaagccctgctcancanactgaccgaagctcaccantganacccancatgaaaaaaatgactgttgcccanggaaaccaaaatggnattaacagtnctngaaaaaaaaactgaaaaaaccccntggaaaanaaagggccctctccnnntnancgggngggaaccaantnaaaaaaatgncnnancccccaaaaaaaaaaaaaaatcaaacngancccccccnaggganntnnaacanttttcannttaaaaaanaaaannnaanccnnnnaantaantccntncggngnaaaacnnattcccgncccccaaaaanatncttttnccaaaaagaaaaanncnnaanaaaaaaanncccccnccccccnnnaanncccccccccnaaanaaaaanagggganng

SEQ ID NO: 771 - DNA, 1192 bp, Homo Sapiens
  misc_feature (871)..(871): n is a, c, g, or t
  misc_feature (943)..(943): n is a, c, g, or t
  misc_feature (951)..(951): n is a, c, g, or t
  misc_feature (954)..(954): n is a, c, g, or t
  misc_feature (960)..(960): n is a, c, g, or t
  misc_feature (964)..(964): n is a, c, g, or t
  misc_feature (981)..(981): n is a, c, g, or t
  misc_feature (994)..(994): n is a, c, g, or t
  misc_feature (1013)..(1013): n is a, c, g, or t
  misc_feature (1016)..(1016): n is a, c, g, or t
  misc_feature (1030)..(1030): n is a, c, g, or t
  misc_feature (1038)..(1038): n is a, c, g, or t
  misc_feature (1040)..(1040): n is a, c, g, or t
  misc_feature (1042)..(1042): n is a, c, g, or t
  misc_feature (1056)..(1056): n is a, c, g, or t
  misc_feature (1058)..(1058): n is a, c, g, or t
  misc_feature (1062)..(1062): n is a, c, g, or t
  misc_feature (1076)..(1076): n is a, c, g, or t
  misc_feature (1083)..(1083): n is a, c, g, or t
  misc_feature (1086)..(1086): n is a, c, g, or t
  misc_feature (1089)..(1089): n is a, c, g, or t
  misc_feature (1097)..(1097): n is a, c, g, or t
  misc_feature (1111)..(1111): n is a, c, g, or t
  misc_feature (1113)..(1113): n is a, c, g, or t
  misc_feature (1116)..(1116): n is a, c, g, or t
  misc_feature (1118)..(1118): n is a, c, g, or t
  misc_feature (1123)..(1123): n is a, c, g, or t
  misc_feature (1130)..(1130): n is a, c, g, or t
  misc_feature (1140)..(1140): n is a, c, g, or t
  misc_feature (1142)..(1142): n is a, c, g, or t
  misc_feature (1147)..(1147): n is a, c, g, or t
  misc_feature (1157)..(1158): n is a, c, g, or t
  misc_feature (1160)..(1160): n is a, c, g, or t
  misc_feature (1167)..(1167): n is a, c, g, or t
  misc_feature (1172)..(1172): n is a, c, g, or t
  misc_feature (1177)..(1177): n is a, c, g, or t
  misc_feature (1188)..(1188): n is a, c, g, or t
  misc_feature (1192)..(1192): n is a, c, g, or t
attagagaaattactatgagaggatcgcatcaccatcaccatcacggatcctatttaggtgacactatagaatcgtcgacccacgcgtccggcgcggcccaacctttactccagagatcatggctgccgaggatgtggtggcgactggcgccgacccaagcgatctggagagcggcgggctgctgcatgagattttcacgtcgccgctcaacctgctgctgcttggcctctgcatcttcctgctctacaagatcgtgcgcggggaccagccggcggccagcggcgacagcgacgacgacgagccgccccctctgccccgcctcaagcggcgcgacttcacccccgccgagctgcggcgcttcgacggcgtccaggacccgcgcatactcatggccatcaacggcaaggtgttcgatgtgaccaaaggccgcaaattctacgggcccgaggggccgtatggggtctttgctggaagagatgcatccaggggccttgccacattttgcctggataaggaagcactgaaggatgagtacgatgacctttctgacctcactgctgcccagcaggagactctgagtgactgggagtctcagttcactttcaagtatcatcacgtgggcaaactgctgaaggagggggaggagcccactgtgtactcagatgaggaagaaccaaaagatgagagtgcccggaaaaatgattaaagcattcagtggaagtatatctatttttgtattttgcaaaatcatttgtaacagtccactctgtctttaaaacatagtgattacaatatttagaaagttttgagcacttgctataagttttttaattaacatcactagtgacactaataaaattaacttcttanaatgcatgatgtgtttgtgtgtcacaaatccagaaagtgaactgcagtgctgtaatacacatgttaaaaacngtttttcntcnatctgnagtnagtacaggatgaatttnaatgtgtttttcntgaaaaaaaagaaaaattnggntatttcccaaaaanggtaaaantntnaatgggccccaaananaagnatcacttttatccngaggttntgnaanaaaaaaancccctttttttttncnatngnttaanggggganttttgttttntnacccntaaaaaaaanngngggttcnaaaanttttnttgggataaancccn

SEQ ID NO: 772 - DNA, 1375 bp, Homo Sapiens
  misc_feature (827)..(827): n is a, c, g, or t
  misc_feature (898)..(898): n is a, c, g, or t
  misc_feature (900)..(900): n is a, c, g, or t
  misc_feature (939)..(939): n is a, c, g, or t
  misc_feature (950)..(950): n is a, c, g, or t
  misc_feature (958)..(958): n is a, c, g, or t
  misc_feature (975)..(975): n is a, c, g, or t
  misc_feature (987)..(987): n is a, c, g, or t
  misc_feature (994)..(994): n is a, c, g, or t
  misc_feature (1004)..(1004): n is a, c, g, or t
  misc_feature (1035)..(1035): n is a, c, g, or t
  misc_feature (1067)..(1067): n is a, c, g, or t
  misc_feature (1070)..(1070): n is a, c, g, or t
  misc_feature (1083)..(1083): n is a, c, g, or t
  misc_feature (1099)..(1099): n is a, c, g, or t
  misc_feature (1112)..(1112): n is a, c, g, or t
  misc_feature (1120)..(1120): n is a, c, g, or t
  misc_feature (1125)..(1125): n is a, c, g, or t
  misc_feature (1133)..(1133): n is a, c, g, or t
  misc_feature (1148)..(1149): n is a, c, g, or t
  misc_feature (1155)..(1156): n is a, c, g, or t
  misc_feature (1160)..(1160): n is a, c, g, or t
  misc_feature (1163)..(1163): n is a, c, g, or t
  misc_feature (1172)..(1172): n is a, c, g, or t
  misc_feature (1185)..(1186): n is a, c, g, or t
  misc_feature (1197)..(1197): n is a, c, g, or t
  misc_feature (1213)..(1213): n is a, c, g, or t
  misc_feature (1224)..(1224): n is a, c, g, or t
  misc_feature (1237)..(1237): n is a, c, g, or t
  misc_feature (1252)..(1252): n is a, c, g, or t
  misc_feature (1254)..(1254): n is a, c, g, or t
  misc_feature (1263)..(1263): n is a, c, g, or t
  misc_feature (1270)..(1270): n is a, c, g, or t
  misc_feature (1291)..(1291): n is a, c, g, or t
  misc_feature (1293)..(1293): n is a, c, g, or t
  misc_feature (1297)..(1297): n is a, c, g, or t
  misc_feature (1301)..(1302): n is a, c, g, or t
  misc_feature (1306)..(1306): n is a, c, g, or t
  misc_feature (1310)..(1311): n is a, c, g, or t
  misc_feature (1313)..(1314): n is a, c, g, or t
  misc_feature (1321)..(1321): n is a, c, g, or t
  misc_feature (1325)..(1325): n is a, c, g, or t
  misc_feature (1327)..(1327): n is a, c, g, or t
  misc_feature (1340)..(1341): n is a, c, g, or t
  misc_feature (1347)..(1347): n is a, c, g, or t
  misc_feature (1365)..(1368): n is a, c, g, or t
  misc_feature (1375)..(1375): n is a, c, g, or t
tagagaaattactatgagaggatcgcatcaccatcaccatcacggatcctatttaggtgacactatagaatcgtcgacccacgcgtccgcccacgcgtccgcccacgcgtccgcccacgcgtccgctgccactgagaccaaaaaggtcagccatgtggctgatacaaaggtcaatacaaaggctcaggagactgaggctgcaccctctcaggccccagcagatgaacctgagcctgagagtgcagctgcccagtctcaggagaatcaggatactcggcccaaggtcaaagccaagaaagcccgaaaggtgaagcatctggatggggaagaggatggcagcagtgatcagagtcaggcttctggaaccacaggtggccgaagggtctcaaaggccctaatggcctcaatggcccgcagggcttcaaggggtcccatagccttttgggcccgcagggcatcaaggactcggttggctgcttgggcccggagagccttgctctccctgagatcacctaaagcccgtaggggcaaggctcgccgtagagctgccaagctccagtcatcccaagagcctgaagcaccaccacctcgggatgtggcccttttgcaagggagggcaaatgatttggtgaagtaccttttggctaaagaccagacgaagattcccatcaagcgctcggacatgctgaaggacatcatcaaagaatacactgatgtgtaccccgaaatcattgaacgagcaggctattccttggagaaggtatttgggattcaattgaaggaaattgataagaatgaccacttgtacattcttctcagcaccttanagcccactgatgcaggcatactgggaacgactaaggactcacccaagctgggtctgctcatggtgcttctnancatcatcttcatgaaatggaaatcggtccagtgaggctntcatctgggangtgctgcncaagtttggggcctgcncccctgggtatnattgggnttctcttcancgcttgctgttccgtgtttgtccttttggcnaaaaaaaggacggtcctaagaattgcattcantcntggtggtctggtngaaaccgggttggggntgcttgaattggntaaaaggncccanggtttttnaccttgggtggaaannatgggnnaaanggnccttaaacncctctgccccccnncctcaaggttnccttggggctttttanggaactttccntcttttgggtggnaaacctttttttccntnttgaaaaancctcttncccaatttgggaaaaggcccnancccngagnnaaanaaanngnnaaaaaantttncntttccccccccannaaaaancattttccttttgggaannnnaaaaaan

SEQ ID NO: 773 - DNA, 1449 bp, Homo Sapiens
  misc_feature (832)..(832): n is a, c, g, or t
  misc_feature (847)..(847): n is a, c, g, or t
  misc_feature (886)..(886): n is a, c, g, or t
  misc_feature (924)..(924): n is a, c, g, or t
  misc_feature (937)..(937): n is a, c, g, or t
  misc_feature (968)..(968): n is a, c, g, or t
  misc_feature (979)..(979): n is a, c, g, or t
  misc_feature (984)..(984): n is a, c, g, or t
  misc_feature (1006)..(1006): n is a, c, g, or t
  misc_feature (1014)..(1014): n is a, c, g, or t
  misc_feature (1029)..(1029): n is a, c, g, or t
  misc_feature (1032)..(1032): n is a, c, g, or t
  misc_feature (1068)..(1068): n is a, c, g, or t
  misc_feature (1087)..(1087): n is a, c, g, or t
  misc_feature (1089)..(1090): n is a, c, g, or t
  misc_feature (1106)..(1108): n is a, c, g, or t
  misc_feature (1111)..(1111): n is a, c, g, or t
  misc_feature (1133)..(1134): n is a, c, g, or t
  misc_feature (1139)..(1139): n is a, c, g, or t
  misc_feature (1141)..(1142): n is a, c, g, or t
  misc_feature (1144)..(1145): n is a, c, g, or t
  misc_feature (1149)..(1149): n is a, c, g, or t
  misc_feature (1154)..(1155): n is a, c, g, or t
  misc_feature (1178)..(1178): n is a, c, g, or t
  misc_feature (1180)..(1180): n is a, c, g, or t
  misc_feature (1182)..(1182): n is a, c, g, or t
  misc_feature (1184)..(1184): n is a, c, g, or t
  misc_feature (1189)..(1189): n is a, c, g, or t
  misc_feature (1194)..(1194): n is a, c, g, or t
  misc_feature (1197)..(1197): n is a, c, g, or t
  misc_feature (1199)..(1199): n is a, c, g, or t
  misc_feature (1207)..(1207): n is a, c, g, or t
  misc_feature (1216)..(1216): n is a, c, g, or t
  misc_feature (1231)..(1231): n is a, c, g, or t
  misc_feature (1236)..(1236): n is a, c, g, or t
  misc_feature (1239)..(1239): n is a, c, g, or t
  misc_feature (1241)..(1241): n is a, c, g, or t
  misc_feature (1251)..(1251): n is a, c, g, or t
  misc_feature (1258)..(1258): n is a, c, g, or t
  misc_feature (1263)..(1263): n is a, c, g, or t
  misc_feature (1272)..(1272): n is a, c, g, or t
  misc_feature (1276)..(1277): n is a, c, g, or t
  misc_feature (1281)..(1283): n is a, c, g, or t
  misc_feature (1289)..(1289): n is a, c, g, or t
  misc_feature (1295)..(1295): n is a, c, g, or t
  misc_feature (1303)..(1303): n is a, c, g, or t
  misc_feature (1305)..(1305): n is a, c, g, or t
  misc_feature (1312)..(1312): n is a, c, g, or t
  misc_feature (1317)..(1317): n is a, c, g, or t
  misc_feature (1322)..(1322): n is a, c, g, or t
  misc_feature (1327)..(1327): n is a, c, g, or t
  misc_feature (1331)..(1331): n is a, c, g, or t
  misc_feature (1336)..(1336): n is a, c, g, or t
  misc_feature (1340)..(1340): n is a, c, g, or t
  misc_feature (1365)..(1365): n is a, c, g, or t
  misc_feature (1369)..(1369): n is a, c, g, or t
  misc_feature (1375)..(1375): n is a, c, g, or t
  misc_feature (1381)..(1382): n is a, c, g, or t
  misc_feature (1385)..(1385): n is a, c, g, or t
  misc_feature (1388)..(1389): n is a, c, g, or t
  misc_feature (1392)..(1395): n is a, c, g, or t
  misc_feature (1400)..(1400): n is a, c, g, or t
  misc_feature (1404)..(1404): n is a, c, g, or t
  misc_feature (1417)..(1418): n is a, c, g, or t
  misc_feature (1423)..(1423): n is a, c, g, or t
  misc_feature (1426)..(1426): n is a, c, g, or t
  misc_feature (1434)..(1434): n is a, c, g, or t
  misc_feature (1436)..(1436): n is a, c, g, or t
  misc_feature (1439)..(1439): n is a, c, g, or t
taagagaaattactatgagaggatcgcatcaccatcaccatcacggatcctatttaggtgacactatagaatcgtcgacccacgcgtccgcccacgcgtccggcgaagcgatgcctaaatcaaaggaacttgtttcttcaagctcttctggcagtgattctgacagtgaggttgacaaaaagttaaagaggaaaaagcaagttgctccagaaaaacctgtaaagaaacaaaagacaggtgagacttcgagagccctgtcatcttctaaacagagcagcagcagcagagatgataacatgtttcagattgggaaaatgaggtacgttagtgttcgcgattttaaaggcaaagtgctaattgatattagagaatattggatggatcctgaaggtgaaatgaaaccaggaagaaaaggtatttctttaaatccagaacaatggagccagctgaaggaacagatttctgacattgatgatgcagtaagaaaactgtaaaattcgagccatataaataaaacctgtactgttctagttgttttaatctgtctttttacattggcttttgttttctaaatgttctccaagctattgtatgtttggattgcagaagaatttgtaagatgaatacttttttttaatgtgcattattaaaaatattgagtgaagctaattgtcaactttattaaggattactttgtctgcccaccacctagtgtaaaataaaatcaagtaatacaatcttaactgttgtggccttttttgatcataagagttggtactgttttaaggccaaaagtaacagtttttatagatcttttagtttcaactcagcnttttacaataaaaangatttgtattgcattgagtttataaacttttgggtttgngaacttcatattttgatctttttcccttccaatcaaantgtctaggcttgntttgacttccaccccccaatggtttttcccnctttttatttncttcnttttccctttaaaaccttaatnccccttcnggtcccgtttttacntcncccctttattcctttccttgaattaggggatgcctntttggaaagtccggggaancnnccaaaatggtttcccnnnaanaatcttttatggaaacctccannccccnanncnncggnttcanntttccaattccttttgaaaacancngncnttggnaaaanctnanccgggttnttccccaanggtccgggaattttncctcnccncnaaaaaagccntaaaganatccnacttctttncctnntaannngccccnggggantcccgccncncaatttnccccnccccnttttnaaangtggncctnaaaaaaaaaaaaaaaggccccccangganaatatnttaaannccnccnnaannnnccccncctntttaccccgcccnnttttnaancccccggntnacnaaaaaaaaca

SEQ ID NO: 774 - DNA, 1359 bp, Homo Sapiens
  misc_feature (437)..(437): n is a, c, g, or t
  misc_feature (754)..(754): n is a, c, g, or t
  misc_feature (834)..(834): n is a, c, g, or t
  misc_feature (857)..(857): n is a, c, g, or t
  misc_feature (878)..(878): n is a, c, g, or t
  misc_feature (911)..(911): n is a, c, g, or t
  misc_feature (949)..(949): n is a, c, g, or t
  misc_feature (953)..(953): n is a, c, g, or t
  misc_feature (983)..(983): n is a, c, g, or t
  misc_feature (985)..(985): n is a, c, g, or t
  misc_feature (990)..(990): n is a, c, g, or t
  misc_feature (992)..(992): n is a, c, g, or t
  misc_feature (1002)..(1003): n is a, c, g, or t
  misc_feature (1024)..(1025): n is a, c, g, or t
  misc_feature (1027)..(1027): n is a, c, g, or t
  misc_feature (1040)..(1040): n is a, c, g, or t
  misc_feature (1042)..(1042): n is a, c, g, or t
  misc_feature (1050)..(1051): n is a, c, g, or t
  misc_feature (1055)..(1055): n is a, c, g, or t
  misc_feature (1068)..(1068): n is a, c, g, or t
  misc_feature (1074)..(1074): n is a, c, g, or t
  misc_feature (1076)..(1076): n is a, c, g, or t
  misc_feature (1078)..(1078): n is a, c, g, or t
  misc_feature (1080)..(1080): n is a, c, g, or t
  misc_feature (1090)..(1090): n is a, c, g, or t
  misc_feature (1092)..(1092): n is a, c, g, or t
  misc_feature (1096)..(1096): n is a, c, g, or t
  misc_feature (1107)..(1107): n is a, c, g, or t
  misc_feature (1114)..(1114): n is a, c, g, or t
  misc_feature (1125)..(1125): n is a, c, g, or t
  misc_feature (1131)..(1131): n is a, c, g, or t
  misc_feature (1146)..(1147): n is a, c, g, or t
  misc_feature (1151)..(1151): n is a, c, g, or t
  misc_feature (1168)..(1168): n is a, c, g, or t
  misc_feature (1175)..(1177): n is a, c, g, or t
  misc_feature (1189)..(1189): n is a, c, g, or t
  misc_feature (1195)..(1195): n is a, c, g, or t
  misc_feature (1205)..(1205): n is a, c, g, or t
  misc_feature (1208)..(1208): n is a, c, g, or t
  misc_feature (1212)..(1212): n is a, c, g, or t
  misc_feature (1217)..(1217): n is a, c, g, or t
  misc_feature (1249)..(1249): n is a, c, g, or t
  misc_feature (1251)..(1252): n is a, c, g, or t
  misc_feature (1256)..(1256): n is a, c, g, or t
  misc_feature (1269)..(1269): n is a, c, g, or t
  misc_feature (1273)..(1274): n is a, c, g, or t
  misc_feature (1282)..(1282): n is a, c, g, or t
  misc_feature (1284)..(1284): n is a, c, g, or t
  misc_feature (1289)..(1289): n is a, c, g, or t
  misc_feature (1293)..(1293): n is a, c, g, or t
  misc_feature (1295)..(1295): n is a, c, g, or t
  misc_feature (1302)..(1302): n is a, c, g, or t
  misc_feature (1305)..(1305): n is a, c, g, or t
  misc_feature (1308)..(1308): n is a, c, g, or t
  misc_feature (1316)..(1316): n is a, c, g, or t
  misc_feature (1319)..(1319): n is a, c, g, or t
  misc_feature (1323)..(1323): n is a, c, g, or t
  misc_feature (1327)..(1327): n is a, c, g, or t
  misc_feature (1330)..(1330): n is a, c, g, or t
  misc_feature (1343)..(1343): n is a, c, g, or t
  misc_feature (1345)..(1345): n is a, c, g, or t
  misc_feature (1347)..(1349): n is a, c, g, or t
  misc_feature (1351)..(1351): n is a, c, g, or t
  misc_feature (1356)..(1356): n is a, c, g, or t
tagagaaattactatgagaggatcgcatcaccatcaccatcacggatcctatttaggtgacactatagaatcgtcgacccacgcgtccgcccacgcgatccgcccacgcgtccgcccggcgatatggctgccgctgtgccccgcgccgcatttctctccccgctgcttccccttctcctgggcttcctgctcctctccgctccgcatggcggcagcggcctgcacaccaagggcgcccttcccctggatacggtcactttctacaaggtcattcccaaaagcaagttcgtcttggtgaagttcgacacccagtacccctacggtgagaagcaggatgagttcaagcgtcttgctgaaaactcggcttccagcgatgatctcttggtggcagaggtggggatctcagattatggtgacaagctgaacatggagctgantgagaaatacaagctggacaaagagagctacccagtcttctacctcttccgggatggggactttgagaacccagtcccatacactggggcagttaaggttggagccatccagcgctggctgaaggggcaaggggtctacctaggtatgcctggttgcctgcctgtatacgacgccctggccggggagttcatcagggcctctggtgtggaggcccgccaggccctcttgaagcaggggcaagataacctctcaagtgtgaaggagactcagaagaagtgggccgagcaatacctgaagatcatggggaagatcttanaccaaggggaggacttcccagcatcagagatgacacggatcgccaggctgattgagaagaacaagatgagtgacgggaanaaggaggagctccagaagagctnaacatcctgattgccttccanaaaaagggggccgaaaaaaagaactgtaaaaangctgtctgtgattttccaggattggtgggggtagggangggnaaaattaacctgctggctgggaattccctngnggaananaagggggtanngggaaaagtggtactaacccnnantctgaaccctganangcctgganntganggctaaaatgacnatgctngnangncctaactggncngggnaaactggaaanttactcnggggggtgggnaatgancccccaaaaaaaaanngctnaaaaaggaaaaagaagnactgccnnntctttaaaaagnattccnttaattaaanttnaggnttggnaaaaaaaaaaaaaaaaaaaagggggccccccnanngggncaaaactttaaanaaanngggccccngnaaaancgangnccaaaanccnggnttttaaancgngtgnccgnggntttttgggaaaanancnnngnaattnaaa

SEQ ID NO: 775 - DNA, 1388 bp, Homo Sapiens
  misc_feature (819)..(819): n is a, c, g, or t
  misc_feature (830)..(830): n is a, c, g, or t
  misc_feature (880)..(880): n is a, c, g, or t
  misc_feature (897)..(897): n is a, c, g, or t
  misc_feature (923)..(923): n is a, c, g, or t
  misc_feature (939)..(939): n is a, c, g, or t
  misc_feature (941)..(941): n is a, c, g, or t
  misc_feature (948)..(948): n is a, c, g, or t
  misc_feature (958)..(958): n is a, c, g, or t
  misc_feature (979)..(979): n is a, c, g, or t
  misc_feature (988)..(989): n is a, c, g, or t
  misc_feature (994)..(994): n is a, c, g, or t
  misc_feature (1001)..(1001): n is a, c, g, or t
  misc_feature (1003)..(1003): n is a, c, g, or t
  misc_feature (1008)..(1008): n is a, c, g, or t
  misc_feature (1015)..(1015): n is a, c, g, or t
  misc_feature (1020)..(1021): n is a, c, g, or t
  misc_feature (1032)..(1032): n is a, c, g, or t
  misc_feature (1035)..(1035): n is a, c, g, or t
  misc_feature (1050)..(1050): n is a, c, g, or t
  misc_feature (1055)..(1055): n is a, c, g, or t
  misc_feature (1057)..(1057): n is a, c, g, or t
  misc_feature (1059)..(1059): n is a, c, g, or t
  misc_feature (1066)..(1066): n is a, c, g, or t
  misc_feature (1071)..(1071): n is a, c, g, or t
  misc_feature (1083)..(1084): n is a, c, g, or t
  misc_feature (1091)..(1091): n is a, c, g, or t
  misc_feature (1097)..(1098): n is a, c, g, or t
  misc_feature (1101)..(1101): n is a, c, g, or t
  misc_feature (1104)..(1108): n is a, c, g, or t
  misc_feature (1111)..(1111): n is a, c, g, or t
  misc_feature (1115)..(1115): n is a, c, g, or t
  misc_feature (1123)..(1123): n is a, c, g, or t
  misc_feature (1127)..(1128): n is a, c, g, or t
  misc_feature (1131)..(1131): n is a, c, g, or t
  misc_feature (1133)..(1133): n is a, c, g, or t
  misc_feature (1137)..(1139): n is a, c, g, or t
  misc_feature (1144)..(1144): n is a, c, g, or t
  misc_feature (1147)..(1148): n is a, c, g, or t
  misc_feature (1153)..(1159): n is a, c, g, or t
  misc_feature (1163)..(1163): n is a, c, g, or t
  misc_feature (1167)..(1184): n is a, c, g, or t
  misc_feature (1190)..(1191): n is a, c, g, or t
  misc_feature (1202)..(1203): n is a, c, g, or t
  misc_feature (1207)..(1210): n is a, c, g, or t
  misc_feature (1213)..(1213): n is a, c, g, or t
  misc_feature (1216)..(1217): n is a, c, g, or t
  misc_feature (1220)..(1226): n is a, c, g, or t
  misc_feature (1229)..(1230): n is a, c, g, or t
  misc_feature (1234)..(1235): n is a, c, g, or t
  misc_feature (1238)..(1238): n is a, c, g, or t
  misc_feature (1240)..(1241): n is a, c, g, or t
  misc_feature (1247)..(1247): n is a, c, g, or t
  misc_feature (1249)..(1250): n is a, c, g, or t
  misc_feature (1253)..(1254): n is a, c, g, or t
  misc_feature (1263)..(1263): n is a, c, g, or t
  misc_feature (1268)..(1269): n is a, c, g, or t
  misc_feature (1278)..(1278): n is a, c, g, or t
  misc_feature (1282)..(1284): n is a, c, g, or t
  misc_feature (1286)..(1290): n is a, c, g, or t
  misc_feature (1292)..(1292): n is a, c, g, or t
  misc_feature (1297)..(1297): n is a, c, g, or t
  misc_feature (1304)..(1304): n is a, c, g, or t
  misc_feature (1307)..(1307): n is a, c, g, or t
  misc_feature (1311)..(1318): n is a, c, g, or t
  misc_feature (1321)..(1321): n is a, c, g, or t
  misc_feature (1327)..(1328): n is a, c, g, or t
  misc_feature (1330)..(1342): n is a, c, g, or t
  misc_feature (1344)..(1344): n is a, c, g, or t
  misc_feature (1349)..(1352): n is a, c, g, or t
  misc_feature (1354)..(1354): n is a, c, g, or t
  misc_feature (1357)..(1357): n is a, c, g, or t
  misc_feature (1360)..(1364): n is a, c, g, or t
  misc_feature (1366)..(1367): n is a, c, g, or t
  misc_feature (1370)..(1370): n is a, c, g, or t
  misc_feature (1373)..(1375): n is a, c, g, or t
  misc_feature (1383)..(1383): n is a, c, g, or t
  misc_feature (1385)..(1386): n is a, c, g, or t
  misc_feature (1388)..(1388): n is a, c, g, or t
aaattagagaaattaactatgagaggatcgcatcaccatcaccatcacggatcctatttaggtgacactatagaatcgtcgacccacgcgtccgtatcaacctgctggtcatctttgcccccaacatcctgggcatctttggggtcatcggtgccacatctgccccattcctcatcttcatcttccctgccatcttctacttccgaatcatgcccacggagaaggagcctgcaagatccacccccaaaatcctggccctgtgttttgctatgcttggcttcttgctgatgaccatgagcttgagcttcatcatcattgactgggcctcagggaccagccggcatggaggaaaccactagggtgaccctcatcctgttctgtctactcaccctagcagccctgcccagactcttcagcccctgctcccatccagtggccagtcgggggaggagaaagacgcgattaacactgtggcattcagccaggccccatgtcctctctgtggaaggtttttgttcaagagccaggaccaaggcccttgggccactaccctgctaggctctggagctgtagaggcttcctgaactgggagcagggtagggctgtcgccttagatcccgcccaagcccctcattccctccttgcacagatgcatacactggggcccagcagctgcctcctgaggtgacacagcctgtaggaacatacacagctgggatcagcctgcagccatcccccgaccctgctgctaggccacggtctgcgccctggggcctcatctcccccagcccacttgttttccccccttttattccctangcccttttcanactcctggggcccttggatactcttctcccatctcccttcacaggatganaccctcccataccccanaactggggccagcaggttctgctganggtggggctggtgtangnacccccnaaaaaacccntgtcctgtcccttcacagtcnggggaaggnnggaantcccccngncaaancctgggncaaanntcaaattccantgntgggaaaaaaaaaanggccnangnccaaaangggcntgcccccggganncaaaaanccccannggnccnnnnnggnaaangggggggnaggnnggnancccnnnttttnaannttttnnnnnnnaaanaaannnnnnnnnnnnnnnnnngggggnncccccccaaanngggnnnnaanaanntannnnnnnaanntggnnccngnnaaaaancnnaannaccccaaanccccnngattttttnaaannngnnnnncncgggnttttttnggnaaannnnnnnnggnaatttnngnnnnnnnnnnnnngnaaaannnngnaanccnnnnnannccnggnnnaaaaattngnntn

SEQ ID NO: 776 - DNA, 1200 bp, Homo Sapiens
  misc_feature (832)..(832): n is a, c, g, or t
  misc_feature (893)..(893): n is a, c, g, or t
  misc_feature (988)..(988): n is a, c, g, or t
  misc_feature (992)..(992): n is a, c, g, or t
  misc_feature (997)..(997): n is a, c, g, or t
  misc_feature (1017)..(1017): n is a, c, g, or t
  misc_feature (1020)..(1020): n is a, c, g, or t
  misc_feature (1027)..(1027): n is a, c, g, or t
  misc_feature (1032)..(1033): n is a, c, g, or t
  misc_feature (1035)..(1035): n is a, c, g, or t
  misc_feature (1080)..(1080): n is a, c, g, or t
  misc_feature (1092)..(1092): n is a, c, g, or t
  misc_feature (1106)..(1106): n is a, c, g, or t
  misc_feature (1110)..(1111): n is a, c, g, or t
  misc_feature (1119)..(1119): n is a, c, g, or t
  misc_feature (1121)..(1121): n is a, c, g, or t
  misc_feature (1124)..(1124): n is a, c, g, or t
  misc_feature (1130)..(1132): n is a, c, g, or t
  misc_feature (1135)..(1135): n is a, c, g, or t
  misc_feature (1138)..(1138): n is a, c, g, or t
  misc_feature (1143)..(1143): n is a, c, g, or t
  misc_feature (1154)..(1154): n is a, c, g, or t
  misc_feature (1164)..(1165): n is a, c, g, or t
  misc_feature (1171)..(1171): n is a, c, g, or t
agaaattactatgagaggatcgcatcaccatcaccatcacggatcctatttaggtgacactatagaatcgtcgacccacgcgtccgcccacgcgtccggggaaatgctggatcagagcaaccagtggggaggcaccgcgctggtggtgcctgccttcgaaatccgaagagcccgccgcatgcccatgaacaaaaacgagctggtgcagctctaccaggttggcgaggtgcggcccttctattatgggttgtgcaccccctgccaggcacccaccaactattcccgctgggtcaacctgccggaagagagcttgctgcggcccgcctacgtggtaccttggcaggacccctgggagccattctacgtggcaggaggcaaggtgcccaccttcgacgagcgctttcggcagtacggcttcaaccgaatcagccaggcctgcgagctgcatgtggcggggtttgattttgaggtcctgaacgaaggtttcttggttcataagggcttcaaagaagcgttgaagttccatccccaaaaggaggctgaaaatcagcacaataagatcctatatcgccagttcaaacaggagttgaaggccaagtaccccaactctccccgacgctgctgagcccttccctcccctaatctgagaagtcagcctcttggctcctcaggccaccatttaggcctgactggggtaagaaatgtcgctccactttacagaggtagctgtggtgttgaaacactggacttggatatggggtgctgggatcgattcctagctttaccactaactagctgtgtggccttgagtaaatcccgttacctctctgancctcggttaccctgtctgtaaaaaagggaggtgagaatacctacctcacggaactgttggnaggctcaaatgaaatgctatatgtgaaaaacattctgtaagcttcgtacaaatgtgaagtattaatattatcccagaataatggtggtattatantggnaatantaaaaatcttgggtgggtantangaaaacnaaaanntntgaatgggatggaactaaaaatcctgaaaacttaatgaaatgganttttttggaaanaaatccaaatgaanggcnnaaaatttnanttnttaacnnntgnaanaaaancctaaaattcntggttttccnnaggggnttccccttcaagggtttttggaaaaaaaa

SEQ ID NO: 777 - DNA, 1304 bp, Homo Sapiens
  misc_feature (835)..(835): n is a, c, g, or t
  misc_feature (877)..(877): n is a, c, g, or t
  misc_feature (887)..(887): n is a, c, g, or t
  misc_feature (902)..(902): n is a, c, g, or t
  misc_feature (910)..(910): n is a, c, g, or t
  misc_feature (916)..(916): n is a, c, g, or t
  misc_feature (918)..(918): n is a, c, g, or t
  misc_feature (920)..(920): n is a, c, g, or t
  misc_feature (933)..(933): n is a, c, g, or t
  misc_feature (938)..(938): n is a, c, g, or t
  misc_feature (943)..(943): n is a, c, g, or t
  misc_feature (945)..(945): n is a, c, g, or t
  misc_feature (958)..(958): n is a, c, g, or t
  misc_feature (975)..(975): n is a, c, g, or t
  misc_feature (981)..(981): n is a, c, g, or t
  misc_feature (984)..(984): n is a, c, g, or t
  misc_feature (987)..(987): n is a, c, g, or t
  misc_feature (990)..(990): n is a, c, g, or t
  misc_feature (993)..(993): n is a, c, g, or t
  misc_feature (995)..(995): n is a, c, g, or t
  misc_feature (1012)..(1012): n is a, c, g, or t
  misc_feature (1016)..(1016): n is a, c, g, or t
  misc_feature (1018)..(1018): n is a, c, g, or t
  misc_feature (1037)..(1037): n is a, c, g, or t
  misc_feature (1049)..(1049): n is a, c, g, or t
  misc_feature (1076)..(1076): n is a, c, g, or t
  misc_feature (1099)..(1099): n is a, c, g, or t
  misc_feature (1108)..(1108): n is a, c, g, or t
  misc_feature (1123)..(1123): n is a, c, g, or t
  misc_feature (1127)..(1127): n is a, c, g, or t
  misc_feature (1134)..(1134): n is a, c, g, or t
  misc_feature (1141)..(1141): n is a, c, g, or t
  misc_feature (1147)..(1147): n is a, c, g, or t
  misc_feature (1150)..(1150): n is a, c, g, or t
  misc_feature (1155)..(1155): n is a, c, g, or t
  misc_feature (1157)..(1157): n is a, c, g, or t
  misc_feature (1161)..(1161): n is a, c, g, or t
  misc_feature (1172)..(1172): n is a, c, g, or t
  misc_feature (1174)..(1174): n is a, c, g, or t
  misc_feature (1176)..(1177): n is a, c, g, or t
  misc_feature (1181)..(1182): n is a, c, g, or t
  misc_feature (1187)..(1187): n is a, c, g, or t
  misc_feature (1189)..(1189): n is a, c, g, or t
  misc_feature (1193)..(1193): n is a, c, g, or t
  misc_feature (1203)..(1204): n is a, c, g, or t
  misc_feature (1208)..(1208): n is a, c, g, or t
  misc_feature (1213)..(1213): n is a, c, g, or t
  misc_feature (1216)..(1216): n is a, c, g, or t
  misc_feature (1220)..(1220): n is a, c, g, or t
  misc_feature (1223)..(1223): n is a, c, g, or t
  misc_feature (1228)..(1228): n is a, c, g, or t
  misc_feature (1230)..(1231): n is a, c, g, or t
  misc_feature (1236)..(1236): n is a, c, g, or t
  misc_feature (1243)..(1244): n is a, c, g, or t
  misc_feature (1247)..(1247): n is a, c, g, or t
  misc_feature (1249)..(1249): n is a, c, g, or t
  misc_feature (1253)..(1253): n is a, c, g, or t
  misc_feature (1259)..(1259): n is a, c, g, or t
  misc_feature (1263)..(1263): n is a, c, g, or t
  misc_feature (1265)..(1267): n is a, c, g, or t
  misc_feature (1272)..(1272): n is a, c, g, or t
  misc_feature (1275)..(1275): n is a, c, g, or t
  misc_feature (1277)..(1277): n is a, c, g, or t
  misc_feature (1280)..(1281): n is a, c, g, or t
  misc_feature (1284)..(1286): n is a, c, g, or t
  misc_feature (1290)..(1296): n is a, c, g, or t
  misc_feature (1302)..(1303): n is a, c, g, or t
gagaaattactatgagaggatcgcatcaccatcaccatcacggatcctatttaggtgacactatagaatcgtcgacccacgcgtccggttgtatatttgtctaaaatgaaagctcttttgcgttctaaaactacaatatatgtcatcttattttccctgagtatccaagtatagtgcagattctatgtaaaactactaaatgacactggaatatgtttagtagattagggggaaaaactataaaggtttatacaattgtttgtagttacatttaggatggacttatccctttggagaagagtgaagtttgttttttcgccatgtgatgaagaccactgtgattttttaaaaaagtagataatacttaaaatggcgtaataattctgcacttgaatttgtactgttaacagcacatttggaagattttaaaactttttattgtcttataaatagcattcacttattattttggatatttaagggttccattaagttaacactgtatttggacaaagtgtgaccaaattagccagtctgttttcttccatgtttaattagaagtgagaggtagaagtacttcaaattcaacaggccagcaagcaatcggcttaaaattccctttcttaaatgttgtgctcttatgttctcggctttttaatgactttatttttacagtacttgttcagtcacttgagatgaaatgcttggggtagcttttccatcctcaaacttaatgtttttactagttcatagtgtttggaacagtatatgccaatcactgagactgcatcagagtttgcaattttgtatgtttcattgcccaaagaaggcttantggttgttgactgtagtataagtcagctttctgtagcataanatttgatttncccatacttacttcncttgttanacatcncngnattatttggggtnaaacnggacncntttccagcagttngcttttgttccaatcgngatganaanccnaanacngnaatttgatttgagcccnaaancncattttaaaataacctggnataaaagttatnaacctggttttggggaaaaaacctacnaaaacccagggacccccaaatangcccgttcnggggaatttggaacntaanaaggganccaaccnaaaaanaanaaaantngggnaaaaaaattgnanannccgnnccggngngggnaaggcccggnntttnaaaanttnaacnttnggggnannggggnccccccnnaanancccncccccntttnannntgggnttngnaannttnnngggnnnnnnntagggnna

SEQ ID NO: 778 - DNA, 2074 bp, Homo Sapiens
  misc_feature (3)..(3): n is a, c, g, or t
  misc_feature (8)..(8): n is a, c, g, or t
  misc_feature (10)..(10): n is a, c, g, or t
  misc_feature (19)..(19): n is a, c, g, or t
  misc_feature (21)..(22): n is a, c, g, or t
  misc_feature (24)..(24): n is a, c, g, or t
  misc_feature (28)..(28): n is a, c, g, or t
  misc_feature (30)..(30): n is a, c, g, or t
  misc_feature (33)..(33): n is a, c, g, or t
  misc_feature (36)..(36): n is a, c, g, or t
  misc_feature (55)..(55): n is a, c, g, or t
  misc_feature (61)..(61): n is a, c, g, or t
  misc_feature (65)..(65): n is a, c, g, or t
  misc_feature (70)..(70): n is a, c, g, or t
  misc_feature (84)..(85): n is a, c, g, or t
  misc_feature (92)..(92): n is a, c, g, or t
  misc_feature (95)..(95): n is a, c, g, or t
  misc_feature (100)..(100): n is a, c, g, or t
  misc_feature (107)..(107): n is a, c, g, or t
  misc_feature (111)..(111): n is a, c, g, or t
  misc_feature (115)..(115): n is a, c, g, or t
  misc_feature (124)..(124): n is a, c, g, or t
  misc_feature (130)..(130): n is a, c, g, or t
  misc_feature (132)..(132): n is a, c, g, or t
  misc_feature (134)..(134): n is a, c, g, or t
  misc_feature (136)..(137): n is a, c, g, or t
  misc_feature (143)..(143): n is a, c, g, or t
  misc_feature (148)..(148): n is a, c, g, or t
  misc_feature (163)..(163): n is a, c, g, or t
  misc_feature (166)..(166): n is a, c, g, or t
  misc_feature (175)..(177): n is a, c, g, or t
  misc_feature (181)..(183): n is a, c, g, or t
  misc_feature (185)..(185): n is a, c, g, or t
  misc_feature (188)..(188): n is a, c, g, or t
  misc_feature (193)..(193): n is a, c, g, or t
  misc_feature (203)..(203): n is a, c, g, or t
  misc_feature (208)..(209): n is a, c, g, or t
  misc_feature (213)..(216): n is a, c, g, or t
  misc_feature (224)..(224): n is a, c, g, or t
  misc_feature (230)..(230): n is a, c, g, or t
  misc_feature (232)..(232): n is a, c, g, or t
  misc_feature (239)..(239): n is a, c, g, or t
  misc_feature (241)..(241): n is a, c, g, or t
  misc_feature (244)..(246): n is a, c, g, or t
  misc_feature (252)..(253): n is a, c, g, or t
  misc_feature (262)..(263): n is a, c, g, or t
  misc_feature (265)..(266): n is a, c, g, or t
  misc_feature (269)..(269): n is a, c, g, or t
  misc_feature (276)..(276): n is a, c, g, or t
  misc_feature (281)..(281): n is a, c, g, or t
  misc_feature (284)..(284): n is a, c, g, or t
  misc_feature (288)..(288): n is a, c, g, or t
  misc_feature (292)..(292): n is a, c, g, or t
  misc_feature (295)..(297): n is a, c, g, or t
  misc_feature (303)..(303): n is a, c, g, or t
  misc_feature (312)..(312): n is a, c, g, or t
  misc_feature (318)..(318): n is a, c, g, or t
  misc_feature (326)..(326): n is a, c, g, or t
  misc_feature (333)..(334): n is a, c, g, or t
  misc_feature (344)..(345): n is a, c, g, or t
  misc_feature (348)..(348): n is a, c, g, or t
  misc_feature (353)..(354): n is a, c, g, or t
  misc_feature (358)..(358): n is a, c, g, or t
  misc_feature (363)..(363): n is a, c, g, or t
  misc_feature (369)..(369): n is a, c, g, or t
  misc_feature (373)..(373): n is a, c, g, or t
  misc_feature (377)..(377): n is a, c, g, or t
  misc_feature (380)..(380): n is a, c, g, or t
  misc_feature (385)..(386): n is a, c, g, or t
  misc_feature (389)..(390): n is a, c, g, or t
  misc_feature (395)..(397): n is a, c, g, or t
  misc_feature (401)..(402): n is a, c, g, or t
  misc_feature (405)..(405): n is a, c, g, or t
  misc_feature (409)..(411): n is a, c, g, or t
  misc_feature (415)..(416): n is a, c, g, or t
  misc_feature (418)..(418): n is a, c, g, or t
  misc_feature (420)..(420): n is a, c, g, or t
  misc_feature (425)..(425): n is a, c, g, or t
  misc_feature (427)..(427): n is a, c, g, or t
  misc_feature (429)..(429): n is a, c, g, or t
  misc_feature (434)..(435): n is a, c, g, or t
  misc_feature (438)..(438): n is a, c, g, or t
  misc_feature (440)..(441): n is a, c, g, or t
  misc_feature (448)..(448): n is a, c, g, or t
  misc_feature (450)..(450): n is a, c, g, or t
  misc_feature (452)..(452): n is a, c, g, or t
  misc_feature (454)..(454): n is a, c, g, or t
  misc_feature (456)..(456): n is a, c, g, or t
  misc_feature (458)..(459): n is a, c, g, or t
  misc_feature (463)..(464): n is a, c, g, or t
  misc_feature (466)..(468): n is a, c, g, or t
  misc_feature (471)..(472): n is a, c, g, or t
  misc_feature (475)..(475): n is a, c, g, or t
  misc_feature (477)..(477): n is a, c, g, or t
  misc_feature (479)..(479): n is a, c, g, or t
  misc_feature (482)..(483): n is a, c, g, or t
  misc_feature (485)..(485): n is a, c, g, or t
  misc_feature (490)..(490): n is a, c, g, or t
  misc_feature (494)..(494): n is a, c, g, or t
  misc_feature (497)..(497): n is a, c, g, or t
  misc_feature (499)..(499): n is a, c, g, or t
  misc_feature (503)..(503): n is a, c, g, or t
  misc_feature (507)..(507): n is a, c, g, or t
  misc_feature (509)..(509): n is a, c, g, or t
  misc_feature (511)..(511): n is a, c, g, or t
  misc_feature (514)..(516): n is a, c, g, or t
  misc_feature (519)..(519): n is a, c, g, or t
  misc_feature (525)..(525): n is a, c, g, or t
  misc_feature (529)..(530): n is a, c, g, or t
  misc_feature (534)..(534): n is a, c, g, or t
  misc_feature (538)..(538): n is a, c, g, or t
  misc_feature (540)..(540): n is a, c, g, or t
  misc_feature (544)..(544): n is a, c, g, or t
  misc_feature (546)..(546): n is a, c, g, or t
  misc_feature (548)..(548): n is a, c, g, or t
  misc_feature (550)..(550): n is a, c, g, or t
  misc_feature (554)..(554): n is a, c, g, or t
  misc_feature (564)..(565): n is a, c, g, or t
  misc_feature (568)..(568): n is a, c, g, or t
  misc_feature (570)..(570): n is a, c, g, or t
  misc_feature (572)..(572): n is a, c, g, or t
  misc_feature (574)..(577): n is a, c, g, or t
  misc_feature (584)..(584): n is a, c, g, or t
  misc_feature (593)..(593): n is a, c, g, or t
  misc_feature (595)..(595): n is a, c, g, or t
  misc_feature (600)..(600): n is a, c, g, or t
  misc_feature (602)..(603): n is a, c, g, or t
  misc_feature (611)..(611): n is a, c, g, or t
  misc_feature (615)..(615): n is a, c, g, or t
  misc_feature (618)..(618): n is a, c, g, or t
  misc_feature (623)..(623): n is a, c, g, or t
  misc_feature (625)..(625): n is a, c, g, or t
  misc_feature (628)..(628): n is a, c, g, or t
  misc_feature (632)..(632): n is a, c, g, or t
  misc_feature (634)..(634): n is a, c, g, or t
  misc_feature (640)..(640): n is a, c, g, or t
  misc_feature (646)..(648): n is a, c, g, or t
  misc_feature (650)..(650): n is a, c, g, or t
  misc_feature (657)..(657): n is a, c, g, or t
  misc_feature (659)..(660): n is a, c, g, or t
  misc_feature (667)..(668): n is a, c, g, or t
  misc_feature (670)..(672): n is a, c, g, or t
  misc_feature (675)..(675): n is a, c, g, or t
  misc_feature (677)..(678): n is a, c, g, or t
  misc_feature (682)..(684): n is a, c, g, or t
  misc_feature (686)..(686): n is a, c, g, or t
  misc_feature (689)..(691): n is a, c, g, or t
  misc_feature (693)..(693): n is a, c, g, or t
  misc_feature (703)..(703): n is a, c, g, or t
  misc_feature (707)..(707): n is a, c, g, or t
  misc_feature (714)..(715): n is a, c, g, or t
  misc_feature (725)..(725): n is a, c, g, or t
  misc_feature (729)..(729): n is a, c, g, or t
  misc_feature (732)..(732): n is a, c, g, or t
  misc_feature (738)..(738): n is a, c, g, or t
  misc_feature (743)..(743): n is a, c, g, or t
  misc_feature (746)..(748): n is a, c, g, or t
  misc_feature (750)..(752): n is a, c, g, or t
  misc_feature (754)..(755): n is a, c, g, or t
  misc_feature (760)..(760): n is a, c, g, or t
  misc_feature (766)..(766): n is a, c, g, or t
  misc_feature (768)..(769): n is a, c, g, or t
  misc_feature (774)..(775): n is a, c, g, or t
  misc_feature (782)..(784): n is a, c, g, or t
  misc_feature (787)..(787): n is a, c, g, or t
  misc_feature (791)..(791): n is a, c, g, or t
  misc_feature (800)..(801): n is a, c, g, or t
  misc_feature (804)..(804): n is a, c, g, or t
  misc_feature (810)..(810): n is a, c, g, or t
  misc_feature (814)..(815): n is a, c, g, or t
  misc_feature (824)..(825): n is a, c, g, or t
  misc_feature (827)..(827): n is a, c, g, or t
  misc_feature (830)..(830): n is a, c, g, or t
  misc_feature (834)..(834): n is a, c, g, or t
  misc_feature (840)..(844): n is a, c, g, or t
  misc_feature (848)..(848): n is a, c, g, or t
  misc_feature (850)..(852): n is a, c, g, or t
  misc_feature (854)..(854): n is a, c, g, or t
  misc_feature (859)..(859): n is a, c, g, or t
  misc_feature (866)..(866): n is a, c, g, or t
  misc_feature (868)..(868): n is a, c, g, or t
  misc_feature (871)..(871): n is a, c, g, or t
  misc_feature (879)..(879): n is a, c, g, or t
  misc_feature (886)..(886): n is a, c, g, or t
  misc_feature (889)..(889): n is a, c, g, or t
  misc_feature (893)..(894): n is a, c, g, or t
  misc_feature (898)..(899): n is a, c, g, or t
  misc_feature (902)..(902): n is a, c, g, or t
  misc_feature (907)..(910): n is a, c, g, or t
  misc_feature (912)..(912): n is a, c, g, or t
  misc_feature (915)..(916): n is a, c, g, or t
  misc_feature (918)..(918): n is a, c, g, or t
  misc_feature (923)..(923): n is a, c, g, or t
  misc_feature (926)..(927): n is a, c, g, or t
  misc_feature (930)..(930): n is a, c, g, or t
  misc_feature (932)..(932): n is a, c, g, or t
  misc_feature (934)..(937): n is a, c, g, or t
  misc_feature (942)..(942): n is a, c, g, or t
  misc_feature (945)..(949): n is a, c, g, or t
  misc_feature (954)..(954): n is a, c, g, or t
  misc_feature (957)..(957): n is a, c, g, or t
  misc_feature (959)..(961): n is a, c, g, or t
  misc_feature (967)..(967): n is a, c, g, or t
  misc_feature (969)..(969): n is a, c, g, or t
  misc_feature (972)..(972): n is a, c, g, or t
  misc_feature (976)..(977): n is a, c, g, or t
  misc_feature (981)..(981): n is a, c, g, or t
  misc_feature (985)..(985): n is a, c, g, or t
  misc_feature (988)..(988): n is a, c, g, or t
  misc_feature (994)..(994): n is a, c, g, or t
  misc_feature (996)..(997): n is a, c, g, or t
  misc_feature (1001)..(1002): n is a, c, g, or t
  misc_feature (1005)..(1006): n is a, c, g, or t
  misc_feature (1012)..(1013): n is a, c, g, or t
  misc_feature (1019)..(1021): n is a, c, g, or t
  misc_feature (1023)..(1023): n is a, c, g, or t
  misc_feature (1029)..(1029): n is a, c, g, or t
  misc_feature (1034)..(1035): n is a, c, g, or t
  misc_feature (1039)..(1041): n is a, c, g, or t
  misc_feature (1048)..(1048): n is a, c, g, or t
  misc_feature (1056)..(1056): n is a, c, g, or t
  misc_feature (1059)..(1059): n is a, c, g, or t
  misc_feature (1061)..(1061): n is a, c, g, or t
  misc_feature (1063)..(1063): n is a, c, g, or t
  misc_feature (1070)..(1070): n is a, c, g, or t
  misc_feature (1072)..(1073): n is a, c, g, or t
  misc_feature (1077)..(1077): n is a, c, g, or t
  misc_feature (1080)..(1081): n is a, c, g, or t
  misc_feature (1083)..(1084): n is a, c, g, or t
  misc_feature (1091)..(1094): n is a, c, g, or t
  misc_feature (1097)..(1097): n is a, c, g, or t
  misc_feature (1100)..(1100): n is a, c, g, or t
  misc_feature (1102)..(1102): n is a, c, g, or t
  misc_feature (1106)..(1108): n is a, c, g, or t
  misc_feature (1110)..(1111): n is a, c, g, or t
  misc_feature (1113)..(1113): n is a, c, g, or t
  misc_feature (1121)..(1121): n is a, c, g, or t
  misc_feature (1123)..(1124): n is a, c, g, or t
  misc_feature (1126)..(1126): n is a, c, g, or t
  misc_feature (1128)..(1128): n is a, c, g, or t
  misc_feature (1130)..(1132): n is a, c, g, or t
  misc_feature (1136)..(1136): n is a, c, g, or t
  misc_feature (1143)..(1143): n is a, c, g, or t
  misc_feature (1145)..(1146): n is a, c, g, or t
  misc_feature (1152)..(1152): n is a, c, g, or t
  misc_feature (1156)..(1160): n is a, c, g, or t
  misc_feature (1162)..(1163): n is a, c, g, or t
  misc_feature (1166)..(1168): n is a, c, g, or t
  misc_feature (1170)..(1170): n is a, c, g, or t
  misc_feature (1172)..(1172): n is a, c, g, or t
  misc_feature (1176)..(1177): n is a, c, g, or t
  misc_feature (1184)..(1184): n is a, c, g, or t
  misc_feature (1187)..(1187): n is a, c, g, or t
  misc_feature (1190)..(1190): n is a, c, g, or t
  misc_feature (1194)..(1194): n is a, c, g, or t
  misc_feature (1196)..(1196): n is a, c, g, or t
  misc_feature (1201)..(1201): n is a, c, g, or t
  misc_feature (1203)..(1203): n is a, c, g, or t
  misc_feature (1211)..(1211): n is a, c, g, or t
  misc_feature (1213)..(1213): n is a, c, g, or t
  misc_feature (1215)..(1216): n is a, c, g, or t
  misc_feature (1219)..(1219): n is a, c, g, or t
  misc_feature (1224)..(1225): n is a, c, g, or t
  misc_feature (1227)..(1228): n is a, c, g, or t
  misc_feature (1230)..(1230): n is a, c, g, or t
  misc_feature (1235)..(1235): n is a, c, g, or t
  misc_feature (1237)..(1237): n is a, c, g, or t
  misc_feature (1239)..(1240): n is a, c, g, or t
  misc_feature (1244)..(1244): n is a, c, g, or t
  misc_feature (1246)..(1246): n is a, c, g, or t
  misc_feature (1248)..(1248): n is a, c, g, or t
  misc_feature (1251)..(1252): n is a, c, g, or t
  misc_feature (1254)..(1254): n is a, c, g, or t
  misc_feature (1257)..(1257): n is a, c, g, or t
  misc_feature (1260)..(1260): n is a, c, g, or t
  misc_feature (1262)..(1262): n is a, c, g, or t
  misc_feature (1269)..(1269): n is a, c, g, or t
  misc_feature (1271)..(1272): n is a, c, g, or t
  misc_feature (1276)..(1276): n is a, c, g, or t
  misc_feature (1284)..(1284): n is a, c, g, or t
  misc_feature (1287)..(1287): n is a, c, g, or t
  misc_feature (1289)..(1291): n is a, c, g, or t
  misc_feature (1304)..(1304): n is a, c, g, or t
  misc_feature (1308)..(1308): n is a, c, g, or t
  misc_feature (1311)..(1314): n is a, c, g, or t
  misc_feature (1318)..(1318): n is a, c, g, or t
  misc_feature (1326)..(1326): n is a, c, g, or t
  misc_feature (1335)..(1335): n is a, c, g, or t
  misc_feature (1338)..(1338): n is a, c, g, or t
  misc_feature (1340)..(1340): n is a, c, g, or t
  misc_feature (1345)..(1345): n is a, c, g, or t
  misc_feature (1347)..(1348): n is a, c, g, or t
  misc_feature (1354)..(1354): n is a, c, g, or t
  misc_feature (1362)..(1362): n is a, c, g, or t
  misc_feature (1366)..(1367): n is a, c, g, or t
  misc_feature (1370)..(1370): n is a, c, g, or t
  misc_feature (1372)..(1372): n is a, c, g, or t
  misc_feature (1374)..(1374): n is a, c, g, or t
  misc_feature (1376)..(1377): n is a, c, g, or t
  misc_feature (1379)..(1379): n is a, c, g, or t
  misc_feature (1384)..(1384): n is a, c, g, or t
  misc_feature (1390)..(1390): n is a, c, g, or t
  misc_feature (1394)..(1395): n is a, c, g, or t
  misc_feature (1397)..(1397): n is a, c, g, or t
  misc_feature (1401)..(1401): n is a, c, g, or t
  misc_feature (1412)..(1412): n is a, c, g, or t
  misc_feature (1417)..(1417): n is a, c, g, or t
  misc_feature (1422)..(1422): n is a, c, g, or t
  misc_feature (1427)..(1427): n is a, c, g, or t
  misc_feature (1429)..(1429): n is a, c, g, or t
  misc_feature (1439)..(1439): n is a, c, g, or t
  misc_feature (1445)..(1446): n is a, c, g, or t
  misc_feature (1448)..(1450): n is a, c, g, or t
  misc_feature (1453)..(1453): n is a, c, g, or t
  misc_feature (1456)..(1456): n is a, c, g, or t
  misc_feature (1464)..(1464): n is a, c, g, or t
  misc_feature (1466)..(1466): n is a, c, g, or t
  misc_feature (1469)..(1469): n is a, c, g, or t
  misc_feature (1473)..(1473): n is a, c, g, or t
  misc_feature (1481)..(1482): n is a, c, g, or t
  misc_feature (1487)..(1487): n is a, c, g, or t
  misc_feature (1493)..(1493): n is a, c, g, or t
  misc_feature (1499)..(1500): n is a, c, g, or t
  misc_feature (1507)..(1507): n is a, c, g, or t
  misc_feature (1509)..(1509): n is a, c, g, or t
  misc_feature (1511)..(1511): n is a, c, g, or t
  misc_feature (1514)..(1514): n is a, c, g, or t
  misc_feature (1518)..(1518): n is a, c, g, or t
  misc_feature (1529)..(1529): n is a, c, g, or t
  misc_feature (1535)..(1536): n is a, c, g, or t
  misc_feature (1543)..(1543): n is a, c, g, or t
  misc_feature (1551)..(1551): n is a, c, g, or t
  misc_feature (1555)..(1555): n is a, c, g, or t
  misc_feature (1557)..(1558): n is a, c, g, or t
  misc_feature (1568)..(1568): n is a, c, g, or t
  misc_feature (1571)..(1571): n is a, c, g, or t
  misc_feature (1576)..(1578): n is a, c, g, or t
  misc_feature (1584)..(1584): n is a, c, g, or t
  misc_feature (1586)..(1586): n is a, c, g, or t
  misc_feature (1588)..(1588): n is a, c, g, or t
  misc_feature (1592)..(1592): n is a, c, g, or t
  misc_feature (1598)..(1598): n is a, c, g, or t
  misc_feature (1602)..(1602): n is a, c, g, or t
  misc_feature (1605)..(1605): n is a, c, g, or t
  misc_feature (1608)..(1608): n is a, c, g, or t
  misc_feature (1610)..(1610): n is a, c, g, or t
  misc_feature (1612)..(1612): n is a, c, g, or t
  misc_feature (1614)..(1614): n is a, c, g, or t
  misc_feature (1617)..(1619): n is a, c, g, or t
  misc_feature (1622)..(1622): n is a, c, g, or t
  misc_feature (1627)..(1628): n is a, c, g, or t
  misc_feature (1631)..(1631): n is a, c, g, or t
  misc_feature (1633)..(1635): n is a, c, g, or t
  misc_feature (1641)..(1641): n is a, c, g, or t
  misc_feature (1643)..(1643): n is a, c, g, or t
  misc_feature (1645)..(1645): n is a, c, g, or t
  misc_feature (1652)..(1652): n is a, c, g, or t
  misc_feature (1654)..(1654): n is a, c, g, or t
  misc_feature (1670)..(1670): n is a, c, g, or t
  misc_feature (1677)..(1677): n is a, c, g, or t
  misc_feature (1688)..(1688): n is a, c, g, or t
  misc_feature (1696)..(1697): n is a, c, g, or t
  misc_feature (1699)..(1700): n is a, c, g, or t
  misc_feature (1703)..(1704): n is a, c, g, or t
  misc_feature (1706)..(1706): n is a, c, g, or t
  misc_feature (1709)..(1709): n is a, c, g, or t
  misc_feature (1713)..(1714): n is a, c, g, or t
  misc_feature (1718)..(1719): n is a, c, g, or t
  misc_feature (1721)..(1722): n is a, c, g, or t
  misc_feature (1727)..(1727): n is a, c, g, or t
  misc_feature (1734)..(1734): n is a, c, g, or t
  misc_feature (1736)..(1736): n is a, c, g, or t
  misc_feature (1741)..(1742): n is a, c, g, or t
  misc_feature (1751)..(1751): n is a, c, g, or t
  misc_feature (1755)..(1757): n is a, c, g, or t
  misc_feature (1760)..(1762): n is a, c, g, or t
  misc_feature (1766)..(1766): n is a, c, g, or t
  misc_feature (1770)..(1770): n is a, c, g, or t
  misc_feature (1774)..(1776): n is a, c, g, or t
  misc_feature (1783)..(1783): n is a, c, g, or t
  misc_feature (1785)..(1785): n is a, c, g, or t
  misc_feature (1787)..(1787): n is a, c, g, or t
  misc_feature (1789)..(1789): n is a, c, g, or t
  misc_feature (1800)..(1800): n is a, c, g, or t
  misc_feature (1805)..(1805): n is a, c, g, or t
  misc_feature (1813)..(1813): n is a, c, g, or t
  misc_feature (1815)..(1815): n is a, c, g, or t
  misc_feature (1817)..(1817): n is a, c, g, or t
  misc_feature (1819)..(1819): n is a, c, g, or t
  misc_feature (1821)..(1821): n is a, c, g, or t
  misc_feature (1824)..(1824): n is a, c, g, or t
  misc_feature (1828)..(1829): n is a, c, g, or t
  misc_feature (1835)..(1835): n is a, c, g, or t
  misc_feature (1847)..(1847): n is a, c, g, or t
  misc_feature (1850)..(1850): n is a, c, g, or t
  misc_feature (1854)..(1854): n is a, c, g, or t
  misc_feature (1861)..(1861): n is a, c, g, or t
  misc_feature (1863)..(1863): n is a, c, g, or t
  misc_feature (1865)..(1865): n is a, c, g, or t
  misc_feature (1875)..(1875): n is a, c, g, or t
  misc_feature (1880)..(1880): n is a, c, g, or t
  misc_feature (1882)..(1883): n is a, c, g, or t
  misc_feature (1885)..(1885): n is a, c, g, or t
  misc_feature (1890)..(1890): n is a, c, g, or t
  misc_feature (1892)..(1892): n is a, c, g, or t
  misc_feature (1897)..(1898): n is a, c, g, or t
  misc_feature (1906)..(1906): n is a, c, g, or t
  misc_feature (1908)..(1908): n is a, c, g, or t
  misc_feature (1917)..(1917): n is a, c, g, or t
  misc_feature (1921)..(1922): n is a, c, g, or t
  misc_feature (1924)..(1925): n is a, c, g, or t
  misc_feature (1932)..(1933): n is a, c, g, or t
  misc_feature (1937)..(1937): n is a, c, g, or t
  misc_feature (1941)..(1941): n is a, c, g, or t
  misc_feature (1948)..(1948): n is a, c, g, or t
  misc_feature (1950)..(1950): n is a, c, g, or t
  misc_feature (1953)..(1954): n is a, c, g, or t
  misc_feature (1962)..(1962): n is a, c, g, or t
  misc_feature (1965)..(1965): n is a, c, g, or t
  misc_feature (1968)..(1968): n is a, c, g, or t
  misc_feature (1977)..(1977): n is a, c, g, or t
  misc_feature (1989)..(1991): n is a, c, g, or t
  misc_feature (1994)..(1994): n is a, c, g, or t
  misc_feature (1996)..(1996): n is a, c, g, or t
  misc_feature (2004)..(2004): n is a, c, g, or t
  misc_feature (2013)..(2013): n is a, c, g, or t
  misc_feature (2018)..(2018): n is a, c, g, or t
  misc_feature (2020)..(2020): n is a, c, g, or t
  misc_feature (2026)..(2026): n is a, c, g, or t
  misc_feature (2028)..(2028): n is a, c, g, or t
  misc_feature (2033)..(2033): n is a, c, g, or t
  misc_feature (2037)..(2038): n is a, c, g, or t
  misc_feature (2052)..(2052): n is a, c, g, or t
  misc_feature (2056)..(2059): n is a, c, g, or t
  misc_feature (2061)..(2061): n is a, c, g, or t
  misc_feature (2066)..(2066): n is a, c, g, or t
  misc_feature (2071)..(2072): n is a, c, g, or t
cgnatttntnattattaananngngggngntgnggnggggtttttttcccccccncccctntatnggggngatttctttttttnnggggggngcncattnatacacnattncttncccaaaagngggggngntncnnggactnccaanctatctgggggtttnttnatctcccannncccnnntnctnctctngttccggttntagtnntttnnnnttcctacncctacntncttgaancntcnnnaggganngttgtcccnnannttngatcccncttcncgncgtntgangtnnncaatantatttcttncctccnaatcaccncccatanncaacgagccnnttnatganntggnagacngatgcncttngtgnttntaatnnccnncacgnnncccnngangtcnnntctnnancntcgtngncnccccnntantnntaaccantncncnanannttanntnnnccnncgngngnccnnantgtanaaantantntctncttncntnacnnntcnatgagntatnnaatncagncnaagnanantnttantcaccttttnntananangnnnnccacacncctccttanancgtanannacaaaccnaacncanttccnanctncatntnttcctntttcannntncaccccncnnttgcaanntnnntantnntgcnnnantcnnnantattcccttntctnaatcatnnttttcatatngtcnaanccatcnatttnctnnnannncnnctctngatttncnnctatnnctccctnnnaancacnctatcccgnnttntctaantttnnatcccaccnncnctncctntagtcnnnnntcancnnntnctatntcctatnantancatccttntcccggncantttnncttnntcnatcannnntngtnnancttcnccnnctncntnnnntattnccnnnnnccctnacntnnntttcanantcncacnncgtnctcnaancgcctncnncctnnttnngccctnnctcctnnngnatctcnaattnnatannnaactcantcattccnccntncnacttttnanntatnccnnanntacctcnnnncanatncnttcnnntnncntttgtccncnnantncnnnttcntatttanannaatatncccnnnnnannctnnnantnatcnnattaaanacnccnctantncttcntnttttctcnantnnctnaatcnnanncntcatntncnncttngntnctnncnagncantntcaatancnnttancccctcantcncnnntaattttcattcncctnatnnnntttnttttctanactttgtcntantngcttntnnttttcnctctatanattnnttntntnanncnctccncaactntatnntnctcnctaaaatttcnattcnaaacntcccntnttcctttttncctccnnannnttntantgactccnanatntatntctcactnntcttnttctangactannactcctncntntantttnttcattctatnatctannattcttnattatacncttntnnattcgtctanacntaacnnngtacantnanctcntcaccntatntcnctnanantntcnnnttnacganncantnnncctcgnantncatagcnanttctgtaaagtttttntctctcnttctttttctnactatctnncnntcnngnttnaatnncaanncnnttgtnacattancntcttnntctctagtnttcnnngtnnntctnattntccnnnccgtacncntntnttcacttcctntgatntcacccanantnantnaancgtnntatctnttatctccattntcnctcntgcattntncnttcccaattntatgntnngncgtcncncttcnntcatatantntccactatntacnntnntacttcnnaatncctnttacacncncgnncatcctcncanatnctacacacntatcgctcttcnnncancnctatcttnccatcatanatagntntctatnanatcanctannagagagatattatnatannnnanactgnatatnntt

SEQ ID NO: 779 - DNA, 1381 bp, Homo Sapiens
  misc_feature (814)..(814): n is a, c, g, or t
  misc_feature (833)..(833): n is a, c, g, or t
  misc_feature (843)..(843): n is a, c, g, or t
  misc_feature (924)..(924): n is a, c, g, or t
  misc_feature (971)..(971): n is a, c, g, or t
  misc_feature (990)..(990): n is a, c, g, or t
  misc_feature (992)..(992): n is a, c, g, or t
  misc_feature (1003)..(1003): n is a, c, g, or t
  misc_feature (1030)..(1030): n is a, c, g, or t
  misc_feature (1035)..(1035): n is a, c, g, or t
  misc_feature (1056)..(1056): n is a, c, g, or t
  misc_feature (1066)..(1066): n is a, c, g, or t
  misc_feature (1074)..(1074): n is a, c, g, or t
  misc_feature (1084)..(1084): n is a, c, g, or t
  misc_feature (1089)..(1089): n is a, c, g, or t
  misc_feature (1092)..(1092): n is a, c, g, or t
  misc_feature (1105)..(1105): n is a, c, g, or t
  misc_feature (1107)..(1107): n is a, c, g, or t
  misc_feature (1112)..(1112): n is a, c, g, or t
  misc_feature (1120)..(1120): n is a, c, g, or t
  misc_feature (1134)..(1135): n is a, c, g, or t
  misc_feature (1138)..(1138): n is a, c, g, or t
  misc_feature (1146)..(1146): n is a, c, g, or t
  misc_feature (1155)..(1155): n is a, c, g, or t
  misc_feature (1157)..(1157): n is a, c, g, or t
  misc_feature (1159)..(1159): n is a, c, g, or t
  misc_feature (1175)..(1175): n is a, c, g, or t
  misc_feature (1181)..(1181): n is a, c, g, or t
  misc_feature (1184)..(1186): n is a, c, g, or t
  misc_feature (1194)..(1194): n is a, c, g, or t
  misc_feature (1203)..(1204): n is a, c, g, or t
  misc_feature (1207)..(1207): n is a, c, g, or t
  misc_feature (1213)..(1214): n is a, c, g, or t
  misc_feature (1224)..(1225): n is a, c, g, or t
  misc_feature (1231)..(1233): n is a, c, g, or t
  misc_feature (1236)..(1236): n is a, c, g, or t
  misc_feature (1238)..(1240): n is a, c, g, or t
  misc_feature (1244)..(1244): n is a, c, g, or t
  misc_feature (1248)..(1248): n is a, c, g, or t
  misc_feature (1254)..(1254): n is a, c, g, or t
  misc_feature (1264)..(1264): n is a, c, g, or t
  misc_feature (1266)..(1266): n is a, c, g, or t
  misc_feature (1281)..(1281): n is a, c, g, or t
  misc_feature (1284)..(1284): n is a, c, g, or t
  misc_feature (1286)..(1286): n is a, c, g, or t
  misc_feature (1290)..(1290): n is a, c, g, or t
  misc_feature (1293)..(1294): n is a, c, g, or t
  misc_feature (1301)..(1301): n is a, c, g, or t
  misc_feature (1309)..(1311): n is a, c, g, or t
  misc_feature (1317)..(1318): n is a, c, g, or t
  misc_feature (1322)..(1322): n is a, c, g, or t
  misc_feature (1330)..(1330): n is a, c, g, or t
  misc_feature (1340)..(1340): n is a, c, g, or t
  misc_feature (1344)..(1344): n is a, c, g, or t
  misc_feature (1346)..(1346): n is a, c, g, or t
  misc_feature (1349)..(1349): n is a, c, g, or t
  misc_feature (1355)..(1355): n is a, c, g, or t
  misc_feature (1359)..(1359): n is a, c, g, or t
  misc_feature (1361)..(1361): n is a, c, g, or t
  misc_feature (1367)..(1367): n is a, c, g, or t
  misc_feature (1371)..(1372): n is a, c, g, or t
  misc_feature (1377)..(1377): n is a, c, g, or t
atagagaaattactatgagaggatcgcatcaccatcaccatcacggatcctatttaggtgacactatagaatcgtcgacccacgcgtccggcggcggtggcggcggagacccgaacatggcgaccgcgcgcaccttcgggcccgagcgggaagccgagccggccaaggaagcgcgcgtcgtgggctcggagcttgtggacacttatacggtttacatcatccaggtcactgatggcagccatgagtggacagtaaagcaccgctacagcgacttccatgacctgcatgaaaagctcgttgcagagagaaagattgataaaaacctgcttccgcccaaaaagataattgggaaaaactcaagaagcttggtggagaagagggagaaggatctggaggtctacctccagaagctcctggctgccttccctggcgtgacccccagagtactggcccacttcttgcattttcacttctatgagataaatggcatcaccgcggcactggctgaagagctctttgagaaaggagaacagctcctgggggccggcgaggtctttgccattggacccctgcagctgtatgccgtcacggagcagctgcagcagggaaagcccacgtgcgccagtggggatgccaagaccgacctcgggcacatcctggacttcacctgtcgccttaagtaccttaaggtttctggcacagaaggaccttttgggaccagcaacattcaggagcagctcctgccgttcgacctatcaatattcaagtccctgcatcaggtggagataagtcactgtgatgctaagcacatcanagggctggtcgcatcgaancccaccttanccacgctgagtgtccgcttctcagcaacctcgatgaaggaagtccttgttcctgaagcctcaaaatttgatgagtgggaancctgaaggcacaacccttaaaaggccctgtgactgccgtcatccccnccttggcaggcattgaccncncttgacctgancccaacagcatctccgaaatcgacaantctgngaactgatcccaaaaattganttcctggacntgaattcncaatgggatngctgnttnggaaaatttgcancnccggnaaaacctngggaatttggaccnntcntaaaaaanctctcctcntngnaagggtttcccccaanctgggnaannnaaaacttnaaacctggnnggnaccccnnaaaagttgannggccgnnnaancnnntccntggnaactgnattccgggananggtttaaaaaggggnggncngaanaanncccccgnttggaacnnntttttnnaaanccttaaantccccaaacnaaangnttntttttnaaangnccaaantttnnaaaanaaaa

SEQ ID NO: 780 - DNA, 1375 bp, Homo Sapiens
  misc_feature (1)..(2): n is a, c, g, or t
  misc_feature (702)..(702): n is a, c, g, or t
  misc_feature (862)..(862): n is a, c, g, or t
  misc_feature (885)..(885): n is a, c, g, or t
  misc_feature (901)..(901): n is a, c, g, or t
  misc_feature (914)..(914): n is a, c, g, or t
  misc_feature (918)..(918): n is a, c, g, or t
  misc_feature (927)..(927): n is a, c, g, or t
  misc_feature (929)..(929): n is a, c, g, or t
  misc_feature (932)..(932): n is a, c, g, or t
  misc_feature (960)..(960): n is a, c, g, or t
  misc_feature (962)..(962): n is a, c, g, or t
  misc_feature (969)..(969): n is a, c, g, or t
  misc_feature (973)..(973): n is a, c, g, or t
  misc_feature (980)..(980): n is a, c, g, or t
  misc_feature (1016)..(1016): n is a, c, g, or t
  misc_feature (1023)..(1023): n is a, c, g, or t
  misc_feature (1026)..(1026): n is a, c, g, or t
  misc_feature (1047)..(1047): n is a, c, g, or t
  misc_feature (1049)..(1050): n is a, c, g, or t
  misc_feature (1052)..(1054): n is a, c, g, or t
  misc_feature (1056)..(1056): n is a, c, g, or t
  misc_feature (1058)..(1059): n is a, c, g, or t
  misc_feature (1061)..(1073): n is a, c, g, or t
  misc_feature (1075)..(1076): n is a, c, g, or t
  misc_feature (1078)..(1078): n is a, c, g, or t
  misc_feature (1080)..(1082): n is a, c, g, or t
  misc_feature (1086)..(1086): n is a, c, g, or t
  misc_feature (1097)..(1097): n is a, c, g, or t
  misc_feature (1105)..(1105): n is a, c, g, or t
  misc_feature (1111)..(1111): n is a, c, g, or t
  misc_feature (1114)..(1114): n is a, c, g, or t
  misc_feature (1121)..(1121): n is a, c, g, or t
  misc_feature (1123)..(1123): n is a, c, g, or t
  misc_feature (1125)..(1125): n is a, c, g, or t
  misc_feature (1137)..(1137): n is a, c, g, or t
  misc_feature (1140)..(1140): n is a, c, g, or t
  misc_feature (1146)..(1146): n is a, c, g, or t
  misc_feature (1150)..(1150): n is a, c, g, or t
  misc_feature (1153)..(1154): n is a, c, g, or t
  misc_feature (1156)..(1156): n is a, c, g, or t
  misc_feature (1163)..(1163): n is a, c, g, or t
  misc_feature (1167)..(1167): n is a, c, g, or t
  misc_feature (1170)..(1171): n is a, c, g, or t
  misc_feature (1182)..(1182): n is a, c, g, or t
  misc_feature (1185)..(1185): n is a, c, g, or t
  misc_feature (1195)..(1195): n is a, c, g, or t
  misc_feature (1198)..(1198): n is a, c, g, or t
  misc_feature (1208)..(1208): n is a, c, g, or t
  misc_feature (1214)..(1216): n is a, c, g, or t
  misc_feature (1224)..(1224): n is a, c, g, or t
  misc_feature (1238)..(1238): n is a, c, g, or t
  misc_feature (1241)..(1241): n is a, c, g, or t
  misc_feature (1245)..(1245): n is a, c, g, or t
  misc_feature (1254)..(1255): n is a, c, g, or t
  misc_feature (1258)..(1258): n is a, c, g, or t
  misc_feature (1268)..(1268): n is a, c, g, or t
  misc_feature (1278)..(1279): n is a, c, g, or t
  misc_feature (1291)..(1292): n is a, c, g, or t
  misc_feature (1297)..(1297): n is a, c, g, or t
  misc_feature (1299)..(1300): n is a, c, g, or t
  misc_feature (1305)..(1305): n is a, c, g, or t
  misc_feature (1309)..(1309): n is a, c, g, or t
  misc_feature (1317)..(1317): n is a, c, g, or t
  misc_feature (1319)..(1321): n is a, c, g, or t
  misc_feature (1324)..(1325): n is a, c, g, or t
  misc_feature (1327)..(1328): n is a, c, g, or t
  misc_feature (1332)..(1332): n is a, c, g, or t
  misc_feature (1336)..(1336): n is a, c, g, or t
  misc_feature (1346)..(1346): n is a, c, g, or t
  misc_feature (1351)..(1352): n is a, c, g, or t
  misc_feature (1361)..(1362): n is a, c, g, or t
  misc_feature (1369)..(1370): n is a, c, g, or t
  misc_feature (1373)..(1373): n is a, c, g, or t
nnattagagaaaattactatgagaggatcgcatcaccatcaccatcacggatcctatttaggtgacactatagaatcgtcgacccacgcgtccgcgctgccccctggcaagatcgtggccctcgtgggccagtctggcggaggaaagaccaccgtggcttccctgctggagcgcttctacgaccccacggcaggcgtggtgatgctggatgggcgggacctgcgcacccttgacccctcctggctccggggccaggttgtcggcttcatcagccaggagcccatcctgtttgggacgaccatcatggaaaacatccgctttgggaagctggaagcttccgatgaagaggtgtacacagccgcccgggaagcgaatgctcacgagttcatcaccagcttccccgagggctacaacacggtcgtcggtgaacggggcactaccctgtctgggggccagaagcagcgcctggccatcgcccgagcccttatcaagcagcccacggtgctgatactggatgaagctaccagcgcgctggatgcagagtccgagcgggttgtacaggaggccctggaccgggccagtgcaggccgcacggtgctggtaattgcccaccggctcagcactgtccgtggggcccactgcattgtcgtcatggccgatggccgtgtctgggaggctgggacacatgaagagctcctgaanaaaggcgggctatacgccgagctcatccggaggcaggccctggatgccccgaggacagcggcccccccgcccaaaaagccagaaggccccaggagccaccagcacaagtcctgagaaagggcccccctgaggtgtggtcgctgccaagcatcattgttanggctggggctcagcctgggggancctactggggactgancccccaggaaggnccancatgtgganantcnctgcggctgctcctgctcacaataaaancnggggccnaacnacttggnaaggggaggccaaattccctcccttccccttcccantcctgcnggntgctccctccaaaaaaaaaanannannnanannannnnnnnnnnnnnannanannngggnggccccccccnaaaggaancctatnaanttaattnantnaatttggacccnttnaaaaanccanaannancccaaancctntgnnatttttaaaanccnggtttccccnggntttttttggnaaaccnnnttattggnaattttcgacttanaanttanggaaaaaanntgnaaaccccttnaattcccggnncaaaaaattttnngattntnnttttnaganaaaaaaantnnngannanntttnaaanaaaaaaaaanttttnnttttttttnnccaaaannccnaa

SEQ ID NO: 781 - DNA, 1387 bp, Homo Sapiens
  misc_feature (1)..(1): n is a, c, g, or t
  misc_feature (943)..(943): n is a, c, g, or t
  misc_feature (948)..(948): n is a, c, g, or t
  misc_feature (964)..(964): n is a, c, g, or t
  misc_feature (970)..(970): n is a, c, g, or t
  misc_feature (973)..(973): n is a, c, g, or t
  misc_feature (998)..(998): n is a, c, g, or t
  misc_feature (1005)..(1005): n is a, c, g, or t
  misc_feature (1039)..(1040): n is a, c, g, or t
  misc_feature (1056)..(1057): n is a, c, g, or t
  misc_feature (1060)..(1061): n is a, c, g, or t
  misc_feature (1070)..(1070): n is a, c, g, or t
  misc_feature (1072)..(1072): n is a, c, g, or t
  misc_feature (1106)..(1106): n is a, c, g, or t
  misc_feature (1123)..(1125): n is a, c, g, or t
  misc_feature (1128)..(1128): n is a, c, g, or t
  misc_feature (1134)..(1134): n is a, c, g, or t
  misc_feature (1147)..(1147): n is a, c, g, or t
  misc_feature (1149)..(1149): n is a, c, g, or t
  misc_feature (1151)..(1151): n is a, c, g, or t
  misc_feature (1154)..(1154): n is a, c, g, or t
  misc_feature (1160)..(1160): n is a, c, g, or t
  misc_feature (1162)..(1162): n is a, c, g, or t
  misc_feature (1164)..(1165): n is a, c, g, or t
  misc_feature (1175)..(1175): n is a, c, g, or t
  misc_feature (1179)..(1179): n is a, c, g, or t
  misc_feature (1191)..(1192): n is a, c, g, or t
  misc_feature (1197)..(1198): n is a, c, g, or t
  misc_feature (1200)..(1200): n is a, c, g, or t
  misc_feature (1218)..(1218): n is a, c, g, or t
  misc_feature (1226)..(1226): n is a, c, g, or t
  misc_feature (1231)..(1231): n is a, c, g, or t
  misc_feature (1248)..(1248): n is a, c, g, or t
  misc_feature (1254)..(1254): n is a, c, g, or t
  misc_feature (1257)..(1257): n is a, c, g, or t
  misc_feature (1268)..(1269): n is a, c, g, or t
  misc_feature (1272)..(1272): n is a, c, g, or t
  misc_feature (1275)..(1275): n is a, c, g, or t
  misc_feature (1295)..(1295): n is a, c, g, or t
  misc_feature (1302)..(1304): n is a, c, g, or t
  misc_feature (1311)..(1311): n is a, c, g, or t
  misc_feature (1322)..(1322): n is a, c, g, or t
  misc_feature (1325)..(1325): n is a, c, g, or t
  misc_feature (1340)..(1341): n is a, c, g, or t
  misc_feature (1343)..(1343): n is a, c, g, or t
  misc_feature (1349)..(1354): n is a, c, g, or t
  misc_feature (1356)..(1356): n is a, c, g, or t
  misc_feature (1358)..(1359): n is a, c, g, or t
  misc_feature (1362)..(1362): n is a, c, g, or t
  misc_feature (1370)..(1370): n is a, c, g, or t
  misc_feature (1373)..(1373): n is a, c, g, or t
  misc_feature (1375)..(1375): n is a, c, g, or t
  misc_feature (1377)..(1381): n is a, c, g, or t
  misc_feature (1383)..(1384): n is a, c, g, or t
  misc_feature (1386)..(1386): n is a, c, g, or t
naatagagaaattactatgagaggatcgcatcaccatcaccatcacggatcctatttaggtgacactatagaatcgtcgacccacgcgtccgatagcttaccgcaaggatcagactgttgctggacacgacgtctgtgtggagccaggaggaacacatgtggtgtctgtatggctgctctctacctaggacaccagctgccacttcttttgcctcatgaagaactcttgggccagccaaactgggaacctaggtgtctgggtcttgtgacaaccaaagcactttgacactaccccctgccgagagaagaggagtggatgagcctgcgggtttgcctcaagaaacttcatgagggtctcttactaactccattacactctctctcctggagcctcatctccatgtcaagcaggagggtaaagaagggaactaagagcaggtctttcaagccacacccccacctgcggatggatgggtttctctgtaggccatgcaggcctttgtcgcagcaaaccttcccagcagcccttgagccaagtaaaaccagcacaaccagccaccagtggttggtgaggcagtgcccacaaggctcatgttgtatgcctttgataaggccatcttggctttgagtagcagtgttcctcgtcacccatttccccctcaggattacaacacctgctatcaaatcatctaagctgaaaacatgagatgcgcttggaaaggcctagtcagaagccatttcctcttatcatttccctctcctatgcaccagtaaggcccgtccagagccccagcagggagtgggccctgagtccacactgtccctgagtgatccaggaggctgcccacatcccccacatgtgcactgtggttccagtgtagctgctgtgagcccactgccactgcctcaaaagggagccactgtgaacctctcgagtggctcnaaaancagtggcttttttganaatggnccnatacttctggcccggctggatgaanggaatgnccaaccctttggcctctccccctccttccatttnnttctctctcttggccnnatnnctcttttcnanttcaaaaaaaaaaaaaaaaaaaaaaaaggggcgnccccccccctaaagggnnnccnaataancttaaattaactnancntgnaccccngntnnaaaaatcccnaaangacccccaaaannccctnngnatttttcaaaaaccccgnttgccccnggggntttttttttggggaaanccaacnacntgggaaatttnnggnccnagaaccaaaagggaaaaaantcctggnnnacccccnttaaatccccnggnccccaaaaaaatttnngngttttnnnnnngncnnggncaaaaccnacncncnnnnntnncnc

SEQ ID NO: 782 - DNA, 1030 bp, Homo Sapiens
  misc_feature (2)..(2): n is a, c, g, or t
  misc_feature (4)..(5): n is a, c, g, or t
  misc_feature (7)..(8): n is a, c, g, or t
  misc_feature (12)..(12): n is a, c, g, or t
  misc_feature (14)..(14): n is a, c, g, or t
  misc_feature (30)..(30): n is a, c, g, or t
  misc_feature (63)..(63): n is a, c, g, or t
  misc_feature (104)..(104): n is a, c, g, or t
  misc_feature (175)..(175): n is a, c, g, or t
  misc_feature (187)..(187): n is a, c, g, or t
  misc_feature (230)..(230): n is a, c, g, or t
  misc_feature (266)..(266): n is a, c, g, or t
  misc_feature (333)..(333): n is a, c, g, or t
  misc_feature (695)..(695): n is a, c, g, or t
  misc_feature (707)..(707): n is a, c, g, or t
  misc_feature (752)..(752): n is a, c, g, or t
  misc_feature (764)..(764): n is a, c, g, or t
  misc_feature (766)..(768): n is a, c, g, or t
  misc_feature (770)..(770): n is a, c, g, or t
  misc_feature (790)..(790): n is a, c, g, or t
  misc_feature (796)..(796): n is a, c, g, or t
  misc_feature (807)..(807): n is a, c, g, or t
  misc_feature (818)..(818): n is a, c, g, or t
  misc_feature (821)..(821): n is a, c, g, or t
  misc_feature (828)..(830): n is a, c, g, or t
  misc_feature (841)..(841): n is a, c, g, or t
  misc_feature (859)..(859): n is a, c, g, or t
  misc_feature (862)..(862): n is a, c, g, or t
  misc_feature (870)..(870): n is a, c, g, or t
  misc_feature (880)..(880): n is a, c, g, or t
  misc_feature (891)..(891): n is a, c, g, or t
  misc_feature (896)..(896): n is a, c, g, or t
  misc_feature (901)..(901): n is a, c, g, or t
  misc_feature (904)..(904): n is a, c, g, or t
  misc_feature (911)..(911): n is a, c, g, or t
  misc_feature (913)..(913): n is a, c, g, or t
  misc_feature (915)..(915): n is a, c, g, or t
  misc_feature (920)..(920): n is a, c, g, or t
  misc_feature (930)..(930): n is a, c, g, or t
  misc_feature (940)..(940): n is a, c, g, or t
  misc_feature (955)..(955): n is a, c, g, or t
  misc_feature (957)..(957): n is a, c, g, or t
  misc_feature (959)..(959): n is a, c, g, or t
  misc_feature (966)..(966): n is a, c, g, or t
  misc_feature (969)..(969): n is a, c, g, or t
  misc_feature (974)..(974): n is a, c, g, or t
  misc_feature (976)..(976): n is a, c, g, or t
  misc_feature (982)..(983): n is a, c, g, or t
  misc_feature (988)..(988): n is a, c, g, or t
  misc_feature (992)..(992): n is a, c, g, or t
  misc_feature (1008)..(1009): n is a, c, g, or t
  misc_feature (1013)..(1013): n is a, c, g, or t
  misc_feature (1018)..(1020): n is a, c, g, or t
  misc_feature (1023)..(1023): n is a, c, g, or t
ananngnntaangnaaattcctggagaggntcgcttccccatcaccatcacggatcctatttnggtgacactatagaatcgtcgacccacgcgtccgattctcngttcataggctatcccatcaccctttatttggagaaggaacgagagaaggaaattatctgatgatgaggcngaggaagagaanggtgagaaagaagaggaagataaagatgatgaagaaaaacccnagatcgaagatgtgggttcagatgaggaggatgacngcggtaaggataagaagaagaaaactaagaagatcaaagagaaatacattgatcaggaagaactaancaagaccaagcctatttggaccagaaaccctgatgacatcacccaagaggagtatggagaattctacaagagcctcactaatgactgggaagaccacttggcagtcaagcacttttctgtagaaggtcagttggaattcagggcattgctatttattcctcgtcgggctccctttgacctttttgagaacaagaagaaaaagaacaacatcaaactctatgtccgccgtgtgttcatcatggacagctgtgatgagttgataccagagtatctcaattttatccgtggtgtggttgactctgaggatctgcccctgaacatctcccgagaaatgctccagcagagcaaaatcttgaaagtcnttcgcaaaaacnttgttaagaagtgccttgagctcttctctgagctggcagaagacnaggagaattacnannnanttctatgaggcatttctctnaaaatnctcaagccttnggaatccaccnaantactccnnnaaaccggccgncccgccctgttcttgaanccntgcctgcngcttatcctntaccttccccngtccnggaanaantgaagantngnacaancctcccggcncaaaaaattnatttttcctccgccntngnagggganganccccnangaagtnnccctncttntttttaactatccccnngggntggannnaanccaataa

SEQ ID NO: 783 - DNA, 1200 bp, Homo Sapiens
  misc_feature (2)..(5): n is a, c, g, or t
  misc_feature (8)..(8): n is a, c, g, or t
  misc_feature (10)..(10): n is a, c, g, or t
  misc_feature (13)..(14): n is a, c, g, or t
  misc_feature (17)..(18): n is a, c, g, or t
  misc_feature (21)..(21): n is a, c, g, or t
  misc_feature (37)..(39): n is a, c, g, or t
  misc_feature (51)..(52): n is a, c, g, or t
  misc_feature (58)..(59): n is a, c, g, or t
  misc_feature (61)..(63): n is a, c, g, or t
  misc_feature (69)..(69): n is a, c, g, or t
  misc_feature (74)..(74): n is a, c, g, or t
  misc_feature (76)..(76): n is a, c, g, or t
  misc_feature (80)..(81): n is a, c, g, or t
  misc_feature (83)..(83): n is a, c, g, or t
  misc_feature (90)..(90): n is a, c, g, or t
  misc_feature (93)..(93): n is a, c, g, or t
  misc_feature (99)..(99): n is a, c, g, or t
  misc_feature (109)..(109): n is a, c, g, or t
  misc_feature (112)..(113): n is a, c, g, or t
  misc_feature (116)..(116): n is a, c, g, or t
  misc_feature (126)..(126): n is a, c, g, or t
  misc_feature (134)..(136): n is a, c, g, or t
  misc_feature (141)..(141): n is a, c, g, or t
  misc_feature (147)..(147): n is a, c, g, or t
  misc_feature (155)..(157): n is a, c, g, or t
  misc_feature (167)..(167): n is a, c, g, or t
  misc_feature (172)..(172): n is a, c, g, or t
  misc_feature (174)..(176): n is a, c, g, or t
  misc_feature (178)..(178): n is a, c, g, or t
  misc_feature (188)..(188): n is a, c, g, or t
  misc_feature (192)..(192): n is a, c, g, or t
  misc_feature (197)..(197): n is a, c, g, or t
  misc_feature (199)..(201): n is a, c, g, or t
  misc_feature (203)..(203): n is a, c, g, or t
  misc_feature (212)..(212): n is a, c, g, or t
  misc_feature (217)..(218): n is a, c, g, or t
  misc_feature (221)..(222): n is a, c, g, or t
  misc_feature (224)..(224): n is a, c, g, or t
  misc_feature (226)..(226): n is a, c, g, or t
  misc_feature (230)..(230): n is a, c, g, or t
  misc_feature (233)..(233): n is a, c, g, or t
  misc_feature (239)..(239): n is a, c, g, or t
  misc_feature (241)..(242): n is a, c, g, or t
  misc_feature (244)..(244): n is a, c, g, or t
  misc_feature (246)..(247): n is a, c, g, or t
  misc_feature (249)..(250): n is a, c, g, or t
  misc_feature (259)..(261): n is a, c, g, or t
  misc_feature (266)..(267): n is a, c, g, or t
  misc_feature (281)..(282): n is a, c, g, or t
  misc_feature (284)..(285): n is a, c, g, or t
  misc_feature (287)..(289): n is a, c, g, or t
  misc_feature (295)..(295): n is a, c, g, or t
  misc_feature (297)..(297): n is a, c, g, or t
  misc_feature (300)..(300): n is a, c, g, or t
  misc_feature (303)..(304): n is a, c, g, or t
  misc_feature (311)..(311): n is a, c, g, or t
  misc_feature (313)..(313): n is a, c, g, or t
  misc_feature (317)..(317): n is a, c, g, or t
  misc_feature (326)..(326): n is a, c, g, or t
  misc_feature (332)..(335): n is a, c, g, or t
  misc_feature (343)..(343): n is a, c, g, or t
  misc_feature (346)..(346): n is a, c, g, or t
  misc_feature (348)..(348): n is a, c, g, or t
  misc_feature (350)..(350): n is a, c, g, or t
  misc_feature (358)..(358): n is a, c, g, or t
  misc_feature (362)..(363): n is a, c, g, or t
  misc_feature (367)..(367): n is a, c, g, or t
  misc_feature (370)..(372): n is a, c, g, or t
  misc_feature (375)..(375): n is a, c, g, or t
  misc_feature (377)..(377): n is a, c, g, or t
  misc_feature (380)..(380): n is a, c, g, or t
  misc_feature (382)..(382): n is a, c, g, or t
  misc_feature (384)..(384): n is a, c, g, or t
  misc_feature (389)..(391): n is a, c, g, or t
  misc_feature (393)..(395): n is a, c, g, or t
  misc_feature (397)..(398): n is a, c, g, or t
  misc_feature (401)..(401): n is a, c, g, or t
  misc_feature (405)..(407): n is a, c, g, or t
  misc_feature (412)..(412): n is a, c, g, or t
  misc_feature (418)..(418): n is a, c, g, or t
  misc_feature (420)..(420): n is a, c, g, or t
  misc_feature (426)..(426): n is a, c, g, or t
  misc_feature (428)..(428): n is a, c, g, or t
  misc_feature (435)..(435): n is a, c, g, or t
  misc_feature (438)..(438): n is a, c, g, or t
  misc_feature (442)..(442): n is a, c, g, or t
  misc_feature (447)..(447): n is a, c, g, or t
  misc_feature (454)..(454): n is a, c, g, or t
  misc_feature (463)..(464): n is a, c, g, or t
  misc_feature (473)..(473): n is a, c, g, or t
  misc_feature (478)..(478): n is a, c, g, or t
  misc_feature (481)..(481): n is a, c, g, or t
  misc_feature (485)..(486): n is a, c, g, or t
  misc_feature (488)..(488): n is a, c, g, or t
  misc_feature (498)..(498): n is a, c, g, or t
  misc_feature (502)..(503): n is a, c, g, or t
  misc_feature (505)..(505): n is a, c, g, or t
  misc_feature (510)..(510): n is a, c, g, or t
  misc_feature (513)..(513): n is a, c, g, or t
  misc_feature (520)..(521): n is a, c, g, or t
  misc_feature (523)..(523): n is a, c, g, or t
  misc_feature (526)..(526): n is a, c, g, or t
  misc_feature (528)..(529): n is a, c, g, or t
  misc_feature (533)..(533): n is a, c, g, or t
  misc_feature (540)..(540): n is a, c, g, or t
  misc_feature (544)..(546): n is a, c, g, or t
  misc_feature (552)..(553): n is a, c, g, or t
  misc_feature (558)..(558): n is a, c, g, or t
  misc_feature (561)..(561): n is a, c, g, or t
  misc_feature (569)..(569): n is a, c, g, or t
  misc_feature (574)..(575): n is a, c, g, or t
  misc_feature (577)..(577): n is a, c, g, or t
  misc_feature (582)..(584): n is a, c, g, or t
  misc_feature (587)..(590): n is a, c, g, or t
  misc_feature (593)..(594): n is a, c, g, or t
  misc_feature (600)..(600): n is a, c, g, or t
  misc_feature (602)..(602): n is a, c, g, or t
  misc_feature (607)..(607): n is a, c, g, or t
  misc_feature (612)..(612): n is a, c, g, or t
  misc_feature (616)..(616): n is a, c, g, or t
  misc_feature (618)..(618): n is a, c, g, or t
  misc_feature (623)..(626): n is a, c, g, or t
  misc_feature (628)..(628): n is a, c, g, or t
  misc_feature (631)..(631): n is a, c, g, or t
  misc_feature (633)..(633): n is a, c, g, or t
  misc_feature (635)..(635): n is a, c, g, or t
  misc_feature (637)..(637): n is a, c, g, or t
  misc_feature (642)..(644): n is a, c, g, or t
  misc_feature (646)..(646): n is a, c, g, or t
  misc_feature (649)..(650): n is a, c, g, or t
  misc_feature (654)..(654): n is a, c, g, or t
  misc_feature (659)..(659): n is a, c, g, or t
  misc_feature (666)..(666): n is a, c, g, or t
  misc_feature (668)..(668): n is a, c, g, or t
  misc_feature (671)..(674): n is a, c, g, or t
  misc_feature (677)..(677): n is a, c, g, or t
  misc_feature (679)..(682): n is a, c, g, or t
  misc_feature (685)..(685): n is a, c, g, or t
  misc_feature (692)..(692): n is a, c, g, or t
  misc_feature (701)..(701): n is a, c, g, or t
  misc_feature (712)..(712): n is a, c, g, or t
  misc_feature (714)..(715): n is a, c, g, or t
  misc_feature (718)..(718): n is a, c, g, or t
  misc_feature (720)..(720): n is a, c, g, or t
  misc_feature (723)..(723): n is a, c, g, or t
  misc_feature (728)..(729): n is a, c, g, or t
  misc_feature (734)..(734): n is a, c, g, or t
  misc_feature (737)..(737): n is a, c, g, or t
  misc_feature (739)..(740): n is a, c, g, or t
  misc_feature (742)..(742): n is a, c, g, or t
  misc_feature (749)..(749): n is a, c, g, or t
  misc_feature (752)..(755): n is a, c, g, or t
  misc_feature (757)..(757): n is a, c, g, or t
  misc_feature (764)..(766): n is a, c, g, or t
  misc_feature (769)..(769): n is a, c, g, or t
  misc_feature (775)..(775): n is a, c, g, or t
  misc_feature (777)..(777): n is a, c, g, or t
  misc_feature (780)..(780): n is a, c, g, or t
  misc_feature (782)..(782): n is a, c, g, or t
  misc_feature (786)..(789): n is a, c, g, or t
  misc_feature (793)..(794): n is a, c, g, or t
  misc_feature (796)..(797): n is a, c, g, or t
  misc_feature (802)..(804): n is a, c, g, or t
  misc_feature (819)..(820): n is a, c, g, or t
  misc_feature (826)..(827): n is a, c, g, or t
  misc_feature (833)..(836): n is a, c, g, or t
  misc_feature (838)..(840): n is a, c, g, or t
  misc_feature (844)..(844): n is a, c, g, or t
  misc_feature (846)..(846): n is a, c, g, or t
  misc_feature (848)..(848): n is a, c, g, or t
  misc_feature (853)..(853): n is a, c, g, or t
  misc_feature (855)..(855): n is a, c, g, or t
  misc_feature (857)..(857): n is a, c, g, or t
  misc_feature (859)..(861): n is a, c, g, or t
  misc_feature (863)..(863): n is a, c, g, or t
  misc_feature (872)..(872): n is a, c, g, or t
  misc_feature (875)..(875): n is a, c, g, or t
  misc_feature (877)..(878): n is a, c, g, or t
  misc_feature (880)..(880): n is a, c, g, or t
  misc_feature (886)..(886): n is a, c, g, or t
  misc_feature (890)..(893): n is a, c, g, or t
  misc_feature (897)..(897): n is a, c, g, or t
  misc_feature (906)..(906): n is a, c, g, or t
  misc_feature (909)..(909): n is a, c, g, or t
  misc_feature (915)..(915): n is a, c, g, or t
  misc_feature (918)..(918): n is a, c, g, or t
  misc_feature (929)..(929): n is a, c, g, or t
  misc_feature (933)..(933): n is a, c, g, or t
  misc_feature (936)..(936): n is a, c, g, or t
  misc_feature (938)..(938): n is a, c, g, or t
  misc_feature (940)..(940): n is a, c, g, or t
  misc_feature (945)..(946): n is a, c, g, or t
  misc_feature (949)..(949): n is a, c, g, or t
  misc_feature (952)..(952): n is a, c, g, or t
  misc_feature (956)..(956): n is a, c, g, or t
  misc_feature (958)..(958): n is a, c, g, or t
  misc_feature (962)..(963): n is a, c, g, or t
  misc_feature (965)..(967): n is a, c, g, or t
  misc_feature (973)..(973): n is a, c, g, or t
  misc_feature (975)..(975): n is a, c, g, or t
  misc_feature (977)..(977): n is a, c, g, or t
  misc_feature (979)..(979): n is a, c, g, or t
  misc_feature (988)..(988): n is a, c, g, or t
  misc_feature (992)..(992): n is a, c, g, or t
  misc_feature (994)..(994): n is a, c, g, or t
  misc_feature (1000)..(1000): n is a, c, g, or t
  misc_feature (1003)..(1003): n is a, c, g, or t
  misc_feature (1010)..(1010): n is a, c, g, or t
  misc_feature (1015)..(1016): n is a, c, g, or t
  misc_feature (1019)..(1022): n is a, c, g, or t
  misc_feature (1024)..(1024): n is a, c, g, or t
  misc_feature (1026)..(1027): n is a, c, g, or t
  misc_feature (1032)..(1032): n is a, c, g, or t
  misc_feature (1037)..(1037): n is a, c, g, or t
  misc_feature (1039)..(1040): n is a, c, g, or t
  misc_feature (1042)..(1042): n is a, c, g, or t
  misc_feature (1044)..(1047): n is a, c, g, or t
  misc_feature (1050)..(1050): n is a, c, g, or t
  misc_feature (1052)..(1052): n is a, c, g, or t
  misc_feature (1057)..(1057): n is a, c, g, or t
  misc_feature (1059)..(1059): n is a, c, g, or t
  misc_feature (1066)..(1068): n is a, c, g, or t
  misc_feature (1072)..(1072): n is a, c, g, or t
  misc_feature (1076)..(1076): n is a, c, g, or t
  misc_feature (1080)..(1080): n is a, c, g, or t
  misc_feature (1082)..(1082): n is a, c, g, or t
  misc_feature (1088)..(1089): n is a, c, g, or t
  misc_feature (1100)..(1101): n is a, c, g, or t
  misc_feature (1105)..(1105): n is a, c, g, or t
  misc_feature (1107)..(1107): n is a, c, g, or t
  misc_feature (1112)..(1112): n is a, c, g, or t
  misc_feature (1114)..(1115): n is a, c, g, or t
  misc_feature (1118)..(1119): n is a, c, g, or t
  misc_feature (1123)..(1123): n is a, c, g, or t
  misc_feature (1127)..(1127): n is a, c, g, or t
  misc_feature (1136)..(1136): n is a, c, g, or t
  misc_feature (1140)..(1141): n is a, c, g, or t
  misc_feature (1144)..(1144): n is a, c, g, or t
  misc_feature (1147)..(1149): n is a, c, g, or t
  misc_feature (1157)..(1159): n is a, c, g, or t
  misc_feature (1161)..(1161): n is a, c, g, or t
  misc_feature (1164)..(1164): n is a, c, g, or t
  misc_feature (1168)..(1168): n is a, c, g, or t
  misc_feature (1172)..(1173): n is a, c, g, or t
  misc_feature (1178)..(1178): n is a, c, g, or t
  misc_feature (1183)..(1183): n is a, c, g, or t
  misc_feature (1187)..(1189): n is a, c, g, or t
  misc_feature (1192)..(1193): n is a, c, g, or t
  misc_feature (1195)..(1196): n is a, c, g, or t
  misc_feature (1198)..(1198): n is a, c, g, or t
cnnnnaananttnnggnnaantttttttggggggggnnncccccccccccnnccgggnntnnntttttnggggncncatnnanaaatttngancccacngtctcgccanagnnttntcgggggtantcctgcgnnnatgcnccctgnaggaaaannncagaatactncagcncnnnanccccctggtnatgncgaanannnantcagcttgngggtnntcnngnanctcnagnaggccngnngngnntnntcaaatctnnngctgnngaacggagaggccnnanntnnngaacangnganggnncccgacngnggantaccatgcnatgacnnnnagatcttntancngnatagtgcnaatnntganatnnnaangnagncnangtggnnnannntnngtnagcnnngggcntatccncntgaaantngaagccntgnacgntaggnaagcccngacgtccannactgatttngacanaanaganngnccgaaccagnttcnngnttgtnganaaagagnncntcngnnactnaaaggtngttnnncttttnntccanaanggggcctnaggtnntnctacnnnacnnnnggnnaatggngngtaanagcangtananattannnngngcncngnanacaannnanctnnatanctagnattccantnaannnngtngnnnnggnaaacttntggaaaaangaattgaaccngnntgntnttntaaanncaganttncnngncaaaaantannnncnagaagtnnnganacgaancncantnaccnnnngccnngnnactgnnncaaatgtgctctatnnctcagnngtcagnnnncnnnaatnangntgttncncncnnntnacaaaaaancangnnangataanctcnnnngggnggactttantcnaaatanacnaaagagggcantgtnagngnancgtanncantangacngnttcnnannnaacacnancntnaataccttntcantnaaacanaanttttttnttagnnagnnnngnanncaaangaatnannangnnnnttncntggantngatcaannnatanaggnggtntnttcttnnaggaactcctnnaaangnttctngnnttnntgtngggncacgttctnatannaanaannntctttctnnncntanagantacnntggantaaanacannnagnngnnantc

SEQ ID NO: 784 - DNA, 1400 bp, Homo Sapiens
  misc_feature (108)..(108): n is a, c, g, or t
  misc_feature (117)..(117): n is a, c, g, or t
  misc_feature (182)..(182): n is a, c, g, or t
  misc_feature (188)..(188): n is a, c, g, or t
  misc_feature (191)..(191): n is a, c, g, or t
  misc_feature (228)..(228): n is a, c, g, or t
  misc_feature (350)..(350): n is a, c, g, or t
  misc_feature (470)..(470): n is a, c, g, or t
  misc_feature (512)..(512): n is a, c, g, or t
  misc_feature (523)..(523): n is a, c, g, or t
  misc_feature (525)..(525): n is a, c, g, or t
  misc_feature (535)..(535): n is a, c, g, or t
  misc_feature (580)..(580): n is a, c, g, or t
  misc_feature (666)..(666): n is a, c, g, or t
  misc_feature (685)..(685): n is a, c, g, or t
  misc_feature (706)..(706): n is a, c, g, or t
  misc_feature (761)..(761): n is a, c, g, or t
  misc_feature (777)..(777): n is a, c, g, or t
  misc_feature (785)..(785): n is a, c, g, or t
  misc_feature (787)..(788): n is a, c, g, or t
  misc_feature (794)..(794): n is a, c, g, or t
  misc_feature (797)..(797): n is a, c, g, or t
  misc_feature (803)..(803): n is a, c, g, or t
  misc_feature (824)..(824): n is a, c, g, or t
  misc_feature (834)..(834): n is a, c, g, or t
  misc_feature (865)..(865): n is a, c, g, or t
  misc_feature (869)..(869): n is a, c, g, or t
  misc_feature (872)..(872): n is a, c, g, or t
  misc_feature (884)..(884): n is a, c, g, or t
  misc_feature (890)..(890): n is a, c, g, or t
  misc_feature (900)..(900): n is a, c, g, or t
  misc_feature (910)..(910): n is a, c, g, or t
  misc_feature (946)..(946): n is a, c, g, or t
  misc_feature (954)..(954): n is a, c, g, or t
  misc_feature (961)..(961): n is a, c, g, or t
  misc_feature (965)..(966): n is a, c, g, or t
  misc_feature (974)..(974): n is a, c, g, or t
  misc_feature (981)..(981): n is a, c, g, or t
  misc_feature (985)..(985): n is a, c, g, or t
  misc_feature (987)..(987): n is a, c, g, or t
  misc_feature (1005)..(1005): n is a, c, g, or t
  misc_feature (1023)..(1023): n is a, c, g, or t
  misc_feature (1028)..(1028): n is a, c, g, or t
  misc_feature (1031)..(1031): n is a, c, g, or t
  misc_feature (1044)..(1044): n is a, c, g, or t
  misc_feature (1046)..(1047): n is a, c, g, or t
  misc_feature (1051)..(1051): n is a, c, g, or t
  misc_feature (1055)..(1055): n is a, c, g, or t
  misc_feature (1060)..(1060): n is a, c, g, or t
  misc_feature (1062)..(1062): n is a, c, g, or t
  misc_feature (1064)..(1064): n is a, c, g, or t
  misc_feature (1087)..(1087): n is a, c, g, or t
  misc_feature (1090)..(1090): n is a, c, g, or t
  misc_feature (1096)..(1096): n is a, c, g, or t
  misc_feature (1106)..(1106): n is a, c, g, or t
  misc_feature (1108)..(1108): n is a, c, g, or t
  misc_feature (1115)..(1115): n is a, c, g, or t
  misc_feature (1117)..(1117): n is a, c, g, or t
  misc_feature (1130)..(1130): n is a, c, g, or t
  misc_feature (1134)..(1134): n is a, c, g, or t
  misc_feature (1137)..(1137): n is a, c, g, or t
  misc_feature (1140)..(1140): n is a, c, g, or t
  misc_feature (1159)..(1159): n is a, c, g, or t
  misc_feature (1167)..(1168): n is a, c, g, or t
  misc_feature (1170)..(1170): n is a, c, g, or t
  misc_feature (1181)..(1182): n is a, c, g, or t
  misc_feature (1195)..(1196): n is a, c, g, or t
  misc_feature (1202)..(1202): n is a, c, g, or t
  misc_feature (1207)..(1207): n is a, c, g, or t
  misc_feature (1210)..(1210): n is a, c, g, or t
  misc_feature (1219)..(1220): n is a, c, g, or t
  misc_feature (1226)..(1226): n is a, c, g, or t
  misc_feature (1228)..(1229): n is a, c, g, or t
  misc_feature (1234)..(1234): n is a, c, g, or t
  misc_feature (1241)..(1241): n is a, c, g, or t
  misc_feature (1243)..(1243): n is a, c, g, or t
  misc_feature (1255)..(1255): n is a, c, g, or t
  misc_feature (1264)..(1266): n is a, c, g, or t
  misc_feature (1272)..(1272): n is a, c, g, or t
  misc_feature (1274)..(1274): n is a, c, g, or t
  misc_feature (1281)..(1281): n is a, c, g, or t
  misc_feature (1283)..(1283): n is a, c, g, or t
  misc_feature (1285)..(1285): n is a, c, g, or t
  misc_feature (1288)..(1289): n is a, c, g, or t
  misc_feature (1295)..(1295): n is a, c, g, or t
  misc_feature (1297)..(1300): n is a, c, g, or t
  misc_feature (1306)..(1307): n is a, c, g, or t
  misc_feature (1312)..(1313): n is a, c, g, or t
  misc_feature (1317)..(1318): n is a, c, g, or t
  misc_feature (1325)..(1325): n is a, c, g, or t
  misc_feature (1335)..(1335): n is a, c, g, or t
  misc_feature (1338)..(1338): n is a, c, g, or t
  misc_feature (1341)..(1342): n is a, c, g, or t
  misc_feature (1348)..(1349): n is a, c, g, or t
  misc_feature (1351)..(1351): n is a, c, g, or t
  misc_feature (1354)..(1354): n is a, c, g, or t
  misc_feature (1356)..(1358): n is a, c, g, or t
  misc_feature (1383)..(1383): n is a, c, g, or t
  misc_feature (1386)..(1387): n is a, c, g, or t
  misc_feature (1391)..(1391): n is a, c, g, or t
  misc_feature (1395)..(1396): n is a, c, g, or t
  misc_feature (1398)..(1398): n is a, c, g, or t
tagaggaaaattaactatgagaggatcgcatcaccatcaccatcacggatcctatttaggtgacactatagaatcgtcgacccacgcgtccgagctgcgcgagggtcnacagcctcngccacatcctccacctctcttggtccagcgagcgttgccgggccagggtcaagcggagggctccnacggcncgnacggagcgaagcgccgagccatggcgcaccaaacggncatccacgccacggaagagctgaaggaattctttgccaaggcacgggctggctctgtgcggctcatcaaggttgtgattgaggacgagcagctcgtgctgggtgcctcgcaggagccagtangccgctgggatcaggactatgacagggccgtgctgccactgctggacgcccagcagccctgctacctgctctaccgcctcgactcacagaatgctcatggcttcgaatggctcttcctcncctggtcgcctgataactcccccgtgcggctgaagatgctgnacgcggccacncnggccacaatnaaaaaggagtttggaggtggccacatcaaggatgagctcttcggnactgtgaaggatgacctctcttttgctgggtaccagaaacacctgtcgtcctgtgcggcacctgccccgctgacctcggctgaganagagctccagcagatccgnattaacgaggtgaagacaganatcagtgtggaaagcaagcaccagaccctgcagggacctcgccttccccctgcancctgaggcccagcggncactccancnnctcaancanaaatgntcaactacatccagatgaaanctggacctanagcggggaaaaccatttaagctggtgcacanaaanccnacaaatgttggncccaantgcccctccngggtgccccnaagatgctgccccgctaccactttctttcttctaanaagcaaanccatgangggnnaacccccnttgaatnctgnangggttcaatcaaactccntgcccgggggaaaaattncaccnatnaaggaaaccaaangnntctnactncccantngnaaaaaacccccttcctccaattnctngaaaanaagaatttcntntggaaantncccaaaaaaattnaaantgngcnattgggaaaaattaaaganaaattccnntnaaaaaaggttnncccccaaaaaaanncccttnaaaanggnttttcccannccaaangnnccaangggggangngggccctaaaanccttttccnnnccccgngnaaaaatngnanaannaccctngnnnntggaannggccnncccnngaagaantggggggttnccnttnncctccnngnacntnnnttttttgttccaaaaaatttttggnaannaaantttnnanta

SEQ ID NO: 785 - DNA, 1396 bp, Homo Sapiens
  misc_feature (5)..(6): n is a, c, g, or t
  misc_feature (861)..(861): n is a, c, g, or t
  misc_feature (873)..(873): n is a, c, g, or t
  misc_feature (912)..(912): n is a, c, g, or t
  misc_feature (921)..(921): n is a, c, g, or t
  misc_feature (923)..(923): n is a, c, g, or t
  misc_feature (925)..(925): n is a, c, g, or t
  misc_feature (948)..(948): n is a, c, g, or t
  misc_feature (968)..(968): n is a, c, g, or t
  misc_feature (987)..(987): n is a, c, g, or t
  misc_feature (990)..(990): n is a, c, g, or t
  misc_feature (1020)..(1020): n is a, c, g, or t
  misc_feature (1025)..(1025): n is a, c, g, or t
  misc_feature (1028)..(1028): n is a, c, g, or t
  misc_feature (1038)..(1042): n is a, c, g, or t
  misc_feature (1044)..(1046): n is a, c, g, or t
  misc_feature (1054)..(1054): n is a, c, g, or t
  misc_feature (1058)..(1059): n is a, c, g, or t
  misc_feature (1065)..(1067): n is a, c, g, or t
  misc_feature (1072)..(1072): n is a, c, g, or t
  misc_feature (1077)..(1077): n is a, c, g, or t
  misc_feature (1098)..(1098): n is a, c, g, or t
  misc_feature (1100)..(1100): n is a, c, g, or t
  misc_feature (1105)..(1105): n is a, c, g, or t
  misc_feature (1107)..(1107): n is a, c, g, or t
  misc_feature (1111)..(1112): n is a, c, g, or t
  misc_feature (1114)..(1116): n is a, c, g, or t
  misc_feature (1126)..(1126): n is a, c, g, or t
  misc_feature (1133)..(1133): n is a, c, g, or t
  misc_feature (1135)..(1136): n is a, c, g, or t
  misc_feature (1147)..(1148): n is a, c, g, or t
  misc_feature (1153)..(1153): n is a, c, g, or t
  misc_feature (1158)..(1158): n is a, c, g, or t
  misc_feature (1167)..(1169): n is a, c, g, or t
  misc_feature (1172)..(1172): n is a, c, g, or t
  misc_feature (1179)..(1179): n is a, c, g, or t
  misc_feature (1183)..(1183): n is a, c, g, or t
  misc_feature (1187)..(1187): n is a, c, g, or t
  misc_feature (1195)..(1195): n is a, c, g, or t
  misc_feature (1197)..(1197): n is a, c, g, or t
  misc_feature (1208)..(1208): n is a, c, g, or t
  misc_feature (1210)..(1210): n is a, c, g, or t
  misc_feature (1215)..(1215): n is a, c, g, or t
  misc_feature (1218)..(1218): n is a, c, g, or t
  misc_feature (1222)..(1222): n is a, c, g, or t
  misc_feature (1227)..(1227): n is a, c, g, or t
  misc_feature (1232)..(1232): n is a, c, g, or t
  misc_feature (1238)..(1238): n is a, c, g, or t
  misc_feature (1245)..(1246): n is a, c, g, or t
  misc_feature (1254)..(1255): n is a, c, g, or t
  misc_feature (1260)..(1260): n is a, c, g, or t
  misc_feature (1270)..(1271): n is a, c, g, or t
  misc_feature (1275)..(1275): n is a, c, g, or t
  misc_feature (1285)..(1285): n is a, c, g, or t
  misc_feature (1299)..(1299): n is a, c, g, or t
  misc_feature (1301)..(1301): n is a, c, g, or t
  misc_feature (1303)..(1303): n is a, c, g, or t
  misc_feature (1314)..(1314): n is a, c, g, or t
  misc_feature (1322)..(1322): n is a, c, g, or t
  misc_feature (1324)..(1324): n is a, c, g, or t
  misc_feature (1326)..(1326): n is a, c, g, or t
  misc_feature (1329)..(1329): n is a, c, g, or t
  misc_feature (1331)..(1331): n is a, c, g, or t
  misc_feature (1335)..(1335): n is a, c, g, or t
  misc_feature (1353)..(1353): n is a, c, g, or t
  misc_feature (1357)..(1357): n is a, c, g, or t
  misc_feature (1360)..(1360): n is a, c, g, or t
  misc_feature (1368)..(1368): n is a, c, g, or t
  misc_feature (1386)..(1386): n is a, c, g, or t
  misc_feature (1388)..(1389): n is a, c, g, or t
  misc_feature (1392)..(1392): n is a, c, g, or t
caatnngagaaattaactatgagaggatcgcatcaccatcaccatcacggatcctatttaggtgacactatagaatcgtcgacccacgcgtccggtgctcggtgcgctgagctccgcggctccgcgagccggttccgtccccttcccgccgccgccatgaagtggatgttcaaggaggaccactcgctggaacacagatgcgtggagtccgcgaagattcgagcgaaatatcccgacagggttccggtgattgtggaaaaggtctcaggctctcagattgttgacattgacaaacggaagtacttggttccatctgatatcactgtggctcagttcatgtggatcatcaggaaaaggatccagcttccttctgaaaaggcgatcttcctgtttgtggataagacagtcccacagtccagcctaactatgggacagctttacgagaaggaaaaagatgaagatggattcttatatgtggcctacagcggagagaacacttttggcttctgagggccattgctgggctaggtgcaccgtaactgcttgtgtatcttgtaaatagccagccattttcagttattataccagaacctcttcacatagacctattagtgcatttgtaactggatttatttcttaatatattggaaggttttgtttccttagactagtaaattatcatacagagttttattttgagtttttctttttgtgcattgtcctcatgcctgtattctccaggaaacttgtccttctggaaaatcatattgaatgatatttctatatcgaagtgaggtaggtgcggtattaaagtgaaagggaaggtgatgcatttattctgggttatgcttgaagtgttanatggctaagtantaaaattatcccaatttaaatcccttaacagtcagaacncttgcttcncnanaatatgccaactgccaatcatgntgggactgagctaattttgnttccctctttctgaaactnttnagggaaaaataattaacaataaaaaattcnccttntanggcccatatnnnnnannnaaaacaanccannaaaaannnaaaanaaaanggggccccccccctaaaaggngnccaanancctnnannnaccgaacttngaacccngnngaaaaaccccnnaaggnccccnaaaaccccnnngantttttcnaaancctnggttgccncnggggttttttntntgganaanccanccatntttgnggaaanttttcgnnttggaacnnaatgngaaaaaaacnngganaacccccctngaatttccccgggncncnaaaaaaatttngaggtttncntnttncnaggnacaaaaaaaccgctcggnaaanccnttttaaanaaaaaaaaaactattttncnnctntttt

SEQ ID NO: 786 - DNA, 1373 bp, Homo Sapiens
  misc_feature (1)..(1): n is a, c, g, or t
  misc_feature (3)..(3): n is a, c, g, or t
  misc_feature (873)..(873): n is a, c, g, or t
  misc_feature (960)..(960): n is a, c, g, or t
  misc_feature (975)..(975): n is a, c, g, or t
  misc_feature (986)..(986): n is a, c, g, or t
  misc_feature (997)..(997): n is a, c, g, or t
  misc_feature (1017)..(1017): n is a, c, g, or t
  misc_feature (1019)..(1019): n is a, c, g, or t
  misc_feature (1022)..(1022): n is a, c, g, or t
  misc_feature (1030)..(1030): n is a, c, g, or t
  misc_feature (1042)..(1042): n is a, c, g, or t
  misc_feature (1047)..(1047): n is a, c, g, or t
  misc_feature (1054)..(1054): n is a, c, g, or t
  misc_feature (1057)..(1057): n is a, c, g, or t
  misc_feature (1074)..(1075): n is a, c, g, or t
  misc_feature (1082)..(1082): n is a, c, g, or t
  misc_feature (1084)..(1084): n is a, c, g, or t
  misc_feature (1086)..(1086): n is a, c, g, or t
  misc_feature (1089)..(1089): n is a, c, g, or t
  misc_feature (1097)..(1098): n is a, c, g, or t
  misc_feature (1106)..(1106): n is a, c, g, or t
  misc_feature (1113)..(1114): n is a, c, g, or t
  misc_feature (1133)..(1133): n is a, c, g, or t
  misc_feature (1136)..(1137): n is a, c, g, or t
  misc_feature (1139)..(1139): n is a, c, g, or t
  misc_feature (1144)..(1144): n is a, c, g, or t
  misc_feature (1150)..(1151): n is a, c, g, or t
  misc_feature (1154)..(1154): n is a, c, g, or t
  misc_feature (1158)..(1158): n is a, c, g, or t
  misc_feature (1161)..(1161): n is a, c, g, or t
  misc_feature (1167)..(1167): n is a, c, g, or t
  misc_feature (1175)..(1175): n is a, c, g, or t
  misc_feature (1183)..(1183): n is a, c, g, or t
  misc_feature (1195)..(1195): n is a, c, g, or t
  misc_feature (1197)..(1197): n is a, c, g, or t
  misc_feature (1199)..(1199): n is a, c, g, or t
  misc_feature (1206)..(1206): n is a, c, g, or t
  misc_feature (1217)..(1217): n is a, c, g, or t
  misc_feature (1236)..(1236): n is a, c, g, or t
  misc_feature (1239)..(1239): n is a, c, g, or t
  misc_feature (1242)..(1242): n is a, c, g, or t
  misc_feature (1245)..(1245): n is a, c, g, or t
  misc_feature (1259)..(1260): n is a, c, g, or t
  misc_feature (1263)..(1263): n is a, c, g, or t
  misc_feature (1267)..(1267): n is a, c, g, or t
  misc_feature (1270)..(1270): n is a, c, g, or t
  misc_feature (1273)..(1274): n is a, c, g, or t
  misc_feature (1277)..(1277): n is a, c, g, or t
  misc_feature (1297)..(1298): n is a, c, g, or t
  misc_feature (1307)..(1307): n is a, c, g, or t
  misc_feature (1312)..(1312): n is a, c, g, or t
  misc_feature (1317)..(1317): n is a, c, g, or t
  misc_feature (1320)..(1321): n is a, c, g, or t
  misc_feature (1327)..(1327): n is a, c, g, or t
  misc_feature (1332)..(1332): n is a, c, g, or t
  misc_feature (1342)..(1342): n is a, c, g, or t
  misc_feature (1344)..(1344): n is a, c, g, or t
  misc_feature (1348)..(1348): n is a, c, g, or t
  misc_feature (1373)..(1373): n is a, c, g, or t
nantagagaaattactatgagaggatcgcatcaccatcaccatcacggatcctatttaggtgacactatagaatcgtcgacccacgcgtccgccttgcacctgctgaagtgcagctttgacgtggtcaagcgctgggtgaatgaggctcaggaggcagcatccagtgataacatcatggtccagtaccacgcactagggctcctgtaccatgtgcgtaagaatgaccgcctagccgtcaataagatgatcagcaaggtcacacggcacggccttaagtctccctttgcctactgcatgatgatccgggtggccagcaagcaggtggaagaggaggatggcagccgtgacagcccactgtttgacttcatcgagagctgcttgcgcaacaagcacgagatggtggtgtatgaagccgcctcggccatcgtcaatctgccaggctgcagtgccaaagagctggccccggctgtgtcaggtcactgggcattccttcacccagcgtcacatgtttatgcttgctgggaactaggcctgggttcccgggctaggagaaagaaagaaaatgctcttaacaagtgttaaggagtctgtacctaggaagcacctgccccagacactatgctgagtccccacttgtatcacgttttggtggtgggctgctgttagttccatctgactgctgaagaggctgagtgctccagcttttctgcagctcacccaaggctgctctccgctatgctgctgttcgtaccctcaataaggttgccatgaagcatccgtcagctgtgacagcttgtaatctggatctggagaacctggtcacagattcaaaccgcagcattgccacgctggccatcaccaccctccttaanacgggcagcgagaagcagcatcgaccgcctcatgaagcaaatctcctccttcatgtcaaaaatctcggatgaattcaaggtggtggntgtccagcccatcantgccctgtgtnaaaaatatccncccaaacccccgtccttatnanttncctgttcnccatgctgcggnaaaanggtggcnttnaataaaaccccctatcnnggaacgncncntcnccttcttnnaaaaaacnccaaaannaagaaacagggttttcccnctnncnaattncccaannatncaanttnccgggntgcccccntattctantccctggccagnangnccaaaancccaaaccccnaaaaaaccctttcctaaancanggnttnaaaaaaaaaaccgnnagncctnatntcnnccnattttgacccaaaaaaaatnnccccatttnttttnaaaanaanntccccnccaangaaaatcctnancaanttttttttttttttaaaaaaaaaan

SEQ ID NO: 787 - DNA, 1200 bp, Homo Sapiens
  misc_feature (1)..(1): n is a, c, g, or t
  misc_feature (4)..(5): n is a, c, g, or t
  misc_feature (8)..(9): n is a, c, g, or t
  misc_feature (12)..(12): n is a, c, g, or t
  misc_feature (14)..(15): n is a, c, g, or t
  misc_feature (22)..(23): n is a, c, g, or t
  misc_feature (44)..(44): n is a, c, g, or t
  misc_feature (46)..(46): n is a, c, g, or t
  misc_feature (53)..(53): n is a, c, g, or t
  misc_feature (61)..(64): n is a, c, g, or t
  misc_feature (69)..(69): n is a, c, g, or t
  misc_feature (81)..(81): n is a, c, g, or t
  misc_feature (86)..(86): n is a, c, g, or t
  misc_feature (89)..(89): n is a, c, g, or t
  misc_feature (93)..(94): n is a, c, g, or t
  misc_feature (109)..(109): n is a, c, g, or t
  misc_feature (112)..(112): n is a, c, g, or t
  misc_feature (120)..(120): n is a, c, g, or t
  misc_feature (123)..(123): n is a, c, g, or t
  misc_feature (125)..(125): n is a, c, g, or t
  misc_feature (129)..(129): n is a, c, g, or t
  misc_feature (132)..(132): n is a, c, g, or t
  misc_feature (138)..(138): n is a, c, g, or t
  misc_feature (144)..(144): n is a, c, g, or t
  misc_feature (147)..(147): n is a, c, g, or t
  misc_feature (152)..(156): n is a, c, g, or t
  misc_feature (158)..(159): n is a, c, g, or t
  misc_feature (166)..(167): n is a, c, g, or t
  misc_feature (172)..(172): n is a, c, g, or t
  misc_feature (174)..(174): n is a, c, g, or t
  misc_feature (178)..(178): n is a, c, g, or t
  misc_feature (180)..(180): n is a, c, g, or t
  misc_feature (187)..(187): n is a, c, g, or t
  misc_feature (189)..(189): n is a, c, g, or t
  misc_feature (193)..(195): n is a, c, g, or t
  misc_feature (201)..(202): n is a, c, g, or t
  misc_feature (206)..(206): n is a, c, g, or t
  misc_feature (208)..(209): n is a, c, g, or t
  misc_feature (211)..(211): n is a, c, g, or t
  misc_feature (213)..(213): n is a, c, g, or t
  misc_feature (232)..(232): n is a, c, g, or t
  misc_feature (234)..(236): n is a, c, g, or t
  misc_feature (241)..(241): n is a, c, g, or t
  misc_feature (243)..(245): n is a, c, g, or t
  misc_feature (249)..(249): n is a, c, g, or t
  misc_feature (255)..(256): n is a, c, g, or t
  misc_feature (264)..(265): n is a, c, g, or t
  misc_feature (271)..(272): n is a, c, g, or t
  misc_feature (274)..(274): n is a, c, g, or t
  misc_feature (280)..(281): n is a, c, g, or t
  misc_feature (290)..(292): n is a, c, g, or t
  misc_feature (297)..(297): n is a, c, g, or t
  misc_feature (299)..(300): n is a, c, g, or t
  misc_feature (305)..(305): n is a, c, g, or t
  misc_feature (308)..(308): n is a, c, g, or t
  misc_feature (315)..(315): n is a, c, g, or t
  misc_feature (317)..(317): n is a, c, g, or t
  misc_feature (319)..(320): n is a, c, g, or t
  misc_feature (322)..(322): n is a, c, g, or t
  misc_feature (328)..(330): n is a, c, g, or t
  misc_feature (332)..(332): n is a, c, g, or t
  misc_feature (334)..(334): n is a, c, g, or t
  misc_feature (337)..(337): n is a, c, g, or t
  misc_feature (339)..(339): n is a, c, g, or t
  misc_feature (351)..(352): n is a, c, g, or t
  misc_feature (355)..(355): n is a, c, g, or t
  misc_feature (366)..(367): n is a, c, g, or t
  misc_feature (369)..(369): n is a, c, g, or t
  misc_feature (372)..(372): n is a, c, g, or t
  misc_feature (376)..(377): n is a, c, g, or t
  misc_feature (379)..(380): n is a, c, g, or t
  misc_feature (384)..(385): n is a, c, g, or t
  misc_feature (389)..(390): n is a, c, g, or t
  misc_feature (402)..(402): n is a, c, g, or t
  misc_feature (409)..(410): n is a, c, g, or t
  misc_feature (416)..(416): n is a, c, g, or t
  misc_feature (419)..(419): n is a, c, g, or t
  misc_feature (421)..(421): n is a, c, g, or t
  misc_feature (433)..(433): n is a, c, g, or t
  misc_feature (437)..(437): n is a, c, g, or t
  misc_feature (439)..(443): n is a, c, g, or t
  misc_feature (445)..(445): n is a, c, g, or t
  misc_feature (447)..(447): n is a, c, g, or t
  misc_feature (450)..(450): n is a, c, g, or t
  misc_feature (461)..(461): n is a, c, g, or t
  misc_feature (463)..(464): n is a, c, g, or t
  misc_feature (467)..(467): n is a, c, g, or t
  misc_feature (469)..(470): n is a, c, g, or t
  misc_feature (474)..(474): n is a, c, g, or t
  misc_feature (477)..(477): n is a, c, g, or t
  misc_feature (479)..(479): n is a, c, g, or t
  misc_feature (486)..(486): n is a, c, g, or t
  misc_feature (488)..(488): n is a, c, g, or t
  misc_feature (491)..(491): n is a, c, g, or t
  misc_feature (494)..(495): n is a, c, g, or t
  misc_feature (498)..(498): n is a, c, g, or t
  misc_feature (502)..(502): n is a, c, g, or t
  misc_feature (507)..(507): n is a, c, g, or t
  misc_feature (510)..(510): n is a, c, g, or t
  misc_feature (516)..(517): n is a, c, g, or t
  misc_feature (524)..(526): n is a, c, g, or t
  misc_feature (529)..(530): n is a, c, g, or t
  misc_feature (532)..(532): n is a, c, g, or t
  misc_feature (534)..(535): n is a, c, g, or t
  misc_feature (537)..(537): n is a, c, g, or t
  misc_feature (543)..(543): n is a, c, g, or t
  misc_feature (556)..(556): n is a, c, g, or t
  misc_feature (560)..(560): n is a, c, g, or t
  misc_feature (563)..(563): n is a, c, g, or t
  misc_feature (567)..(567): n is a, c, g, or t
  misc_feature (570)..(571): n is a, c, g, or t
  misc_feature (574)..(577): n is a, c, g, or t
  misc_feature (579)..(580): n is a, c, g, or t
  misc_feature (582)..(582): n is a, c, g, or t
  misc_feature (586)..(586): n is a, c, g, or t
  misc_feature (594)..(594): n is a, c, g, or t
  misc_feature (597)..(597): n is a, c, g, or t
  misc_feature (601)..(602): n is a, c, g, or t
  misc_feature (608)..(610): n is a, c, g, or t
  misc_feature (615)..(616): n is a, c, g, or t
  misc_feature (620)..(620): n is a, c, g, or t
  misc_feature (624)..(624): n is a, c, g, or t
  misc_feature (634)..(636): n is a, c, g, or t
  misc_feature (642)..(644): n is a, c, g, or t
  misc_feature (646)..(646): n is a, c, g, or t
  misc_feature (649)..(649): n is a, c, g, or t
  misc_feature (651)..(651): n is a, c, g, or t
  misc_feature (653)..(653): n is a, c, g, or t
  misc_feature (655)..(655): n is a, c, g, or t
  misc_feature (660)..(660): n is a, c, g, or t
  misc_feature (662)..(662): n is a, c, g, or t
  misc_feature (670)..(671): n is a, c, g, or t
  misc_feature (674)..(675): n is a, c, g, or t
  misc_feature (677)..(678): n is a, c, g, or t
  misc_feature (680)..(680): n is a, c, g, or t
  misc_feature (682)..(682): n is a, c, g, or t
  misc_feature (686)..(686): n is a, c, g, or t
  misc_feature (691)..(691): n is a, c, g, or t
  misc_feature (693)..(693): n is a, c, g, or t
  misc_feature (699)..(701): n is a, c, g, or t
  misc_feature (703)..(703): n is a, c, g, or t
  misc_feature (707)..(707): n is a, c, g, or t
  misc_feature (709)..(709): n is a, c, g, or t
  misc_feature (712)..(713): n is a, c, g, or t
  misc_feature (718)..(719): n is a, c, g, or t
  misc_feature (722)..(722): n is a, c, g, or t
  misc_feature (726)..(726): n is a, c, g, or t
  misc_feature (729)..(730): n is a, c, g, or t
  misc_feature (735)..(735): n is a, c, g, or t
  misc_feature (740)..(740): n is a, c, g, or t
  misc_feature (744)..(744): n is a, c, g, or t
  misc_feature (746)..(746): n is a, c, g, or t
  misc_feature (752)..(752): n is a, c, g, or t
  misc_feature (755)..(755): n is a, c, g, or t
  misc_feature (757)..(759): n is a, c, g, or t
  misc_feature (761)..(761): n is a, c, g, or t
  misc_feature (765)..(768): n is a, c, g, or t
  misc_feature (773)..(774): n is a, c, g, or t
  misc_feature (778)..(779): n is a, c, g, or t
  misc_feature (781)..(781): n is a, c, g, or t
  misc_feature (787)..(787): n is a, c, g, or t
  misc_feature (789)..(791): n is a, c, g, or t
  misc_feature (794)..(795): n is a, c, g, or t
  misc_feature (799)..(799): n is a, c, g, or t
  misc_feature (801)..(801): n is a, c, g, or t
  misc_feature (803)..(803): n is a, c, g, or t
  misc_feature (805)..(805): n is a, c, g, or t
  misc_feature (810)..(810): n is a, c, g, or t
  misc_feature (813)..(813): n is a, c, g, or t
  misc_feature (815)..(815): n is a, c, g, or t
  misc_feature (820)..(820): n is a, c, g, or t
  misc_feature (823)..(824): n is a, c, g, or t
  misc_feature (826)..(826): n is a, c, g, or t
  misc_feature (828)..(829): n is a, c, g, or t
  misc_feature (832)..(833): n is a, c, g, or t
  misc_feature (840)..(842): n is a, c, g, or t
  misc_feature (849)..(849): n is a, c, g, or t
  misc_feature (856)..(857): n is a, c, g, or t
  misc_feature (859)..(859): n is a, c, g, or t
  misc_feature (866)..(866): n is a, c, g, or t
  misc_feature (869)..(870): n is a, c, g, or t
  misc_feature (874)..(876): n is a, c, g, or t
  misc_feature (879)..(881): n is a, c, g, or t
  misc_feature (883)..(883): n is a, c, g, or t
  misc_feature (885)..(885): n is a, c, g, or t
  misc_feature (892)..(892): n is a, c, g, or t
  misc_feature (896)..(896): n is a, c, g, or t
  misc_feature (898)..(899): n is a, c, g, or t
  misc_feature (901)..(901): n is a, c, g, or t
  misc_feature (905)..(905): n is a, c, g, or t
  misc_feature (908)..(908): n is a, c, g, or t
  misc_feature (910)..(911): n is a, c, g, or t
  misc_feature (918)..(918): n is a, c, g, or t
  misc_feature (923)..(924): n is a, c, g, or t
  misc_feature (928)..(929): n is a, c, g, or t
  misc_feature (931)..(931): n is a, c, g, or t
  misc_feature (934)..(935): n is a, c, g, or t
  misc_feature (937)..(937): n is a, c, g, or t
  misc_feature (940)..(940): n is a, c, g, or t
  misc_feature (946)..(946): n is a, c, g, or t
  misc_feature (948)..(948): n is a, c, g, or t
  misc_feature (955)..(955): n is a, c, g, or t
  misc_feature (958)..(960): n is a, c, g, or t
  misc_feature (964)..(965): n is a, c, g, or t
  misc_feature (967)..(969): n is a, c, g, or t
  misc_feature (971)..(974): n is a, c, g, or t
  misc_feature (979)..(980): n is a, c, g, or t
  misc_feature (982)..(982): n is a, c, g, or t
  misc_feature (984)..(984): n is a, c, g, or t
  misc_feature (986)..(987): n is a, c, g, or t
  misc_feature (989)..(989): n is a, c, g, or t
  misc_feature (998)..(998): n is a, c, g, or t
  misc_feature (1000)..(1000): n is a, c, g, or t
  misc_feature (1002)..(1005): n is a, c, g, or t
  misc_feature (1011)..(1012): n is a, c, g, or t
  misc_feature (1015)..(1015): n is a, c, g, or t
  misc_feature (1017)..(1018): n is a, c, g, or t
  misc_feature (1020)..(1020): n is a, c, g, or t
  misc_feature (1022)..(1022): n is a, c, g, or t
  misc_feature (1025)..(1025): n is a, c, g, or t
  misc_feature (1027)..(1028): n is a, c, g, or t
  misc_feature (1031)..(1033): n is a, c, g, or t
  misc_feature (1035)..(1035): n is a, c, g, or t
  misc_feature (1039)..(1040): n is a, c, g, or t
  misc_feature (1044)..(1044): n is a, c, g, or t
  misc_feature (1047)..(1047): n is a, c, g, or t
  misc_feature (1051)..(1051): n is a, c, g, or t
  misc_feature (1054)..(1054): n is a, c, g, or t
  misc_feature (1056)..(1056): n is a, c, g, or t
  misc_feature (1061)..(1061): n is a, c, g, or t
  misc_feature (1067)..(1067): n is a, c, g, or t
  misc_feature (1069)..(1069): n is a, c, g, or t
  misc_feature (1073)..(1078): n is a, c, g, or t
  misc_feature (1080)..(1080): n is a, c, g, or t
  misc_feature (1083)..(1085): n is a, c, g, or t
  misc_feature (1089)..(1089): n is a, c, g, or t
  misc_feature (1092)..(1092): n is a, c, g, or t
  misc_feature (1097)..(1097): n is a, c, g, or t
  misc_feature (1104)..(1104): n is a, c, g, or t
  misc_feature (1109)..(1109): n is a, c, g, or t
  misc_feature (1111)..(1111): n is a, c, g, or t
  misc_feature (1114)..(1114): n is a, c, g, or t
  misc_feature (1116)..(1116): n is a, c, g, or t
  misc_feature (1118)..(1118): n is a, c, g, or t
  misc_feature (1120)..(1120): n is a, c, g, or t
  misc_feature (1122)..(1122): n is a, c, g, or t
  misc_feature (1124)..(1124): n is a, c, g, or t
  misc_feature (1127)..(1127): n is a, c, g, or t
  misc_feature (1131)..(1131): n is a, c, g, or t
  misc_feature (1133)..(1133): n is a, c, g, or t
  misc_feature (1138)..(1140): n is a, c, g, or t
  misc_feature (1142)..(1142): n is a, c, g, or t
  misc_feature (1144)..(1144): n is a, c, g, or t
  misc_feature (1146)..(1146): n is a, c, g, or t
  misc_feature (1150)..(1151): n is a, c, g, or t
  misc_feature (1157)..(1157): n is a, c, g, or t
  misc_feature (1159)..(1159): n is a, c, g, or t
  misc_feature (1161)..(1161): n is a, c, g, or t
  misc_feature (1163)..(1163): n is a, c, g, or t
  misc_feature (1165)..(1166): n is a, c, g, or t
  misc_feature (1168)..(1168): n is a, c, g, or t
  misc_feature (1170)..(1170): n is a, c, g, or t
  misc_feature (1173)..(1174): n is a, c, g, or t
  misc_feature (1176)..(1176): n is a, c, g, or t
  misc_feature (1183)..(1184): n is a, c, g, or t
  misc_feature (1187)..(1193): n is a, c, g, or t
  misc_feature (1198)..(1198): n is a, c, g, or t
nagnnaannttncnnggggggnnccccccccccccccccggggntnctttttnggggccannnnaaaanttcgaacccccngtccnccngagnnttctgagggggaccntgncggcaatnctntntganggnatgatnagaatnctncaccnnnnnanncccctgnnaatgncnaatngncactcancnagannnttttgnngcancnntngnaaaccggaatgcctatccncnnnttctntnnntgcnagaaannagggcccnnctttanngnaacaannccatgagcnnnctgancnnaagantantcatgcnananntnatgatnnncngngcnantagtgctaattnngcntccgatgggcnngntgntcanntnntgannaacnngtgctgttcgcntgaactnnaagtcntgntncgatgatagggnggangnnnnncncnganacagaaaaacngnnacngnncganccntntccaggnanacnagnnagnatcntcagntancggcannaggtttnnncannantnncncattgngtgctaatgttcnttancgnacgncanngtnnnnanngnggtntacagccncanctannagctgnnnacccnnaacntggnaggcatttcnnnacatcnnntnaanantngnccgananaattatgnnaanngnntnanatcngatgntnttttannncntttncnganncagannatntccntcnnatgtngatgncaananaatctntgncnnncnactnnnnaatannattnncntgcttntnnnttnnccancncnantaaantgntnccctnatnntnannatnncctttgnnntttaccngaggganntntatttcnagnnctcnnnagnnngncnctctggnaatngnncncaangcngnntctattnggtcnnctgnncnganntnatncttgtncnaggttcnacnnncaanntnnnannnnccaanntncncnntnccctttccntntnnnnaacatnnatnanngngnttntnnttnnngnactnnctcnacnccgnttntnggganattagngnttannnnnnanatnnnaaantcnttaanttgatgngtagngntgncnantntntntanatananaggannntncncntccnngccatntncncnanntntntcnntngtcttannacnnnnnnncactngt

SEQ ID NO: 788 - DNA, 1200 bp, Homo Sapiens
  misc_feature (432)..(432): n is a, c, g, or t
  misc_feature (435)..(435): n is a, c, g, or t
  misc_feature (441)..(441): n is a, c, g, or t
  misc_feature (443)..(443): n is a, c, g, or t
  misc_feature (448)..(448): n is a, c, g, or t
  misc_feature (456)..(456): n is a, c, g, or t
  misc_feature (459)..(460): n is a, c, g, or t
  misc_feature (462)..(462): n is a, c, g, or t
  misc_feature (464)..(464): n is a, c, g, or t
  misc_feature (468)..(468): n is a, c, g, or t
  misc_feature (470)..(471): n is a, c, g, or t
  misc_feature (473)..(474): n is a, c, g, or t
  misc_feature (476)..(476): n is a, c, g, or t
  misc_feature (486)..(487): n is a, c, g, or t
  misc_feature (494)..(494): n is a, c, g, or t
  misc_feature (504)..(504): n is a, c, g, or t
  misc_feature (507)..(507): n is a, c, g, or t
  misc_feature (514)..(514): n is a, c, g, or t
  misc_feature (517)..(517): n is a, c, g, or t
  misc_feature (520)..(520): n is a, c, g, or t
  misc_feature (523)..(523): n is a, c, g, or t
  misc_feature (527)..(527): n is a, c, g, or t
  misc_feature (535)..(536): n is a, c, g, or t
  misc_feature (538)..(538): n is a, c, g, or t
  misc_feature (543)..(543): n is a, c, g, or t
  misc_feature (554)..(554): n is a, c, g, or t
  misc_feature (561)..(561): n is a, c, g, or t
  misc_feature (563)..(563): n is a, c, g, or t
  misc_feature (567)..(567): n is a, c, g, or t
  misc_feature (571)..(571): n is a, c, g, or t
  misc_feature (577)..(577): n is a, c, g, or t
  misc_feature (581)..(581): n is a, c, g, or t
  misc_feature (587)..(588): n is a, c, g, or t
  misc_feature (597)..(597): n is a, c, g, or t
  misc_feature (602)..(602): n is a, c, g, or t
  misc_feature (610)..(610): n is a, c, g, or t
  misc_feature (617)..(617): n is a, c, g, or t
  misc_feature (633)..(633): n is a, c, g, or t
  misc_feature (639)..(639): n is a, c, g, or t
  misc_feature (645)..(645): n is a, c, g, or t
  misc_feature (663)..(663): n is a, c, g, or t
  misc_feature (678)..(678): n is a, c, g, or t
  misc_feature (688)..(688): n is a, c, g, or t
  misc_feature (693)..(693): n is a, c, g, or t
  misc_feature (697)..(697): n is a, c, g, or t
  misc_feature (705)..(705): n is a, c, g, or t
  misc_feature (710)..(710): n is a, c, g, or t
  misc_feature (712)..(712): n is a, c, g, or t
  misc_feature (735)..(735): n is a, c, g, or t
  misc_feature (739)..(739): n is a, c, g, or t
  misc_feature (747)..(747): n is a, c, g, or t
  misc_feature (749)..(749): n is a, c, g, or t
  misc_feature (757)..(757): n is a, c, g, or t
  misc_feature (775)..(775): n is a, c, g, or t
  misc_feature (779)..(780): n is a, c, g, or t
  misc_feature (792)..(792): n is a, c, g, or t
  misc_feature (805)..(805): n is a, c, g, or t
  misc_feature (809)..(810): n is a, c, g, or t
  misc_feature (815)..(815): n is a, c, g, or t
  misc_feature (826)..(826): n is a, c, g, or t
  misc_feature (861)..(862): n is a, c, g, or t
  misc_feature (867)..(867): n is a, c, g, or t
  misc_feature (877)..(878): n is a, c, g, or t
  misc_feature (887)..(887): n is a, c, g, or t
  misc_feature (895)..(895): n is a, c, g, or t
  misc_feature (902)..(902): n is a, c, g, or t
  misc_feature (916)..(916): n is a, c, g, or t
  misc_feature (924)..(924): n is a, c, g, or t
  misc_feature (930)..(930): n is a, c, g, or t
  misc_feature (932)..(932): n is a, c, g, or t
  misc_feature (935)..(935): n is a, c, g, or t
  misc_feature (943)..(943): n is a, c, g, or t
  misc_feature (950)..(951): n is a, c, g, or t
  misc_feature (959)..(959): n is a, c, g, or t
  misc_feature (966)..(966): n is a, c, g, or t
  misc_feature (971)..(971): n is a, c, g, or t
  misc_feature (980)..(982): n is a, c, g, or t
  misc_feature (999)..(1000): n is a, c, g, or t
  misc_feature (1009)..(1010): n is a, c, g, or t
  misc_feature (1014)..(1015): n is a, c, g, or t
  misc_feature (1028)..(1028): n is a, c, g, or t
  misc_feature (1041)..(1041): n is a, c, g, or t
  misc_feature (1043)..(1044): n is a, c, g, or t
  misc_feature (1052)..(1052): n is a, c, g, or t
  misc_feature (1068)..(1068): n is a, c, g, or t
  misc_feature (1072)..(1072): n is a, c, g, or t
  misc_feature (1075)..(1075): n is a, c, g, or t
  misc_feature (1077)..(1077): n is a, c, g, or t
  misc_feature (1095)..(1095): n is a, c, g, or t
  misc_feature (1097)..(1097): n is a, c, g, or t
  misc_feature (1103)..(1103): n is a, c, g, or t
  misc_feature (1107)..(1107): n is a, c, g, or t
  misc_feature (1118)..(1118): n is a, c, g, or t
  misc_feature (1126)..(1127): n is a, c, g, or t
  misc_feature (1136)..(1136): n is a, c, g, or t
  misc_feature (1144)..(1144): n is a, c, g, or t
  misc_feature (1167)..(1167): n is a, c, g, or t
  misc_feature (1183)..(1183): n is a, c, g, or t
  misc_feature (1187)..(1187): n is a, c, g, or t
  misc_feature (1199)..(1199): n is a, c, g, or t
aatagagagattactatgagaggatcgcatcaccatcaccatcacggatcctatttaggtgacactatagaatcgtcgacccacgcgtccgaagaaacatgggtgtgcttggcccacagggcctggtggtgatggacctccccgctccctcaagctctggatggctgcagtgttgtactagactttgttcaggctgttctcatctcagtattgccccttcctttcactttcacacttcatctcattcctgttgtcactttccccgaaacgaataaagtctccccagctcctgctgtgtaggctgggcagaaaccacaaaaaaaaaaaaaaaaaaaaaaaaaaaaaaaaaataaaaaaaaaaaaaaaaaaaaaaaaaaaaaaaaaaaaaaaaaaaaaaaaaaaaaaaaaaaaaaaaaaaaaaaaaaggggggnccncccccnanagggngccgaatnaanntnanttancnnanntnggaccccggnngaaaaanccagaaaggnccncaaaacnccntcnggntttnttcaaaanncncggtngcccccggggnttttttntngggnaaancccaanctancttggnnaaattttcnggacntaaggaanctaaaanggaaaaaaaaatcccnggatanaccccngttgaaataatcccaaanggcctcgtaaaaaanattttgaggnatttncagncagttgcncaaangnacctaaaaaccaaaccgttcaancggnaaataacngncctttttnaaaaaccgtaaaaaaaanaaannccaaagtttttnacccggccctttnttcnnatttntttgccccccnggaaaaagggcccccccggaaatttttcttatggnnaaatnaaaaaaaggnnaaactgggnaaatgggnaaaaagngtttccccccttgnttaaaccnggtttncnaanaaaaaaanaggaaannttttttcnccccccnggganggaaaaaannnaaaaaaattttccgggnnttttttaannaaanntttcccaaaaaangggggggtttaangnnaaaaccgnccctatttcccaaaangggnttntngaaaaaaatttttttttncncccccnccanccccggggggnatttcccnnctttttttnttaaaagngggccaaaaatggaaaaattttnttcccccccctttttncccnggggaaaatatna

SEQ ID NO: 789 - DNA, 1200 bp, Homo Sapiens
  misc_feature (72)..(72): n is a, c, g, or t
  misc_feature (427)..(427): n is a, c, g, or t
  misc_feature (805)..(805): n is a, c, g, or t
  misc_feature (815)..(815): n is a, c, g, or t
  misc_feature (860)..(860): n is a, c, g, or t
  misc_feature (865)..(865): n is a, c, g, or t
  misc_feature (867)..(867): n is a, c, g, or t
  misc_feature (871)..(871): n is a, c, g, or t
  misc_feature (888)..(888): n is a, c, g, or t
  misc_feature (901)..(901): n is a, c, g, or t
  misc_feature (903)..(903): n is a, c, g, or t
  misc_feature (909)..(909): n is a, c, g, or t
  misc_feature (926)..(926): n is a, c, g, or t
  misc_feature (929)..(929): n is a, c, g, or t
  misc_feature (935)..(935): n is a, c, g, or t
  misc_feature (939)..(939): n is a, c, g, or t
  misc_feature (943)..(943): n is a, c, g, or t
  misc_feature (951)..(951): n is a, c, g, or t
  misc_feature (953)..(953): n is a, c, g, or t
  misc_feature (964)..(964): n is a, c, g, or t
  misc_feature (970)..(970): n is a, c, g, or t
  misc_feature (974)..(974): n is a, c, g, or t
  misc_feature (979)..(979): n is a, c, g, or t
  misc_feature (984)..(984): n is a, c, g, or t
  misc_feature (990)..(990): n is a, c, g, or t
  misc_feature (996)..(996): n is a, c, g, or t
  misc_feature (1006)..(1006): n is a, c, g, or t
  misc_feature (1011)..(1011): n is a, c, g, or t
  misc_feature (1020)..(1020): n is a, c, g, or t
  misc_feature (1027)..(1027): n is a, c, g, or t
  misc_feature (1030)..(1030): n is a, c, g, or t
  misc_feature (1039)..(1039): n is a, c, g, or t
  misc_feature (1053)..(1053): n is a, c, g, or t
  misc_feature (1058)..(1058): n is a, c, g, or t
  misc_feature (1063)..(1063): n is a, c, g, or t
  misc_feature (1066)..(1066): n is a, c, g, or t
  misc_feature (1068)..(1068): n is a, c, g, or t
  misc_feature (1073)..(1074): n is a, c, g, or t
  misc_feature (1079)..(1079): n is a, c, g, or t
  misc_feature (1081)..(1081): n is a, c, g, or t
  misc_feature (1090)..(1090): n is a, c, g, or t
  misc_feature (1092)..(1092): n is a, c, g, or t
  misc_feature (1097)..(1097): n is a, c, g, or t
  misc_feature (1099)..(1099): n is a, c, g, or t
  misc_feature (1121)..(1121): n is a, c, g, or t
  misc_feature (1137)..(1137): n is a, c, g, or t
  misc_feature (1143)..(1143): n is a, c, g, or t
  misc_feature (1145)..(1145): n is a, c, g, or t
  misc_feature (1149)..(1149): n is a, c, g, or t
  misc_feature (1170)..(1170): n is a, c, g, or t
  misc_feature (1172)..(1174): n is a, c, g, or t
aaattagagaaattactatgagaggatcgcatcaccatcaccatcacggatcctatttaggtgacactatanaatcgtcgacccacgcgtccggaagcggtcgccatgtccgcggggagcgcgacacatcctggagctggcgggcgccgcagcaaatgggaccaaccagctccagccccacttctcttcctcccgccagcggccccaggtggggaggttaccagcagtgggggaagtcctgggggcaccacagctgctccttcaggagccttggatgctgctgctgctgtggctgccaagattaatgccatgctcatggcaaaagggaagctgaaaccaactcagaatgcttctgagaagcttcaggctcctggcaaaggcctaactagcaataaaagcaaggatgacctggtggtagctgaagtanaaattaatgatgtgcctctcacatgtaggaacttgctgactcgaggacagactcaagacgagatcagccgacttagtggggctgcagtatcaactcgagggaggttcatgacaactgaggaaaaagccaaagtgggaccaggggatcgtccattatatcttcatgttcagggccagacacgggaattagtggacagagctgtaaaccggatcaaagaaattatcaccaatggagtggtaaaagctgccacaggcagttgatgcctccaccagcctttccagtgactggaataaaaacagagtccgatgaaaggaatggggtctgggaaccttaacagggagccatgattatccagccaagaagatgaaaactacaaanaagggatttnggctttggtgggcttatgctgcaaaattcctctgatgaaaaaggnaggancntggnaggtcataaaaaatgcnaagtagttttccnanagggcnggaattttgggaatacnaantattcntttnttcnaaaccacnanctaaacaacanaatgcnattntgganggctncctagnaaaaantggaaaaaanttttngacccccanttgactnttntttaacaanaatggctgcttttngattnaaaanacncnggggnnccgtngntgggaaccntnttgancnttttcaaaatttaaaaattccnggcccccttttttaangggttncntaanaaccccaaaaaattttttttncnnngggcaaaaaatccgttaaattttttt

SEQ ID NO: 790 - DNA, 1200 bp, Homo Sapiens
  misc_feature (2)..(2): n is a, c, g, or t
  misc_feature (15)..(15): n is a, c, g, or t
  misc_feature (877)..(877): n is a, c, g, or t
  misc_feature (928)..(928): n is a, c, g, or t
  misc_feature (945)..(945): n is a, c, g, or t
  misc_feature (947)..(947): n is a, c, g, or t
  misc_feature (986)..(986): n is a, c, g, or t
  misc_feature (992)..(993): n is a, c, g, or t
  misc_feature (996)..(996): n is a, c, g, or t
  misc_feature (999)..(999): n is a, c, g, or t
  misc_feature (1013)..(1014): n is a, c, g, or t
  misc_feature (1022)..(1022): n is a, c, g, or t
  misc_feature (1038)..(1038): n is a, c, g, or t
  misc_feature (1049)..(1049): n is a, c, g, or t
  misc_feature (1082)..(1082): n is a, c, g, or t
  misc_feature (1089)..(1089): n is a, c, g, or t
  misc_feature (1092)..(1092): n is a, c, g, or t
  misc_feature (1094)..(1094): n is a, c, g, or t
  misc_feature (1110)..(1110): n is a, c, g, or t
  misc_feature (1127)..(1127): n is a, c, g, or t
  misc_feature (1142)..(1143): n is a, c, g, or t
  misc_feature (1147)..(1147): n is a, c, g, or t
  misc_feature (1152)..(1153): n is a, c, g, or t
  misc_feature (1156)..(1156): n is a, c, g, or t
  misc_feature (1165)..(1165): n is a, c, g, or t
  misc_feature (1167)..(1167): n is a, c, g, or t
  misc_feature (1170)..(1170): n is a, c, g, or t
  misc_feature (1175)..(1175): n is a, c, g, or t
  misc_feature (1177)..(1177): n is a, c, g, or t
  misc_feature (1184)..(1184): n is a, c, g, or t
  misc_feature (1192)..(1192): n is a, c, g, or t
  misc_feature (1197)..(1197): n is a, c, g, or t
  misc_feature (1199)..(1199): n is a, c, g, or t
gnatagagaaattanctatgagaggatcgcatcaccatcaccatcacggatcctatttaggtgacactatagaatcgtcgacccacgcgtccgcccacgcgtccgcccacgcgtccgtaaagtttaagatgcagaacttgtcacttgcatggtgtgccccccgtactcacatacactctgctgttgccagcagtcgcagaccgcaggagccctgtctaaaagtttcttctagaaccagagaccagcaagtgaaattattgccatctcaaggatggcaaaagaattcaaagctcaatgtgcactatttttttctttgctgtgggacaacagtgaatgtgtttatgccagcgtgtgctgatgatactgaggggctttaggttggcaaatagcactgttttcttagctgcaagaattcattgcacaatgtttttcatcatttttgttaatgtcatctttttttggtccttgctacgaaaaggaatgcgattctgtggtcattcgcactgggttgcattgattccccctctgatggccaatgtggagtggacaaagtgtccggaactcacatcggtgatcgtcccctcgtcttaagacccagcccgctctgtgtgagcctctggggctccctcgctcagtgagcacagttccccgggggttcatgccagagctccggctgaagcaagaagtcctccagctgcgtcgtttgccgcctgtggacgagtgcgccccagtttctgccctggcagctcctggccacaccttctcagagctcacctgtgcacttctaaattgaattggcccacggtgtccaaccaagaaggagcatctgcactccgagaaagatgtgttctgtaactgccccagtgtgaccccgcantggctctcggtgctagatatgcatgactaaaaatgatgctgggcaaaatgnaaatgatctttcattangntggggggcagcgtctttctctgcctttgctaaatgcagncagcannaanccnttttgctaaaaaannttttgttngacttctgaaatccanggctgaattgntgttaaaaaaaaaaaaaaaaaaaaaaaaaaaangggcggnccncnccccaaaagggagccnaataaacttaaataacngaaccttggaacccnngttnaaaannccnaaaggaccncnaanccccncnggaattnttcaaaanccccngnt

SEQ ID NO: 791 - DNA, 1450 bp, Homo Sapiens
  misc_feature (927)..(927): n is a, c, g, or t
  misc_feature (936)..(936): n is a, c, g, or t
  misc_feature (941)..(941): n is a, c, g, or t
  misc_feature (947)..(947): n is a, c, g, or t
  misc_feature (957)..(957): n is a, c, g, or t
  misc_feature (969)..(969): n is a, c, g, or t
  misc_feature (976)..(976): n is a, c, g, or t
  misc_feature (1005)..(1005): n is a, c, g, or t
  misc_feature (1013)..(1013): n is a, c, g, or t
  misc_feature (1019)..(1019): n is a, c, g, or t
  misc_feature (1027)..(1027): n is a, c, g, or t
  misc_feature (1034)..(1034): n is a, c, g, or t
  misc_feature (1038)..(1038): n is a, c, g, or t
  misc_feature (1040)..(1041): n is a, c, g, or t
  misc_feature (1047)..(1047): n is a, c, g, or t
  misc_feature (1052)..(1052): n is a, c, g, or t
  misc_feature (1056)..(1056): n is a, c, g, or t
  misc_feature (1061)..(1064): n is a, c, g, or t
  misc_feature (1067)..(1067): n is a, c, g, or t
  misc_feature (1072)..(1072): n is a, c, g, or t
  misc_feature (1078)..(1079): n is a, c, g, or t
  misc_feature (1081)..(1081): n is a, c, g, or t
  misc_feature (1086)..(1086): n is a, c, g, or t
  misc_feature (1092)..(1092): n is a, c, g, or t
  misc_feature (1094)..(1094): n is a, c, g, or t
  misc_feature (1110)..(1110): n is a, c, g, or t
  misc_feature (1124)..(1124): n is a, c, g, or t
  misc_feature (1142)..(1142): n is a, c, g, or t
  misc_feature (1147)..(1148): n is a, c, g, or t
  misc_feature (1153)..(1153): n is a, c, g, or t
  misc_feature (1155)..(1155): n is a, c, g, or t
  misc_feature (1157)..(1157): n is a, c, g, or t
  misc_feature (1161)..(1161): n is a, c, g, or t
  misc_feature (1169)..(1169): n is a, c, g, or t
  misc_feature (1171)..(1171): n is a, c, g, or t
  misc_feature (1175)..(1175): n is a, c, g, or t
  misc_feature (1183)..(1183): n is a, c, g, or t
  misc_feature (1185)..(1185): n is a, c, g, or t
  misc_feature (1188)..(1188): n is a, c, g, or t
  misc_feature (1190)..(1191): n is a, c, g, or t
  misc_feature (1194)..(1194): n is a, c, g, or t
  misc_feature (1203)..(1203): n is a, c, g, or t
  misc_feature (1206)..(1206): n is a, c, g, or t
  misc_feature (1220)..(1220): n is a, c, g, or t
  misc_feature (1224)..(1225): n is a, c, g, or t
  misc_feature (1230)..(1230): n is a, c, g, or t
  misc_feature (1237)..(1238): n is a, c, g, or t
  misc_feature (1240)..(1240): n is a, c, g, or t
  misc_feature (1243)..(1243): n is a, c, g, or t
  misc_feature (1247)..(1247): n is a, c, g, or t
  misc_feature (1254)..(1254): n is a, c, g, or t
  misc_feature (1258)..(1259): n is a, c, g, or t
  misc_feature (1261)..(1262): n is a, c, g, or t
  misc_feature (1276)..(1276): n is a, c, g, or t
  misc_feature (1287)..(1288): n is a, c, g, or t
  misc_feature (1301)..(1301): n is a, c, g, or t
  misc_feature (1308)..(1310): n is a, c, g, or t
  misc_feature (1319)..(1319): n is a, c, g, or t
  misc_feature (1323)..(1323): n is a, c, g, or t
  misc_feature (1327)..(1327): n is a, c, g, or t
  misc_feature (1335)..(1335): n is a, c, g, or t
  misc_feature (1342)..(1342): n is a, c, g, or t
  misc_feature (1357)..(1357): n is a, c, g, or t
  misc_feature (1364)..(1365): n is a, c, g, or t
  misc_feature (1370)..(1370): n is a, c, g, or t
  misc_feature (1372)..(1375): n is a, c, g, or t
  misc_feature (1377)..(1378): n is a, c, g, or t
  misc_feature (1383)..(1383): n is a, c, g, or t
  misc_feature (1385)..(1385): n is a, c, g, or t
  misc_feature (1393)..(1395): n is a, c, g, or t
  misc_feature (1408)..(1408): n is a, c, g, or t
  misc_feature (1413)..(1413): n is a, c, g, or t
  misc_feature (1416)..(1416): n is a, c, g, or t
  misc_feature (1421)..(1422): n is a, c, g, or t
  misc_feature (1425)..(1425): n is a, c, g, or t
  misc_feature (1436)..(1437): n is a, c, g, or t
  misc_feature (1439)..(1439): n is a, c, g, or t
  misc_feature (1444)..(1444): n is a, c, g, or t
  misc_feature (1447)..(1447): n is a, c, g, or t
aatagagagattactatgagaggatcgcatcaccatcaccatcacggatcctatttaggtgacactatagaatcgtcgacccacgcgtccgctatttgtgcagagtttgccatcctgcgaatgctgctgcagagctcggaggggcgctgtgtgtacatcacccccatggaggccctggcagagcaggtatacatggactggtacgagaagttccaggacaggctcaacaagaaggtggtactcctgacaggcgagaccagcacagacctgaagctgctgggcaaagggaacattatcatcagcacccctgagaagtgggacatactttcccggcgatggaagcagcgcaagaacgtgcagaacatcaacctcttcgtggtggatgaggtccaccttatcgggggcgagaatgggcctgtcttagaagtgatctgctcccgaatgcgctacatctcctcccagattgagcggcccattcgcattgtggcactcagctcttcgctctccaatgccaaggatgtggcccactggctgggctgcagtgccacctccaccttcaacttccatcccaatgtgcgtcccgtccccttggagctgcacatccagggcttcaacatcagccatacacaaacccgcctgctctccatggccaagcctgtgtaccatgctatcaccaagcactcgcccaagaagcctgtcattgtctttgtgccgtctcgcaagcagacccgcctcactgccattgacatcctcaccacctgtgcagcagacatccaacggcagaggttcttgcactgcaccgagaaggatctgattccgtacctggagaagctaaagtgacagcacgctcaaggaaaaccctgctaaatggggtgggctacctgcatgaggggctcacccccatggagcgacgcctggtggaaccancctcttcanctcangggctntccaggtggnggtggcttctcngaaatcnctgctggggcattgaacgtggcttgcccnccctggtnatcatncatggaanaccccantaantnnaatggncaaantccnccccnnnntgnaatancccctnntnttaancggccntnaaaggggggggccccnccaacccccctttncaaaaaaaaaggcccttntttcnncagtntncnggcncccaaaanantttntccaaaantnttnanntanccctttccnaanaaatcccccgaccntggnngcctnacccctnnanggnaatntccccanaaanntnnaaaaaccgagaagntgtggaacccnnccggacattttgntcccccnnnaaaaaaccnatanaaantttggggnccccccnctctttcaacctttnaaaatgnnaacancnnnnannaaacnangtctcccnnnaaaaagggccccncaaanaanccccnntanaacccatattnntnttttncanaga

SEQ ID NO: 792 - DNA, 1385 bp, Homo Sapiens
  misc_feature (889)..(889): n is a, c, g, or t
  misc_feature (927)..(927): n is a, c, g, or t
  misc_feature (968)..(968): n is a, c, g, or t
  misc_feature (977)..(977): n is a, c, g, or t
  misc_feature (987)..(987): n is a, c, g, or t
  misc_feature (1001)..(1001): n is a, c, g, or t
  misc_feature (1021)..(1021): n is a, c, g, or t
  misc_feature (1023)..(1023): n is a, c, g, or t
  misc_feature (1034)..(1034): n is a, c, g, or t
  misc_feature (1037)..(1037): n is a, c, g, or t
  misc_feature (1044)..(1045): n is a, c, g, or t
  misc_feature (1050)..(1050): n is a, c, g, or t
  misc_feature (1057)..(1057): n is a, c, g, or t
  misc_feature (1068)..(1068): n is a, c, g, or t
  misc_feature (1072)..(1072): n is a, c, g, or t
  misc_feature (1082)..(1082): n is a, c, g, or t
  misc_feature (1100)..(1100): n is a, c, g, or t
  misc_feature (1106)..(1106): n is a, c, g, or t
  misc_feature (1113)..(1113): n is a, c, g, or t
  misc_feature (1115)..(1115): n is a, c, g, or t
  misc_feature (1119)..(1120): n is a, c, g, or t
  misc_feature (1130)..(1130): n is a, c, g, or t
  misc_feature (1140)..(1140): n is a, c, g, or t
  misc_feature (1145)..(1145): n is a, c, g, or t
  misc_feature (1148)..(1148): n is a, c, g, or t
  misc_feature (1151)..(1151): n is a, c, g, or t
  misc_feature (1158)..(1158): n is a, c, g, or t
  misc_feature (1166)..(1166): n is a, c, g, or t
  misc_feature (1168)..(1168): n is a, c, g, or t
  misc_feature (1186)..(1186): n is a, c, g, or t
  misc_feature (1191)..(1191): n is a, c, g, or t
  misc_feature (1196)..(1196): n is a, c, g, or t
  misc_feature (1199)..(1199): n is a, c, g, or t
  misc_feature (1204)..(1204): n is a, c, g, or t
  misc_feature (1209)..(1210): n is a, c, g, or t
  misc_feature (1216)..(1216): n is a, c, g, or t
  misc_feature (1219)..(1219): n is a, c, g, or t
  misc_feature (1223)..(1223): n is a, c, g, or t
  misc_feature (1226)..(1226): n is a, c, g, or t
  misc_feature (1241)..(1241): n is a, c, g, or t
  misc_feature (1247)..(1248): n is a, c, g, or t
  misc_feature (1256)..(1256): n is a, c, g, or t
  misc_feature (1259)..(1260): n is a, c, g, or t
  misc_feature (1264)..(1264): n is a, c, g, or t
  misc_feature (1275)..(1275): n is a, c, g, or t
  misc_feature (1279)..(1281): n is a, c, g, or t
  misc_feature (1283)..(1283): n is a, c, g, or t
  misc_feature (1285)..(1290): n is a, c, g, or t
  misc_feature (1296)..(1296): n is a, c, g, or t
  misc_feature (1299)..(1299): n is a, c, g, or t
  misc_feature (1301)..(1304): n is a, c, g, or t
  misc_feature (1308)..(1308): n is a, c, g, or t
  misc_feature (1316)..(1316): n is a, c, g, or t
  misc_feature (1318)..(1319): n is a, c, g, or t
  misc_feature (1321)..(1321): n is a, c, g, or t
  misc_feature (1331)..(1331): n is a, c, g, or t
  misc_feature (1336)..(1337): n is a, c, g, or t
  misc_feature (1342)..(1343): n is a, c, g, or t
  misc_feature (1345)..(1345): n is a, c, g, or t
  misc_feature (1348)..(1348): n is a, c, g, or t
  misc_feature (1352)..(1352): n is a, c, g, or t
  misc_feature (1355)..(1357): n is a, c, g, or t
  misc_feature (1373)..(1373): n is a, c, g, or t
  misc_feature (1383)..(1383): n is a, c, g, or t
  misc_feature (1385)..(1385): n is a, c, g, or t
tagagaaattactatgagaggatcgcatcaccatcaccatcacggatcctatttaggtgacactatagaatcgtcgacccacgcgtccggcctcactgtcaacccccaggacaacaactgcctggcagttggggccagcgggcccttcgtgaggctctatgacatccgcatgatccataaccacagaaagagcatgaagcagagcccttcagcgggtgtgcacaccttctgtgaccggcagaaaccccttccggacggtgcagcccagtattacgtagcaggtcacctgccagtgaagcttcctgactacaacaaccgtttgagagtgctggttgccacctatgtgaccttcagccccaatggcacagagctactagtcaacatggggggggaacaggtctatttgtgctggttgccacctatgtgaccttcagccccaatggcacagagctactagtcaacatggggggggaacaggtctatttgtttgacttgacttacaagcagcggccgtacaccttcctcttgcctagaaaatgccactcctcgggggaagtccagaatggcaagatgtccaccaccgttggacacaccgttgagcggccgctccctatagtgagtcgtattaagcttaattagctgagcttggactcctgttgatagatccagtaatgacctcagaactccatctggatttgttcagaacgctcggttgccgccgggcgttttttattggtgagaatccaagctagcttggcgagattttcaggagctaaggaagctaaaatggagaaaaaaatcactggatataccaccgttgatatatcccaatggcatcgtaaagaacattttgaggcatttcagtcagttgctcaatgtacctataacnagaccgttcagctggatattacggcctttttaaagacngtaaagaaaaataagcacaagttttatccggcctttattcncattcttgncccccctgangaatgctcatccgnaattcctatggcaatgaaananggggaactggngantggaaanngttcnccttgtnacccgttttcntgancaaactgaangtttttctcccttggagngaaacnccaaaantncggnngttttaaaanattccaaatnggggntanggnaaactgnctattccnanggttttgaaaaatttttnccccncccanccnggggnttccnntttttnaanggcnaangaaaaatttcccccnttttcnngggaaatnatnnaggnaagggggagcngggnnngntnnnnnnttgggntcntnnnnaaanaaaaaaancnngnaggggggggnttttnnattgnncnccngggnatnnnttaaaaaaaaaaaaantttttttttncn

SEQ ID NO: 793 - DNA, 1198 bp, Homo Sapiens
  misc_feature (1)..(1): n is a, c, g, or t
  misc_feature (923)..(923): n is a, c, g, or t
  misc_feature (926)..(926): n is a, c, g, or t
  misc_feature (979)..(979): n is a, c, g, or t
  misc_feature (994)..(994): n is a, c, g, or t
  misc_feature (1001)..(1001): n is a, c, g, or t
  misc_feature (1020)..(1020): n is a, c, g, or t
  misc_feature (1039)..(1039): n is a, c, g, or t
  misc_feature (1054)..(1054): n is a, c, g, or t
  misc_feature (1056)..(1057): n is a, c, g, or t
  misc_feature (1084)..(1084): n is a, c, g, or t
  misc_feature (1089)..(1089): n is a, c, g, or t
  misc_feature (1093)..(1094): n is a, c, g, or t
  misc_feature (1106)..(1106): n is a, c, g, or t
  misc_feature (1115)..(1115): n is a, c, g, or t
  misc_feature (1125)..(1125): n is a, c, g, or t
  misc_feature (1138)..(1138): n is a, c, g, or t
  misc_feature (1148)..(1148): n is a, c, g, or t
  misc_feature (1155)..(1156): n is a, c, g, or t
  misc_feature (1164)..(1164): n is a, c, g, or t
  misc_feature (1169)..(1169): n is a, c, g, or t
  misc_feature (1173)..(1173): n is a, c, g, or t
  misc_feature (1178)..(1178): n is a, c, g, or t
  misc_feature (1185)..(1185): n is a, c, g, or t
  misc_feature (1197)..(1197): n is a, c, g, or t
naatagagaaattactatgagaggatcgcatcaccatcaccatcacggatcctatttaggtgacactatagaatcgtcgacccacgcgtccggcccaatggacattgcagtgcaggagggaaggctgacatggctggtttacattattggagcagtgatcggtggccgggtttcttttgccagcactgatgagcaagacgccatggatggtgagcttgtctgtcgggtgctccagctgatgaacctaacagattctcgtttggcccaggcgggtaatgagaagctagagttggccatgctgagcttttttgaacagtttcgtaagatctacattggggaccaagtgcagaaatcctctaagctgtaccgccgactctcagaagttctgggcttgaatgatgagaccatggtcctaagcgtcttcataggaaaaatcatcaccaacttgaagtactggggccgttgtgaaccaatcacctccaagacactacagcttctcaatgacctctccattgggtacagtagcgtaaggaagctagtgaagcttagtgcggtacagttcatgctgaacaatcacacgagcgagcacttttcatttttgggtattaacaatcagtccaacctgacagacatgcggtgtcggactaccttctacacagcacttgggcgtctcctcatggtggatttaggagaggatgaagatcagtatgagcagttcatgctgccactcacagcagcatttgaggctgtggcccagatgtttagcaccaatagtttcaacgagcaggaggcaaagcgaactctagttggcctagtaagagacctgagagggatcgctttcgctttcaatgccaagaccagcttcatgatgctctttgaaatggatatatccatcctatatgccaattctccaacgggcaatnganctctggtaccatgatccagcctgtactacccctgtactcaagttgatggctgnaattggttcaaaaanggcccancgactccagtttgatgtcncttcccccaatggcatctnactcttcccaaaaancnncaagaagataacatggtaggcaatccncatcntgannctaagaaaagtncccaaaggnatcaggtctntgccctgaaaccncaagggcatnccccctnngcttcccnagggngaanggcgncccccanggggaattaccnc

SEQ ID NO: 794 - DNA, 1236 bp, Homo Sapiens
  misc_feature (1)..(1): n is a, c, g, or t
  misc_feature (939)..(939): n is a, c, g, or t
  misc_feature (953)..(953): n is a, c, g, or t
  misc_feature (966)..(967): n is a, c, g, or t
  misc_feature (974)..(974): n is a, c, g, or t
  misc_feature (977)..(977): n is a, c, g, or t
  misc_feature (990)..(990): n is a, c, g, or t
  misc_feature (1004)..(1004): n is a, c, g, or t
  misc_feature (1023)..(1023): n is a, c, g, or t
  misc_feature (1028)..(1028): n is a, c, g, or t
  misc_feature (1043)..(1043): n is a, c, g, or t
  misc_feature (1077)..(1077): n is a, c, g, or t
  misc_feature (1083)..(1083): n is a, c, g, or t
  misc_feature (1086)..(1086): n is a, c, g, or t
  misc_feature (1088)..(1088): n is a, c, g, or t
  misc_feature (1094)..(1094): n is a, c, g, or t
  misc_feature (1100)..(1100): n is a, c, g, or t
  misc_feature (1111)..(1111): n is a, c, g, or t
  misc_feature (1126)..(1126): n is a, c, g, or t
  misc_feature (1143)..(1143): n is a, c, g, or t
  misc_feature (1153)..(1153): n is a, c, g, or t
  misc_feature (1157)..(1157): n is a, c, g, or t
  misc_feature (1170)..(1170): n is a, c, g, or t
  misc_feature (1173)..(1173): n is a, c, g, or t
  misc_feature (1191)..(1191): n is a, c, g, or t
  misc_feature (1209)..(1209): n is a, c, g, or t
  misc_feature (1216)..(1216): n is a, c, g, or t
  misc_feature (1226)..(1226): n is a, c, g, or t
nttagagaaattactatgagaggatcgcatcaccatcaccatcacggatcctatttaggtgacactatagaatcgtcgacccacgcgtccgcagaaatccttgccatgcatgaaagtgtcctcaagtgccccactccgggctgcacggggcgcgggcatgtcaacagcaacaggaactcccaccgaagcctctccggatgcccgatcgctgcagcagagaaactggccaaggcacaggaaaagcaccagagctgcgacgtgtccaagtccagccaggcctcggaccgcgtgctcaggccaatgtgctttgtgaagcagctggagattcctcagtatggctacagaaacaatgtccccacaactacgccgcgttccaacctggccaaggagctcgagaaatattccaagacctcgtttgaatacaacagttacgacaaccatacttatggcaagcgagccatagctcccaagcgaagcggtactgcaaggaccccagccccagcagcagcagcaccagcagctacgcgcccagcagcagcagcaacctgagctgcggcgggggcagcagcgccagcagcacgtgcagcaagagcagcttcgactacacgcacgacatggaggcggcccacatggcggccaccgccatcctcaacctgtccacgcgctgccgcgagatgccgcagaacctgagcaccaagccgcaggacctgtgcgccacgcggaaccctgacatggaggtggatgagaacgggaccctggacctcagcatgaacaagcagaggccgcggggacagctgctgccccatcctgacccctctggagcccatgtccccccagcagcaggcagtgatgaacaaccggtgttttccagctgggcgaagggcgactgctgggacttgccccgtaaactacaccaaaaatgaaacccccggagggatnagacaaggaagaantccaaagacattnncttccanaanaatttggaccccntttcaggaaggctnttaaaaaaaaaaacggttntcccngggggaaggtgaacnattccccaagttcccaaaaacccaaagttacccntccatnggncnaggggngaaccnaaaaaaggggnctttaatttaaacanttgttcccaaatttccnaagggttgtntaantgggaaaattggntcnattttaaactggggaaantttccccccctcccaaanaaaaaantttttttttnggggtggccc

SEQ ID NO: 795 - DNA, 1325 bp, Homo Sapiens
  misc_feature (1)..(1): n is a, c, g, or t
  misc_feature (878)..(878): n is a, c, g, or t
  misc_feature (926)..(926): n is a, c, g, or t
  misc_feature (932)..(932): n is a, c, g, or t
  misc_feature (934)..(934): n is a, c, g, or t
  misc_feature (939)..(939): n is a, c, g, or t
  misc_feature (990)..(990): n is a, c, g, or t
  misc_feature (1012)..(1012): n is a, c, g, or t
  misc_feature (1018)..(1018): n is a, c, g, or t
  misc_feature (1022)..(1022): n is a, c, g, or t
  misc_feature (1028)..(1028): n is a, c, g, or t
  misc_feature (1047)..(1047): n is a, c, g, or t
  misc_feature (1054)..(1055): n is a, c, g, or t
  misc_feature (1070)..(1070): n is a, c, g, or t
  misc_feature (1075)..(1075): n is a, c, g, or t
  misc_feature (1082)..(1083): n is a, c, g, or t
  misc_feature (1096)..(1096): n is a, c, g, or t
  misc_feature (1099)..(1099): n is a, c, g, or t
  misc_feature (1103)..(1104): n is a, c, g, or t
  misc_feature (1107)..(1107): n is a, c, g, or t
  misc_feature (1122)..(1122): n is a, c, g, or t
  misc_feature (1135)..(1135): n is a, c, g, or t
  misc_feature (1138)..(1139): n is a, c, g, or t
  misc_feature (1145)..(1145): n is a, c, g, or t
  misc_feature (1150)..(1150): n is a, c, g, or t
  misc_feature (1152)..(1152): n is a, c, g, or t
  misc_feature (1154)..(1154): n is a, c, g, or t
  misc_feature (1161)..(1161): n is a, c, g, or t
  misc_feature (1171)..(1171): n is a, c, g, or t
  misc_feature (1173)..(1174): n is a, c, g, or t
  misc_feature (1185)..(1185): n is a, c, g, or t
  misc_feature (1190)..(1190): n is a, c, g, or t
  misc_feature (1199)..(1199): n is a, c, g, or t
  misc_feature (1201)..(1203): n is a, c, g, or t
  misc_feature (1206)..(1206): n is a, c, g, or t
  misc_feature (1210)..(1210): n is a, c, g, or t
  misc_feature (1214)..(1214): n is a, c, g, or t
  misc_feature (1216)..(1216): n is a, c, g, or t
  misc_feature (1231)..(1231): n is a, c, g, or t
  misc_feature (1239)..(1239): n is a, c, g, or t
  misc_feature (1253)..(1253): n is a, c, g, or t
  misc_feature (1260)..(1260): n is a, c, g, or t
  misc_feature (1264)..(1264): n is a, c, g, or t
  misc_feature (1270)..(1270): n is a, c, g, or t
  misc_feature (1273)..(1273): n is a, c, g, or t
  misc_feature (1275)..(1275): n is a, c, g, or t
  misc_feature (1278)..(1278): n is a, c, g, or t
  misc_feature (1288)..(1288): n is a, c, g, or t
  misc_feature (1298)..(1299): n is a, c, g, or t
  misc_feature (1305)..(1305): n is a, c, g, or t
  misc_feature (1317)..(1317): n is a, c, g, or t
  misc_feature (1321)..(1322): n is a, c, g, or t
nttagagaaattactatgagaggatcgcatcaccatcaccatcacggatcctatttaggtgacactatagaatcgtcgacccacgcgtccgggcggggggagccggctgcggagggcgacggagcgcccggagccccggacatgtccaggcggaagcaggcgaagccgcgctcggtgaaagttgaagagggggaggcctcagacttctcgctggcctgggattcctccgtgacagcagcaggaggcctagaaggagagccagagtgcgatcagaaaaccagccgtgcgctggaagacaggaacagcgtgacaagtcaagaggagagaaatgaggatgatgaagacatggaggatgaatcaatttacacctgcgatcactgtcagcaggacttcgagtctctggcagacctgacggaccaccgggcccaccgctgtcctggagatggtgatgacgacccacaactctcctgggtggcctcgtctccctccagcaaggatgttgcgtcacccacgcagatgatcggagatggttgtgacctcggcctcggcgaggaggaagggggcacgggcctgccatacccttgccagttctgcgacaagtccttcatccgcttgagctacttgaagaggcacgagcagatccacagcgacaagctgccgttcaagtgcacctactgcagccgcctcttcaagcacaagaggagccgcgaccggcacatcaagctgcatacgggcgacaagaagtatcactgccacgagtgcgaggcagccttctcccgcagcgaccacctcaagatccacctgaagacccacagctccagcaagcccttcagtgcactgtgtgcaagcgcggcttctcctccaccagctcgctgcanagccacatgcaggcccacaaaagaacaaggagcatctggccaagtcgnaaaagnanccaanaaggacgacttcttgtgcgactactgcgaggacactttcacccaaacggangaactggaaaaacacgtgctcncccccncccncaactntccaaaaggcgacttgcantgcattnnctgccctgagtcttntccanaaaaaannctgttccccattntcnccannccncccaccaaaaacaanggctcctgggttnctnntgaatnccccncncnaaaaatncaaaagcccntnnaatggggcatnccaantaaattccngnnngcncccnccancntttggggtttttttncctatggncaaatccccctttntttttcngaantccccnccntnggnaaaccaaaanttttttcccnnaaaatnagggaaaaaccntttnnatg

SEQ ID NO: 796 - DNA, 1357 bp, Homo Sapiens
  misc_feature (943)..(943): n is a, c, g, or t
  misc_feature (993)..(993): n is a, c, g, or t
  misc_feature (1033)..(1033): n is a, c, g, or t
  misc_feature (1084)..(1084): n is a, c, g, or t
  misc_feature (1089)..(1089): n is a, c, g, or t
  misc_feature (1100)..(1100): n is a, c, g, or t
  misc_feature (1110)..(1110): n is a, c, g, or t
  misc_feature (1123)..(1123): n is a, c, g, or t
  misc_feature (1138)..(1138): n is a, c, g, or t
  misc_feature (1155)..(1155): n is a, c, g, or t
  misc_feature (1168)..(1168): n is a, c, g, or t
  misc_feature (1175)..(1175): n is a, c, g, or t
  misc_feature (1181)..(1181): n is a, c, g, or t
  misc_feature (1187)..(1187): n is a, c, g, or t
  misc_feature (1189)..(1189): n is a, c, g, or t
  misc_feature (1195)..(1195): n is a, c, g, or t
  misc_feature (1204)..(1204): n is a, c, g, or t
  misc_feature (1208)..(1208): n is a, c, g, or t
  misc_feature (1210)..(1210): n is a, c, g, or t
  misc_feature (1230)..(1230): n is a, c, g, or t
  misc_feature (1240)..(1240): n is a, c, g, or t
  misc_feature (1261)..(1261): n is a, c, g, or t
  misc_feature (1267)..(1267): n is a, c, g, or t
  misc_feature (1273)..(1274): n is a, c, g, or t
  misc_feature (1280)..(1280): n is a, c, g, or t
  misc_feature (1283)..(1283): n is a, c, g, or t
  misc_feature (1287)..(1287): n is a, c, g, or t
  misc_feature (1296)..(1296): n is a, c, g, or t
  misc_feature (1302)..(1302): n is a, c, g, or t
  misc_feature (1310)..(1312): n is a, c, g, or t
  misc_feature (1317)..(1318): n is a, c, g, or t
  misc_feature (1322)..(1324): n is a, c, g, or t
  misc_feature (1327)..(1327): n is a, c, g, or t
  misc_feature (1332)..(1332): n is a, c, g, or t
  misc_feature (1338)..(1340): n is a, c, g, or t
  misc_feature (1344)..(1344): n is a, c, g, or t
  misc_feature (1347)..(1347): n is a, c, g, or t
  misc_feature (1354)..(1354): n is a, c, g, or t
  misc_feature (1357)..(1357): n is a, c, g, or t
atagagaaattactatgagaggatcgcatcaccatcaccatcacggatcctatttaggtgacactatagaatcgtcgacccacgcgtccggcaggtcagcagattcctggctgcagcttggagggccccagactttgtgcctcgttactgtaaactctatgagcacttgcagagagcaggctccgagctgtttgggcctcgggcagccttcatgctggctctgcgcagtggcttctctggcgccttgctgcagcagtccttcctcactgctgctcacatgagtgagcagtttgccaggtacattgaccaacagatccagggtggcctgattggtggagcccctggagtggaaatgctggggcagcttcagcggcacctggaacccattatggtcctttctggtctggaactggccacaacttttgagcacttctatcagcattatatggcggaccgtctcctgagctttggttcgagctggctggagggggctgtgctagagcagattggcctctgttttcccaaccgcctcccacagctgatgctgcagagcctgagcacctctgaggagctgcagcgccagttccacctcttccagctccagcggctcgacaagttgttcttggagcaggaagatgaggaggaaaagagactagaggaagaggaggaggaagaggaggaagaggaagctgagaaagaattatttatcgaagatccaagtccagccatttctatactggtcctgtcaccacgctgctggcccgtctccccactctgctacctgtaccatcccagaaagtgccttcccacagaattctgtgatgcccttgaccgtttctccagtttctacagccagagtcagaaccatccagtcctggacatgggaccacatcggcgactgcagtggacgtggctgggccgggctgaactgcagtttgggaancaaatactgcatgtgtccaccgtgcaaatgtggctgctgctgaaattcantcaaacaaagaggtgtcagtaaaaaccttgctgaaggatnctgacctctccccaaaactgctgctccaggcactcgtgcccctcacctcanggaanggccctttgancctgcatganggccaagaatttnccaacgggggggggnctgcggcttcatgaacntgggccccacccnaaggggnagcccntggggntnaaaccncccccggcnaacngnaacttaaaaaaaaaaaaagnccaaccctgnaaaaaaaaaaaaatccttgancgtctntttttnnattccnaancccngggaaaagncccccnttaaaaannnttttnngggnnnaanccccnaaaaannnaaanccnggaaacnggn

SEQ ID NO: 797 - DNA, 1410 bp, Homo Sapiens
  misc_feature (1)..(2): n is a, c, g, or t
  misc_feature (901)..(901): n is a, c, g, or t
  misc_feature (926)..(926): n is a, c, g, or t
  misc_feature (931)..(931): n is a, c, g, or t
  misc_feature (939)..(939): n is a, c, g, or t
  misc_feature (943)..(943): n is a, c, g, or t
  misc_feature (956)..(956): n is a, c, g, or t
  misc_feature (992)..(992): n is a, c, g, or t
  misc_feature (994)..(994): n is a, c, g, or t
  misc_feature (997)..(997): n is a, c, g, or t
  misc_feature (1003)..(1003): n is a, c, g, or t
  misc_feature (1017)..(1017): n is a, c, g, or t
  misc_feature (1028)..(1028): n is a, c, g, or t
  misc_feature (1031)..(1031): n is a, c, g, or t
  misc_feature (1041)..(1041): n is a, c, g, or t
  misc_feature (1044)..(1044): n is a, c, g, or t
  misc_feature (1051)..(1051): n is a, c, g, or t
  misc_feature (1054)..(1054): n is a, c, g, or t
  misc_feature (1067)..(1067): n is a, c, g, or t
  misc_feature (1085)..(1085): n is a, c, g, or t
  misc_feature (1090)..(1090): n is a, c, g, or t
  misc_feature (1092)..(1092): n is a, c, g, or t
  misc_feature (1095)..(1095): n is a, c, g, or t
  misc_feature (1109)..(1109): n is a, c, g, or t
  misc_feature (1119)..(1119): n is a, c, g, or t
  misc_feature (1124)..(1124): n is a, c, g, or t
  misc_feature (1127)..(1127): n is a, c, g, or t
  misc_feature (1130)..(1130): n is a, c, g, or t
  misc_feature (1137)..(1137): n is a, c, g, or t
  misc_feature (1142)..(1143): n is a, c, g, or t
  misc_feature (1155)..(1155): n is a, c, g, or t
  misc_feature (1170)..(1170): n is a, c, g, or t
  misc_feature (1179)..(1179): n is a, c, g, or t
  misc_feature (1182)..(1182): n is a, c, g, or t
  misc_feature (1193)..(1194): n is a, c, g, or t
  misc_feature (1197)..(1197): n is a, c, g, or t
  misc_feature (1207)..(1207): n is a, c, g, or t
  misc_feature (1216)..(1216): n is a, c, g, or t
  misc_feature (1228)..(1228): n is a, c, g, or t
  misc_feature (1244)..(1244): n is a, c, g, or t
  misc_feature (1250)..(1250): n is a, c, g, or t
  misc_feature (1259)..(1259): n is a, c, g, or t
  misc_feature (1269)..(1269): n is a, c, g, or t
  misc_feature (1274)..(1274): n is a, c, g, or t
  misc_feature (1277)..(1277): n is a, c, g, or t
  misc_feature (1284)..(1284): n is a, c, g, or t
  misc_feature (1287)..(1287): n is a, c, g, or t
  misc_feature (1290)..(1290): n is a, c, g, or t
  misc_feature (1309)..(1309): n is a, c, g, or t
  misc_feature (1313)..(1313): n is a, c, g, or t
  misc_feature (1318)..(1318): n is a, c, g, or t
  misc_feature (1331)..(1331): n is a, c, g, or t
  misc_feature (1339)..(1339): n is a, c, g, or t
  misc_feature (1347)..(1347): n is a, c, g, or t
  misc_feature (1355)..(1356): n is a, c, g, or t
  misc_feature (1362)..(1362): n is a, c, g, or t
  misc_feature (1366)..(1366): n is a, c, g, or t
  misc_feature (1368)..(1369): n is a, c, g, or t
  misc_feature (1372)..(1372): n is a, c, g, or t
  misc_feature (1377)..(1377): n is a, c, g, or t
  misc_feature (1383)..(1384): n is a, c, g, or t
  misc_feature (1386)..(1386): n is a, c, g, or t
  misc_feature (1403)..(1403): n is a, c, g, or t
  misc_feature (1405)..(1405): n is a, c, g, or t
  misc_feature (1407)..(1407): n is a, c, g, or t
  misc_feature (1410)..(1410): n is a, c, g, or t
nntagagaaattactatgagaggatcgcatcaccatcaccatcacggatcctatttaggtgacactatagaatcgtcgacccacgcgtccgcagacccctgcacggagctgatgcgcacagataccagcatcgcctgcaccatgcctgagggggccctgccggctccggtgcctgtgtgtgtgcgcttcgagcgtcggggctgcgtgcacggcaacctcaccttctggtacatgcagaacccggtcatcacggccatcagtccccgccgcagccctgtcagtggcggcaggaccatcacagtggctggtgagcgtttccacatggtgcagaatgtgtccatggccgtccaccacattggccgggagcccacgctctgcaaggttctcaactccaccctcatcacctgcccgtcccccggggccctgagcaacgcatcagcgccagtggacttcttcatcaatgggcgggcctacgcagacgaggtggctgtggctgaggagctactggaccccgaggaggcacagcggggcagcaggttccgcctggactacctccccaacccacagttctctacggccaagagggagaagtggatcaagcaccaccccggggagcctctcaccctcgttatccacaaggagcaggacagcctggggctccagagtcacgagtaccgggtcaagataggccaagtaagctgcgacatccagattgtctctgacagaatcatccactgctcggtcaacgagtccctgggcgcggccgtggggcagctgcccatcacaatccaggtagggaacttcaaccagaccatcgccacactgcagctggggggcagcgagacggccatcatcgtgtccatcgtcatctgcagcgtcctgctgctgctctccgtggtgnccctgttcgtcttctgtaccaaganccgangtgctgancgtnactggcaaaaaancctgctgcaaatggagaaaatggaatctcaaatccnanagnaatccncaaaggcttccttnaactgcaaaanaanttgaaaaatntcncaagganctnaaccccaccaggncatcccctttcttgaaanaaaananttnttgaccccaccttnttcccaaagntttcntcnttnaaaaaanggtanntgttgccttccnaaacctcaatcccanggaattccnagnaaagaaaaccnnccnttgtgggaanggaaaattntgaaaattccgnccaaataaaaagaaanaatttntttcttaantaaaaaaaanttttnttntttttcnccnttnaaaaaaaaaaattttgggnaaangaacntcctttttattcnttgggaantgaaaaanccttaaannttgggntttnannccnaaaanaatttnngnaaattgggaaaaccacntntnttn

SEQ ID NO: 798 - DNA, 1407 bp, Homo Sapiens
  misc_feature (499)..(499): n is a, c, g, or t
  misc_feature (556)..(556): n is a, c, g, or t
  misc_feature (589)..(589): n is a, c, g, or t
  misc_feature (618)..(618): n is a, c, g, or t
  misc_feature (637)..(637): n is a, c, g, or t
  misc_feature (656)..(656): n is a, c, g, or t
  misc_feature (660)..(660): n is a, c, g, or t
  misc_feature (665)..(665): n is a, c, g, or t
  misc_feature (673)..(673): n is a, c, g, or t
  misc_feature (685)..(685): n is a, c, g, or t
  misc_feature (694)..(694): n is a, c, g, or t
  misc_feature (703)..(703): n is a, c, g, or t
  misc_feature (724)..(724): n is a, c, g, or t
  misc_feature (727)..(727): n is a, c, g, or t
  misc_feature (732)..(732): n is a, c, g, or t
  misc_feature (742)..(742): n is a, c, g, or t
  misc_feature (745)..(745): n is a, c, g, or t
  misc_feature (749)..(749): n is a, c, g, or t
  misc_feature (757)..(757): n is a, c, g, or t
  misc_feature (766)..(766): n is a, c, g, or t
  misc_feature (768)..(768): n is a, c, g, or t
  misc_feature (783)..(783): n is a, c, g, or t
  misc_feature (785)..(786): n is a, c, g, or t
  misc_feature (801)..(801): n is a, c, g, or t
  misc_feature (803)..(804): n is a, c, g, or t
  misc_feature (817)..(818): n is a, c, g, or t
  misc_feature (829)..(829): n is a, c, g, or t
  misc_feature (833)..(833): n is a, c, g, or t
  misc_feature (837)..(837): n is a, c, g, or t
  misc_feature (840)..(841): n is a, c, g, or t
  misc_feature (843)..(843): n is a, c, g, or t
  misc_feature (848)..(848): n is a, c, g, or t
  misc_feature (850)..(850): n is a, c, g, or t
  misc_feature (853)..(854): n is a, c, g, or t
  misc_feature (856)..(857): n is a, c, g, or t
  misc_feature (860)..(860): n is a, c, g, or t
  misc_feature (865)..(865): n is a, c, g, or t
  misc_feature (867)..(867): n is a, c, g, or t
  misc_feature (870)..(870): n is a, c, g, or t
  misc_feature (874)..(875): n is a, c, g, or t
  misc_feature (877)..(878): n is a, c, g, or t
  misc_feature (880)..(880): n is a, c, g, or t
  misc_feature (889)..(890): n is a, c, g, or t
  misc_feature (893)..(893): n is a, c, g, or t
  misc_feature (896)..(896): n is a, c, g, or t
  misc_feature (903)..(903): n is a, c, g, or t
  misc_feature (908)..(908): n is a, c, g, or t
  misc_feature (910)..(910): n is a, c, g, or t
  misc_feature (917)..(918): n is a, c, g, or t
  misc_feature (927)..(927): n is a, c, g, or t
  misc_feature (930)..(931): n is a, c, g, or t
  misc_feature (933)..(933): n is a, c, g, or t
  misc_feature (938)..(938): n is a, c, g, or t
  misc_feature (946)..(946): n is a, c, g, or t
  misc_feature (953)..(955): n is a, c, g, or t
  misc_feature (958)..(958): n is a, c, g, or t
  misc_feature (964)..(964): n is a, c, g, or t
  misc_feature (969)..(970): n is a, c, g, or t
  misc_feature (974)..(974): n is a, c, g, or t
  misc_feature (977)..(977): n is a, c, g, or t
  misc_feature (980)..(980): n is a, c, g, or t
  misc_feature (984)..(984): n is a, c, g, or t
  misc_feature (990)..(990): n is a, c, g, or t
  misc_feature (1001)..(1001): n is a, c, g, or t
  misc_feature (1003)..(1003): n is a, c, g, or t
  misc_feature (1007)..(1007): n is a, c, g, or t
  misc_feature (1029)..(1029): n is a, c, g, or t
  misc_feature (1038)..(1038): n is a, c, g, or t
  misc_feature (1045)..(1045): n is a, c, g, or t
  misc_feature (1054)..(1054): n is a, c, g, or t
  misc_feature (1056)..(1056): n is a, c, g, or t
  misc_feature (1058)..(1059): n is a, c, g, or t
  misc_feature (1062)..(1063): n is a, c, g, or t
  misc_feature (1069)..(1069): n is a, c, g, or t
  misc_feature (1071)..(1071): n is a, c, g, or t
  misc_feature (1073)..(1073): n is a, c, g, or t
  misc_feature (1093)..(1093): n is a, c, g, or t
  misc_feature (1098)..(1098): n is a, c, g, or t
  misc_feature (1102)..(1102): n is a, c, g, or t
  misc_feature (1105)..(1105): n is a, c, g, or t
  misc_feature (1111)..(1111): n is a, c, g, or t
  misc_feature (1113)..(1114): n is a, c, g, or t
  misc_feature (1116)..(1117): n is a, c, g, or t
  misc_feature (1132)..(1132): n is a, c, g, or t
  misc_feature (1137)..(1139): n is a, c, g, or t
  misc_feature (1143)..(1143): n is a, c, g, or t
  misc_feature (1150)..(1151): n is a, c, g, or t
  misc_feature (1156)..(1156): n is a, c, g, or t
  misc_feature (1158)..(1158): n is a, c, g, or t
  misc_feature (1160)..(1160): n is a, c, g, or t
  misc_feature (1166)..(1166): n is a, c, g, or t
  misc_feature (1171)..(1172): n is a, c, g, or t
  misc_feature (1180)..(1180): n is a, c, g, or t
  misc_feature (1186)..(1186): n is a, c, g, or t
  misc_feature (1188)..(1188): n is a, c, g, or t
  misc_feature (1190)..(1190): n is a, c, g, or t
  misc_feature (1199)..(1199): n is a, c, g, or t
  misc_feature (1202)..(1202): n is a, c, g, or t
  misc_feature (1206)..(1207): n is a, c, g, or t
  misc_feature (1212)..(1212): n is a, c, g, or t
  misc_feature (1214)..(1215): n is a, c, g, or t
  misc_feature (1217)..(1217): n is a, c, g, or t
  misc_feature (1219)..(1225): n is a, c, g, or t
  misc_feature (1232)..(1232): n is a, c, g, or t
  misc_feature (1236)..(1237): n is a, c, g, or t
  misc_feature (1239)..(1239): n is a, c, g, or t
  misc_feature (1243)..(1243): n is a, c, g, or t
  misc_feature (1245)..(1245): n is a, c, g, or t
  misc_feature (1247)..(1247): n is a, c, g, or t
  misc_feature (1249)..(1249): n is a, c, g, or t
  misc_feature (1259)..(1259): n is a, c, g, or t
  misc_feature (1265)..(1265): n is a, c, g, or t
  misc_feature (1271)..(1271): n is a, c, g, or t
  misc_feature (1273)..(1275): n is a, c, g, or t
  misc_feature (1277)..(1277): n is a, c, g, or t
  misc_feature (1279)..(1280): n is a, c, g, or t
  misc_feature (1282)..(1282): n is a, c, g, or t
  misc_feature (1284)..(1284): n is a, c, g, or t
  misc_feature (1286)..(1286): n is a, c, g, or t
  misc_feature (1289)..(1289): n is a, c, g, or t
  misc_feature (1292)..(1292): n is a, c, g, or t
  misc_feature (1299)..(1301): n is a, c, g, or t
  misc_feature (1309)..(1310): n is a, c, g, or t
  misc_feature (1312)..(1313): n is a, c, g, or t
  misc_feature (1319)..(1319): n is a, c, g, or t
  misc_feature (1324)..(1325): n is a, c, g, or t
  misc_feature (1331)..(1331): n is a, c, g, or t
  misc_feature (1334)..(1337): n is a, c, g, or t
  misc_feature (1343)..(1343): n is a, c, g, or t
  misc_feature (1345)..(1345): n is a, c, g, or t
  misc_feature (1352)..(1352): n is a, c, g, or t
  misc_feature (1360)..(1363): n is a, c, g, or t
  misc_feature (1367)..(1367): n is a, c, g, or t
  misc_feature (1369)..(1369): n is a, c, g, or t
  misc_feature (1371)..(1371): n is a, c, g, or t
  misc_feature (1373)..(1373): n is a, c, g, or t
  misc_feature (1378)..(1378): n is a, c, g, or t
  misc_feature (1381)..(1382): n is a, c, g, or t
  misc_feature (1386)..(1387): n is a, c, g, or t
  misc_feature (1390)..(1390): n is a, c, g, or t
  misc_feature (1395)..(1395): n is a, c, g, or t
  misc_feature (1399)..(1401): n is a, c, g, or t
  misc_feature (1404)..(1404): n is a, c, g, or t
atttagagaaaattacttatgagaggatcgcatcaccatcaccatcacggtatcctatttaggtgacactatagaatcgtcgacccacgcgtccgcgggagggcagggccgacggacggcgggcggcggcggcggtggcggcgctggagtcggcgcgggtgctggcgccatggaggccgagcggggtcccgagcgccggcctgcggagcgtagcagcccgggccagacgccggaggagggcgcgcaggccttggccgagttcgcggcgctgcacggcccggcgctgcgcgcttcgggggtccccgaacgttactggggccgcctcctgcacaagctggagcacgaggttttcgacgctggggaagtgtttgggatcatgcaagtggaggaggtagaagaggaggaggacgaggcagcccgggaggtgcggaagcagcagcccaacccggggaacgagctgtgctacaaggtcatcgtgaccagagagagcgggctccangcagcccaccccaacagcatcttcctcatcgaccacgcctggacgtgccgtgtggancatgcgcgccagcagctgcaacaggtgcccggnctgctgcaccgcatggccaacctgatggncattgatttccacggtganctgcccagtacataagctntggncctgntgctggangagatgtggaanttcaaccanacctactanctggcccatgggacagctganganaagangccggtgtgntanatcntggactanttcagttcncngatccatcaatccgnanntgcccaaacttcacnannccaaccttctttnnaaaattgccanaaancaanttnncntaacncnctnntnnttnccccntnaangaanntnnanttcttgtcnnaanaanttgaccnataananttttgcnntaaataaanttnnanccccnttaatccnaaaatannntgnttcttnccttnnaccnccnacnaaantttttngtaattttttntntatnaaaatactataaccccaccctnaaatctctnccaaaangatattttnantnntcnntcaaanantntttagatttaaaattatttnaaatnttcnttnttacancnntnntattttaattaaaanccttnnncatnttatatnnttttncntnatattnttatnnctaaaatnttttcnancnttttttaanttntcanntttcntnntnannnnnnnaaacatntatnntntttnancnanaattatatanaaaaanttattntnnnantnntncntnttnctntatatcnnntcctcctnntnnaaaaanttttnnatatantannnntaatanantttaaantatatctnnnnctanantncnttatnatnnatannatncaatnaatnnntcnatt

SEQ ID NO: 799 - DNA, 1335 bp, Homo Sapiens
  misc_feature (940)..(940): n is a, c, g, or t
  misc_feature (946)..(946): n is a, c, g, or t
  misc_feature (949)..(949): n is a, c, g, or t
  misc_feature (966)..(966): n is a, c, g, or t
  misc_feature (994)..(994): n is a, c, g, or t
  misc_feature (1041)..(1041): n is a, c, g, or t
  misc_feature (1044)..(1044): n is a, c, g, or t
  misc_feature (1060)..(1060): n is a, c, g, or t
  misc_feature (1071)..(1071): n is a, c, g, or t
  misc_feature (1088)..(1088): n is a, c, g, or t
  misc_feature (1108)..(1108): n is a, c, g, or t
  misc_feature (1112)..(1112): n is a, c, g, or t
  misc_feature (1120)..(1120): n is a, c, g, or t
  misc_feature (1124)..(1124): n is a, c, g, or t
  misc_feature (1139)..(1139): n is a, c, g, or t
  misc_feature (1147)..(1147): n is a, c, g, or t
  misc_feature (1155)..(1156): n is a, c, g, or t
  misc_feature (1163)..(1163): n is a, c, g, or t
  misc_feature (1172)..(1172): n is a, c, g, or t
  misc_feature (1178)..(1179): n is a, c, g, or t
  misc_feature (1182)..(1182): n is a, c, g, or t
  misc_feature (1188)..(1188): n is a, c, g, or t
  misc_feature (1190)..(1190): n is a, c, g, or t
  misc_feature (1197)..(1197): n is a, c, g, or t
  misc_feature (1200)..(1200): n is a, c, g, or t
  misc_feature (1202)..(1202): n is a, c, g, or t
  misc_feature (1217)..(1217): n is a, c, g, or t
  misc_feature (1225)..(1225): n is a, c, g, or t
  misc_feature (1227)..(1227): n is a, c, g, or t
  misc_feature (1237)..(1237): n is a, c, g, or t
  misc_feature (1242)..(1242): n is a, c, g, or t
  misc_feature (1245)..(1245): n is a, c, g, or t
  misc_feature (1256)..(1257): n is a, c, g, or t
  misc_feature (1260)..(1261): n is a, c, g, or t
  misc_feature (1263)..(1263): n is a, c, g, or t
  misc_feature (1270)..(1270): n is a, c, g, or t
  misc_feature (1273)..(1273): n is a, c, g, or t
  misc_feature (1275)..(1275): n is a, c, g, or t
  misc_feature (1279)..(1281): n is a, c, g, or t
  misc_feature (1285)..(1286): n is a, c, g, or t
  misc_feature (1296)..(1297): n is a, c, g, or t
  misc_feature (1301)..(1302): n is a, c, g, or t
  misc_feature (1307)..(1307): n is a, c, g, or t
  misc_feature (1309)..(1310): n is a, c, g, or t
  misc_feature (1314)..(1314): n is a, c, g, or t
  misc_feature (1326)..(1326): n is a, c, g, or t
  misc_feature (1329)..(1329): n is a, c, g, or t
  misc_feature (1331)..(1334): n is a, c, g, or t
tagagaaattactatgagaggatcgcatcaccatcaccatcacggatcctatttaggtgacactatagaatcgtcgacccacgcgtccggaaacttttcaacttggagcctgccattcagcgttgaggtagatgagttccgacactgtcacggctgtgttcccagcagcgaaggcctctgcggagctgccagtcgtcttgaacgtgcatgggcggcgtgtgacatctccagggaggccgtccgaagtcgagaatcgtcagctgtaagtaggagctacacagcgcagagaaaatggaaccacccatccgtgaggcctctttccggagggagccgcacacttggacttgagagtttgccagcagcgagctcggatgcatctctccaaaagccaccaaggtcggcgcgtctgaagagcgttttgcggtcatcagacttcctcatctgaaaacacagaacatactgaccctttcaagtacttagtcattttcctgaaagtgtggtctgtttcagaatgctgtggcaaccaggtaggtgtggcactggccatgtgccacgtctttgccctttgtagtctgtcagatattaaagtttctaaccctgtttttttaatctccaagaatggggaaagtggaatgtagagatggaagcagaacgtgatgtttggatacaacagctatttaatccttttttattttttaagcaaaacactcagttttctaccttattttctaatgttgatttcatggtaatactgacagttgggagtgtttaacataaaaactcattgctaaagagcactgaggaaatgggagctagcgcacttgtaataaaaataaagacaaaatattttcttgaatgcatatatgtgattgggtattttaaaaaccagtatcatctgtcatctccaaagattacaggagtcagcttgttaatacagtantgttantangttctgtatttttaatncagtacttaaaattctaggtcctttatngcccaaagtcacccagttagtttaaaccacaaactctgtcttggggncanataatgggggcggggnaatgacttgcntaaaatcccccacctgnaaaaaagctgaacgggcttnagcnttgcaaanggancgggttgcccccctngccccggnatttctgnnccctccngctccaggnttattnngcntgcccntnaaaccanganangaggcctcaggtggnaaaaaccntncctgttatcnaggtnccnaaaaaacctgnnacnnanggggggnccntncccnnngggnntcaaaaaaanngggnnaaaancnntttnaaaaattttaanccngnnnna

SEQ ID NO: 800 - DNA, 1200 bp, Homo Sapiens
  misc_feature (934)..(934): n is a, c, g, or t
  misc_feature (949)..(949): n is a, c, g, or t
  misc_feature (1033)..(1033): n is a, c, g, or t
  misc_feature (1051)..(1051): n is a, c, g, or t
  misc_feature (1067)..(1067): n is a, c, g, or t
  misc_feature (1100)..(1100): n is a, c, g, or t
  misc_feature (1112)..(1112): n is a, c, g, or t
  misc_feature (1117)..(1117): n is a, c, g, or t
  misc_feature (1131)..(1131): n is a, c, g, or t
  misc_feature (1145)..(1145): n is a, c, g, or t
  misc_feature (1155)..(1155): n is a, c, g, or t
  misc_feature (1176)..(1176): n is a, c, g, or t
  misc_feature (1180)..(1180): n is a, c, g, or t
  misc_feature (1183)..(1184): n is a, c, g, or t
  misc_feature (1186)..(1186): n is a, c, g, or t
  misc_feature (1192)..(1194): n is a, c, g, or t
tagagaaattactatgagaggatcgcatcaccatcaccatcacggatcctatttaggtgacactatagaatcgtcgacccacgcgtccgggactgggaagatggacgcagctactctgacctacgacactctccggtttgctgagtttgaagattttcctgagacctcagagcccgtttggatactgggtagaaaatacagcattttcacagaaaaggacgagatcttgtctgatgtggcatctagactttggtttacatacaggaaaaactttccagccattggggggacaggccccacctcggacacaggctggggctgcatgctgcggtgtggacagatgatctttgcccaagccctggtgtgccggcacctaggccgagattggaggtggacacaaaggaagaggcagccagacagctacttcagcgtcctcaacgcattcatcgacaggaaggacagttactactccattcaccagatagcgcaaatgggagttggcgaaggcaagtccataggccagtggtacgggcccaacactgtcgcccaggtcctgaagaagcttgctgtcttcgatacgtggagctccttggcggtccacattgcaatggacaacactgttgtgatggaggaaatcagaaggttgtgcaggaccagcgttccctgtgcaggcgccactgcgtttcctgcagattccgaccggcactgcaacggattccctgccggagctgaggtcaccaacaggccgtcgccatggagacccctggtacttctcattcccctgcgcctggggctcacggacatcaacgaggcctacgtggagacgctgaagcactgcttcatgatgccccagtccctgggcgtcatcggagggaagcccaacagcgcccactacttcatcggctacgttggtgaggagctcatctacctgganccccacaccacgcanccagccgtggaacccactgatggctgcttcatccggaaaaaagcttccattgcagcacccgcccgtgccccatgaacatcccgnaacttgacccgtccatcnctgtggggtttttctntaaaaatgaaaaagaacttcatgattggggccnccaatcaaaaanctgtntctgcttggagggncccgcccatgtttnactggggaanaaaaacctttaatttggctgncccnaanncngaaccnnncccaaa

SEQ ID NO: 801 - DNA, 1976 bp, Homo Sapiens
  misc_feature (6)..(7): n is a, c, g, or t
  misc_feature (15)..(15): n is a, c, g, or t
  misc_feature (24)..(24): n is a, c, g, or t
  misc_feature (28)..(29): n is a, c, g, or t
  misc_feature (40)..(40): n is a, c, g, or t
  misc_feature (43)..(44): n is a, c, g, or t
  misc_feature (50)..(50): n is a, c, g, or t
  misc_feature (56)..(56): n is a, c, g, or t
  misc_feature (60)..(61): n is a, c, g, or t
  misc_feature (63)..(63): n is a, c, g, or t
  misc_feature (69)..(69): n is a, c, g, or t
  misc_feature (74)..(74): n is a, c, g, or t
  misc_feature (76)..(76): n is a, c, g, or t
  misc_feature (82)..(83): n is a, c, g, or t
  misc_feature (95)..(95): n is a, c, g, or t
  misc_feature (98)..(98): n is a, c, g, or t
  misc_feature (105)..(105): n is a, c, g, or t
  misc_feature (107)..(107): n is a, c, g, or t
  misc_feature (116)..(116): n is a, c, g, or t
  misc_feature (132)..(132): n is a, c, g, or t
  misc_feature (137)..(137): n is a, c, g, or t
  misc_feature (140)..(140): n is a, c, g, or t
  misc_feature (152)..(153): n is a, c, g, or t
  misc_feature (158)..(159): n is a, c, g, or t
  misc_feature (162)..(162): n is a, c, g, or t
  misc_feature (166)..(168): n is a, c, g, or t
  misc_feature (176)..(177): n is a, c, g, or t
  misc_feature (180)..(180): n is a, c, g, or t
  misc_feature (192)..(192): n is a, c, g, or t
  misc_feature (196)..(197): n is a, c, g, or t
  misc_feature (200)..(201): n is a, c, g, or t
  misc_feature (204)..(204): n is a, c, g, or t
  misc_feature (207)..(207): n is a, c, g, or t
  misc_feature (210)..(212): n is a, c, g, or t
  misc_feature (217)..(217): n is a, c, g, or t
  misc_feature (226)..(227): n is a, c, g, or t
  misc_feature (234)..(234): n is a, c, g, or t
  misc_feature (239)..(239): n is a, c, g, or t
  misc_feature (245)..(246): n is a, c, g, or t
  misc_feature (249)..(249): n is a, c, g, or t
  misc_feature (256)..(256): n is a, c, g, or t
  misc_feature (258)..(258): n is a, c, g, or t
  misc_feature (260)..(260): n is a, c, g, or t
  misc_feature (265)..(265): n is a, c, g, or t
  misc_feature (271)..(272): n is a, c, g, or t
  misc_feature (274)..(274): n is a, c, g, or t
  misc_feature (284)..(286): n is a, c, g, or t
  misc_feature (288)..(289): n is a, c, g, or t
  misc_feature (291)..(291): n is a, c, g, or t
  misc_feature (296)..(297): n is a, c, g, or t
  misc_feature (302)..(302): n is a, c, g, or t
  misc_feature (307)..(307): n is a, c, g, or t
  misc_feature (309)..(309): n is a, c, g, or t
  misc_feature (312)..(313): n is a, c, g, or t
  misc_feature (315)..(315): n is a, c, g, or t
  misc_feature (324)..(324): n is a, c, g, or t
  misc_feature (326)..(326): n is a, c, g, or t
  misc_feature (331)..(331): n is a, c, g, or t
  misc_feature (335)..(335): n is a, c, g, or t
  misc_feature (339)..(339): n is a, c, g, or t
  misc_feature (343)..(343): n is a, c, g, or t
  misc_feature (345)..(345): n is a, c, g, or t
  misc_feature (347)..(347): n is a, c, g, or t
  misc_feature (351)..(352): n is a, c, g, or t
  misc_feature (354)..(354): n is a, c, g, or t
  misc_feature (371)..(371): n is a, c, g, or t
  misc_feature (373)..(374): n is a, c, g, or t
  misc_feature (378)..(378): n is a, c, g, or t
  misc_feature (381)..(381): n is a, c, g, or t
  misc_feature (389)..(389): n is a, c, g, or t
  misc_feature (392)..(392): n is a, c, g, or t
  misc_feature (395)..(395): n is a, c, g, or t
  misc_feature (401)..(401): n is a, c, g, or t
  misc_feature (410)..(410): n is a, c, g, or t
  misc_feature (416)..(417): n is a, c, g, or t
  misc_feature (422)..(423): n is a, c, g, or t
  misc_feature (434)..(436): n is a, c, g, or t
  misc_feature (438)..(438): n is a, c, g, or t
  misc_feature (441)..(441): n is a, c, g, or t
  misc_feature (446)..(446): n is a, c, g, or t
  misc_feature (458)..(459): n is a, c, g, or t
  misc_feature (465)..(467): n is a, c, g, or t
  misc_feature (473)..(473): n is a, c, g, or t
  misc_feature (475)..(475): n is a, c, g, or t
  misc_feature (477)..(477): n is a, c, g, or t
  misc_feature (480)..(480): n is a, c, g, or t
  misc_feature (484)..(484): n is a, c, g, or t
  misc_feature (491)..(491): n is a, c, g, or t
  misc_feature (493)..(494): n is a, c, g, or t
  misc_feature (496)..(496): n is a, c, g, or t
  misc_feature (498)..(498): n is a, c, g, or t
  misc_feature (501)..(501): n is a, c, g, or t
  misc_feature (506)..(506): n is a, c, g, or t
  misc_feature (512)..(513): n is a, c, g, or t
  misc_feature (515)..(515): n is a, c, g, or t
  misc_feature (524)..(525): n is a, c, g, or t
  misc_feature (527)..(529): n is a, c, g, or t
  misc_feature (532)..(532): n is a, c, g, or t
  misc_feature (534)..(535): n is a, c, g, or t
  misc_feature (541)..(544): n is a, c, g, or t
  misc_feature (546)..(546): n is a, c, g, or t
  misc_feature (551)..(551): n is a, c, g, or t
  misc_feature (555)..(555): n is a, c, g, or t
  misc_feature (557)..(557): n is a, c, g, or t
  misc_feature (559)..(560): n is a, c, g, or t
  misc_feature (562)..(562): n is a, c, g, or t
  misc_feature (564)..(564): n is a, c, g, or t
  misc_feature (566)..(566): n is a, c, g, or t
  misc_feature (571)..(571): n is a, c, g, or t
  misc_feature (579)..(579): n is a, c, g, or t
  misc_feature (585)..(586): n is a, c, g, or t
  misc_feature (589)..(590): n is a, c, g, or t
  misc_feature (601)..(601): n is a, c, g, or t
  misc_feature (603)..(605): n is a, c, g, or t
  misc_feature (607)..(607): n is a, c, g, or t
  misc_feature (609)..(610): n is a, c, g, or t
  misc_feature (613)..(613): n is a, c, g, or t
  misc_feature (616)..(616): n is a, c, g, or t
  misc_feature (620)..(620): n is a, c, g, or t
  misc_feature (625)..(625): n is a, c, g, or t
  misc_feature (628)..(628): n is a, c, g, or t
  misc_feature (631)..(634): n is a, c, g, or t
  misc_feature (637)..(637): n is a, c, g, or t
  misc_feature (640)..(640): n is a, c, g, or t
  misc_feature (643)..(644): n is a, c, g, or t
  misc_feature (646)..(646): n is a, c, g, or t
  misc_feature (649)..(649): n is a, c, g, or t
  misc_feature (653)..(653): n is a, c, g, or t
  misc_feature (656)..(656): n is a, c, g, or t
  misc_feature (659)..(661): n is a, c, g, or t
  misc_feature (664)..(664): n is a, c, g, or t
  misc_feature (668)..(669): n is a, c, g, or t
  misc_feature (674)..(674): n is a, c, g, or t
  misc_feature (676)..(676): n is a, c, g, or t
  misc_feature (684)..(684): n is a, c, g, or t
  misc_feature (689)..(689): n is a, c, g, or t
  misc_feature (691)..(691): n is a, c, g, or t
  misc_feature (693)..(695): n is a, c, g, or t
  misc_feature (697)..(701): n is a, c, g, or t
  misc_feature (705)..(706): n is a, c, g, or t
  misc_feature (712)..(713): n is a, c, g, or t
  misc_feature (719)..(719): n is a, c, g, or t
  misc_feature (724)..(724): n is a, c, g, or t
  misc_feature (726)..(726): n is a, c, g, or t
  misc_feature (730)..(730): n is a, c, g, or t
  misc_feature (734)..(734): n is a, c, g, or t
  misc_feature (737)..(738): n is a, c, g, or t
  misc_feature (740)..(740): n is a, c, g, or t
  misc_feature (742)..(743): n is a, c, g, or t
  misc_feature (749)..(749): n is a, c, g, or t
  misc_feature (751)..(751): n is a, c, g, or t
  misc_feature (755)..(756): n is a, c, g, or t
  misc_feature (760)..(764): n is a, c, g, or t
  misc_feature (766)..(766): n is a, c, g, or t
  misc_feature (768)..(769): n is a, c, g, or t
  misc_feature (772)..(772): n is a, c, g, or t
  misc_feature (775)..(775): n is a, c, g, or t
  misc_feature (777)..(777): n is a, c, g, or t
  misc_feature (784)..(785): n is a, c, g, or t
  misc_feature (788)..(788): n is a, c, g, or t
  misc_feature (791)..(793): n is a, c, g, or t
  misc_feature (796)..(797): n is a, c, g, or t
  misc_feature (806)..(806): n is a, c, g, or t
  misc_feature (809)..(809): n is a, c, g, or t
  misc_feature (813)..(814): n is a, c, g, or t
  misc_feature (825)..(825): n is a, c, g, or t
  misc_feature (830)..(830): n is a, c, g, or t
  misc_feature (833)..(833): n is a, c, g, or t
  misc_feature (838)..(839): n is a, c, g, or t
  misc_feature (844)..(844): n is a, c, g, or t
  misc_feature (847)..(847): n is a, c, g, or t
  misc_feature (854)..(854): n is a, c, g, or t
  misc_feature (858)..(858): n is a, c, g, or t
  misc_feature (870)..(870): n is a, c, g, or t
  misc_feature (872)..(872): n is a, c, g, or t
  misc_feature (874)..(875): n is a, c, g, or t
  misc_feature (878)..(878): n is a, c, g, or t
  misc_feature (881)..(881): n is a, c, g, or t
  misc_feature (884)..(884): n is a, c, g, or t
  misc_feature (891)..(892): n is a, c, g, or t
  misc_feature (896)..(898): n is a, c, g, or t
  misc_feature (901)..(901): n is a, c, g, or t
  misc_feature (906)..(907): n is a, c, g, or t
  misc_feature (909)..(909): n is a, c, g, or t
  misc_feature (916)..(916): n is a, c, g, or t
  misc_feature (918)..(918): n is a, c, g, or t
  misc_feature (925)..(925): n is a, c, g, or t
  misc_feature (927)..(927): n is a, c, g, or t
  misc_feature (931)..(931): n is a, c, g, or t
  misc_feature (933)..(933): n is a, c, g, or t
  misc_feature (938)..(938): n is a, c, g, or t
  misc_feature (943)..(945): n is a, c, g, or t
  misc_feature (949)..(949): n is a, c, g, or t
  misc_feature (951)..(951): n is a, c, g, or t
  misc_feature (953)..(955): n is a, c, g, or t
  misc_feature (962)..(963): n is a, c, g, or t
  misc_feature (966)..(966): n is a, c, g, or t
  misc_feature (969)..(969): n is a, c, g, or t
  misc_feature (973)..(973): n is a, c, g, or t
  misc_feature (975)..(977): n is a, c, g, or t
  misc_feature (988)..(989): n is a, c, g, or t
  misc_feature (996)..(996): n is a, c, g, or t
  misc_feature (998)..(998): n is a, c, g, or t
  misc_feature (1000)..(1001): n is a, c, g, or t
  misc_feature (1004)..(1004): n is a, c, g, or t
  misc_feature (1006)..(1008): n is a, c, g, or t
  misc_feature (1013)..(1013): n is a, c, g, or t
  misc_feature (1015)..(1015): n is a, c, g, or t
  misc_feature (1022)..(1024): n is a, c, g, or t
  misc_feature (1031)..(1031): n is a, c, g, or t
  misc_feature (1034)..(1034): n is a, c, g, or t
  misc_feature (1039)..(1039): n is a, c, g, or t
  misc_feature (1042)..(1043): n is a, c, g, or t
  misc_feature (1046)..(1046): n is a, c, g, or t
  misc_feature (1050)..(1050): n is a, c, g, or t
  misc_feature (1056)..(1057): n is a, c, g, or t
  misc_feature (1063)..(1063): n is a, c, g, or t
  misc_feature (1065)..(1065): n is a, c, g, or t
  misc_feature (1067)..(1067): n is a, c, g, or t
  misc_feature (1069)..(1069): n is a, c, g, or t
  misc_feature (1073)..(1073): n is a, c, g, or t
  misc_feature (1075)..(1075): n is a, c, g, or t
  misc_feature (1077)..(1077): n is a, c, g, or t
  misc_feature (1079)..(1079): n is a, c, g, or t
  misc_feature (1081)..(1081): n is a, c, g, or t
  misc_feature (1083)..(1084): n is a, c, g, or t
  misc_feature (1086)..(1087): n is a, c, g, or t
  misc_feature (1089)..(1089): n is a, c, g, or t
  misc_feature (1095)..(1095): n is a, c, g, or t
  misc_feature (1097)..(1097): n is a, c, g, or t
  misc_feature (1100)..(1100): n is a, c, g, or t
  misc_feature (1103)..(1103): n is a, c, g, or t
  misc_feature (1107)..(1107): n is a, c, g, or t
  misc_feature (1109)..(1109): n is a, c, g, or t
  misc_feature (1111)..(1114): n is a, c, g, or t
  misc_feature (1116)..(1116): n is a, c, g, or t
  misc_feature (1120)..(1120): n is a, c, g, or t
  misc_feature (1126)..(1126): n is a, c, g, or t
  misc_feature (1129)..(1129): n is a, c, g, or t
  misc_feature (1134)..(1136): n is a, c, g, or t
  misc_feature (1139)..(1139): n is a, c, g, or t
  misc_feature (1145)..(1145): n is a, c, g, or t
  misc_feature (1148)..(1148): n is a, c, g, or t
  misc_feature (1150)..(1150): n is a, c, g, or t
  misc_feature (1154)..(1155): n is a, c, g, or t
  misc_feature (1161)..(1161): n is a, c, g, or t
  misc_feature (1163)..(1163): n is a, c, g, or t
  misc_feature (1166)..(1166): n is a, c, g, or t
  misc_feature (1168)..(1169): n is a, c, g, or t
  misc_feature (1172)..(1172): n is a, c, g, or t
  misc_feature (1174)..(1174): n is a, c, g, or t
  misc_feature (1177)..(1177): n is a, c, g, or t
  misc_feature (1180)..(1181): n is a, c, g, or t
  misc_feature (1184)..(1184): n is a, c, g, or t
  misc_feature (1186)..(1186): n is a, c, g, or t
  misc_feature (1188)..(1188): n is a, c, g, or t
  misc_feature (1190)..(1190): n is a, c, g, or t
  misc_feature (1192)..(1192): n is a, c, g, or t
  misc_feature (1196)..(1196): n is a, c, g, or t
  misc_feature (1198)..(1199): n is a, c, g, or t
  misc_feature (1206)..(1207): n is a, c, g, or t
  misc_feature (1212)..(1212): n is a, c, g, or t
  misc_feature (1218)..(1218): n is a, c, g, or t
  misc_feature (1223)..(1226): n is a, c, g, or t
  misc_feature (1228)..(1228): n is a, c, g, or t
  misc_feature (1231)..(1231): n is a, c, g, or t
  misc_feature (1233)..(1233): n is a, c, g, or t
  misc_feature (1236)..(1239): n is a, c, g, or t
  misc_feature (1241)..(1241): n is a, c, g, or t
  misc_feature (1244)..(1244): n is a, c, g, or t
  misc_feature (1253)..(1253): n is a, c, g, or t
  misc_feature (1255)..(1255): n is a, c, g, or t
  misc_feature (1258)..(1260): n is a, c, g, or t
  misc_feature (1264)..(1264): n is a, c, g, or t
  misc_feature (1269)..(1269): n is a, c, g, or t
  misc_feature (1271)..(1271): n is a, c, g, or t
  misc_feature (1275)..(1275): n is a, c, g, or t
  misc_feature (1279)..(1279): n is a, c, g, or t
  misc_feature (1286)..(1287): n is a, c, g, or t
  misc_feature (1289)..(1290): n is a, c, g, or t
  misc_feature (1292)..(1292): n is a, c, g, or t
  misc_feature (1296)..(1297): n is a, c, g, or t
  misc_feature (1299)..(1300): n is a, c, g, or t
  misc_feature (1302)..(1302): n is a, c, g, or t
  misc_feature (1304)..(1304): n is a, c, g, or t
  misc_feature (1306)..(1307): n is a, c, g, or t
  misc_feature (1309)..(1309): n is a, c, g, or t
  misc_feature (1312)..(1315): n is a, c, g, or t
  misc_feature (1317)..(1318): n is a, c, g, or t
  misc_feature (1322)..(1324): n is a, c, g, or t
  misc_feature (1328)..(1328): n is a, c, g, or t
  misc_feature (1332)..(1332): n is a, c, g, or t
  misc_feature (1338)..(1338): n is a, c, g, or t
  misc_feature (1345)..(1345): n is a, c, g, or t
  misc_feature (1350)..(1351): n is a, c, g, or t
  misc_feature (1353)..(1353): n is a, c, g, or t
  misc_feature (1355)..(1355): n is a, c, g, or t
  misc_feature (1362)..(1362): n is a, c, g, or t
  misc_feature (1365)..(1367): n is a, c, g, or t
  misc_feature (1369)..(1371): n is a, c, g, or t
  misc_feature (1373)..(1373): n is a, c, g, or t
  misc_feature (1375)..(1376): n is a, c, g, or t
  misc_feature (1384)..(1385): n is a, c, g, or t
  misc_feature (1390)..(1390): n is a, c, g, or t
  misc_feature (1392)..(1392): n is a, c, g, or t
  misc_feature (1395)..(1395): n is a, c, g, or t
  misc_feature (1402)..(1402): n is a, c, g, or t
  misc_feature (1409)..(1410): n is a, c, g, or t
  misc_feature (1413)..(1413): n is a, c, g, or t
  misc_feature (1417)..(1417): n is a, c, g, or t
  misc_feature (1420)..(1421): n is a, c, g, or t
  misc_feature (1424)..(1424): n is a, c, g, or t
  misc_feature (1431)..(1431): n is a, c, g, or t
  misc_feature (1434)..(1434): n is a, c, g, or t
  misc_feature (1437)..(1437): n is a, c, g, or t
  misc_feature (1441)..(1441): n is a, c, g, or t
  misc_feature (1444)..(1444): n is a, c, g, or t
  misc_feature (1447)..(1447): n is a, c, g, or t
  misc_feature (1450)..(1451): n is a, c, g, or t
  misc_feature (1455)..(1455): n is a, c, g, or t
  misc_feature (1464)..(1466): n is a, c, g, or t
  misc_feature (1469)..(1470): n is a, c, g, or t
  misc_feature (1473)..(1474): n is a, c, g, or t
  misc_feature (1479)..(1479): n is a, c, g, or t
  misc_feature (1481)..(1481): n is a, c, g, or t
  misc_feature (1484)..(1487): n is a, c, g, or t
  misc_feature (1495)..(1495): n is a, c, g, or t
  misc_feature (1503)..(1503): n is a, c, g, or t
  misc_feature (1505)..(1506): n is a, c, g, or t
  misc_feature (1508)..(1508): n is a, c, g, or t
  misc_feature (1510)..(1510): n is a, c, g, or t
  misc_feature (1512)..(1514): n is a, c, g, or t
  misc_feature (1521)..(1521): n is a, c, g, or t
  misc_feature (1525)..(1525): n is a, c, g, or t
  misc_feature (1527)..(1527): n is a, c, g, or t
  misc_feature (1530)..(1530): n is a, c, g, or t
  misc_feature (1535)..(1535): n is a, c, g, or t
  misc_feature (1537)..(1537): n is a, c, g, or t
  misc_feature (1539)..(1539): n is a, c, g, or t
  misc_feature (1545)..(1545): n is a, c, g, or t
  misc_feature (1547)..(1547): n is a, c, g, or t
  misc_feature (1554)..(1554): n is a, c, g, or t
  misc_feature (1559)..(1559): n is a, c, g, or t
  misc_feature (1563)..(1563): n is a, c, g, or t
  misc_feature (1567)..(1567): n is a, c, g, or t
  misc_feature (1570)..(1570): n is a, c, g, or t
  misc_feature (1572)..(1574): n is a, c, g, or t
  misc_feature (1579)..(1579): n is a, c, g, or t
  misc_feature (1588)..(1589): n is a, c, g, or t
  misc_feature (1592)..(1595): n is a, c, g, or t
  misc_feature (1598)..(1598): n is a, c, g, or t
  misc_feature (1600)..(1601): n is a, c, g, or t
  misc_feature (1606)..(1608): n is a, c, g, or t
  misc_feature (1610)..(1611): n is a, c, g, or t
  misc_feature (1613)..(1613): n is a, c, g, or t
  misc_feature (1616)..(1616): n is a, c, g, or t
  misc_feature (1618)..(1618): n is a, c, g, or t
  misc_feature (1622)..(1622): n is a, c, g, or t
  misc_feature (1627)..(1627): n is a, c, g, or t
  misc_feature (1630)..(1631): n is a, c, g, or t
  misc_feature (1636)..(1638): n is a, c, g, or t
  misc_feature (1640)..(1642): n is a, c, g, or t
  misc_feature (1644)..(1644): n is a, c, g, or t
  misc_feature (1646)..(1646): n is a, c, g, or t
  misc_feature (1648)..(1648): n is a, c, g, or t
  misc_feature (1651)..(1651): n is a, c, g, or t
  misc_feature (1653)..(1653): n is a, c, g, or t
  misc_feature (1664)..(1664): n is a, c, g, or t
  misc_feature (1669)..(1671): n is a, c, g, or t
  misc_feature (1674)..(1674): n is a, c, g, or t
  misc_feature (1679)..(1679): n is a, c, g, or t
  misc_feature (1681)..(1681): n is a, c, g, or t
  misc_feature (1683)..(1683): n is a, c, g, or t
  misc_feature (1685)..(1685): n is a, c, g, or t
  misc_feature (1688)..(1689): n is a, c, g, or t
  misc_feature (1692)..(1693): n is a, c, g, or t
  misc_feature (1695)..(1695): n is a, c, g, or t
  misc_feature (1697)..(1697): n is a, c, g, or t
  misc_feature (1702)..(1703): n is a, c, g, or t
  misc_feature (1705)..(1705): n is a, c, g, or t
  misc_feature (1711)..(1716): n is a, c, g, or t
  misc_feature (1718)..(1718): n is a, c, g, or t
  misc_feature (1721)..(1722): n is a, c, g, or t
  misc_feature (1726)..(1726): n is a, c, g, or t
  misc_feature (1729)..(1730): n is a, c, g, or t
  misc_feature (1734)..(1734): n is a, c, g, or t
  misc_feature (1737)..(1738): n is a, c, g, or t
  misc_feature (1742)..(1742): n is a, c, g, or t
  misc_feature (1744)..(1745): n is a, c, g, or t
  misc_feature (1755)..(1755): n is a, c, g, or t
  misc_feature (1758)..(1758): n is a, c, g, or t
  misc_feature (1761)..(1762): n is a, c, g, or t
  misc_feature (1765)..(1765): n is a, c, g, or t
  misc_feature (1767)..(1767): n is a, c, g, or t
  misc_feature (1772)..(1772): n is a, c, g, or t
  misc_feature (1775)..(1775): n is a, c, g, or t
  misc_feature (1777)..(1777): n is a, c, g, or t
  misc_feature (1786)..(1786): n is a, c, g, or t
  misc_feature (1791)..(1792): n is a, c, g, or t
  misc_feature (1800)..(1800): n is a, c, g, or t
  misc_feature (1804)..(1804): n is a, c, g, or t
  misc_feature (1806)..(1809): n is a, c, g, or t
  misc_feature (1811)..(1811): n is a, c, g, or t
  misc_feature (1813)..(1816): n is a, c, g, or t
  misc_feature (1818)..(1818): n is a, c, g, or t
  misc_feature (1820)..(1820): n is a, c, g, or t
  misc_feature (1822)..(1822): n is a, c, g, or t
  misc_feature (1828)..(1828): n is a, c, g, or t
  misc_feature (1831)..(1831): n is a, c, g, or t
  misc_feature (1838)..(1838): n is a, c, g, or t
  misc_feature (1842)..(1842): n is a, c, g, or t
  misc_feature (1846)..(1846): n is a, c, g, or t
  misc_feature (1849)..(1852): n is a, c, g, or t
  misc_feature (1855)..(1855): n is a, c, g, or t
  misc_feature (1857)..(1858): n is a, c, g, or t
  misc_feature (1860)..(1860): n is a, c, g, or t
  misc_feature (1862)..(1862): n is a, c, g, or t
  misc_feature (1868)..(1868): n is a, c, g, or t
  misc_feature (1870)..(1872): n is a, c, g, or t
  misc_feature (1874)..(1874): n is a, c, g, or t
  misc_feature (1877)..(1877): n is a, c, g, or t
  misc_feature (1880)..(1880): n is a, c, g, or t
  misc_feature (1885)..(1885): n is a, c, g, or t
  misc_feature (1888)..(1889): n is a, c, g, or t
  misc_feature (1892)..(1892): n is a, c, g, or t
  misc_feature (1905)..(1907): n is a, c, g, or t
  misc_feature (1911)..(1911): n is a, c, g, or t
  misc_feature (1914)..(1914): n is a, c, g, or t
  misc_feature (1918)..(1918): n is a, c, g, or t
  misc_feature (1927)..(1927): n is a, c, g, or t
  misc_feature (1936)..(1938): n is a, c, g, or t
  misc_feature (1941)..(1942): n is a, c, g, or t
  misc_feature (1945)..(1945): n is a, c, g, or t
  misc_feature (1950)..(1950): n is a, c, g, or t
  misc_feature (1958)..(1959): n is a, c, g, or t
  misc_feature (1966)..(1966): n is a, c, g, or t
  misc_feature (1970)..(1970): n is a, c, g, or t
  misc_feature (1973)..(1974): n is a, c, g, or t
caaatnngggggggnagatatttntttnngggagggggtnttnnctctcncctctncacnntntccggngatcncnatattnntggggagcacanatnataaaancnctctcacancacagacgctctcgcncacanagncgctattcgcgnngatcnnagnagcnnnatttgcgnnggnctgactcgagtntcanntgnnatncgnctnnnttggnctggtgaannccccctnccggnttgcanncanccgaagngnanccctngaaagnncngatttgctgnnncnngntgcannccacnccacntnatnntngatgatggnantgatntccntatnaccngnangcannancttctgagacatacagngnnttgnaantgagtacnccntancaatancatactccnacgcgnnaaagnnataatgctcgnnntnctntactngcgacgaatgtnnatcgannnttgaancngnttngcgngtcctcnanncntnctngaagngtttgnnanatggaggcnnannngtntnngtcgcnnnncncaacnttgnangnncnanangatgngcgtaatnaagaannctnngaacagagttngnnngnanngancanattngatcncangannnnacnctnttnnanaanaagnagncgnnnccntatnnggctngngatggaantgaantnannngnnnnnggcnnacacgnngaaccnaaggntnacantagnaanngngnntcacancnaatnntgannnnncncnnagncancnaaggganngtngtnnntannaatgggcantcncaanngggaaaagaanccagnatnctgcnntaaangancggtacnatgnccaatacagcangnannagnagnaanaggcacnntatnnnttnactgnncntaatagntntgattanancaanantattnctacnnngaantntnnnataacannganaantggnannngcaaacaaaannagccagngntnngcngnnngggtncntaaccannntgattanaanataantannganttcnagttanntagacngnantnagancnancncncnnanngnaaagtntnaanatntatngnannnnantcangactanaantctcnnnccnatatcngtncnaccnnaggggntnaanannganantcnttnncanangntnanttancnncccagcnnaaaangtcgcntcacnnnntnganantannnnanagntggcagtcntnaannncgcnaaatncntccnaagntaaattnncnntntagnncnnananannanttnnnnanngtcnnnggcngggntcgcanacatctnttacnncnanctctacnatnnntnnngnannctcgcacnntaccntntcntatagcnattttcnncanatcngcnnaangacaaanctnccnacanacngtnacnntaanaaactatannnagnntannactananagnnnngctcattntcgactangnnantncnnntaaagtnaaanantanagttngntnattctncntccccanctagnaacngccnacntnnncgtanccacttcanntcnnnncgncnntgagnnngnnanatngntctnataantanntagtnnncnnnanangnctnangtgccgctatntatcnnntanctccngnancnttnnttnngncncatanngnaatatnnnnnntngannaccncgnnttgnttnntctnanncatcaccaanccntanngtnancgttncgnanacataatcngaganncgttatcnctcnannnnantnnnncncncnacgacntgnaactttngccntagncannnnctncnntntntgacanannntntcngtntgagntgnntantactgatgtagcnnncaangtnatanccctcatancagaagtgnnnagnntgntatancgagatanntgactantctnttnntc

SEQ ID NO: 802 - DNA, 1406 bp, Homo Sapiens
  misc_feature (1)..(1): n is a, c, g, or t
  misc_feature (789)..(789): n is a, c, g, or t
  misc_feature (855)..(855): n is a, c, g, or t
  misc_feature (875)..(875): n is a, c, g, or t
  misc_feature (910)..(910): n is a, c, g, or t
  misc_feature (916)..(916): n is a, c, g, or t
  misc_feature (922)..(922): n is a, c, g, or t
  misc_feature (929)..(929): n is a, c, g, or t
  misc_feature (931)..(931): n is a, c, g, or t
  misc_feature (939)..(939): n is a, c, g, or t
  misc_feature (946)..(946): n is a, c, g, or t
  misc_feature (954)..(954): n is a, c, g, or t
  misc_feature (991)..(991): n is a, c, g, or t
  misc_feature (996)..(996): n is a, c, g, or t
  misc_feature (999)..(999): n is a, c, g, or t
  misc_feature (1003)..(1003): n is a, c, g, or t
  misc_feature (1006)..(1006): n is a, c, g, or t
  misc_feature (1012)..(1012): n is a, c, g, or t
  misc_feature (1016)..(1016): n is a, c, g, or t
  misc_feature (1024)..(1025): n is a, c, g, or t
  misc_feature (1032)..(1032): n is a, c, g, or t
  misc_feature (1035)..(1035): n is a, c, g, or t
  misc_feature (1050)..(1050): n is a, c, g, or t
  misc_feature (1059)..(1059): n is a, c, g, or t
  misc_feature (1064)..(1064): n is a, c, g, or t
  misc_feature (1068)..(1069): n is a, c, g, or t
  misc_feature (1072)..(1072): n is a, c, g, or t
  misc_feature (1076)..(1076): n is a, c, g, or t
  misc_feature (1080)..(1080): n is a, c, g, or t
  misc_feature (1085)..(1085): n is a, c, g, or t
  misc_feature (1092)..(1092): n is a, c, g, or t
  misc_feature (1102)..(1102): n is a, c, g, or t
  misc_feature (1106)..(1106): n is a, c, g, or t
  misc_feature (1111)..(1113): n is a, c, g, or t
  misc_feature (1115)..(1115): n is a, c, g, or t
  misc_feature (1119)..(1120): n is a, c, g, or t
  misc_feature (1126)..(1126): n is a, c, g, or t
  misc_feature (1128)..(1128): n is a, c, g, or t
  misc_feature (1134)..(1134): n is a, c, g, or t
  misc_feature (1139)..(1139): n is a, c, g, or t
  misc_feature (1141)..(1142): n is a, c, g, or t
  misc_feature (1161)..(1161): n is a, c, g, or t
  misc_feature (1168)..(1169): n is a, c, g, or t
  misc_feature (1171)..(1172): n is a, c, g, or t
  misc_feature (1176)..(1176): n is a, c, g, or t
  misc_feature (1182)..(1182): n is a, c, g, or t
  misc_feature (1185)..(1185): n is a, c, g, or t
  misc_feature (1192)..(1192): n is a, c, g, or t
  misc_feature (1195)..(1195): n is a, c, g, or t
  misc_feature (1197)..(1200): n is a, c, g, or t
  misc_feature (1203)..(1203): n is a, c, g, or t
  misc_feature (1206)..(1206): n is a, c, g, or t
  misc_feature (1214)..(1215): n is a, c, g, or t
  misc_feature (1218)..(1224): n is a, c, g, or t
  misc_feature (1227)..(1229): n is a, c, g, or t
  misc_feature (1232)..(1232): n is a, c, g, or t
  misc_feature (1235)..(1236): n is a, c, g, or t
  misc_feature (1239)..(1240): n is a, c, g, or t
  misc_feature (1242)..(1242): n is a, c, g, or t
  misc_feature (1244)..(1244): n is a, c, g, or t
  misc_feature (1246)..(1253): n is a, c, g, or t
  misc_feature (1255)..(1256): n is a, c, g, or t
  misc_feature (1261)..(1263): n is a, c, g, or t
  misc_feature (1269)..(1275): n is a, c, g, or t
  misc_feature (1278)..(1279): n is a, c, g, or t
  misc_feature (1281)..(1282): n is a, c, g, or t
  misc_feature (1286)..(1290): n is a, c, g, or t
  misc_feature (1293)..(1298): n is a, c, g, or t
  misc_feature (1300)..(1300): n is a, c, g, or t
  misc_feature (1303)..(1308): n is a, c, g, or t
  misc_feature (1311)..(1312): n is a, c, g, or t
  misc_feature (1319)..(1320): n is a, c, g, or t
  misc_feature (1325)..(1325): n is a, c, g, or t
  misc_feature (1329)..(1329): n is a, c, g, or t
  misc_feature (1334)..(1334): n is a, c, g, or t
  misc_feature (1336)..(1337): n is a, c, g, or t
  misc_feature (1339)..(1343): n is a, c, g, or t
  misc_feature (1345)..(1346): n is a, c, g, or t
  misc_feature (1350)..(1350): n is a, c, g, or t
  misc_feature (1353)..(1364): n is a, c, g, or t
  misc_feature (1366)..(1368): n is a, c, g, or t
  misc_feature (1375)..(1376): n is a, c, g, or t
  misc_feature (1379)..(1380): n is a, c, g, or t
  misc_feature (1386)..(1390): n is a, c, g, or t
  misc_feature (1392)..(1397): n is a, c, g, or t
  misc_feature (1399)..(1400): n is a, c, g, or t
  misc_feature (1406)..(1406): n is a, c, g, or t
naatagagaaaattactatgagaggatcgcatcaccatcaccatcacggatcctatttaggtgacactatagaatcgtcgacccacgcgtccgagcaagtgttcgcgtcccccagtaaacaccccatggacagcaagggggaggagtccaagatcagctaccccaacatcttcttcatgattgacagcttcgaggaggtgttcagcgacatgaccgtaggggaaggagagatggtctgtgtggagctggtggctagtgacaaaaccaacacgttccagggggtcatctttcagggctccatccgctacgaggcgctcaagaaggtgtatgacaaccgggtgagcgtggccgcccgcatggcacagaagatgtcgtttggcttctacaagtacagcaacatggagtttgtgcgcatgaagggcccccagggcaagggccacgccgagatggcggtcagccgagtgtctacaggtgacacatccccctgtgggactgaagaggactccagcccagcttcgcccatgcacgagcgggtgacctccttcagcacaccccccaccccagaacggaacaaccggcctgccttcttctccccatccctcaagaggaaggtgccccggaaccggatcgctgagatgaagaagtcgcactcggccaacgacagcgaggagttcttccgggaggacgacggtggagccgatctgcacaatgcaaccaacctgcggtctcggtccctgtcgggcacaggacggtccctggtcgggtcctggctgaagctgaacagagcanatggaaacttccttctctatgcacacttaacctacgtcacgttgccgctgcatcggattttaacanacatcctggaagttcggcanaagcccatcctgatgaacctaaccgcgtgcggaancctgcncaaaanccccggncngggcccanccctcgnagtgctgncaaagtgcctacctgttccaccgccaccgggtctgcnatggnacnccantgntggaancccnacccaggnnaggcccnctncaattcccgggggcnggggccaantcccnaaanncancccnaaanggaantggcttnttccttcccntggnggggnnngntccnnccttgngncccccncccantnnccccccacctttttttggnaaacccnntnncccnaaaaanaanaaaaatnccnannnnccnttnaaaaaaannaannnnnnnttnnnccnaannggnncnanannnnnnnntnnttttnnncccccnnnnnnnggnnanncccnnnnnggnnnnnngnttnnnnnnccnnttttttnnaaaancggnaaatntnnannnnngnnaaanttnnnnnnnnnnnncnnntttcccnnttnntttttnnnnnannnnnnannattttn

SEQ ID NO: 803 - DNA, 1386 bp, Homo Sapiens
  misc_feature (2)..(2): n is a, c, g, or t
  misc_feature (954)..(954): n is a, c, g, or t
  misc_feature (1015)..(1015): n is a, c, g, or t
  misc_feature (1022)..(1022): n is a, c, g, or t
  misc_feature (1056)..(1056): n is a, c, g, or t
  misc_feature (1060)..(1061): n is a, c, g, or t
  misc_feature (1063)..(1063): n is a, c, g, or t
  misc_feature (1066)..(1066): n is a, c, g, or t
  misc_feature (1078)..(1078): n is a, c, g, or t
  misc_feature (1098)..(1098): n is a, c, g, or t
  misc_feature (1111)..(1111): n is a, c, g, or t
  misc_feature (1121)..(1121): n is a, c, g, or t
  misc_feature (1134)..(1134): n is a, c, g, or t
  misc_feature (1149)..(1149): n is a, c, g, or t
  misc_feature (1153)..(1153): n is a, c, g, or t
  misc_feature (1168)..(1168): n is a, c, g, or t
  misc_feature (1173)..(1173): n is a, c, g, or t
  misc_feature (1175)..(1175): n is a, c, g, or t
  misc_feature (1191)..(1191): n is a, c, g, or t
  misc_feature (1199)..(1199): n is a, c, g, or t
  misc_feature (1203)..(1203): n is a, c, g, or t
  misc_feature (1213)..(1213): n is a, c, g, or t
  misc_feature (1215)..(1215): n is a, c, g, or t
  misc_feature (1219)..(1220): n is a, c, g, or t
  misc_feature (1226)..(1226): n is a, c, g, or t
  misc_feature (1232)..(1234): n is a, c, g, or t
  misc_feature (1236)..(1236): n is a, c, g, or t
  misc_feature (1243)..(1244): n is a, c, g, or t
  misc_feature (1246)..(1246): n is a, c, g, or t
  misc_feature (1252)..(1252): n is a, c, g, or t
  misc_feature (1258)..(1258): n is a, c, g, or t
  misc_feature (1278)..(1278): n is a, c, g, or t
  misc_feature (1281)..(1281): n is a, c, g, or t
  misc_feature (1288)..(1288): n is a, c, g, or t
  misc_feature (1298)..(1298): n is a, c, g, or t
  misc_feature (1303)..(1303): n is a, c, g, or t
  misc_feature (1312)..(1312): n is a, c, g, or t
  misc_feature (1314)..(1314): n is a, c, g, or t
  misc_feature (1318)..(1318): n is a, c, g, or t
  misc_feature (1326)..(1326): n is a, c, g, or t
  misc_feature (1328)..(1328): n is a, c, g, or t
  misc_feature (1334)..(1334): n is a, c, g, or t
  misc_feature (1338)..(1338): n is a, c, g, or t
  misc_feature (1340)..(1340): n is a, c, g, or t
  misc_feature (1344)..(1344): n is a, c, g, or t
  misc_feature (1346)..(1349): n is a, c, g, or t
  misc_feature (1353)..(1353): n is a, c, g, or t
  misc_feature (1360)..(1360): n is a, c, g, or t
  misc_feature (1366)..(1366): n is a, c, g, or t
  misc_feature (1372)..(1373): n is a, c, g, or t
  misc_feature (1377)..(1377): n is a, c, g, or t
  misc_feature (1379)..(1382): n is a, c, g, or t
antagagaaattaactatgagaggatcgcatcaccatcaccatcacggatcctatttaggtgacactatagaatcgtcgacccacgcgtccgacttcttcctgtctgacaggcaccgctgtgagatgcagagccccagctcctgtctggtctgtgagatgtcctcactgtttcaggagttttactctggacaccggtcccctcacatcccgtataagttgctgcacctggtgtggacccacgcgaggcacctagcaggctacgagcagcaggacgcccacgagttcctcatcgcggccctggacgtgctccaccgacactgcaaaggtgatgacaatgggaagaaggccaacaaccccaaccactgcaactgcatcatagaccagatcttcacaggcgggttgcagtcagacgtcacctgccaagtctgccatggagtctccaccaccatcgaccccttctgggacatcagcttggatctccccggctcttccaccccattctggcccctgagcccagggagcgagggcaacgtggtaaacggggaaagccacgtgtcgggaaccaccacgctcacggactgcctgcgacgattcaccagaccagagcacttgggcagcagcgccaagatcaagtgcagcggttgccatagctaccaggagtccacaaagcagctcactatgaagaaactgcccatcgtagcctgttttcatctcaaacgatttgaacactcagccaagctgcggcggaagatcaccacgtatgtgtccttccccctggagctggacatgacccctttcatggcctccagcaaagagagcaggatgaatggacagtaccagcagcccacggacagtctcaacaatgacaacaagtattccctgtttgctgttgttaaccatcaagggaccttggagagtggccactacaccagcttttatccggcagcacaaanaccagtggttcaagtgtgacgatgccatcatcacaaggccagcatcaaggacgtcctgganagcgaanggtacttgctgttctatcacaaacagtttctggnaaannantanccttatctgcanctggtcaaaaaaaaaaaggnatgcattggcaancctcacaaantgatctccctggnccccccctccccaancctncaccgcctcccgggntgggnanccacctcccatgaaantgggcccnctgncctggaaccntngggnngggagnaaccannnangggaagnncngggaantctttnaaaaaaaaaaaaaagggggnccnggggggnaaaaaaaaanccccncaaaaattntntttnaaaggggngnaagggncccnanaaanannnngggnccccccnggggancccccnntaanannnnaaaa

SEQ ID NO: 804 - DNA, 1318 bp, Homo Sapiens
  misc_feature (924)..(924): n is a, c, g, or t
  misc_feature (926)..(926): n is a, c, g, or t
  misc_feature (954)..(954): n is a, c, g, or t
  misc_feature (958)..(958): n is a, c, g, or t
  misc_feature (976)..(976): n is a, c, g, or t
  misc_feature (978)..(978): n is a, c, g, or t
  misc_feature (980)..(980): n is a, c, g, or t
  misc_feature (986)..(986): n is a, c, g, or t
  misc_feature (989)..(993): n is a, c, g, or t
  misc_feature (997)..(997): n is a, c, g, or t
  misc_feature (1000)..(1000): n is a, c, g, or t
  misc_feature (1002)..(1002): n is a, c, g, or t
  misc_feature (1004)..(1004): n is a, c, g, or t
  misc_feature (1007)..(1007): n is a, c, g, or t
  misc_feature (1014)..(1014): n is a, c, g, or t
  misc_feature (1019)..(1019): n is a, c, g, or t
  misc_feature (1022)..(1022): n is a, c, g, or t
  misc_feature (1031)..(1031): n is a, c, g, or t
  misc_feature (1041)..(1042): n is a, c, g, or t
  misc_feature (1047)..(1047): n is a, c, g, or t
  misc_feature (1051)..(1051): n is a, c, g, or t
  misc_feature (1079)..(1079): n is a, c, g, or t
  misc_feature (1087)..(1088): n is a, c, g, or t
  misc_feature (1092)..(1092): n is a, c, g, or t
  misc_feature (1101)..(1101): n is a, c, g, or t
  misc_feature (1104)..(1104): n is a, c, g, or t
  misc_feature (1106)..(1107): n is a, c, g, or t
  misc_feature (1109)..(1109): n is a, c, g, or t
  misc_feature (1119)..(1119): n is a, c, g, or t
  misc_feature (1127)..(1127): n is a, c, g, or t
  misc_feature (1131)..(1132): n is a, c, g, or t
  misc_feature (1150)..(1150): n is a, c, g, or t
  misc_feature (1160)..(1161): n is a, c, g, or t
  misc_feature (1164)..(1164): n is a, c, g, or t
  misc_feature (1169)..(1170): n is a, c, g, or t
  misc_feature (1177)..(1177): n is a, c, g, or t
  misc_feature (1184)..(1184): n is a, c, g, or t
  misc_feature (1188)..(1188): n is a, c, g, or t
  misc_feature (1202)..(1202): n is a, c, g, or t
  misc_feature (1209)..(1209): n is a, c, g, or t
  misc_feature (1212)..(1214): n is a, c, g, or t
  misc_feature (1219)..(1219): n is a, c, g, or t
  misc_feature (1233)..(1234): n is a, c, g, or t
  misc_feature (1246)..(1246): n is a, c, g, or t
  misc_feature (1248)..(1248): n is a, c, g, or t
  misc_feature (1250)..(1250): n is a, c, g, or t
  misc_feature (1256)..(1256): n is a, c, g, or t
  misc_feature (1258)..(1259): n is a, c, g, or t
  misc_feature (1262)..(1262): n is a, c, g, or t
  misc_feature (1270)..(1270): n is a, c, g, or t
  misc_feature (1274)..(1274): n is a, c, g, or t
  misc_feature (1278)..(1278): n is a, c, g, or t
  misc_feature (1280)..(1280): n is a, c, g, or t
  misc_feature (1283)..(1283): n is a, c, g, or t
  misc_feature (1288)..(1290): n is a, c, g, or t
  misc_feature (1294)..(1294): n is a, c, g, or t
  misc_feature (1298)..(1299): n is a, c, g, or t
  misc_feature (1315)..(1315): n is a, c, g, or t
gattagagagaattactatgagaggatcgcatcaccatcaccatcacggatcctatttaggtgacactatagaatcgtcgacccacgcgtccgagtaccttcgcactccggatatgaggaagaaaaagcaagaacttgatgaacatgagaaaaatctcaaactaatagaggaaaaactaggtatgactcccatacgtaagtgtaatgactcattgcgtcattcaccaaaggttgagacgacagattgtccagttcctcctaaaagaatgagacgagaagctacaagacaaaataggattataaccaaaacagatgtatgagaggtgacagagagaagaggccattggtctcagtaagaatgccctgctttctgcatctctgtttcagaagaccaagagggtgacttaccagactgagtatttctggggacaatacaagtacctgggcatgaatttccatttcgattcagatgggactggaaacaaccattcaattttatgaatcttactggacattatggatttactggaattattccagacattatgccctttggttgtcactaccttgcaaatgtgtaagaggaaaatgtgctaatgtggcagtgactgtaaaactggcacatggcatttattaatcctgaagaaaagtacatgtactatttttcagtataaatataatgaacatgtcagaactatttcttgaaaacctttttattacttttgcgtgaatttatttaacaaagatgttttgtcttttgtgtaagggaggttctagaggctagatgtttaattgtaaatatgtgaggaaaactcaatgcagaattcaggataaaattttaaaaagcacaggtatttgggaattgaaatgttaagatacccagaaccaacattaaatcaatgagtgaacttgtgacagtggtancnatttccaaattccaaaagacttatcccngggngggggggggggggggatntntntatatntannnnnaaanatntntnttntaaaatnttccnccncccccaagnttttaaaacnnatggntggnttgactttataaaaaccaaaaaaaaggnagcccccnncctnaattttacnttnanntnatttgggaanttttttanaccnntttttaagggggttaaanaaaaaaatannttnccccnntaagggnactttcngggnaaaaagttgctgcnaaaaccnttnnnaaggnaaattacccaaggnnggcccaaaaaangncnttgggnanntcnaaaaattngttngggnanttnttttnnnggancacnnttgggaaaaaatttgnccc

SEQ ID NO: 805 - DNA, 1196 bp, Homo Sapiens
  misc_feature (1)..(1): n is a, c, g, or t
  misc_feature (15)..(15): n is a, c, g, or t
  misc_feature (17)..(17): n is a, c, g, or t
  misc_feature (878)..(878): n is a, c, g, or t
  misc_feature (885)..(885): n is a, c, g, or t
  misc_feature (908)..(908): n is a, c, g, or t
  misc_feature (940)..(940): n is a, c, g, or t
  misc_feature (965)..(965): n is a, c, g, or t
  misc_feature (967)..(967): n is a, c, g, or t
  misc_feature (1007)..(1007): n is a, c, g, or t
  misc_feature (1020)..(1020): n is a, c, g, or t
  misc_feature (1038)..(1038): n is a, c, g, or t
  misc_feature (1045)..(1046): n is a, c, g, or t
  misc_feature (1054)..(1054): n is a, c, g, or t
  misc_feature (1066)..(1066): n is a, c, g, or t
  misc_feature (1074)..(1074): n is a, c, g, or t
  misc_feature (1080)..(1080): n is a, c, g, or t
  misc_feature (1086)..(1086): n is a, c, g, or t
  misc_feature (1089)..(1089): n is a, c, g, or t
  misc_feature (1101)..(1101): n is a, c, g, or t
  misc_feature (1104)..(1104): n is a, c, g, or t
  misc_feature (1108)..(1108): n is a, c, g, or t
  misc_feature (1115)..(1115): n is a, c, g, or t
  misc_feature (1118)..(1118): n is a, c, g, or t
  misc_feature (1128)..(1128): n is a, c, g, or t
  misc_feature (1135)..(1135): n is a, c, g, or t
  misc_feature (1140)..(1140): n is a, c, g, or t
  misc_feature (1156)..(1157): n is a, c, g, or t
  misc_feature (1163)..(1165): n is a, c, g, or t
  misc_feature (1180)..(1180): n is a, c, g, or t
  misc_feature (1185)..(1185): n is a, c, g, or t
  misc_feature (1188)..(1188): n is a, c, g, or t
naatagagaaattancnatgagaggatcgcatcaccatcaccatcacggatcctatttaggtgacactatagaatcgtcgacccacgcgtccgagcgcccgagccgcggccctcgagacgggaccgagagcatcatgggcagcactgtcccgcgctccgcctccgtgctgcttctgctgctgctcctgcgccgggccgagcagccctgcggggccgagctcaccttcgagctgccggacaacgccaagcagtgcttccacgaggaggtggagcagggcgtgaagttctccctggattaccaggtcatcactggaggccactacgatgttgactgctatgtagaggacccccaggggaacaccatctacagagaaacgaagaagcagtacgacagcttcacgtaccgggctgaagtcaagggcgtttatcatttttgcttcagtaatgagttttccaccttctctcacaagaccgtctactttgactttcaagtgggcgatgagcctcccattctcccagacatggggaacagggtcacagctctcacccagatggagtccgcctgcgtgaccatccatgaggctctgaaaacggtgattgactcccagacgcattaccggctgcgggaggcccaggaccgggcccgagcggaagaccttaatagccgagtctcttactggtctgttggcgagacgattgccctgttcgtggtcagcttcagtcaggtgctactgttgaaaagcttcttcacagaaaaacgacccatcagcagggcagtccactcctagccccggcatcctgctctagggcccctcatgccccaggctggagcagctctcctaggtcacagcctgctggggctgggtcgcgtaacccanggtggangcagaacgatgctgctgtggtanccctttgcctttcatgcccatgcttgattctngcacctcagcagctgaaggtctcananaccagtaatcaaaaggcatccgactgcattaagtgggcancgctgaaaaaaantttacaactaggccaggnataaccnntgtgggangggggaaagggnaagggttnaatggncctggnttnttggcaggaaantcnaatngcccagnccntttggggaanttaaggncccgncccttttttttgaagnngggggnnnttttttttggggggnccatnccnaaaggaaa

SEQ ID NO: 806 - DNA, 1532 bp, Homo Sapiens
  misc_feature (249)..(249): n is a, c, g, or t
  misc_feature (289)..(289): n is a, c, g, or t
  misc_feature (291)..(291): n is a, c, g, or t
  misc_feature (304)..(304): n is a, c, g, or t
  misc_feature (312)..(312): n is a, c, g, or t
  misc_feature (316)..(316): n is a, c, g, or t
  misc_feature (321)..(321): n is a, c, g, or t
  misc_feature (324)..(324): n is a, c, g, or t
  misc_feature (326)..(328): n is a, c, g, or t
  misc_feature (335)..(335): n is a, c, g, or t
  misc_feature (348)..(348): n is a, c, g, or t
  misc_feature (353)..(353): n is a, c, g, or t
  misc_feature (364)..(364): n is a, c, g, or t
  misc_feature (383)..(383): n is a, c, g, or t
  misc_feature (389)..(389): n is a, c, g, or t
  misc_feature (391)..(391): n is a, c, g, or t
  misc_feature (411)..(411): n is a, c, g, or t
  misc_feature (413)..(413): n is a, c, g, or t
  misc_feature (419)..(419): n is a, c, g, or t
  misc_feature (422)..(424): n is a, c, g, or t
  misc_feature (426)..(426): n is a, c, g, or t
  misc_feature (429)..(429): n is a, c, g, or t
  misc_feature (435)..(437): n is a, c, g, or t
  misc_feature (442)..(442): n is a, c, g, or t
  misc_feature (448)..(448): n is a, c, g, or t
  misc_feature (451)..(451): n is a, c, g, or t
  misc_feature (454)..(455): n is a, c, g, or t
  misc_feature (462)..(463): n is a, c, g, or t
  misc_feature (478)..(478): n is a, c, g, or t
  misc_feature (485)..(485): n is a, c, g, or t
  misc_feature (490)..(490): n is a, c, g, or t
  misc_feature (494)..(494): n is a, c, g, or t
  misc_feature (497)..(499): n is a, c, g, or t
  misc_feature (501)..(501): n is a, c, g, or t
  misc_feature (503)..(504): n is a, c, g, or t
  misc_feature (509)..(509): n is a, c, g, or t
  misc_feature (514)..(514): n is a, c, g, or t
  misc_feature (518)..(518): n is a, c, g, or t
  misc_feature (523)..(523): n is a, c, g, or t
  misc_feature (525)..(526): n is a, c, g, or t
  misc_feature (530)..(532): n is a, c, g, or t
  misc_feature (534)..(536): n is a, c, g, or t
  misc_feature (542)..(543): n is a, c, g, or t
  misc_feature (555)..(555): n is a, c, g, or t
  misc_feature (557)..(557): n is a, c, g, or t
  misc_feature (561)..(561): n is a, c, g, or t
  misc_feature (564)..(564): n is a, c, g, or t
  misc_feature (569)..(569): n is a, c, g, or t
  misc_feature (571)..(574): n is a, c, g, or t
  misc_feature (577)..(577): n is a, c, g, or t
  misc_feature (586)..(586): n is a, c, g, or t
  misc_feature (588)..(588): n is a, c, g, or t
  misc_feature (590)..(591): n is a, c, g, or t
  misc_feature (595)..(595): n is a, c, g, or t
  misc_feature (597)..(598): n is a, c, g, or t
  misc_feature (601)..(602): n is a, c, g, or t
  misc_feature (613)..(613): n is a, c, g, or t
  misc_feature (616)..(616): n is a, c, g, or t
  misc_feature (620)..(620): n is a, c, g, or t
  misc_feature (623)..(623): n is a, c, g, or t
  misc_feature (627)..(628): n is a, c, g, or t
  misc_feature (630)..(631): n is a, c, g, or t
  misc_feature (636)..(636): n is a, c, g, or t
  misc_feature (640)..(642): n is a, c, g, or t
  misc_feature (647)..(648): n is a, c, g, or t
  misc_feature (654)..(655): n is a, c, g, or t
  misc_feature (657)..(658): n is a, c, g, or t
  misc_feature (661)..(661): n is a, c, g, or t
  misc_feature (664)..(664): n is a, c, g, or t
  misc_feature (666)..(666): n is a, c, g, or t
  misc_feature (670)..(670): n is a, c, g, or t
  misc_feature (673)..(673): n is a, c, g, or t
  misc_feature (675)..(678): n is a, c, g, or t
  misc_feature (682)..(682): n is a, c, g, or t
  misc_feature (688)..(688): n is a, c, g, or t
  misc_feature (693)..(693): n is a, c, g, or t
  misc_feature (696)..(697): n is a, c, g, or t
  misc_feature (704)..(704): n is a, c, g, or t
  misc_feature (706)..(706): n is a, c, g, or t
  misc_feature (724)..(724): n is a, c, g, or t
  misc_feature (726)..(727): n is a, c, g, or t
  misc_feature (733)..(736): n is a, c, g, or t
  misc_feature (745)..(745): n is a, c, g, or t
  misc_feature (749)..(750): n is a, c, g, or t
  misc_feature (760)..(760): n is a, c, g, or t
  misc_feature (764)..(764): n is a, c, g, or t
  misc_feature (767)..(767): n is a, c, g, or t
  misc_feature (772)..(772): n is a, c, g, or t
  misc_feature (776)..(776): n is a, c, g, or t
  misc_feature (778)..(778): n is a, c, g, or t
  misc_feature (782)..(782): n is a, c, g, or t
  misc_feature (787)..(788): n is a, c, g, or t
  misc_feature (791)..(792): n is a, c, g, or t
  misc_feature (800)..(800): n is a, c, g, or t
  misc_feature (803)..(803): n is a, c, g, or t
  misc_feature (812)..(812): n is a, c, g, or t
  misc_feature (820)..(821): n is a, c, g, or t
  misc_feature (825)..(825): n is a, c, g, or t
  misc_feature (831)..(831): n is a, c, g, or t
  misc_feature (836)..(836): n is a, c, g, or t
  misc_feature (839)..(841): n is a, c, g, or t
  misc_feature (843)..(844): n is a, c, g, or t
  misc_feature (852)..(853): n is a, c, g, or t
  misc_feature (856)..(859): n is a, c, g, or t
  misc_feature (867)..(867): n is a, c, g, or t
  misc_feature (873)..(873): n is a, c, g, or t
  misc_feature (876)..(876): n is a, c, g, or t
  misc_feature (878)..(878): n is a, c, g, or t
  misc_feature (884)..(884): n is a, c, g, or t
  misc_feature (894)..(894): n is a, c, g, or t
  misc_feature (902)..(902): n is a, c, g, or t
  misc_feature (904)..(904): n is a, c, g, or t
  misc_feature (907)..(907): n is a, c, g, or t
  misc_feature (909)..(909): n is a, c, g, or t
  misc_feature (918)..(919): n is a, c, g, or t
  misc_feature (921)..(921): n is a, c, g, or t
  misc_feature (929)..(929): n is a, c, g, or t
  misc_feature (931)..(932): n is a, c, g, or t
  misc_feature (934)..(934): n is a, c, g, or t
  misc_feature (939)..(940): n is a, c, g, or t
  misc_feature (961)..(961): n is a, c, g, or t
  misc_feature (963)..(965): n is a, c, g, or t
  misc_feature (970)..(970): n is a, c, g, or t
  misc_feature (981)..(981): n is a, c, g, or t
  misc_feature (983)..(983): n is a, c, g, or t
  misc_feature (990)..(990): n is a, c, g, or t
  misc_feature (993)..(997): n is a, c, g, or t
  misc_feature (1001)..(1001): n is a, c, g, or t
  misc_feature (1004)..(1005): n is a, c, g, or t
  misc_feature (1007)..(1007): n is a, c, g, or t
  misc_feature (1011)..(1012): n is a, c, g, or t
  misc_feature (1014)..(1014): n is a, c, g, or t
  misc_feature (1017)..(1017): n is a, c, g, or t
  misc_feature (1022)..(1022): n is a, c, g, or t
  misc_feature (1030)..(1031): n is a, c, g, or t
  misc_feature (1039)..(1039): n is a, c, g, or t
  misc_feature (1041)..(1041): n is a, c, g, or t
  misc_feature (1043)..(1043): n is a, c, g, or t
  misc_feature (1045)..(1045): n is a, c, g, or t
  misc_feature (1048)..(1048): n is a, c, g, or t
  misc_feature (1051)..(1051): n is a, c, g, or t
  misc_feature (1056)..(1056): n is a, c, g, or t
  misc_feature (1060)..(1060): n is a, c, g, or t
  misc_feature (1062)..(1062): n is a, c, g, or t
  misc_feature (1067)..(1069): n is a, c, g, or t
  misc_feature (1072)..(1072): n is a, c, g, or t
  misc_feature (1079)..(1079): n is a, c, g, or t
  misc_feature (1086)..(1086): n is a, c, g, or t
  misc_feature (1088)..(1088): n is a, c, g, or t
  misc_feature (1092)..(1097): n is a, c, g, or t
  misc_feature (1105)..(1105): n is a, c, g, or t
  misc_feature (1113)..(1116): n is a, c, g, or t
  misc_feature (1120)..(1120): n is a, c, g, or t
  misc_feature (1122)..(1123): n is a, c, g, or t
  misc_feature (1131)..(1132): n is a, c, g, or t
  misc_feature (1135)..(1135): n is a, c, g, or t
  misc_feature (1138)..(1138): n is a, c, g, or t
  misc_feature (1140)..(1140): n is a, c, g, or t
  misc_feature (1143)..(1143): n is a, c, g, or t
  misc_feature (1146)..(1146): n is a, c, g, or t
  misc_feature (1148)..(1148): n is a, c, g, or t
  misc_feature (1155)..(1157): n is a, c, g, or t
  misc_feature (1159)..(1159): n is a, c, g, or t
  misc_feature (1162)..(1162): n is a, c, g, or t
  misc_feature (1164)..(1164): n is a, c, g, or t
  misc_feature (1166)..(1166): n is a, c, g, or t
  misc_feature (1168)..(1168): n is a, c, g, or t
  misc_feature (1171)..(1171): n is a, c, g, or t
  misc_feature (1173)..(1173): n is a, c, g, or t
  misc_feature (1177)..(1178): n is a, c, g, or t
  misc_feature (1186)..(1186): n is a, c, g, or t
  misc_feature (1191)..(1192): n is a, c, g, or t
  misc_feature (1196)..(1196): n is a, c, g, or t
  misc_feature (1200)..(1200): n is a, c, g, or t
  misc_feature (1202)..(1202): n is a, c, g, or t
  misc_feature (1204)..(1204): n is a, c, g, or t
  misc_feature (1206)..(1206): n is a, c, g, or t
  misc_feature (1208)..(1208): n is a, c, g, or t
  misc_feature (1212)..(1212): n is a, c, g, or t
  misc_feature (1214)..(1214): n is a, c, g, or t
  misc_feature (1217)..(1217): n is a, c, g, or t
  misc_feature (1222)..(1222): n is a, c, g, or t
  misc_feature (1230)..(1233): n is a, c, g, or t
  misc_feature (1237)..(1239): n is a, c, g, or t
  misc_feature (1242)..(1242): n is a, c, g, or t
  misc_feature (1246)..(1247): n is a, c, g, or t
  misc_feature (1252)..(1252): n is a, c, g, or t
  misc_feature (1256)..(1256): n is a, c, g, or t
  misc_feature (1258)..(1258): n is a, c, g, or t
  misc_feature (1261)..(1261): n is a, c, g, or t
  misc_feature (1263)..(1263): n is a, c, g, or t
  misc_feature (1265)..(1265): n is a, c, g, or t
  misc_feature (1267)..(1267): n is a, c, g, or t
  misc_feature (1271)..(1271): n is a, c, g, or t
  misc_feature (1273)..(1273): n is a, c, g, or t
  misc_feature (1282)..(1284): n is a, c, g, or t
  misc_feature (1288)..(1288): n is a, c, g, or t
  misc_feature (1290)..(1290): n is a, c, g, or t
  misc_feature (1293)..(1293): n is a, c, g, or t
  misc_feature (1295)..(1295): n is a, c, g, or t
  misc_feature (1297)..(1298): n is a, c, g, or t
  misc_feature (1300)..(1301): n is a, c, g, or t
  misc_feature (1315)..(1317): n is a, c, g, or t
  misc_feature (1321)..(1323): n is a, c, g, or t
  misc_feature (1326)..(1326): n is a, c, g, or t
  misc_feature (1346)..(1346): n is a, c, g, or t
  misc_feature (1355)..(1356): n is a, c, g, or t
  misc_feature (1374)..(1374): n is a, c, g, or t
  misc_feature (1382)..(1383): n is a, c, g, or t
  misc_feature (1385)..(1385): n is a, c, g, or t
  misc_feature (1392)..(1392): n is a, c, g, or t
  misc_feature (1396)..(1396): n is a, c, g, or t
  misc_feature (1402)..(1402): n is a, c, g, or t
  misc_feature (1405)..(1405): n is a, c, g, or t
  misc_feature (1411)..(1411): n is a, c, g, or t
  misc_feature (1413)..(1413): n is a, c, g, or t
  misc_feature (1416)..(1416): n is a, c, g, or t
  misc_feature (1419)..(1419): n is a, c, g, or t
  misc_feature (1423)..(1424): n is a, c, g, or t
  misc_feature (1436)..(1436): n is a, c, g, or t
  misc_feature (1438)..(1439): n is a, c, g, or t
  misc_feature (1444)..(1444): n is a, c, g, or t
  misc_feature (1448)..(1449): n is a, c, g, or t
  misc_feature (1451)..(1452): n is a, c, g, or t
  misc_feature (1459)..(1459): n is a, c, g, or t
  misc_feature (1461)..(1461): n is a, c, g, or t
  misc_feature (1470)..(1470): n is a, c, g, or t
  misc_feature (1472)..(1474): n is a, c, g, or t
  misc_feature (1476)..(1476): n is a, c, g, or t
  misc_feature (1479)..(1479): n is a, c, g, or t
  misc_feature (1483)..(1483): n is a, c, g, or t
  misc_feature (1486)..(1488): n is a, c, g, or t
  misc_feature (1494)..(1494): n is a, c, g, or t
  misc_feature (1496)..(1496): n is a, c, g, or t
  misc_feature (1500)..(1501): n is a, c, g, or t
  misc_feature (1503)..(1503): n is a, c, g, or t
  misc_feature (1506)..(1506): n is a, c, g, or t
  misc_feature (1508)..(1509): n is a, c, g, or t
  misc_feature (1511)..(1512): n is a, c, g, or t
  misc_feature (1514)..(1514): n is a, c, g, or t
  misc_feature (1522)..(1522): n is a, c, g, or t
  misc_feature (1525)..(1526): n is a, c, g, or t
  misc_feature (1530)..(1530): n is a, c, g, or t
  misc_feature (1532)..(1532): n is a, c, g, or t
aataaagagaaaattactatgagaggatcgcatcaccatcaccatcacgggatcctatttaggtgacactatagaatcgtcgacccacgcgtccgcgaagcccctaaacagtccgctggatgggagggcgtaggtgcgtgcccgggactctgccgatgcgggccgcgccccctggggccaagagactccacgtcccgctcagggcaaagggtgtggggagaagcggtcacgcccctcggctggaatccntgaggaccaggtgagcagccttctcccagccgggactcangncgctgtctccccnagcctggncggncggcnggngnnncgcccanaagtggcccggcnccgcnggatgggcggntctgcccctcaaatctgcnggaggnanattcggctggttcatggtcngngcaccncannnangtngtgggnnngagcntgctgnacnacnnacacacnntctcatcccatatgnctttgancctanaggntcnnngntnnttaantcttncacntaaancnntgcnnnannngaaggnntaagtttcttcncnttcnganaaacncnnnnatntaaatattnangnngganannagnntgtctgtccangcnccanaanggannanntggangaannntccanngccgcnncnntcnatnantttngtntnnnnactncaaccncaaanctnntttcttnanttaaccaaattccatttncnnttcctnnnnctctaattnccannacaaaattcnatancanaactntcancncaanatctnnatnnaatcccantantaacaaccntcaataannatcntatccnaacanaannnanntcaataannctnnnnctacaaanttaaanaanantttaangaacataccnattcccancncananataatcacnncnccattatnannanccccnncttttaaccaaaccctcctanannncttcntaatcttaatntnaaaaatnttnnnnnaggnctnnanaaannantcncttanacattacnncgttagcncncnangancanaaaancatnanaaaannnacntatccantaatccnanaacnnnnnnattacccntatctccnnnntatncnncctttgtnnaanaancnaanacnanaaaactnnnanaancnananatnantacnncaatttanattannaaancacncncntntnttancnatntaatnttaaaaannnnctcnnntanttcnnaaatntttngnatnanancnaccncnaaatccccnnnctcntnaancncnnannttcattcttaaccnnncatnnnagnctacagtctcaaatgaattncaacaatcnnacaatcaataagatctcnaaacatanntnctacacncaanattagnttnctcaanantancanaaannattaccttacananncctanaganntnnctatctntnacatacatnannntntcnacancannnccattntnccanncnatntnntnncnctatcatnaannatcnan

SEQ ID NO: 807 - DNA, 1290 bp, Homo Sapiens
  misc_feature (3)..(3): n is a, c, g, or t
  misc_feature (133)..(133): n is a, c, g, or t
  misc_feature (136)..(136): n is a, c, g, or t
  misc_feature (139)..(139): n is a, c, g, or t
  misc_feature (180)..(180): n is a, c, g, or t
  misc_feature (215)..(215): n is a, c, g, or t
  misc_feature (221)..(221): n is a, c, g, or t
  misc_feature (875)..(875): n is a, c, g, or t
  misc_feature (893)..(893): n is a, c, g, or t
  misc_feature (916)..(916): n is a, c, g, or t
  misc_feature (919)..(919): n is a, c, g, or t
  misc_feature (935)..(935): n is a, c, g, or t
  misc_feature (946)..(946): n is a, c, g, or t
  misc_feature (957)..(957): n is a, c, g, or t
  misc_feature (961)..(961): n is a, c, g, or t
  misc_feature (977)..(977): n is a, c, g, or t
  misc_feature (988)..(988): n is a, c, g, or t
  misc_feature (995)..(995): n is a, c, g, or t
  misc_feature (1014)..(1014): n is a, c, g, or t
  misc_feature (1018)..(1018): n is a, c, g, or t
  misc_feature (1027)..(1027): n is a, c, g, or t
  misc_feature (1030)..(1030): n is a, c, g, or t
  misc_feature (1033)..(1033): n is a, c, g, or t
  misc_feature (1038)..(1038): n is a, c, g, or t
  misc_feature (1056)..(1056): n is a, c, g, or t
  misc_feature (1081)..(1081): n is a, c, g, or t
  misc_feature (1085)..(1085): n is a, c, g, or t
  misc_feature (1100)..(1101): n is a, c, g, or t
  misc_feature (1106)..(1106): n is a, c, g, or t
  misc_feature (1123)..(1124): n is a, c, g, or t
  misc_feature (1129)..(1129): n is a, c, g, or t
  misc_feature (1131)..(1131): n is a, c, g, or t
  misc_feature (1148)..(1148): n is a, c, g, or t
  misc_feature (1150)..(1150): n is a, c, g, or t
  misc_feature (1159)..(1159): n is a, c, g, or t
  misc_feature (1163)..(1163): n is a, c, g, or t
  misc_feature (1170)..(1170): n is a, c, g, or t
  misc_feature (1172)..(1172): n is a, c, g, or t
  misc_feature (1178)..(1178): n is a, c, g, or t
  misc_feature (1189)..(1189): n is a, c, g, or t
  misc_feature (1197)..(1197): n is a, c, g, or t
  misc_feature (1200)..(1200): n is a, c, g, or t
  misc_feature (1204)..(1204): n is a, c, g, or t
  misc_feature (1210)..(1210): n is a, c, g, or t
  misc_feature (1213)..(1215): n is a, c, g, or t
  misc_feature (1221)..(1221): n is a, c, g, or t
  misc_feature (1223)..(1223): n is a, c, g, or t
  misc_feature (1225)..(1225): n is a, c, g, or t
  misc_feature (1229)..(1229): n is a, c, g, or t
  misc_feature (1233)..(1233): n is a, c, g, or t
  misc_feature (1236)..(1236): n is a, c, g, or t
  misc_feature (1241)..(1241): n is a, c, g, or t
  misc_feature (1264)..(1264): n is a, c, g, or t
  misc_feature (1269)..(1269): n is a, c, g, or t
  misc_feature (1272)..(1272): n is a, c, g, or t
  misc_feature (1280)..(1280): n is a, c, g, or t
  misc_feature (1288)..(1288): n is a, c, g, or t
atngagaaattactatgagaggatcgcatcaccatcaccatcacggatcctatttaggtgacactatagaatcgtcgacccacgcgtccgcggacgcgtgggtcctgcatccatacattgggtgtatatttantcngancgggagaagttatattgttaaaagtgtaaaagaataattgngttatgaagctgccttattttttttctttttgaangttacnattttcatgtgaatatttatgtagcataaaatttgcctcctggtaaccctgtaatggatggggcccagaaatgaaatatttgagaaaaacaagtgaaaaggtcaagatacaaatgtgtattaaaaaaaaaaagcctattaatagggtttctgcgcggtgcagggttgtaaacctgctttatcttttaggattattcctaaatgcatcttctttataaacttgacttgctatctcagcaagataaattatattaaaaaaaataagaatcctgcagtgtttaaggaactctttttttgtaaatcacggacacctcaattagcaagaactgaggggagggctttttccattgtttaatgttttgtgatttttagctaaagagagggaacctcatctaagtaacatttgcacatgatacagcaaaaggagttcattgcaatactgtctttggatattgtttcagtactgggtgtttaaaggacaaatagctgctagaattcaggggtaaatgtaagtgttcagaaaacgtcagaacatttggggttttaaactgatttgttgctccctatccagcctagacaccagtaactcttgtgttcaccaggaccccagacccttggcaagggataggctcgttggtgacattgtgaatttcanaatttgttttaatccacnttttttttgctatttatttaaanggncgatcaaccttccccncaaactgaggnaatgaattccncgancctggtctgaaaatgnggaacgtaaanacaaacncgtgcctcgtcctttaaangganttcccccanccnccntggtnaaccagccccggtttgcnttcccccctttttttggggccaaanaaantccacctgaccaaanngaccntgaaaaaggggcctgtnnggggncnccgggttttttaaccgncnggtcctccncccncccaacnangttgcnggggggaatanccccaatnggntttnaattgnggnnnaaaacngnancccncccncangaaanggttttaaaaaaaaaaaaacccnctttnttntaaaaatntcctgggnaa

SEQ ID NO: 808 - DNA, 1388 bp, Homo Sapiens
  misc_feature (671)..(671): n is a, c, g, or t
  misc_feature (805)..(806): n is a, c, g, or t
  misc_feature (822)..(823): n is a, c, g, or t
  misc_feature (827)..(828): n is a, c, g, or t
  misc_feature (835)..(835): n is a, c, g, or t
  misc_feature (853)..(853): n is a, c, g, or t
  misc_feature (855)..(855): n is a, c, g, or t
  misc_feature (879)..(880): n is a, c, g, or t
  misc_feature (889)..(889): n is a, c, g, or t
  misc_feature (893)..(893): n is a, c, g, or t
  misc_feature (918)..(919): n is a, c, g, or t
  misc_feature (921)..(921): n is a, c, g, or t
  misc_feature (923)..(923): n is a, c, g, or t
  misc_feature (925)..(925): n is a, c, g, or t
  misc_feature (937)..(937): n is a, c, g, or t
  misc_feature (943)..(943): n is a, c, g, or t
  misc_feature (952)..(953): n is a, c, g, or t
  misc_feature (962)..(962): n is a, c, g, or t
  misc_feature (965)..(965): n is a, c, g, or t
  misc_feature (970)..(970): n is a, c, g, or t
  misc_feature (973)..(973): n is a, c, g, or t
  misc_feature (976)..(976): n is a, c, g, or t
  misc_feature (986)..(986): n is a, c, g, or t
  misc_feature (988)..(990): n is a, c, g, or t
  misc_feature (998)..(998): n is a, c, g, or t
  misc_feature (1005)..(1005): n is a, c, g, or t
  misc_feature (1007)..(1007): n is a, c, g, or t
  misc_feature (1012)..(1013): n is a, c, g, or t
  misc_feature (1017)..(1017): n is a, c, g, or t
  misc_feature (1024)..(1027): n is a, c, g, or t
  misc_feature (1030)..(1030): n is a, c, g, or t
  misc_feature (1041)..(1041): n is a, c, g, or t
  misc_feature (1045)..(1045): n is a, c, g, or t
  misc_feature (1049)..(1051): n is a, c, g, or t
  misc_feature (1054)..(1054): n is a, c, g, or t
  misc_feature (1056)..(1056): n is a, c, g, or t
  misc_feature (1059)..(1059): n is a, c, g, or t
  misc_feature (1062)..(1062): n is a, c, g, or t
  misc_feature (1067)..(1067): n is a, c, g, or t
  misc_feature (1073)..(1074): n is a, c, g, or t
  misc_feature (1078)..(1078): n is a, c, g, or t
  misc_feature (1083)..(1083): n is a, c, g, or t
  misc_feature (1085)..(1085): n is a, c, g, or t
  misc_feature (1087)..(1087): n is a, c, g, or t
  misc_feature (1089)..(1091): n is a, c, g, or t
  misc_feature (1094)..(1095): n is a, c, g, or t
  misc_feature (1105)..(1105): n is a, c, g, or t
  misc_feature (1109)..(1110): n is a, c, g, or t
  misc_feature (1118)..(1121): n is a, c, g, or t
  misc_feature (1124)..(1128): n is a, c, g, or t
  misc_feature (1130)..(1131): n is a, c, g, or t
  misc_feature (1134)..(1134): n is a, c, g, or t
  misc_feature (1141)..(1143): n is a, c, g, or t
  misc_feature (1150)..(1151): n is a, c, g, or t
  misc_feature (1154)..(1154): n is a, c, g, or t
  misc_feature (1157)..(1157): n is a, c, g, or t
  misc_feature (1167)..(1167): n is a, c, g, or t
  misc_feature (1171)..(1171): n is a, c, g, or t
  misc_feature (1174)..(1174): n is a, c, g, or t
  misc_feature (1176)..(1178): n is a, c, g, or t
  misc_feature (1181)..(1184): n is a, c, g, or t
  misc_feature (1186)..(1187): n is a, c, g, or t
  misc_feature (1189)..(1190): n is a, c, g, or t
  misc_feature (1192)..(1192): n is a, c, g, or t
  misc_feature (1194)..(1195): n is a, c, g, or t
  misc_feature (1199)..(1199): n is a, c, g, or t
  misc_feature (1204)..(1204): n is a, c, g, or t
  misc_feature (1210)..(1214): n is a, c, g, or t
  misc_feature (1216)..(1218): n is a, c, g, or t
  misc_feature (1220)..(1221): n is a, c, g, or t
  misc_feature (1223)..(1227): n is a, c, g, or t
  misc_feature (1230)..(1231): n is a, c, g, or t
  misc_feature (1233)..(1233): n is a, c, g, or t
  misc_feature (1237)..(1237): n is a, c, g, or t
  misc_feature (1240)..(1240): n is a, c, g, or t
  misc_feature (1242)..(1242): n is a, c, g, or t
  misc_feature (1244)..(1245): n is a, c, g, or t
  misc_feature (1248)..(1254): n is a, c, g, or t
  misc_feature (1256)..(1256): n is a, c, g, or t
  misc_feature (1259)..(1259): n is a, c, g, or t
  misc_feature (1261)..(1264): n is a, c, g, or t
  misc_feature (1270)..(1270): n is a, c, g, or t
  misc_feature (1273)..(1273): n is a, c, g, or t
  misc_feature (1279)..(1279): n is a, c, g, or t
  misc_feature (1281)..(1281): n is a, c, g, or t
  misc_feature (1283)..(1288): n is a, c, g, or t
  misc_feature (1291)..(1291): n is a, c, g, or t
  misc_feature (1293)..(1294): n is a, c, g, or t
  misc_feature (1298)..(1298): n is a, c, g, or t
  misc_feature (1300)..(1302): n is a, c, g, or t
  misc_feature (1305)..(1306): n is a, c, g, or t
  misc_feature (1308)..(1313): n is a, c, g, or t
  misc_feature (1316)..(1318): n is a, c, g, or t
  misc_feature (1320)..(1320): n is a, c, g, or t
  misc_feature (1325)..(1326): n is a, c, g, or t
  misc_feature (1329)..(1331): n is a, c, g, or t
  misc_feature (1333)..(1333): n is a, c, g, or t
  misc_feature (1335)..(1335): n is a, c, g, or t
  misc_feature (1340)..(1340): n is a, c, g, or t
  misc_feature (1342)..(1343): n is a, c, g, or t
  misc_feature (1345)..(1347): n is a, c, g, or t
  misc_feature (1349)..(1350): n is a, c, g, or t
  misc_feature (1353)..(1360): n is a, c, g, or t
  misc_feature (1362)..(1362): n is a, c, g, or t
  misc_feature (1364)..(1368): n is a, c, g, or t
  misc_feature (1371)..(1372): n is a, c, g, or t
  misc_feature (1374)..(1375): n is a, c, g, or t
  misc_feature (1377)..(1377): n is a, c, g, or t
  misc_feature (1379)..(1379): n is a, c, g, or t
  misc_feature (1383)..(1383): n is a, c, g, or t
tagagaaattactatgagaggatcgcatcaccatcaccatcacggatcctatttaggtgacactatagaatcgtcgacccacgcgtccgcccacgcgtccgggcccactgagctgtccctggaggagctgagcatcagtgcccggcagcagcccaccccgctcaccccagcccagccagcccccgcccccgcccccgccaccaccacagggaccagggcagggggccacccggaggagccgctctcccggctcagccgcaagaggaagctcctggaggacacagagtcaggcaagacacttctgttggatgcctaccgtgtgtggcagcagggccagaagggtgtggcctatgacctgggccgtgtggagaggatcatgtcggagacctacatgctcatcaagcaggtggatgaggaggctgcgctggagcaggctgtgaagttctgccaggtccatcttggggctgctgcccagagacaggcctcgggggacacccccaccactccaaagcaccccaaagacagccgagagaacttctttcctgtgacagtggtgcccacagcccctgaccctgtgccagctgactctgtccagcggcccagtgatgctcacaccaagcctcgccctgcactagctgccgccacaactattatcacctgccctccgtcancatcagcttccaccctggaccagtccaaaggaccctggggcctccccggccacacaggcctgaagctacccccagcatggcctcttttgggcccaaagggaaaaataactggcgagagtggcaaagggcaccanntttcccgcctcaggannccannggcacantcccgcaggtgaaaaatngnccccaaaaatttccccggcaaaanncaaacttgnttgncctggcaaaaggcttgcccttgggnnanangncctttaaacccnaccttncaacccaannaagggaaanttnaagcnttnaancccaaaaaangnnngggggaangtttttnanttttnnaatntaaattnnnntcncttaaattttncccnaaannntgnanatnttnaatgntccttnntttnaattntncntnnnatnnaaattttcanctanntattattnnnntcnnnnntnnttntttattnnnccctttnncanaanttttaaaaantttnttntnnnttnnnntnntnnanannttcntcttntaaaannnnntnnnannannnnntanntntttnttntntnnttnnnnnnntnttntnnnntaaatnttntaattntnannnnnnttntnntttnannnttnnannnnnnttnnnanttttnnttnnnantnttttnanntnnnanntannnnnnnntntnnnnntanntnntntnttanttatt

SEQ ID NO: 809 - DNA, 1381 bp, Homo Sapiens
  misc_feature (935)..(935): n is a, c, g, or t
  misc_feature (963)..(963): n is a, c, g, or t
  misc_feature (987)..(988): n is a, c, g, or t
  misc_feature (999)..(999): n is a, c, g, or t
  misc_feature (1014)..(1014): n is a, c, g, or t
  misc_feature (1020)..(1020): n is a, c, g, or t
  misc_feature (1025)..(1025): n is a, c, g, or t
  misc_feature (1035)..(1035): n is a, c, g, or t
  misc_feature (1046)..(1046): n is a, c, g, or t
  misc_feature (1060)..(1060): n is a, c, g, or t
  misc_feature (1069)..(1069): n is a, c, g, or t
  misc_feature (1073)..(1073): n is a, c, g, or t
  misc_feature (1075)..(1075): n is a, c, g, or t
  misc_feature (1084)..(1084): n is a, c, g, or t
  misc_feature (1089)..(1089): n is a, c, g, or t
  misc_feature (1093)..(1093): n is a, c, g, or t
  misc_feature (1095)..(1095): n is a, c, g, or t
  misc_feature (1103)..(1103): n is a, c, g, or t
  misc_feature (1108)..(1108): n is a, c, g, or t
  misc_feature (1112)..(1112): n is a, c, g, or t
  misc_feature (1123)..(1124): n is a, c, g, or t
  misc_feature (1127)..(1127): n is a, c, g, or t
  misc_feature (1139)..(1139): n is a, c, g, or t
  misc_feature (1146)..(1146): n is a, c, g, or t
  misc_feature (1154)..(1154): n is a, c, g, or t
  misc_feature (1160)..(1160): n is a, c, g, or t
  misc_feature (1169)..(1169): n is a, c, g, or t
  misc_feature (1172)..(1174): n is a, c, g, or t
  misc_feature (1192)..(1192): n is a, c, g, or t
  misc_feature (1194)..(1194): n is a, c, g, or t
  misc_feature (1204)..(1205): n is a, c, g, or t
  misc_feature (1209)..(1210): n is a, c, g, or t
  misc_feature (1218)..(1218): n is a, c, g, or t
  misc_feature (1222)..(1222): n is a, c, g, or t
  misc_feature (1229)..(1230): n is a, c, g, or t
  misc_feature (1232)..(1232): n is a, c, g, or t
  misc_feature (1237)..(1238): n is a, c, g, or t
  misc_feature (1242)..(1242): n is a, c, g, or t
  misc_feature (1245)..(1245): n is a, c, g, or t
  misc_feature (1249)..(1250): n is a, c, g, or t
  misc_feature (1253)..(1253): n is a, c, g, or t
  misc_feature (1257)..(1257): n is a, c, g, or t
  misc_feature (1261)..(1261): n is a, c, g, or t
  misc_feature (1265)..(1265): n is a, c, g, or t
  misc_feature (1267)..(1267): n is a, c, g, or t
  misc_feature (1271)..(1271): n is a, c, g, or t
  misc_feature (1277)..(1277): n is a, c, g, or t
  misc_feature (1281)..(1281): n is a, c, g, or t
  misc_feature (1291)..(1291): n is a, c, g, or t
  misc_feature (1294)..(1294): n is a, c, g, or t
  misc_feature (1298)..(1299): n is a, c, g, or t
  misc_feature (1301)..(1301): n is a, c, g, or t
  misc_feature (1303)..(1303): n is a, c, g, or t
  misc_feature (1311)..(1311): n is a, c, g, or t
  misc_feature (1313)..(1314): n is a, c, g, or t
  misc_feature (1317)..(1317): n is a, c, g, or t
  misc_feature (1322)..(1322): n is a, c, g, or t
  misc_feature (1325)..(1325): n is a, c, g, or t
  misc_feature (1327)..(1329): n is a, c, g, or t
  misc_feature (1331)..(1331): n is a, c, g, or t
  misc_feature (1345)..(1346): n is a, c, g, or t
  misc_feature (1352)..(1352): n is a, c, g, or t
  misc_feature (1361)..(1361): n is a, c, g, or t
  misc_feature (1363)..(1365): n is a, c, g, or t
  misc_feature (1370)..(1374): n is a, c, g, or t
  misc_feature (1377)..(1381): n is a, c, g, or t
tagagagattactatgagaggatcgcatcaccatcaccatcacggatcctatttaggtgacactatagaatcgtcgacccacgcgtccgcccacgcgtccgcccacgcgtccggtaaggtttgctgcgccttgcttatttctgagtcccagaagctggcacattaccagagcaaaaaacatgccaacaaagtgaagagatacctagcaatccatggaatggagacattaaagggggaaacgaagaagctagactcagatcagaagagcagcagaagcaaagacaagaaccagtgctgccccatctgtaacatgaccttttcctcccctgtcgtggcccagtcgcactacctggggaagacccacgcaaagaacttaaagctgaagcagcagtccactaaggtggaagccttgcaccagaatagagagatgatagacccagacaagttctgcagcctctgccatgcaactttcaacgaccctgtcatggctcaacaacattatgtgggcaagaaacacagaaaacaggagaccaagctcaaactaatggcacgctatgggcggctggcggaccctgctgtcactgactttccagctggaaagggctacccctgcaaaacatgtaagatagtgctgaactccatagaacagtaccaagctcatgtcagcggcttcaaacacaagaaccagtcaccaaaaacagtggcatcatccctgggccagattccaatgcaaaggcaacccattcagaaagactcaaccaccttggaagactagaggtgattctgcccagcatcccatattgggccagccatgagccagcttcccgtgactgctcagcccttggctccctcttgctcgttgttctcaccaggaaagtacacgggcctgaggcaggattgggccacagacagcctctcattggtccgggctaatncactcctgctgctccctttggcaggggntcctgtaggtcatgacaggggagnnagggtattganagactcggggtctcncggggnggtanttgggagggnggcttttcccnttttcccacccccnctgggcctnaggngntgaggcccntgccnctgntntttccttnaaagntcanttttggggccnnttnttgcaactaaanaaaaaanatttcctngggccnaaaaatttnccnnnaaaactggaattttttgncnaacctggggnngggnngaaaaaanaaangggtgcnnanggganntggnacntaannacnttgncttncccnangggnggtttntganttaaacaaanggncttnncngntttccccntnnaantcccnggnannngnaatttggggaaatnncccccncccccccantnnnggggnnnnnccnnnnn

SEQ ID NO: 810 - DNA, 1368 bp, Homo Sapiens
  misc_feature (2)..(2): n is a, c, g, or t
  misc_feature (869)..(869): n is a, c, g, or t
  misc_feature (894)..(894): n is a, c, g, or t
  misc_feature (919)..(919): n is a, c, g, or t
  misc_feature (949)..(949): n is a, c, g, or t
  misc_feature (954)..(954): n is a, c, g, or t
  misc_feature (1020)..(1020): n is a, c, g, or t
  misc_feature (1022)..(1022): n is a, c, g, or t
  misc_feature (1024)..(1024): n is a, c, g, or t
  misc_feature (1048)..(1048): n is a, c, g, or t
  misc_feature (1052)..(1052): n is a, c, g, or t
  misc_feature (1060)..(1060): n is a, c, g, or t
  misc_feature (1071)..(1071): n is a, c, g, or t
  misc_feature (1073)..(1073): n is a, c, g, or t
  misc_feature (1083)..(1083): n is a, c, g, or t
  misc_feature (1090)..(1090): n is a, c, g, or t
  misc_feature (1092)..(1092): n is a, c, g, or t
  misc_feature (1099)..(1099): n is a, c, g, or t
  misc_feature (1103)..(1103): n is a, c, g, or t
  misc_feature (1110)..(1111): n is a, c, g, or t
  misc_feature (1122)..(1124): n is a, c, g, or t
  misc_feature (1126)..(1126): n is a, c, g, or t
  misc_feature (1137)..(1137): n is a, c, g, or t
  misc_feature (1141)..(1141): n is a, c, g, or t
  misc_feature (1150)..(1150): n is a, c, g, or t
  misc_feature (1156)..(1156): n is a, c, g, or t
  misc_feature (1163)..(1163): n is a, c, g, or t
  misc_feature (1167)..(1167): n is a, c, g, or t
  misc_feature (1177)..(1177): n is a, c, g, or t
  misc_feature (1189)..(1189): n is a, c, g, or t
  misc_feature (1193)..(1193): n is a, c, g, or t
  misc_feature (1199)..(1199): n is a, c, g, or t
  misc_feature (1202)..(1202): n is a, c, g, or t
  misc_feature (1204)..(1205): n is a, c, g, or t
  misc_feature (1215)..(1215): n is a, c, g, or t
  misc_feature (1222)..(1222): n is a, c, g, or t
  misc_feature (1238)..(1238): n is a, c, g, or t
  misc_feature (1252)..(1252): n is a, c, g, or t
  misc_feature (1255)..(1255): n is a, c, g, or t
  misc_feature (1257)..(1258): n is a, c, g, or t
  misc_feature (1261)..(1262): n is a, c, g, or t
  misc_feature (1264)..(1266): n is a, c, g, or t
  misc_feature (1269)..(1269): n is a, c, g, or t
  misc_feature (1273)..(1273): n is a, c, g, or t
  misc_feature (1275)..(1275): n is a, c, g, or t
  misc_feature (1282)..(1282): n is a, c, g, or t
  misc_feature (1290)..(1292): n is a, c, g, or t
  misc_feature (1294)..(1297): n is a, c, g, or t
  misc_feature (1299)..(1301): n is a, c, g, or t
  misc_feature (1304)..(1304): n is a, c, g, or t
  misc_feature (1308)..(1309): n is a, c, g, or t
  misc_feature (1315)..(1315): n is a, c, g, or t
  misc_feature (1319)..(1319): n is a, c, g, or t
  misc_feature (1326)..(1326): n is a, c, g, or t
  misc_feature (1332)..(1332): n is a, c, g, or t
  misc_feature (1334)..(1334): n is a, c, g, or t
  misc_feature (1336)..(1336): n is a, c, g, or t
  misc_feature (1338)..(1338): n is a, c, g, or t
  misc_feature (1340)..(1340): n is a, c, g, or t
  misc_feature (1351)..(1351): n is a, c, g, or t
  misc_feature (1365)..(1365): n is a, c, g, or t
  misc_feature (1368)..(1368): n is a, c, g, or t
cnatagagagattactatgagaggatcgcatcaccatcaccatcacggatcctatttaggtgacactatagaatcgtcgacccacgcgtccgggtgcccgacatggcgagtgtagtgctgccgagcggatcccagtgtgcggcggcagcggcggcggcggcgcctcccgggctccggctccggcttctgctgttgctcttctccgccgcggcactgatccccacaggtgatgggcagaatctgtttacgaaagacgtgacagtgatcgagggagaggttgcgaccatcagttgccaagtcaataagagtgacgactctgtgattcagctactgaatcccaacaggcagaccatttatttcagggacttcaggcctttgaaggacagcaggtttcagttgctgaatttttctagcagtgaactcaaagtatcattgacaaacgtctcaatttctgatgaaggaagatacttttgccagctctataccgatcccccacaggaaagttacaccaccatcacagtcctggtcccaccacgtaatctgatgatcgatatccagaaagacactgcggtggaaggtgaggagattgaagtcaactgcactgctatggccagcaagccagccacgactatcaggtggttcaaagggaacacagagctaaaaggcaaatcggaggtggaagagtggtcagacatgtacactgtgaccagtcagctgatgctgaaggtgcacaaggaggacgatggggtcccagtgatctgccaggtggagcaccctgcggtcactggaaacctgcagacccagcggtatctagaagtacagtataagcctcaagtgcacattcagatgacttatcctctacaaggctnaacccgggaaggggacgcgcttganttaacatgtgaaagccatcgggaancccccagcctgtgatggtaacttgggtganagtcnatgatgaaatgcctcaacaccccgtactgtctgggcccaacctgttcatcaataacctaaacaaanananaatggtacataccgctgggaaacnttcnaaacaaanggggaaaagcncnccccgaatanaagctgnangtaaacnaacnaacgggnnaaaaaaaaacnnnanttcccggcctnactnattgcccanttcccnaaaaaangaangggagacctnccaaatcccaanaggnaaaagnccnannggcaaggaanattcccnaaccggggccccgggngggggggttccccngcngnnttnncnnnttngggncntttttcnaaaaaagnnntnnnntnnnaancaannccaaancccnaaccaancctttntntngnangaaaaaacccnaaaaaaaatttttnttn

SEQ ID NO: 811 - DNA, 1200 bp, Homo Sapiens
  misc_feature (1)..(1): n is a, c, g, or t
  misc_feature (872)..(872): n is a, c, g, or t
  misc_feature (905)..(905): n is a, c, g, or t
  misc_feature (914)..(914): n is a, c, g, or t
  misc_feature (918)..(918): n is a, c, g, or t
  misc_feature (928)..(928): n is a, c, g, or t
  misc_feature (950)..(950): n is a, c, g, or t
  misc_feature (963)..(963): n is a, c, g, or t
  misc_feature (966)..(966): n is a, c, g, or t
  misc_feature (983)..(983): n is a, c, g, or t
  misc_feature (992)..(992): n is a, c, g, or t
  misc_feature (998)..(998): n is a, c, g, or t
  misc_feature (1009)..(1009): n is a, c, g, or t
  misc_feature (1022)..(1022): n is a, c, g, or t
  misc_feature (1025)..(1025): n is a, c, g, or t
  misc_feature (1027)..(1027): n is a, c, g, or t
  misc_feature (1030)..(1030): n is a, c, g, or t
  misc_feature (1036)..(1036): n is a, c, g, or t
  misc_feature (1067)..(1067): n is a, c, g, or t
  misc_feature (1069)..(1069): n is a, c, g, or t
  misc_feature (1075)..(1075): n is a, c, g, or t
  misc_feature (1093)..(1094): n is a, c, g, or t
  misc_feature (1099)..(1099): n is a, c, g, or t
  misc_feature (1102)..(1102): n is a, c, g, or t
  misc_feature (1122)..(1122): n is a, c, g, or t
  misc_feature (1125)..(1125): n is a, c, g, or t
  misc_feature (1127)..(1127): n is a, c, g, or t
  misc_feature (1134)..(1135): n is a, c, g, or t
  misc_feature (1139)..(1139): n is a, c, g, or t
  misc_feature (1149)..(1149): n is a, c, g, or t
  misc_feature (1175)..(1175): n is a, c, g, or t
  misc_feature (1178)..(1179): n is a, c, g, or t
  misc_feature (1195)..(1195): n is a, c, g, or t
  misc_feature (1199)..(1199): n is a, c, g, or t
naattagagaaattactatgagaggatcgcatcaccatcaccatcacggatcctatttaggtgacactatagaatcgtcgacccacgcgtccgaacggacattcgtaaagaagcgggttcttcggaaagccctcgagcatgttccaaactcggttcgcttgtggaaagcagccgttgagctggaagaacctgaagatgctagaatcatgctgagccgagctgtggagtgctgccccaccagcgtggagctctggcttgctctggcaaggctggagacctatgaaaatgcccgcaaggtcttgaacaaggcgcgggagaacattcctacagaccgacatatctggatcacggctgctaagctggaggaagccaatgggaacacgcagatggtggagaagatcatcgaccgagccatcacctcgctgcgggccaacggtgtggagatcaaccgtgagcagtggatccaggatgccgaggaatgtgacagggctgggagtgtggccacctgccaggccgtcatgcgtgccgtgattgggattgggattgaggaggaagatcggaagcatacctggatggaggatgctgacagttgtgtagcccacaatgccctggagtgtgcacgagccatctacgcctacgccctgcaggtgttccccagcaagaagagtgtgtggctgcgcgccgcgtacttcgagaagaaccatggcactcgggagtccctggaagcactcctgcagagggctgtggcccactgccccaaagcagaggtgctgtggctcatgggcgccaagtccaagtggctggcaggggatgtgcctgcagcaaggagcatcctggccctggccttccaggccaaccccaacagtgagganatctggctggcagccgtgaagctggagtccganaatgatgantacnaacgggcccngaagctgctggccaaggcgcgnaacaatgcccccnccncccgggtgttcatgaantctgtgaanctggantgggtgcaaanaacatcagggcanccnanatntgtgcnagaagccctgcggcactatgaagacttcccnanctgtgnatgatgaagggccaatcnngaccnaangaaatgatgaaaagcccggnaancntaaaacnngggntgaaaaatgncccctccccccctggggttttttccncgnngggagaaaaattggcncttnc

(The sequence listing continues in the following parts.)

1-18. (canceled)

19. A method for the diagnosis of pancreatic cancer diseases up to pancreatic carcinoma, comprising determining at least one marker sequence on or from a patient to be examined, wherein the at least one marker sequence comprises:
a) a cDNA selected from the group consisting of the nucleic acid sequences of SEQ ID NO: 1-1004;
b) a protein encoded by one of the nucleic acid sequences of SEQ ID NO: 1-1004; or
c) a partial sequence or fragment of the cDNA of a) or the protein of b).

20. The method of claim 19, wherein at least 2 marker sequences are determined on or from a patient to be examined.

21. The method of claim 19, wherein the determining at least one marker sequence on or from a patient to be examined is carried out by means of in-vitro diagnosis.

22. The method of claim 19, wherein the marker sequence is applied onto a solid support.

23. The method of claim 22, wherein the solid support is a filter, a membrane, a magnetic or fluorophore-labeled bead, a silica wafer, glass, metal, ceramics, plastics, a chip, a target for mass spectrometry, or a matrix.

24. A method for diagnosing pancreatic cancer diseases up to pancreatic carcinoma, comprising:
a) applying at least one marker sequence comprising:
i) a cDNA selected from the group consisting of the nucleic acid sequences of SEQ ID NO: 1-1004;
ii) a protein encoded by one of the nucleic acid sequences of SEQ ID NO: 1-1004; or
iii) a partial sequence or fragment of the cDNA of i) or the protein of ii).
b) contacting the at least one marker sequence of a) with body fluid or tissue extract of a patient; and
c) detecting an interaction of said body fluid or tissue extract with the marker sequence of a).

25. A method for the stratification, risk stratification, or therapy control of a patient with pancreatic cancer diseases up to pancreatic carcinoma, comprising determining on or from a patient to be examined at least one marker sequence comprising:
a) a cDNA selected from the group consisting of the nucleic acid sequences of SEQ ID NO: 1-1004;
b) a protein encoded by one of the nucleic acid sequences of SEQ ID NO: 1-1004; or
c) a partial sequence or fragment of the cDNA of a) or the protein of b).

26. The method of claim 25, wherein the stratification or the therapy control covers:
a) decisions for the treatment and therapy of the patient;
b) the hospitalization of the patient;
c) the use, effect and/or dosage of one or more drugs;
d) a therapeutic measure; or
e) the monitoring of a course of the disease and the course of therapy, etiology, or classification of a disease together with prognosis.

27. An arrangement of marker sequences containing at least one marker sequence comprising:
a) a cDNA selected from the group consisting of the nucleic acid sequences of SEQ ID NO: 1-1004;
b) a protein encoded by one of the nucleic acid sequences of SEQ ID NO: 1-1004; or
c) a partial sequence or fragment of the cDNA of a) or the protein of b).

28. The arrangement of claim 27, wherein the arrangement contains at least 2 marker sequences.

29. The arrangement of claim 27, wherein the marker sequences are present as clones.

30. An assay or protein biochip comprising the arrangement of claim 27, wherein the marker sequences are applied to a solid support.

31. A method for the identification and characterization of a substance for pancreatic cancer diseases up to pancreatic carcinoma containing means for detecting a binding success comprising:
a) contacting the arrangement of claim 27 with at least one substance to be tested: and
b) detecting a binding success.

32. A method for the identification and characterization of a substance for pancreatic cancer diseases up to pancreatic carcinoma comprising:
a) contacting the assay of claim 30 with at least one substance to be tested: and
b) detecting a binding success.

33. A method for screening active substances for pancreatic cancer diseases up to pancreatic carcinoma comprising utilizing the arrangement of claim 27.

34. A method for screening active substances for pancreatic cancer diseases up to pancreatic carcinoma comprising utilizing the assay of claim 30.

35. A diagnostic agent which comprises a sequence selected from the group consisting of:
a) the nucleic acid sequence of SEQ ID NO: 1-1004;
b) a protein sequence encoded by one of the nucleic acid sequences of SEQ ID NO: 1-1004, and
c) a partial sequence or fragment of the nucleic acid sequence of a) or the protein sequence of b).

36. A target for the treatment and therapy of pancreatic cancer diseases up to pancreatic carcinoma, wherein the target comprises a sequence selected from the group consisting of:
a) the nucleic acid sequence of SEQ ID NO: 1-1004;
b) a protein sequence encoded by one of the nucleic acid sequences of SEQ ID NO: 1-1004, and
c) a partial sequence or fragment of the nucleic acid sequence of a) or the protein sequence of b).

37. A method for carrying out an apheresis or blood lavage for patients with pancreatic cancer diseases up to pancreatic carcinoma, comprising contacting a body fluid of a patient with pancreatic cancer diseases up to pancreatic carcinoma with an affinity material comprising a marker sequence comprising:
a) a cDNA selected from the group consisting of the nucleic acid sequences of SEQ ID NO: 1-1004;
b) a protein encoded by one of the nucleic acid sequences of SEQ ID NO: 1-1004; or
c) a partial sequence or fragment of the cDNA of a) or the protein of b).
